United States Patent Application Publication US 2013/0332133 A1 - sequence listing, part 29

SEQ ID NO: 229762 - DNA, 343 bp, Unknown
  Bacterial polypeptide expressing nucleotide sequence isolated from the Sargasso Sea
atgaaaaatatcattaatttaatagttgagcaaaattcagataaaaaaaggattgatttatatgtttttgaaaaatttagtcaattgagtagaactagaatcaaaaatttaattttggataatagactaaaaattaatggaaaaataaatcaatcaccctcaaaaaaaatcaatgtgggagataatatttctttagaagttcctaaaccaaagaaaacatcgttaaaaccatttaattttaaattagatattgtttatgaagataatgacttaattgtaataaataaaccagcaggaatatctatgcatccaggacctggaaattatgataatacaatagtaa

SEQ ID NO: 229763 - DNA, 269 bp, Unknown
  Bacterial polypeptide expressing nucleotide sequence isolated from the Sargasso Sea
aatggcaactaaaaccaaagctattaaaatttctcaaaaacatctactaggtattcaagatttatcaataaatgacgttaatttaatcttaaaagaagctgaaaaatttattgaattaaacaaaagtaaaaataaaaaattagatttacttaagggaaaaacacaaattaaccttttttttgaaccatcaacaagaacacaaagctcatttgaactagcaggaaaaagattaggtgcagatgttatgtcaatgaatataacaaactcag

SEQ ID NO: 229764 - DNA, 220 bp, Unknown
  Bacterial polypeptide expressing nucleotide sequence isolated from the Sargasso Sea
gaaaataaatcacggtattcagcttcaaaataataaactcaagcatttcctgaacatccagtccttacctaaagctcatattttagaaatattattaagagcagaggatattcataataataacgaaatatcacaatacccagataaagtagttgctagcttattttttgaaccaagcacaagaacaaaaacaacgtttgaactaacctcaaaaaagatt

SEQ ID NO: 229765 - DNA, 478 bp, Unknown
  Bacterial polypeptide expressing nucleotide sequence isolated from the Sargasso Sea
aatgttacatattttatctgtagatgatttagataatgattttttaatatcactctgggaagaggcattgtcaaatcaaggctcttctaatgccaatttaaaagggaaaatattaactaatctattttacgagccttcaacgagaacttcatcttctttttacagtgctatgacaaaatctggagggacagttattccaataaacaatgtacagttctctagtgttgccaaaggagaatctttagaagacacaattatgactatggggacaatgagtgatggaattgtaataaggcacactgacagtggatctgcgaaaaaagcttctattgtaagcaatgttccaattattaatgctggtgatggagatggcgaacatccaacacagacaatattagacggttttacaatttactattataaaaataaaaaattatcggatttgaatataactatgattggcgatttaaaaaatgga

SEQ ID NO: 229766 - DNA, 277 bp, Unknown
  Bacterial polypeptide expressing nucleotide sequence isolated from the Sargasso Sea
aatggcaaatgtaaaaaaagctattaaaatctcacaaaaacatctcctaggaatccaagatctatcaatttctgatgtaaattttattttaacagaagcaaaacaatttattgatttaaataaaagtaaaaacaaaaaattagatgttttaagaggaaaaactcaaattaatttgttttttgaaccttcaacacgtacacaaagttcatttgaattagccggcaaaagattgggggcagatgttatgtcaatgaacttaaataattcagcaatttaa

SEQ ID NO: 229767 - DNA, 586 bp, Unknown
  Bacterial polypeptide expressing nucleotide sequence isolated from the Sargasso Sea
aatgaaaattaaattaccaaaagtcaaagctataagatcatccacaggttctaaaatactaaaagaagctgaaaaaatatcactaaagtattattcatcgctttctttaaaaacaaaaattaaaataaaaagaacaaaaaatatttttaaaaaaattcatttagttgaaacagcagatttaactaaaaaagaaattgagcatatcttatatgagtcaaaaaaatatatatcatttaataaaaaaagaattaaaaaaactaatagtcttgaaggaaggactatatttaatttgttctttgaagactctacaagaacaagaactagttttgaagtagcagctaaaagattaggagcggatcttataaacgttgttgtaaaggatagctctattaataagggagaaactttacttgatacaatgacaacaattaattcaatgagtccagatgttttaattgttagacatccagaggaaggaatcagtaaaaaaatatctgaaacagtggaagcatctgtaattaatgcaggcgatggtagtcataaacatccaacacaagcattattagacgcacttacaataaagaat

SEQ ID NO: 229768 - DNA, 715 bp, Unknown
  Bacterial polypeptide expressing nucleotide sequence isolated from the Sargasso Sea
atggctaaaaaccttttatcaataaaagatttaactaaagatgagatattagatttaattaagttttcagataactttattgatgatgagggcaattttaggaaagaaactttattcccagataaagtaattgcaaacattttttgcgaacctagtacaagaacaaagtcttcttttgctatagctgcagggaacctaggatgttctatattggactttaatattgataattcttccattcaaaaaggtgaatctatttttgagacagtagatgctttaaatttaatgggcgttgatctttgcgttttacgacatcccgaatctgtaataaatgaattagcagaatgtttaccaaagatggtttttataaatgctggtgaggggtctatatctcatccaacacaagccttgctagaccttaaaactataattgatcataaaaattcactaaatggcttaaaaattgtaatagtaggtgaccttgatcattctagagttacatcatcttttgtggaggctatttcaaattttgaagtcgattccttaatttttagtggtcatccagaaatgtgtacaaaatatcagagtccaattttaggtatttatgagccagacctcgagaaggctcttcaagatgctgatgttgttatgacacttagaatccaacatgaaagatttgagaaagatttaaatttagacttagaaagttataaaa

SEQ ID NO: 229769 - DNA, 369 bp, Unknown
  Bacterial polypeptide expressing nucleotide sequence isolated from the Sargasso Sea
attggatgaaccagaggtaaacgatggtcttatcagtgattcaaaggaggctcagttgaagaacttattgtatctaaaagatcttcacaaggatgaaataattcaattgctcgatcaatccgatcatttcctgaaatcaaatcaaccgcatgaatttgtggaacttcttaaaaaccaatcgatcgccagtcttttttttgagcccagcacaagaacaagtgcatcttttcagcttgctgcaaaacgattgggcgcagaaacaataatgattgatgagaaaacatcatccgcaaccaaaggcgagagtgtattggacacaatcaagaatcttgaagcaatgggtgtcagaggttcatcatccgcactggg

SEQ ID NO: 229770 - DNA, 733 bp, Unknown
  Bacterial polypeptide expressing nucleotide sequence isolated from the Sargasso Sea
aatggctaataatcttttatcaataaacgatctttcaaaaaaagacatactggagttgatagaattctcaaataatttcattgatgatgaaggtaactttaggaaagaaaatctttttccagacaaagtagttgcaaatgttttttgtgagcctagcacgcgaacgaagtcatccttcgcaattgctgcaaacaatttaggatgctcagttatagatttcgatattgaaaattcctcagttcaaaagggagaatctatttttgaaactgtagatgctctcaatcttatgggtgtagatttatgtgtgttacgacatcctgattctgtaataagagaattagctgaatgtatgccgaaaatggttttcataaatgcaggagaaggatcaatttcacatccaacacaagcactattagacataaagacaattatcgatcataaagaaaatttagatggcctgaatattgttatcgtaggagatcttgatcattctagagtcacttcctcttttgttgaaggtgtttctaattttgatttaggatcactaacattttgtgggcaccctgaaatgtgtaccaagtatcaaaattctaagattggtaagtatgaatctcatttagagtcagcccttgaaaatgcagatgttgtgatggctttgagaattcagtacgaaagatttgaaaaagagcttaatttagatctcgaaacatataaatcagagtatcaattgtcc

SEQ ID NO: 229771 - DNA, 355 bp, Unknown
  Bacterial polypeptide expressing nucleotide sequence isolated from the Sargasso Sea
tttggatgatttctcacttcaagaaatagagactgtcattactcttgctgaacaaatgagagaagtgttggatcgccgtattgctcgagcaccggctttgcgcggatttaccgtagtaaatctattttttgagccatccacgagaactcgtgcttcatttgaacttgctgggaaggtactaggtgcagacgtaattagtgtgagcgctgataactcgtcggtggttaaaggtgagtcactaattgatacagttaagacattaagtgctatgcgagctgacgcaatcgtgatgcgccattcgatgtcgggtgcaccgtatttggcttccgcttataccgatgcggcgataataaat

SEQ ID NO: 229772 - DNA, 326 bp, Unknown
  Bacterial polypeptide expressing nucleotide sequence isolated from the Sargasso Sea
aatgaataatttttcccaaaacgacattatttctatacgagatttatcaaaagatgatttagaacaaatctttgcaaaaactaatgaaatcatggaaatgccagcagaacaaagacgcgagatagcaagaggaaaaactctgggatatctattctttgaaccaagcaccagaactagacttagttttcaatctgctatggcgctaattggaggaacctcatttggaattgctgatgcaacttcttcatctgttcaaaaaggcgaaagtttggctgacactgttaagattatggcaggctacacagatgcaattgttttgcgtcatt

SEQ ID NO: 229773 - DNA, 558 bp, Unknown
  Bacterial polypeptide expressing nucleotide sequence isolated from the Sargasso Sea
aacaaaaatcttgaaaataaaataataacaaatttattctatgaaccatctacaagaacttcatcatctttttatagtgcgatgactagatccggtggcacggttatcccaataaataatgttaaattctcctccgttacaaagggcgaatctttagaggatactataaggacgatggcttgcatgtgcgatgcaattgttttaagacattatcaaattggagccgctaaacaagcttcgacagtaagttcagtacctattattaatgcaggagatggaaatggagagcatccaacacacactatccttgatggatttacaatatataactactttaacaaatcaataaataatcttaaaattacaatggttggcgatttgaaaaatggtagaactgttaaaagtttagtaaaacttttgaacagatttaatggaaatagtttttgttttgttagtcctaaagacctcaaatttaatgaaaaattaccaatgaattcttatgaaaccaccgatgtaaatgaagttttgaatgaaacagatgtattgtatgtgactaga

SEQ ID NO: 229774 - DNA, 220 bp, Unknown
  Bacterial polypeptide expressing nucleotide sequence isolated from the Sargasso Sea
aatggcaattaaaacaaataaagctgttaaaatttcccaaaaacatttgttaggtattcaagaattatcaattaatgatgttaattttatacttgatgaagcacacgcatttataaaagttaatcaaagcaaaaataaaaaaattgatgcattaagaggtaagacacaaattaatttattttttgagccctctacaagaactcaaagttcatttgaatta

SEQ ID NO: 229775 - DNA, 436 bp, Unknown
  Bacterial polypeptide expressing nucleotide sequence isolated from the Sargasso Sea
ttggatgaaccagaggtaaacgatggtcttatcaatgattcaaaggaggctcagttgaagaacttgttatatctaaaagatcttcacaaggatgaaattattcaattgctcgatcaatccgatcatttcctgaaatcaaatcaaccgcatgaatttgtggaacttcttaaaaaccaatcgatcgccagtcttttttttgagcccagcacaagaacaagtgcatcttttcagcttgctgcaaaacgattgggcgcagaaacaatagtgattgatgagaaaacatcatccgcaaccaaaggcgaaactgtattggacacaatcaagaatcttgaagcaatgggtgtcagaggtttcatcatccgcactggggataaaaatttatttgccccattgattgataatgtcggttcaaacacaagtctgattagtgcaggcg

SEQ ID NO: 229776 - DNA, 340 bp, Unknown
  Bacterial polypeptide expressing nucleotide sequence isolated from the Sargasso Sea
atgtgtaccaagtatcaaaatcctaaaattggcaagtatgaatctcacttagagtcagcccttgaaaatgcagatgttgtaatggctttgagaattcagtatgaaagatttgaaaaagagcttaatttagatcttgaaacatataaatcagagtatcaattgtcttctgaaaaacttgagtctgcaaaaggtgacgtaatagtaatgcatccaggaccggttaattatgttgaaataacagaagccgtatatgactcagaaaattctgtaattaggcaacaggttgcaaatggtgttgcaataagaatggctgtattatcaagatttttgggcagctaaa

SEQ ID NO: 229777 - DNA, 469 bp, Unknown
  Bacterial polypeptide expressing nucleotide sequence isolated from the Sargasso Sea
aatgagacacttaacatcactcaaggaattatcaaaagatgagatccttgaattattagatttagcagataattttattgattcagaaggctccattagaagagatccactttttccagataagaaagttgttaatattttttgtgagccaagcactcgtaccaaaatctcatttgaaatagctgcatctaatctaggatgccaaataatcgattttgatttgagctcttcctctctagaaaaaggtgagaccctcaaagataccattgataatttagcaaagatgaacattaatctttgtgtcttaaggcataaagactcagttattcatgaattgatagatcaaacagattcaatggtctttataagcggaggagaaggttctatttcccatccctctcaaggacttttagatattatgacagtaaggcataggaaggatttggataattcaaatattttgattgtt

SEQ ID NO: 229778 - DNA, 481 bp, Unknown
  Bacterial polypeptide expressing nucleotide sequence isolated from the Sargasso Sea
tatattaaaaatttaaaaataggtataattggtgatatttctcatagccgtgtagcattaagcaacatttttggattgagaacacttggtgcaaaggttaccttatgcggcccctcaactctcatgccactaaagattgaagaattgggattaagtgtcaataataatatcgatgaagtcatagaatgggcagatgcaatcaatgttctaagaattcaaagagaaagaatgaataacgcattaattccctcagtcagggaatacagaagattatttggcataactcaatcaagaatagaaaaacacaatagtgaacttgtcattatgcatccaggaccaatgaacagatgggtagaaattgatagcaatgttgctgacagtgatcaagcaattattttagatcaagtattaaatggagttgctacaagaatggctattttatatcttttgctttcaggtaaaacaaagaatgattcctaat

SEQ ID NO: 229779 - DNA, 622 bp, Unknown
  Bacterial polypeptide expressing nucleotide sequence isolated from the Sargasso Sea
aatgactaaaaatcttttatcaatcaacgatctctcaaaaaaagaaattttagatttaattgagtttgctaatcattttattgatgaagatggaaactttaggaaagaagatttatttcctgagaaaattgttgcaaatgttttctgcgaaccaagcactagaacaaaatcatcatttgctattgctgcaaataatttaggatgctctttaatagattttgacgttgaaaactcttcaatacaaaaaggagaatcaatttttgaaacaattgatgcactaaacttaatgggcgtggatttatgcgtgtttagacactctgattcagtcataagagaactagcagaatgtcttccaaaaatgagctttattaatgcaggtgagggagcaatatcccatccaacacaagctctattggatatcaaaactataattgatcataaagagacactggatgggttgaatattgttatagttggtgatcttgatcattcaagagtaacttcctcttttgttgaaggtatttcaaattttgacttaggatctctaacattttctggccatccagaaatgtgcaatagatatcaaggttcaaaatttggcaagtacgaaccacatctagaa

SEQ ID NO: 229780 - DNA, 220 bp, Unknown
  Bacterial polypeptide expressing nucleotide sequence isolated from the Sargasso Sea
aatggcctcagacacaaaaaaagctgttaaaaacacttcaaaacatctcctaggtattcaagatttaaaagtttcagaaattaaacatatattaaacgaggctcaacaatttattgacctaaatagaagtaaaaataaaaaattagatatattaaaaggcaaaacacaaataaacttattctttgaaccttctacaagaacacagagttcttttgaatta

SEQ ID NO: 229781 - DNA, 292 bp, Unknown
  Bacterial polypeptide expressing nucleotide sequence isolated from the Sargasso Sea
atgaacaaggctttacaagacgcagatgttgttatgactctaagaattcaacatgaaagatttgaaaatgaattaaaccttgatttagaaacatacaaatcctcttatcagctctcatcagaaaaacttgaattcgcaaaaggtgatgttattgtgatgcatccaggaccagtgaactatattgaaatcactgaagctgtctatgattcagaaaactccgtaattagacaacagattgcaaatgcagttgctgttaggatggcagtcttatcaagatttctgggaagctaaa

SEQ ID NO: 229782 - DNA, 139 bp, Unknown
  Bacterial polypeptide expressing nucleotide sequence isolated from the Sargasso Sea
catgcatccaagtcctatgaatagaggagttgaaatttccaacgaagttgccgatggaaagcaatctgtcattctgaagcatgtggaaaatggagtggcaatccgaatggctgtcttaactgaaatattgaaacaataa

SEQ ID NO: 229783 - DNA, 323 bp, Unknown
  Bacterial polypeptide expressing nucleotide sequence isolated from the Sargasso Sea
aatgacagaggaacttcaaatttatcctcataagcatctgctaggaatagaaggcttacttcctgattcaataaactatttactaaacctttctcaaacctttgtggaacatcttaacagtaacaatgaaaaacttgattacttaaaaaataaaacatgtataaatattttttttgaaaattcaactagaacaagaacatcatttgaattagctggaaaaaaacttggagcagatatgcttaatatttctgtaaattctagttctataaagaaaggtgaaaccttaatagatactgcaatgacacttaatgcgatgaaacctg

SEQ ID NO: 229784 - DNA, 250 bp, Unknown
  Bacterial polypeptide expressing nucleotide sequence isolated from the Sargasso Sea
aatggcagtagtaaaaaagatttcagctattaaaaactcacccaaacatctattaggtattcaacacttatcaattttagaagctaaaaaaattcttaatgaagcaaagacctttataaaattaaatagaagtaatactaaaaaactggatacattaagaggaaaaacgcaaataaatttattttttgagccttcgacgagaacacaaagttcatttgacttggctggcaaaagattaggtgctgatgtt

SEQ ID NO: 229785 - DNA, 617 bp, Unknown
  Bacterial polypeptide expressing nucleotide sequence isolated from the Sargasso Sea
tctaaaggttgatggatttattattaggcatccagaggataagatttcattaaaaatacaagacttgctgcctgaagaaatattttttattaatgctggtgatggaagctatgctcatccatctcaagcgttacttgatgtttttactatgagagaaaaatgtgaggacttaagtgaattaaaagttgcagctattggtgacatcaaacattgtagaatcattgcttcccaagtagaacttttaaataagcttgggtgcaatgatattaaattttatgggccaaaagatcttttagataataatttaacaccttgctctagtgaaattgcagatggctgtttagaagatagagatattctttatattattagagttaaacatgaaagattgaaagaaaatgaatctatagatatggatggctttagatctacatatcaagttaatgaatcttttttagaaaaaacaaaatttaaaggttcaatcatgcatccaggaccaataaatattgatttggaaatatctcaggatgttgcaatatcagaaaaatcacttattttgactcaagtagaaaatggtctatacactcgtgctgcattattgcagctcataacttaga

SEQ ID NO: 229786 - DNA, 400 bp, Unknown
  Bacterial polypeptide expressing nucleotide sequence isolated from the Sargasso Sea
ttggatgaaccagaggtaaacgatggtcttatcaatgattcaaaggaggctcagttgaagaacttgttgtatctaaaagatcttcacaaggatgaaattattcaattgctcgatcaatccgatcatttcctgaaatcaaatcaaccgcatgaatttgtggaacttcttaaaaaccaatcgatcgccagtcttttttttgagcccagcacaagaacaagtgcatcttttcagcttgctgcaaaacgattgggagcagaaacaataatgattgatgagaaaacatcatccgcaaccaaaggcgagagtgtattggacacaatcaagaatcttgaagcaatgggtgttaggggtttcatcatccgcactggggataaaaatttatttgcccccattgattgat

SEQ ID NO: 229787 - DNA, 223 bp, Unknown
  Bacterial polypeptide expressing nucleotide sequence isolated from the Sargasso Sea
gacttagatctgaatattgaagactattcaaattcataccaaatcacaactgaaagaattgaacatgcaaaaggagatgtgataataatgcatcccggaccagtaaattatgttgaaatatcagagaatgcatatcaatctgataattcagttataagacatcaggtatctaatagtgttgctataaggatggcagttttatcaacgtttttgagcagctaac

SEQ ID NO: 229788 - DNA, 262 bp, Unknown
  Bacterial polypeptide expressing nucleotide sequence isolated from the Sargasso Sea
aatggcaattaaatcaaataaagctattaaaatttcacaaaaacatctgttaggtatccaagatttatcagtgagcgatattaattatatactggatgagtctgaagcttttataaaattaaatcaaagtaaaaataaaaaaattgatgtgttaagaggtaaaacacaaataaacttattctttgagccatcaactagaactcaaagctcatttgaacttgctggaaaaagacttggagcagatgttatgtcaatgaatatg

SEQ ID NO: 229789 - DNA, 844 bp, Unknown
  Bacterial polypeptide expressing nucleotide sequence isolated from the Sargasso Sea
tctgaaaggaaaatatgtgcaacatcttctatcagtagacgatatgtccgaagatttcattcttgaaatttggacaaatgcattgaaaaataaagatacaaattctacttctttaaccggtaagattttaacaaatttattttatgaaccttctacaaggacctcatcttcattttacagcgctatgaccaaaaaaggtgggtctgttattcctattaataatgtaaagttttctagtgttacaaaaggtgagactctagaagataccattataaccatgagcacaatgagtgattgtattgttttacgacatcctgaagttggttctgcagaaagggctgcaaaggtaagtccagtcccaataattaatggaggcgatggtgatggcgaacacccaacccaaactctgcttgatggtctgacaatatattcaaataataacaataatcttgataatcttaatattacttttatcggtgacttaaaaaatggaagaaccgttaagagtcttgttaagcttttgagtaggtataaaaataataattttaattttataagtcctgataatttaagatatccatctgatattttgccaattaatagttttgaaagtgataaaattgaagatgtaataagtaagactgatgttctgtatgtaacaagagttcaaaaagaaagaggcagtgaccataattatgctttaactgaagtaactttaagtaaattaaatgataaagctatagtcatgcatccgcttccaagggttaatgaaataccaaaagaatttgataaagataaaagagcaaaatattttgaacaaatgcgaaatggcttatggtgcaga

SEQ ID NO: 229790 - DNA, 470 bp, Unknown
  Bacterial polypeptide expressing nucleotide sequence isolated from the Sargasso Sea
catgaaagaaaaatgtgaagatttcagcaaattaaaagtggcagctattggcgatattaaacattgtcgtattattggatcacaaatgactcttttaaatagacttggatgcacagatattcaattttatggaccaaaagagttactggatgataatttatctccatcatttagtgagatcacagacggatgcatggaagatagagacatcctctatgtaataagagttaagcatgaaagattaaaagacaatgagaatataaatatggaagcttttaagtcgacatatcaaattaacgaatcttttattgaaaaaactaaatttactggttcaatcatgcaccctggaccaattaatattgatttagagatttctgatgctgttgccacatcagaaaaatcacttatttctacacaagtagaaaatgggctctatattagagcggcattattaggccttatttcttaaa

SEQ ID NO: 229791 - DNA, 549 bp, Unknown
  Bacterial polypeptide expressing nucleotide sequence isolated from the Sargasso Sea
gactcagagaagacaatgcagaccagcgcttaaataaaattggcaattcgcttgggctgataggtgatagaagaaatagtgcttacaaaagcaagatggaaaaaatggacgcccttcggaagaaattttcaaagatggtgcttcatccaggcccagattcagaaagggtcgttggcattagtttagatcgagagagcgatcttttatctctaatgaagagaaatgatttggctctcgagaaaatccaagcaatcgtaacaaaagaagaaataccgatattaaagcaaatagaaattgaagagaaatacgccggctatatcaagagacaagatttggagattgaaaaaattcgtcgtcatgaatctatgaaaattccagaagatattgattttggaaaaattgagagtttatcggctgagctacgagagaaattagacattcatagacctaaaaccttggcgcgagcatctcgaattccgggtatgactccagctgcgctgtcaattttgttggttcaatccaagaaagtgggtggtcttaaacgctgaa

SEQ ID NO: 229792 - DNA, 672 bp, Unknown
  Bacterial polypeptide expressing nucleotide sequence isolated from the Sargasso Sea
cttgaagtttgacgaaccttcaacaagaacaaggctttcttttgcgatagcagcagaaaaacttggaattaaaactttcgaatcttcagatgtagtatcggcgaaacaaaaaggggaaattcttaaacatgagatagagacatatgtttctatgggtattgaagttttagtattaaggacaaaagaaaataatatcgatgattatcgagaatttaaaaacatcagtattataagtgctggttttggaaataaatctcatccaactcaagcattgattgatatatctacactatatagcctgaataaaatcaatgaaaaacgtacccctgtaacttatgttggagacgtaaaacattcaagagtttttgaatccggaagacagctcctaaatatattaggattcaaagttggtgtttttacagataaaaaactattacctgacaataaaaatgaccttgaaatttatgaatcatgggatgaagtatttgaaaattctaacgcaatagaacttctaagaatacagaaagaaagattacaagacaatgaagaactaaactttgacgaatacataaatagttatcaacttacaaaagaagttttaggtaaatcacaaagtgatttggctgttcttcatccaatgccaatcaatattggtattgagatttctaaaga

SEQ ID NO: 229793 - DNA, 814 bp, Unknown
  Bacterial polypeptide expressing nucleotide sequence isolated from the Sargasso Sea
tggtaaaagcgtaacaagatttaaagaaggtgacagagtgtattttatggcaccttggggagcatttgctgaagaagcatgcatgcatgaatttggagtaatgccaatacctgatgatatttcatttgagcttgctgcttcataccaaatggcatatggaacaagctaccatgctctagtgcaaagaggagaaatatcaaataaagatgagatccttgttttaggcgcttctggtggtgtaggtctagctgctttagatatagctaaagcaaaaggtgcgcgagttgtggccgcagtatcaacaaaagaaaaggctgaaatatgcaaagagtacggtgcagatgaattgattatttatggcgagggcccgaagaccaaagatgagtcaaaagctttttcaaatgaactaaaatcaaaaagtcttaaaggtggttacgatattatttatgacccaattggtgactgctacacggaaccagcattcagagcaataggctggaaaggcaaatatctcgttgttggctttgctgctggggaaattcctaaacttccaataaatcttacgcttttaaaaggagcgtcactcgtaggagttttttggggaacatttacagggcttgaaagtgaggctaatcagaaaaatattgctgaaattaaccaactactttctgagggcaagattaaaccattgatttcaaaagaagtgccaatggaaaatgccgttgaagccatcacaatgattggcaacagaggtgtaataggaaaagttgtcttagtaataaataaaaaggggcctactaagggccctttttaa

SEQ ID NO: 229794 - DNA, 826 bp, Unknown
  Bacterial polypeptide expressing nucleotide sequence isolated from the Sargasso Sea
tctttcggggaatctcccaccgacgggttggacgcatcgccatttactcgacttagaagaactttcggctgaggaaatcagccttattcttgacactgcagtcatgtgcaaggaagccacacaaggatgtcgggaaaagatcgatgttctgtcgggtgcttctattgtgaatctgttctttgaaaattccactcgaacaaaaacaagtttttctttggctgctcgccgtctgggagcagacgttatcgacttttcagcctcgacgagcagtttgtccaaaggtgaatcattcatcgacactgccaaaaatcttgaggccatgggagtcgacgcggtagtcgtccggcacagaacacccggaacaccccatctgctcgcttcccatcttgatgttggtgttatcaatgctggagatggaccgcatgcacatcctactcaaggattgttggacatcttctcaattcgggaacgccttggtgatctgaaaggtctaacggttggtcttgtcggtgatattgcgcacagccgaacggcacggtcgaatctatggggcctcaccaaacttggtgcgaaagtgattctttgcggcccgcccactcttgtttctgatagttggcaagagtttggagtagaggtctcacatgatcttgatgccattttgccacgatgtgacgttctcaatcttttacggatacagtttgagcgacaaaaaacacgaccatttccctctgtccgagaatatgcccatttgtatgccatgaaccgggatcgtcttcgtcgcgcgaaagatgatctggtgattctggctcctggccctattaaccgt

SEQ ID NO: 229795 - DNA, 391 bp, Unknown
  Bacterial polypeptide expressing nucleotide sequence isolated from the Sargasso Sea
atgtctcatattttaaatgtcgatgatttaactactgattttttatcagaattgtggaatctcgcctccttaaataaaggcaaaagaaactctaagttaaaaaataagattattactaacttgttttacgaaccatcaactagaacatcatcttcattttttagtgccatgaacctatctggaggttcagttattcctattaataatgttcagttctccagtgtttctaaaggggagtctttgcaagatactattttgactatgtcaacaatgacagatgcaattgtgcttaggcctcatgaggaaggatctgctttgaaagcctccgaagtttctgaagtacctataattaatcgtggtgatggtaaaggcgaacatccaacacaaacaa

SEQ ID NO: 229796 - DNA, 217 bp, Unknown
  Bacterial polypeptide expressing nucleotide sequence isolated from the Sargasso Sea
aatggccacagacacaaaaaaagctattaaaaattctccaaaacatcttctaggcattcaagatttaaaagtttcagaaattaagcatatattaaatgaagctcaacaatttattgagttaaatagaagcaaaaacaaaaaattagatattttaaaaggcaaaactcaaattaacttattttttgagccttctacaagaacacaaagttcatttgaa

SEQ ID NO: 229797 - DNA, 193 bp, Unknown
  Bacterial polypeptide expressing nucleotide sequence isolated from the Sargasso Sea
atattatggattaacaccagatatattagaacatgcaaattctgatgctttaattatgcatccaggcccaatgaacagaggtattgaaattgatacaattttagcagatgacattaataagagtgtaattaaagagcaagttgaactcggagttgcagtaagaatggcttgtttaaaaatgttttgtgtataa

SEQ ID NO: 229798 - DNA, 700 bp, Unknown
  Bacterial polypeptide expressing nucleotide sequence isolated from the Sargasso Sea
catgaacaaaatcggagctattgaaaacctaaataaagattttgttaatagtctttttaaggagaccaaaaaaataaaatctgagtggcctgctttagagcaagttggcaagaaaaagacagtttgcttgcttttttgggagccaagcacgagaacaaaactatcatttgagcatgccgcaaaagctttgggttttaatgttttagattttgctcctgatcagtcttccatagtgaagggtgaatcttttgaagacacaattaagactttgctggcattaaaagttgatggcttcgttattagacaccctgaagatgaaatatcaaaaacaattataaaaatgcttccagatgatgttttttatatcaatgcaggagacggaaattttgcccaccccacacaagcattgcttgatgtattcacgatttcagaaaatcatgcagatattcagaacaccaaaataaccatcttgggagatgttgatcattcacgagttattccatctaagttagagctattaaaaatgctggaatgctcagacattagttttttaggaccaaaaaatcttatcgcacaaaaatttgccccactctacacagaaattaatgataattgcttattagaaagggattttttatatgtgttaagagttcagagagaaaggttcaaagagtctgatagtttagatgaggcatcattt

SEQ ID NO: 229799 - DNA, 741 bp, Unknown
  Bacterial polypeptide expressing nucleotide sequence isolated from the Sargasso Sea
aatggctaagaatctgctttcaataaatgaccttacaaaagatgaaatacttgagcttataaatttttcaaacagctttatcgatgatgagggtaattttagaaaagaaaatctctttccagacaagatagttgcaaatgttttctttgagccgagtactagaacaaaaatgtcatttgctgtagctgcaggcaatctgggctgtaatgttttggatttcaacattgacagttcatcaattcaaaaaggggagtctatatacgaaacaatagatgcgcttaatttaatgggagtagatttatgtgttcttaggcatccagattcagttataagggagctagctgagcacatgcccgatatggtatttgtgaatgcaggagagggctctatatcacatcctactcaagcattacttgatatgaaaactattattgatcacaaaaatagtttcgatggattgaagattgtaattattggagatttagaccactctagagttacctcctcttttgttgaaggcatatccaactttgatattgaatcactttacttttgtggccatcctgagatgtgcacaaattatcaaaatacaggtgttggaaaatttgaaccagatattgaaagagcgcttgaagatgctgatgtagtcatgactcttagaattcagtacgaaagatttgaaaaagatctaaatctagacttagattcatataaaagcgcatatcaattatcctcagaaaa

SEQ ID NO: 229800 - DNA, 512 bp, Unknown
  Bacterial polypeptide expressing nucleotide sequence isolated from the Sargasso Sea
agatattgtaagtttgaaagaaaaatttggatatattaaaaatttaaaaattggcataatcggtgatattgcgcacagtcgcgttgcattaagtaatatatatggattgataacgcttggtgcaaaggttacgttgtgcggcccctcaacacttatgcctataaaaattgaagaattgggattaaccgttaataataatattgatgaagtcatagaatgggcagatgccatcaatgttctaagaattcaaagagagagaatgaataacgcattaatcccctctgtaagagagtacagaaaattatttggaataacacaatcaagaatagaaaaacataatagcgaacttgtcataatgcatcccggaccaatgaacagatgggtagaaattgacagtaatgttgctgacagtgagcaagcaattattttagatcaagtattaaatggagttgctacaagaatggccattttatacctcttgctttcaggcacaactaagaaagactcgtaat

SEQ ID NO: 229801 - DNA, 610 bp, Unknown
  Bacterial polypeptide expressing nucleotide sequence isolated from the Sargasso Sea
aatgaaaaatatcattaatttagttatagaggaagaattccacgaaaaaagaattgatgctgtaatagctcaaaaaaatgacgctcttagcagaactaggattaaaaaccttataataaatggaaatcttagtattaatgataaaatagtaaatgacccctccaaaaaaatttataaggatgataagatttctttaacaattccactgcctaaaaaagcatctcttaaagcattcaaatataaattaaacataatttataatgatgaagatttattagttattaataaatcagcaggaatttcaatgcatcctggaccgggaaattatgacaatacgattgtaaacgctttaatgaatttgaatgacaaaaatctgtcaaatattggggatgagttaagaccaggtatagttcatagaattgataaggatacatcgggattggtagtagttgcaaaaaataacaaatcacacgaaaatttatcaaaccagttttctaaacacacaataactagaatatatcaagcactgatctgggggaagctgagaccacaaaatggaaaaatcgaaactctaataacaagaagctcaaaaaatagacaattaatggaa

SEQ ID NO: 229802 - DNA, 261 bp, Unknown
  Bacterial polypeptide expressing nucleotide sequence isolated from the Sargasso Sea
aatggcagttataaaaaaattctcagctgttaaaaaaatccaaaaacatcttttaggaattcaaaacctatcaattcaggaagctaagctcattttagatgaggctaaaaattttataaaacttaatagaagtgcgtctaaaaaattagatttgcttagaggcaagacacagattaacttattttttgaaccttctacaaggacacaaagctcatttgaactagcaggaaagagattgggagccgacgtaatgactatgaa

SEQ ID NO: 229803 - DNA, 709 bp, Unknown
  Bacterial polypeptide expressing nucleotide sequence isolated from the Sargasso Sea
atgagacacttaacatcactcaaggaattatcaaaagatgagatccttgaattattagatttagcagataattttattgattcagaaggctccattagaagagatccactttttccagataagaaagttgttaatattttttgtgagccaagcactcgtaccaaaatctcatttgaaatagctgcatctaatctaggatgccaaataatcgattttgatttgagctcttcctctctagaaaaaggtgagaccctcaaagataccattgataatttagcaaagatgaacattaatctttgtgtcttaaggcataaagactcagttattcatgaattgatagatcaaacagattcaatggtctttataagcggaggagaaggttctatttcccatccctctcaaggacttttagatattatgacagtaaggcataggaaggatttggataattcaaatattttgattgttggcgacttggatcattcaagagttttccagtctttcattgatgggatggctaactttgattccaaaattactttatgtgggcctaaagagctgtgcaaagatgttatagactcctctaatcttaattatgaggaagatcttaaaaaggcactaaaaggtcaggatgttgtaatggctcttaggattcagcatgagagatttgaagacaagaaaaaccttgataaggaaagctatcttagta

SEQ ID NO: 229804 - DNA, 339 bp, Unknown
  Bacterial polypeptide expressing nucleotide sequence isolated from the Sargasso Sea
gagaaaagggaggggaagttaacgaagttgagtcgctttatgatcaacttgcagatgcagatgttgtctacatgactaggatccagaaagagagatttcctgatgaagaggagtacaacagagttgcaggggtgtacaagttatctgctacagacctcaatggttctaagaagggaatgattctgatgcacccattacccagggttgatgagattgacccgagcgtcgattctaccgaacatgctacttactttgagcaggctttcaatggggtcccaactagaatggctttgttgtgtagagggcttggtgtcaatattccaaagaaggtgaaatgat

SEQ ID NO: 229805 - DNA, 292 bp, Unknown
  Bacterial polypeptide expressing nucleotide sequence isolated from the Sargasso Sea
atggcaactaaatcaaacaaagctgttaaaatctcacaaaaacatctactaggtattcaagatttatcaataactgatgtaaattttatactttctgaagctaagcaatttattaatcttaatagaagtaaaaataagaaattagatacccttagaggaaaaacacaaataaatcttttttttgaaccatcaacaaggactcaaagttcatttgaattagctggtaaaagattgggggctgatgttatgtcaatgaaaatagttaactccgcaataaaaaaaggtgaaactt

SEQ ID NO: 229806 - DNA, 338 bp, Unknown
  Bacterial polypeptide expressing nucleotide sequence isolated from the Sargasso Sea
agaagatttaggtgttaatgttaattataatattgatgaagtaattgaatgggctgacgcgttaaatattcttcgaattcaaagagaacgaatgagtggaggtctattaccttctattagagaatataggaatttatttggtatctcttcagatcgtttatctaggcataaaaaagaattagttatcatgcatcctggccctataaatagaggtatagaaattgacagctctgttgcagatagtgatcaggcaataattctcgatcaagtacttaatggtgttgcatcaaggatggcaatattatatctgctcttgggagggaaggaaataacttaaa

SEQ ID NO: 229807 - DNA, 345 bp, Unknown
  Bacterial polypeptide expressing nucleotide sequence isolated from the Sargasso Sea
ctgaaatgtgtaccaagtatcaaaatcctaagattggtaagtatgaatcaaatttagagtcagcccttgaaaatgcagatgttgtgatggctttgagaattcagtatgaaagatttgaaaaagagcttaatttagatcttgaaacatataaatcagagtatcaattgtcttctgaaaagcttgagtctgcaaaaggcgacgtaatagtaatgcatccaggaccagttaattatgttgaaataacagaagctgtttatgactcagaaaattctgtaattaggcaacaggtggcaaatggtgttgcgataagaatggctgtgttatcaagatttttgggcagctaaa

SEQ ID NO: 229808 - DNA, 334 bp, Unknown
  Bacterial polypeptide expressing nucleotide sequence isolated from the Sargasso Sea
ttgaagaacttgttatatctaaaagatcttcacaaagatgaaattattcaattgctcgatcaatccgatcatttcctgaaatcaaatcaaccgcatgaatttgtggaacttcttaaaaaccaatcgatcgccagtcttttttttgagcccagcacaagaacaagtgcatcttttcagcttgctacaaaacgattgggcgcagaaacaatagtgattgatgagaaaacatcatccgcaaccaaaggtgaaactgtattggacacaatcaagaatcttgaagcaatgggtgtcagaggtttcatcatccgcactggggataaaaatttattgcccc

SEQ ID NO: 229809 - DNA, 889 bp, Unknown
  Bacterial polypeptide expressing nucleotide sequence isolated from the Sargasso Sea
ttagctttcgatgccgatcgattggtcggtgcttatacactttggccggtgagacttaaaataggggatgaagttgtgttcggtgcccaatcaatggacaccatgacgcatcccggttatcgagggcagggcatttttacgagattggcaagtgccagttttgagcttgctgcgagccgggggattgaggttttgtatggtttccctaaccctaagagttatccaggatttgttggtaagcttgactggtgccatattggcgacgttatacattgggtccgaccattggtaccgtcgggactagacataattccaacctttgctggacctttggttgatttattttctcaaatgcttcccaggggtggcggtggtaggtttttattgtcttcccagcagccggacgatcaggagctttggcgcttgttcgaagaatggccttttcacaataagggttgcgcaatatttcgttcacacgattggattaggtggcgttacgaccccaaatgccagatggaataccgttgggtatcagcctttgatgaggctggacgtcttgaagcttgcgcagtttgggggatgcatgggtcattatggggcgggctagctgataaccgtgctcacttaactgaattattgggaacaaacgagttggcccttcgagctgttttagcggaggttatctcagaggcccatgcgcggagagtttcagttttagaaaccttaacgaataatccaattgttgagtctgtattaaggcgagcatcagcataccggcatcgaagggcaccaatgattataaaggtattaaccaatcgagccctaccagttaatattttggaattaaacaattggtcaattattggcggtgatatagatacgttttaag

SEQ ID NO: 229810 - DNA, 620 bp, Unknown
  Bacterial polypeptide expressing nucleotide sequence isolated from the Sargasso Sea
accagtttcagtacaaacttatccaattacagtaggagggggtggagctggaggtccacaaccacaagcaggttctagcggaaacctttcagttttttcaacaattacttcaacagctggaggatttggtggtaaaggagcagctggagatggtggttcaggtggtgggggtggaagaggtacaccaagagcagcaggaacaggtaacacaccaccagtaagtcctgcacaaggaacacctggaggtacaggtggtccaccaaatggtggtgatggttcaggtggtggtggcggtgctactactgcaggttcagtaaatgctacttgttgtggaggtgcaggaggtgcaggtgcaacttctgtaattactggaactccagttgcaagagcaggtggaggtggaggtggggcatcaccagcaccatctacaaaaggtgctggaggaactggcggtggaggtaatggtgcaggttgtggttcaccaggacttgcaacagctggaacagcaaatactggcggtggtggtggaggatcatcaggtggtcctggaataccaattactcaaggtgcatcaggaggatcaggtatagtaataataagatataaatttcaaaattaaa

SEQ ID NO: 229811 - DNA, 961 bp, Unknown
  Bacterial polypeptide expressing nucleotide sequence isolated from the Sargasso Sea
tatgggaagatctcagcaaacagaatcgtcggtcaagactataaccatatcgaggcagagtgatgggcagcgtttggataactttctaattaaggaactaaaaggtgtaccacgttcacgaatttatcgtctgattcgtcgaggtgaagtccgattaaacaaaaagcgatgtaagcccgaccttaagcttagcattggtgaccgagttcgtattccgccggttagggtcagctctagtatcgccaaagctgggatcatttcacccggattcgccaaaatactttcagatagcattttgtttgagactgaggagcttttggttctaaataaaccagcggggtttgcagtccaaggtggaacgggtattagagtaaatataatcgacgcaatgcgagagatgaaatcggagtggcgcgaattagagttggctcaccgattagatcgagacacctctggctgcctcttgtttgccaaaaaaattcatattcttagagagttacagcttcaatttaaattaaaaactgtaaagaaagtttattttgcgattgtgcatgggggttggccagataacctaactttagtaaacgcgcctttacttaaaaatcgattaagctcgggagaaagaatagttaaagtagcgaaggatggtaagccgtctgaaacaaagtttaaggtcattgagcgtttcaaaagtgcaactatgatagaggcaaggccgataactggaagaactcatcaaataagggtgcattgtcaatatgcggggcatccaatagtgggtgacttaaaatatagcgtagatgatacgaataatgacctttcgaatgtcaaaaacctgtgtcttcatgctgcggaaatagagttcattgactcttcttccaaaaagcctgttagggtaaccgcacctctcgataagaatcttcatcaaataataaaaaaattaaatcatttaatacaatag

SEQ ID NO: 229812 - DNA, 337 bp, Unknown
  Bacterial polypeptide expressing nucleotide sequence isolated from the Sargasso Sea
ttgttatatctaaaagatcttcacaaggatgaaattattcaattgctcgatcaatccgatcatttcctgaaatcaaatcaaccgcatgaatttgtggaacttcttaaaaaccaatcgatcgccagtcttttttttgagcccagcacaagaacaagcgcatcttttcagcttgctacaaaacgattgggcgcagaaacaatagtgattgatgagaaaacatcatccgcaaccaaaggtgaaactgtattggacacaatcaagaatcttgaagcaatgggtgtcagaggtttcatcatccgcactggggataaaaatttatttgcccccattgattgat

SEQ ID NO: 229813 - DNA, 916 bp, Unknown
  Bacterial polypeptide expressing nucleotide sequence isolated from the Sargasso Sea
aatgtctaagaacttaattaacttttctgatctaaccaagaaagatatttttgatttaattgaactagcaaataattttaagtccgaggattcattagattatcgtagtgaaaatctgtttcctgataaaaagattgtttcgatcttctgcgaaccaagcaccagaacaaaattatcttttgaaatagcagcccacaatttgggagcaaaatttattgattttgatttatctagttcatcaatgaataaaggagagacccttgaagataccatgaatgctgtaaagatgatgggagtagatttatgtattctgcgacacactgagtcagtcatccatgactttgtgaaagatttttctaacatgcaatttattaacgccggagaaggctccatttctcatccaacacaaacattaattgatcttatgaccataaatgaatcaaaagcaaaatttcaggatctcaatattactattgttggcgatcttgatcactctagagttgtgaattcttttatcgaggcgattaaaattgtgggatataaaagtttaactttttgtggccatcctgatctttgtaaaaattttatagatacctcaattggtaattttgaacctgaattagatactgcattacaaaatgcggacgttgtgatgggactaaggattcaaaatgagagactttctgaaaaactaactatcggagctgaagattatattgagaggtatcaaattaatgttgattcacttcaagtagcagatccagaaatgattttattacacccaggacctgtaaacttcggtattgaattgagtaaagaagctagtgagttagataactgtaaaattcgagatcaaatttttaatggtgtagggatgagaatggcagttttaactaggcttttctctcaagcataa

SEQ ID NO: 229814 - DNA, 212 bp, Unknown
  Bacterial polypeptide expressing nucleotide sequence isolated from the Sargasso Sea
agattatgacaaactatctgtagcaaaatctgacgccctcataatgcacccagggccagccaatcgcggtgttgaaatagactctatagttgcagatgactttagtcgcagtgttatacgtgaacaggtagaaatgggagtagcggtgaggatggcttgcctagaaatactctcagcaaatatacaaagaaaaagagccagtgaagaataaa

SEQ ID NO: 229815 - DNA, 178 bp, Unknown
  Bacterial polypeptide expressing nucleotide sequence isolated from the Sargasso Sea
aaattaatattagcaaagaaaaatgctttaattatgcatcctggtccaatgaatagaggtatcgaaattgataccaatttggcagatgatattaacagaagtgttataagagaacaggtcgaacttggtgtggctgtaagaatggcatgtttaaaaattttttgtaaaaaaaattaat

SEQ ID NO: 229816 - DNA, 706 bp, Unknown
  Bacterial polypeptide expressing nucleotide sequence isolated from the Sargasso Sea
aatggctaataatcttttatcaataaacgatctttcaaaaaaagacatactggatctgatagagttctcaaataatttcattgatgatgagggtaactttaggaaagaaaatctttttccagacaaaatagttgcaaatgttttttgtgagccaagcacacgaacaaagtcatcttttgcgattgctgcaaacaatttaggatgctcagtattagattttgatattgaaaattcctcagttcaaaagggagaatctatttttgaaactgtagatgctctcaatcttatgggtgtagatttatgtgtgttaagacatcccgaatctgtaattagagaattagctgaatgtttgccgaaaatggttttcataaatgcaggagaaggatcaatttcacatccaacacaagcacttttagatataaagacaattatggaccataaagaaaatttagatggcctgaatattgttatcgtaggagatcttgatcactcaagagttacttcctcttttgttgaaggtgtatctaattttgatttaggatcactcacattttgtgggcatcctgaaatgtgtaccaagtatcaaaatcctaagattggtaagtatgaatctcatttagagtcagcccttgaaaatgcagatgttgtgatggctttgagaattcagtacgaaagatttgaaaaagagcttaatttagatctttga

SEQ ID NO: 229817 - DNA, 676 bp, Unknown
  Bacterial polypeptide expressing nucleotide sequence isolated from the Sargasso Sea
catgaataaaggagagacacttgaggatacttttaatgcagtagaaatgatgggtgtagatttatgtattctgcgtcatactgagtcagtcatccacgattttgtaaaagactttgcaaacatgcaatttgtaaacgctggagaaggagccatttctcatcccacacaaacattaattgacttaatgactattcacgaatcaaaagaaggatttgaggaccttaaaattgccattgtaggtgatcttgatcactctagagttgtaaattcttttattgaagcgattcaaattgtggggtacaaaagtttaacattttgtggtcatcctgatctttgtaagaattttattgagattccaattggaaattttgaacctgagttagaaactgcgttacaagatgcggatgttgttatggcactcaggattcaaaatgagagattgtctgaaaaactaactatcggagcaagtgattatattgagaggtatcaaattaatgttgattcactccaagtagcagatccagatatgattttattacatccaggaccagtaaactttgggattgaattgagtaaagaagtaggcgagttggataattgtaaaattagcaaccaaatttttaatggtgtggggatgagaatggctgtcttaactaagcttttttctcaagcataa

SEQ ID NO: 229818 - DNA, 426 bp, Unknown
  Bacterial polypeptide expressing nucleotide sequence isolated from the Sargasso Sea
tatgaagcatttaatatctctccaagacttttcacaaaaagaaatcctagagcttatagagcttgccaacaaatttattgatgaagaaggtaatattaaaagcgaatcaatattccctgataaaaggatattaactctcttttgtgagcccagcacgagaacaaaaatatcgtttgaaatagccgcaaaaagtttggggtgccatgttatcaactttgatgcatctaattcatcgctatcaaaaggagaaaccctccaagatacagtcgataccctcgctcagatggatattgatttatgtgttttacgtcatagtgatgcggtaatagaagatttaataaatcacataagaaaaccaatgacttttgtcagtgcgggagagggtgccttttctcatccaacccaaggtctattagatttgatgac

SEQ ID NO: 229819 - DNA, 298 bp, Unknown
  Bacterial polypeptide expressing nucleotide sequence isolated from the Sargasso Sea
aatggctataattaaaaaacttaaagctgttaaaaaataccaaaatcaccttcttgggatacaagacctttctttttcacaaattacagaaatacttaaacaagcaaaaacttttattactttaaataaaagcaattctaaaaaaatagatattttaaggggaaaaactcaaattaatttattttttgaaccatctaccagaacacaaagttcatttgagctggcaggtaaaagactcggcgcagatgtaatgtcaatgaatattgtgaattctgctattaaaaaggtgaaactttaa

SEQ ID NO: 229820 - DNA, 652 bp, Unknown
  Bacterial polypeptide expressing nucleotide sequence isolated from the Sargasso Sea
ttgagtaaacatcttttagattttaaagatatagaaaaaaaagatattgaaaaattaattgatattgcaggaaaattaaatccagaaaaaacagatgcaatttcttctattagtttattgaaatttgatgaaccatcaacgcgaactaggctttcgttctctgtagctgcttatagattaggaataaaaacatttgaatcatctgatataacctcagcaaaaatgaaaggtgaaaaccttaaacatgaaattgaaacttataaaagtatgggtattgaatctttagttattagaactaaagaagataatattgaggaatatagaaaatttgaagacatctccgttataagtggtggttttggaacttcttcacacccaactcaagcaattttagatgctacaacgctagataaatttaacaaattagataaagatactcctgttgtctacataggagacgtaaaacattcaagagttttcgaatcgggaagggaattattttctttgcttggtaaaaaagttggagtttttacacacgaaagttttttaccagatgatttatcaaatatagaagtcttaaatagctgggatgaagttttagaagccacagaagccattgaactcttaagagtccaaaaagagcgtataaaag

SEQ ID NO: 229821 - DNA, 880 bp, Unknown
  Bacterial polypeptide expressing nucleotide sequence isolated from the Sargasso Sea
aatgagacatcttttagactttcaagatgtaaacaaaaatcatttagaaaatctaattgaaaaaactagaagtcttgaagttaaactagaaaatctcggctctttagctctattaaagtttgacgaaccttcaacaagaacgagactttcttttgcaatagcagcagataaacttggaattaaaactttcgaatcttcagatgtagtatcggcgaaacaaaaaggggaaattcttaaacatgagatagagacatatgtttctatgggtattgaagttttagtattaaggacaaaagaaaataatatcgatgattatcgagaatttaataacatcagtgttatcagtgctggttttggaaataaatctcatccaactcaagcattgatagatatatctacactatatagcctgaataaaatcaatgaaaaacatacccctgtaacttatgttggggacgtaaaacattcaagagtttttgaatccggaagagagctcttaaatatattaggattcaaagttggtgtctttacagataaaaaactattacctgacaataaaaatgaccttgaaatttatgaatcatgggatgaggtatttgagagttctaacgcaattgaacttctaagagtacagaaagaaagattacaagataatgaagaactaaactttgatgaatacataaataattatcaacttacacaagaagttttaggtaaatcacaaagtgatttggctgttcttcatccaatgccaatcaatattggtattgagatttctaaagatgctattgaagataggaaaataaaatataaggaccagctttcacacgctataccttcacgaattgcagcattcaaatatgtaagggatgaaatatga

SEQ ID NO: 229822 - DNA, 352 bp, Unknown
  Bacterial polypeptide expressing nucleotide sequence isolated from the Sargasso Sea
catgaattccctgataacaatgaacgatttaactaatgatgacattcatagaattctattagatgctgaaaaattattacctgttgcaaaaggtaacttccaccttcctttgttaaaaggaaagattctaggaaacttattttttgagccatctactagaactagaatgtcatttgaaactgcaatgaaaagattgggtggagatgtaattaatttaggtgctgtagcatcttcatctgttgtaaaaggtgaaacattacacgatactattcgtatggttgatggatattcagatattattgtattaagacatccacgccaaggtgctgcacaatacgcctctgatgcgcaa

SEQ ID NO: 229823 - DNA, 424 bp, Unknown
  Bacterial polypeptide expressing nucleotide sequence isolated from the Sargasso Sea
atgaataatttttcccaaagcgacattatttctatacgagatttatcaaaagatgatttagaacaaatctttgcaaaaactaatgaaattatggaaatgccagcagaaaaaagacgtgaaatagcaagaggaaagactctgggatatctcttctttgaaccaagtactagaactagacttagtttccaatctgctatggcgctaattggaggaacctcatttggaattgctgatgcaacttcttcttctgttcaaaaaggcgaaagtttggctgacactgttaggattatggcaggttatactgatgcaattgttttacgtcattctttggatggctcaagtaaatttgcagctgaggtttctgataaaccgttaatcaatgcaggaagtggcacagaagaacatcctacacaagcaattcaag

SEQ ID NO: 229824 - DNA, 214 bp, Unknown
  Bacterial polypeptide expressing nucleotide sequence isolated from the Sargasso Sea
atggcaactaataaaaaagctgttaaaatttcaaaaaaacaccttcttggaatacaagacctttctatttctgatataaatttaattttagacgaagctaaatcatttatatctttaaataagagtaaaaataaaaaaattgatattttaagaggtaaaactcaaattaatctcttttttgaaccgtcaacaagaacgcaaagctcttttgagt

SEQ ID NO: 229825 - DNA, 169 bp, Unknown
  Bacterial polypeptide expressing nucleotide sequence isolated from the Sargasso Sea
attagaacatgcaaaagctgatgcattaatcatgcacccaggtccaatgaatagaggtattgagatagatactaatttagctgatgatatcaataaaagcgtaattaaagaacaagtagaactaggagttgcagtaagaatggcctgtttaaagattttttgtacttaa

SEQ ID NO: 229826 - DNA, 412 bp, Unknown
  Bacterial polypeptide expressing nucleotide sequence isolated from the Sargasso Sea
atgggcgacatagtcactatggacgacctaaccaaccaagatatcgttgccgttctggatgatgcagagagactagttccggttgctagaggagatgtttacctccccctcctacagggaaaggtgctggcaaatatgttcttcgaaaactcaactaggaccagaatgtcatttgagactgccatgaagaggctcggtggttctgtcctaaacttcacttctataggcacatcagtagcgaagggtgagaccctctatgacaccatgcagatgattgatggatatgctgatgtggccgctatcaggcatccgagacaaggtgcagcccaatacagcgcagacgcagtaggaaattcctattctgaatgctggcgatggtgctggaaatcaccctactcagactatgcttgat

SEQ ID NO: 229827 - DNA, 880 bp, Unknown
  Bacterial polypeptide expressing nucleotide sequence isolated from the Sargasso Sea
atgagacatcttttagattttcaagatgtaaataaaaatcatttagaaaatctaattgaagaatcaagatctctaaaaattaaatcaaaaaatttagatactctagctcttttaaagtttgacgaaccttcaacaagaacacgactttcatttgctattgcagctgaaaaacttggaataaaaacttttgaatcgtcagatgttatatcagcaaaacaaaaaggagaaatgcttcaacacgaattagagacatatatttctatgggaatcgaaatattggtattaaggacaaaagaaaataatattaatgactacagagaatttaaggaaattggaattattagtggaggatttggaaacaaatctcatccaactcaagcactaattgacatctcaacactctatagctttgataaactcactaatacatctaccccagtgacttacgttggtgacgtaaaacattcgagagtatttgaatcaggaagacagcttttaaatttactaggatacaaagttggtgtcttcacagatcagaatctacttccggacaacagaaatgatcttgaaatttatgaatcgtgggatgaagtctttaaaaattctaattcgatagaacttctaagagtacaaaaagaaagaatgctagatattgaaaaaataaatttcgataattacataaagaattatcaacttacaaaaaagatcttagataaatctcaaaaagatttaattgttctccatccaatgccaatcaatattggtattgagatttcagaagatgcaattgaagataaaaaaataaaatatatcgaccaactttcacatgcgataccttcaagaattgcagcatataaatatgtgaaaggagaaatatgat

SEQ ID NO: 229828 - DNA, 883 bp, Unknown
  Bacterial polypeptide expressing nucleotide sequence isolated from the Sargasso Sea
attgagtaaacatcttttagattttaaagatatagaaaaaaaagatattgaaaaattaattgatgttacaggaaaattaaatccagaaaaaacagatgaaatttcttctattagtttattgaaatttgatgaaccatccacgcgaactaggctttctttctctgtagctgcttatagattaggaattaaaacatttgaatcatctgatataacctcagcaaagatgaaaggtgaaaaccttaaacatgaaattgaaacttacaaaagtatgggtattgagtctttagttattagaactaaagaagataatattgatgaatatagaaaatttgaagacatctccgttataagtggtggttttggaacttcttcacacccaactcaagcaattttagatgctacaacgttagataaatttaataaattggataaagatactcctgttgtctacataggagacgtaaaacattcaagagttttcgaatcgggaagggaattattttctttgcttggaaaaaaagttggagtttttacacacgaaagttttttaccagatgatttgtcaaatatagaagtcttaaatagctgggatgaagttttagaaaccacggaagccattgaactcttaagagtccaaaaagagcgtataaaagatcttggagactcatatcttgatgaatatattaataaatatcaacttacagatgaaattcttgataaagcaagtgaggatttaataactcttcatccaatgcctatgaatgttggtgttgaaatatctgaaaaagcttccctacataataaatttaaatataaagaccaactttcttttggtgtgccgtcaaggattgcatcttacatgtacgtaatggagaagatatga

SEQ ID NO: 229829 - DNA, 880 bp, Unknown
  Bacterial polypeptide expressing nucleotide sequence isolated from the Sargasso Sea
aatgagacatctcttagattttcaagatataaataaaaatcatctagaaaatctaattgaaagaaccagaagtctagaagttaaaccagaaaatctagactgtatggccctcttaaagtttgacgaaccttcaacaagaacaagactctcttttgcagtagcagcagaaaagcttggaattaaaactttcgaatcttcagatgttatatcagcaaagcaaaaaggggagattcttaagcatgaagtagagacatacgtttctatgggtattgaaattctagtactgaggacaaaagaaaataatattgatgattatcgagaatttgaagatattgctgttataagtgctggttttgggaataaatcacatccaactcaagcactggttgatatatctacattgtatagtttgaataaaatcaatgaaaaacgaaccccagtaacttatgttggagatgtaaaacattcaagagtgtttgaatccggaagacagcttttaaatttactaggattcaaagtcggtgtctttacagataaaaatctattacctgacaataaaaatgaccttgaaatttatgaatcatggggtgaggtatttgaaaattctaatgcaatagaacttctaagagtacagaaagaaagattacaagataaagaagaaataaactttgatgaatatataaatagttatcagcttacaaaagacgttttaaataaatctcaaagtgatttggctgttcttcatccaatgccaatcaatattggcattgagatttctgaagatgctattgaggatagcaaaataaaatacaaggaccagctttcacacgcaataccatcacgaattgtagcattcaaatatgtaagggatgaaatatga

SEQ ID NO: 229830 - DNA, 199 bp, Unknown
  Bacterial polypeptide expressing nucleotide sequence isolated from the Sargasso Sea
tatgaatactacggtctaacaccagataaattaagttttgctaaagaggatgctttaataatgcatccaggacctatgaatagaggaatagaaattgatactaaattagcggatgatatcaataaaagtgtaatcaaagaacaagtagaactcggagttgctgttaggatggcatgtttaaaacttttttgtgaataat

SEQ ID NO: 229831 - DNA, 892 bp, Unknown
  Bacterial polypeptide expressing nucleotide sequence isolated from the Sargasso Sea
atgtatataaataatctgaaaggaaaatatgtgcaacatcttctatcagtagacgatatgtccgaagatttcattcttgagatttggacaaatgcattgaaaaataaagatacaaattctacttctttaaccggtaaaattttgacaaatttattttatgagccttctacaaggacttcatcttcattttacagcgctatgaccaaaaaaggtgggtctgttattcctattaacaatgtaaagttttctagtgttacaaaaggtgaaactctagaagataccattataactatgagtacaatgagtgattgtattgttttacggcaccctgaagttggttctgcagaaagggctgcaaaagtaagtccagtaccaataattaatggaggcgatggtgatggcgaacatccaacccaaactcttcttgatggcctgacaatatattcaaataacaataataatcttgataatcttaatgttacttttatcggtgacttaaaaaacggaagaactgttaagagtcttgttaagcttttgagtaggtataaaaataataattttaattttataagtcctgataatttaagatacccatctgatattttgccaattaatagttttgaaagtgataaaattgaagatgtaataagtaagactgatgttctgtatgtaacaagagttcaaaaagaaagaggcagtgaccataattatgctttaactgaaataactttaagtaaattaaatgataaagctatagtcatgcatccacttccaagggttaatgaaataccaaaagaatttgataaagataaaagagcaaaatattttgaacaaatgcgaaatggcttatggtgtagaatggctctattagaaaaaataatcctgaattaat

SEQ ID NO: 229832 - DNA, 761 bp, Unknown
  Bacterial polypeptide expressing nucleotide sequence isolated from the Sargasso Sea
aatgaataagattacaagtattagcaatcttaataggacatttgtcgaagatctttttcttaaaactaagctaattaaaaaatcgaaaattattcaacttggtggttttgagggaaagacgatttgccttttattctttgaaaaaagcaccaggacaaaattctcatttgagctagctgcaaaaagattaggattcaatgtgcttgatttttcagaagagatctcatctatgggaaaaggagagtctctggaagatacactgaatacctttgttgccatgggggtaaatggttttgtggtaagacatcctgaagataaaatttccctaaaaattgcgaaattgttacccgataatgtgttctttatcaatgcgggtgatggtaatcatgcccatcccacacaagctttacttgatgtttttaccattcaagaaaatttccaaaaaatagatcagcttgaggttgctattttaggtgattcaaagcactcacgagttatcccctctttcattgagcttctgaaactttttaactgcaataatttaaaattttttggcccgccagagcttttgaatcaagaacatgctccagcgttcaatggcattaaagcggatgcgttttccaaaactgatgttttatttgtcttgagaatccaaaaggaaagattccaaggttttgaaaatataaatatgaagactttcatagaagagtttcaaataaataccagcgtattaaaagcctcaaatttttctggtctcttga

SEQ ID NO: 229833 - DNA, 682 bp, Unknown
  Bacterial polypeptide expressing nucleotide sequence isolated from the Sargasso Sea
tgataattcatcagttcaaaagggtgaatctttttttgaaactgttgatgctctaaatttaatgggggtagatctttgtgttctcaggcaccctgagtctgtaatacaagatttagcagaagctttgcctaagatggtctttatcaatgctggtgaagggtccatatcccatccaacacaagctttgttagatatgaaaacaattatagatcacaaaaattcattggatggtctaaaaatcgtaattgtaggtgacctagatcactcaagagtaacctcttcttttgtagagggcatttctaacttttctattgattctctgactttttctggccatccagaaatgtgtacaaaatatcagaatcctcaaattgggcattatgaacctgatttagataaagcacttgataatgctgatgttgttatgacattaagaatacaatacgaaagatttgatcaggaattaaatttagacctagaaacatataaaaatgcctatcaactttcgtcagaaaagcttgggagcgcaaagggagatgtcattattatgcatcctggtccagtaaattatgtagaaataacagaagctgtttatgattctgagaactcagttattagagaacaaatagcaaatggcgttgcaattagaatggcagttttatctagatttttgagcggctag

SEQ ID NO: 229834 - DNA, 385 bp, Unknown
  Bacterial polypeptide expressing nucleotide sequence isolated from the Sargasso Sea
ctcttctaaattaggatatgaaatacatataattgctcctacatattttttagataggaaggatttaaaaaaaattaataataaaattatttttcataaaaatcttaactctcttaaagagcttgatatcttaatgatgctaagagttcaaaaggagagaattcctaagggtgcaaagaatatgatgagttcctttaaaaaagagttttgtttacaaaataaacatctattgaataagccttacttgatgcacccaggccccgtaaatagaaatatagaaattagcgatgatgttttagacaattaccctaaatccttaattttaaaacaagttgaaatgggagtttttcttagaatggcttgtttacagtatatccttaagtaa

SEQ ID NO: 229835 - DNA, 379 bp, Unknown
  Bacterial polypeptide expressing nucleotide sequence isolated from the Sargasso Sea
gttaggagcagaagttaatatagttgctccatccaatcttatgccaaaagaaattgaaaagtttggtgttaacacttttactgatatgaaaaagggtcttaaagattgtgatattgtaatgatgcttagattgcaaaatgaaagaatgaccagttcatatctttcatcgaatagagaatactatgaatattatgggttaacgccagataaacttgatcatgcaaagtcagatgctttaattatgcatcctggtccaatgaatagaggaattgaaattgatacaagattagctgatgacataaacaaaagtgtaattaaagaacaagttgaattaggtgttgctgtaagaatggcatgtttaaaaatattttgtgaataa

SEQ ID NO: 229836 - DNA, 745 bp, Unknown
  Bacterial polypeptide expressing nucleotide sequence isolated from the Sargasso Sea
atgttacatattttgagtgttaatgattttactgatgactttctatattccctgtggtctgatgcaagcaaaagaaaaggtaaaagtaatagttcattaaaggggaaaattttaaccaatcttttctatgaaccttccacaagaacttcttcatccttctatagcgctatgagttcatgtggtggaagtgtaatacccataaacaatgtacagttttctagcgtggcaaaaggagagtcatttgaagatacaataaaaacaatgtctcagatgagtgatgctatcgttgtgaggcatccagatagtggtgctgcagatactgcagcaaaagtaagttcagttccaataattaatgccggagatggtaattcagagcatcctacacaaactattatagatggttttacaatttacaatttttttaataaaaaattatctgatttaagggttactttagttggggatttaaaaaatggaagaactgttaagagtttagtgaaattattaaataggtttaaaaataatcactttaatcttgttagcccagagaatttaaagctttcatcagaactccctagaagtttttatgaaacaagtgatataaatgaagtattaaaagaaactgatatactttatgtcaccagagttcaaaaagaaagaggaagtatccacgattattctttaacaataaaacaactcaataacttacctaaaaattctattgtaatgcatcctttccctagag

SEQ ID NO: 229837 - DNA, 301 bp, Unknown
  Bacterial polypeptide expressing nucleotide sequence isolated from the Sargasso Sea
attggatgatgtggacataattataatgttaagattgcaattggaaagaatgtctgggtcttttgtaccttcaataagagaatacttcagattctatgggctagatagagaaaaattaaattttgcaaaatctgatgctttgatacttcaccctggtccaatgaataggggggttgaaatagattcggagctagctgacgatcttgatagatcggcaatatttgaacaagtaagaatgggagttgcggttaggatggcatgccttaaaacatttgtaaaaaaaaatgaggagggaaattga

SEQ ID NO: 229838 - DNA, 325 bp, Unknown
  Bacterial polypeptide expressing nucleotide sequence isolated from the Sargasso Sea
atggcaattaaaaccaataaagctattaaaatctcacaaaaacatctgttaggtatccaagatttatcagttaatgatattaattatatcctggatgagtcagaagcttttataaaattaaatcagagtaaaaataaaaaaattgatgtgttaagaggtaaaacacaaataaacttattctttgagccatcaactagaactcaaagctcttttgaacttgctggaaaaagacttggtgcagatgttatgtcaatgaatatgggtaactctgcaattaagaaaggtgaaacattgattgatactgcaatgaccttaaatgcaatgc

SEQ ID NO: 229839 - DNA, 172 bp, Unknown
  Bacterial polypeptide expressing nucleotide sequence isolated from the Sargasso Sea
aaactaaagtttgcaaaaaaagatgctttgctaatgcatcctggcccaatgaacagaggagttgaaattgataccaaactagcagatgacataaatgtcagtctggtaaaagaacaagttgaattaggtgtagctgtcaggatggcatgtttaaaattatactgtaaataaa

SEQ ID NO: 229840 - DNA, 314 bp, Unknown
  Bacterial polypeptide expressing nucleotide sequence isolated from the Sargasso Sea
acaaggactatatgaaccagacttgaataaagctttggacaatgctgatgttgtaatggctttaagaattcaacatgaaagatttgaacaagagctagatttagatttagaaacttataaacaagactatcaactaacatctgaaaagatggataatgcaaaaggagatgcaataattatgcatccaggaccagtaaattatatagaaatcactgagtctatttatgattctgagcaatcagtaataagagagcaggtgaaaaatggagttgctgtaagaatggctgttttatcaagatttttgagctgctaaa

SEQ ID NO: 229841 - DNA, 457 bp, Unknown
  Bacterial polypeptide expressing nucleotide sequence isolated from the Sargasso Sea
aatgctaaaaagcaaacatcttatcggtttagaacattttccagtttctgatttaaataaaataattgatacttctttcaaatttaaagatatcctacaaactgaaagcagaaaagctattttacttaagggaaaaaccatagttaatatgttttttgaaaattctacaagaactaaaattagtttttctttggcagagaagaggttgggtgctgatagtattaatttttctgcttctacgagtagtgttaaaaaaggagaaaccttaaaagatactgttcaaaatattgaatctatgaaaattgatggagctgttataaggcatggtcacccaggatctgctttaaaattaacagaatacattgatggcgcagtaattaatgcaggtgatggttctcatgagcatcctactcaagctatccttgatatggttactttgaaagaaaaattttggtaa

SEQ ID NO: 229842 - DNA, 385 bp, Unknown
  Bacterial polypeptide expressing nucleotide sequence isolated from the Sargasso Sea
ttgggagctcaagtgatggtttgcggccctgcgacacttctacccaggcacattagtgagctaggggtgttggtttccaatgatgtgagagaagctctggaatggtgcgacgtggcgaatgtgctccgaatccagctggaaagacaggaaatgagatacttcccctctttgcgagagtacacaaggttcttcggagtaaacaaaaaattgcttgactctataaaaaaggaaattgtaatcatgcatcctggcccaattaatcgaggggtggaaatcacctccgatgttgcggattcggatcactcaattattctgcagcaagtagaaaatggtgtagccattcggatggctgtgctctacttactggctgagaagaattcttaaa

SEQ ID NO: 229843 - DNA, 160 bp, Unknown
  Bacterial polypeptide expressing nucleotide sequence isolated from the Sargasso Sea
gcaaaaaaagatgcactgataatgcatcccggtccaatgaatagaggagtagaaatagatacaaaacttgcagacgacataaacgttagtttggttaaggagcaagttgaattaggtgtagcagtaagaatggcttgtttaaaaaagtattgtaaataaa

SEQ ID NO: 229844 - DNA, 340 bp, Unknown
  Bacterial polypeptide expressing nucleotide sequence isolated from the Sargasso Sea
ctacctgtgagagtatttactgacatgagaaaaggattagagaattgtgatattgtcatgatgcttcgaattcaaaaagaaagaatagtaggtaaaattatgcctgatcaaaggagttattttaaaaagtatggattagactacaataaactaaaatatgctaaaaaaaatgcttttgtgatgcatcctggcccaatgaacagaggagtggaaatagactctaaactagctgatgatatcacaataagtctaatacaggagcaagtagcaatgggagtggctgttagaatggcttgtctagatttgataataaaaaatagagataacaatgttagttaat

SEQ ID NO: 229845 - DNA, 211 bp, Unknown
  Bacterial polypeptide expressing nucleotide sequence isolated from the Sargasso Sea
aatttttttggccttgatgaaacaaaactttcattggccaacccaaatgcagttatcatgcatcctggaccaatgaatagaggtgtagaaatagcatctgccctagcagatgatacaaataggagtttaataaaaactcaagttgaaatgggtgttgctgtaaggatgtctataattgaggcactaaatcattctaaaaataaaacttaaa

SEQ ID NO: 229846 - DNA, 448 bp, Unknown
  Bacterial polypeptide expressing nucleotide sequence isolated from the Sargasso Sea
atggcggttataaaaaaattttcggctgttaaaaaaatccaaaaacatcttttaggaatccaaaatctatctattcaagaggctaatctaatcttagatgaagcaaaaaattttataaaattgaatagaagtgcatctaaaaaattagatttgttgagaggaaaaactcaaattaatttattttttgaaccttctacacgaactcaaagctcatttgaattagcaggtaaaagactgggtgccgatgttatgacaatgaatgttggaaattcttctttaaaaaaaggcgaaactatactggacacagctatgtctcttaatgcaatgcacccagatattatagtggttagacatcaagactctggagctccaaatctactgtctcaaaaagtgaattgcaccgtaattaatgcaggtgacggtttaagagagcaccctactcaagcac

SEQ ID NO: 229847 - DNA, 465 bp, Unknown
  Bacterial polypeptide expressing nucleotide sequence isolated from the Sargasso Sea
gatgtttgatcatagacatttaattagtttagaaaaatttcctaagaaggatattcaacaaataattgacactgcttttaattttaaagaagtccttgaaaggccaataaaaaaagtcccatcattacaaggcaaaacgatagttaatttattttttgaaaattcaacaagaactaggattagttttgaacttgcgcaaaaaaggcttagtgctgacactgtaaatttttctgcctctactagtagtttaaaaaaaggtgaaagctttaaagatactgcccagaatattgaagctatgaaaatagatgccgtcgtaatgagacatccttctcctggcgctccatatcaattgaaaaaatttattaacgctcaaataataaatgcgggtgatggtacccatgagcatccaactcaggccattcttgatatgatgagcattcaagaaaaatttggaaagataaaaga

SEQ ID NO: 229848 - DNA, 382 bp, Unknown
  Bacterial polypeptide expressing nucleotide sequence isolated from the Sargasso Sea
aatggctgtaataaaaaaatttaaagctgttaaaatagaacaaaatcacctcctaggtatacaggatctttctttttctgatgtttcaaatattctaaatcaggcaaagactttcattacattaaataaaagtgcaacaaaaaaattagatattttaagaggaaagactcaaattaatttattttttgaaccttctactagaactcagagttcttttgaacttgcaggaaaaagacttggtgcagatgtaatgtcaatgaacattgttaattctgcaattaaaaaaggagaaactctaattgatacagcaatgactctaaacgcgatgcatccagatataatcgttataagacatcaagactctggtgctcctaatttgtta

SEQ ID NO: 229849 - DNA, 325 bp, Unknown
  Bacterial polypeptide expressing nucleotide sequence isolated from the Sargasso Sea
atgcttgaaaacattaaaatccctaaaatctctcaaacccatctgcatggcataaaagatcttagcattgaggatataaataatattttagaactcagtaaaattttcaaagagcacaacaaagaaaaggataaaaaaataccaattttaaaaggtagaacaattataaatcttttttttgaaccctctacaagaacactaatctcttttgagatagctgctaaaagattaggcgctgatgtaattaatatgaatattgaaggatcttcattaagaaagggtgaaagtttatttgataccgctcaaactttaggagcaatgaacc

SEQ ID NO: 229850 - DNA, 493 bp, Unknown
  Bacterial polypeptide expressing nucleotide sequence isolated from the Sargasso Sea
catgagctttacgcaatcgcatcttctcgggatcgaacccctgagccctgccgatattactgccctgctggatttgtccgaagcatatgttgatctgaaccgctccgaggaaaaacattcccaagctctcaccggcctgacccagatcaacatgttcttcgaaaactccacccgcacgcaggcctcgtttgagttggccggcaaacgtcttggcgccgatgtgatgaatatgtcgatgcaggcttcatcgatcaaaaaaggcgagacgttgatcgacacggcgctgaccctgaacgcgatgcatcccgatttgctcgtcgtgcgccacccgcattccggcgcggtggaccttttggcgcaaaaggtgaattgcgcggtgctcaatgccggtgatgggcgtcatgaacacccgacgcaagcgctgctcgatgcactcaccattcgccgcgccaagggccgccttcaccgccttaacatcgcgatttgcggtgaa

SEQ ID NO: 229851 - DNA, 153 bp, Unknown
  Bacterial polypeptide expressing nucleotide sequence isolated from the Sargasso Sea
aggatgcattacttatgcatccaggtccaatgaatagaggtgtagagattgatacaaaattagctgatgacattaatgttagtcttgtaaaagaacaagttgaattaggagtagcggtcaggatggcatgtttaaaattatattgtaaataaa

SEQ ID NO: 229852 - DNA, 520 bp, Unknown
  Bacterial polypeptide expressing nucleotide sequence isolated from the Sargasso Sea
aatgggctcaaacattaaaaaagacattaaaatatctcaaaaacatctcctcggtattcaagatctaaaagtttcagatgcaaaattgattttaaatgaagctcaacaatttatagatctgaacagaagtaaaagtaaaaaaatagatattttaaaaggaaagactcaaataaatttattttttgagccatcaacaagaacacagagctcatttgagcttgcgggaaagcgtttgggtgcagatgttatgtctatgaacataacaaattcagcaataaaaaaaggtgaaactttaatagatactgcaatgacactaaatgccatgcatccagacattatagttgttcgtcaccaagactctggtgcttgtaatttgctgtcgcaaaaagttaaatgtgcagttcttaacgctggagatggaagaagagaacatccgacgcaagcattattggatgctttaacaatcataaatagaaaaaaaaaaattgagggtttaaaaattgctatatgggagatattt

SEQ ID NO: 229853 - DNA, 395 bp, Unknown
  Bacterial polypeptide expressing nucleotide sequence isolated from the Sargasso Sea
aatgtcgtctaaagtgacgaatatctcccccatcgatccgcaaatagatgatagcggaaatctcaatcatttcttgacgattgaaggcctaagcaaaacgcagttgataaaactgctagacgcctccagtgttttcatcggtgccgatagcgataggcgaagagaacaagcaaactggcttatcggtcacaccgtcgtgaatctcttctttgaagacagtacccgtacccgtaccacttttgaaatcgcggcgaaacgccttggtgccgccgtaattaacctaaacccttcccgaatgtccacgcgcaagggtgaaaccgtactggacaccgtgcggacacttgaggccatggataccgacatctttgtcgtgcgcgacagcgcaagtggtactg

SEQ ID NO: 229854 - DNA, 626 bp, Unknown
  Bacterial polypeptide expressing nucleotide sequence isolated from the Sargasso Sea
catgcaattcgccggcagccatattctgagcatcagtcaatttgagcgggctgatgttgagcgattgttcaccgttgccgacgccatgcgaccctatgcgcatcgcgagcgaatcacccgcgtactcgatggcgccatccttggctccatgttttttgagccttccacccggacccgaatcagttttggcagcgcctttaacctcctgggcggtgaggtccgtgaaacaaccggttttgagcactctgccattgccaagggtgagtcgctttatgacaccgctcgcgtactgagtggttactccgacatcatcgtcatgcggcatcccgaggacggttcggtctcggagttcgcggcggccagtcgcgtgccggtaatcaatggtggtgatggggctaacgagcaccccagccaggcgttattggacctttacacgattcgctcggagctggcgggcagacagcgcgcgctcgatggtctgcgcatcgctatggtgggggatctgcggtttggcagaaccgtgcactcgctgtcaaaacttctatcgctgtttgagggcttgcgcatcagtctggtctcgcctggggcgctcagcatgcccgaggcggtggtggaaactctgcgcg

SEQ ID NO: 229855 - DNA, 307 bp, Unknown
  Bacterial polypeptide expressing nucleotide sequence isolated from the Sargasso Sea
attttttcaaatatggaaaatggattaaaagattgtgatatagttatgatgttaagattgcaaaatgaaagaatgacaagttcatttctatcttcaaatcgtgaatactacgaatattatggtttaactccagacaaattaaaatttgctaaagatgatgcattaattatgcatccaggtccaatgaatagaggaattgaaatagatactaaattagctgatgatataaataaaagtgtaataaaggaacaagttgaattaggtgtagctgttagaatggcttgtttaaaaatattctgtgaataat

SEQ ID NO: 229856 - DNA, 416 bp, Unknown
  Bacterial polypeptide expressing nucleotide sequence isolated from the Sargasso Sea
gagagtggctagatcaaatatttatcttcttacaatgttaggagcagaagttaatatagttgcaccatccaatcttatgccaaaagaaattgaaaagtttggtgttaacacttttactgatatgaaaaagggtctcaaagattgtgatattgtaatgatgcttagattacaaaatgaaagaatgactagttcatatctttcatcgaatagagaatactatgaatattatggattaacaccagataaacttgatcatgcaaagtcagatgctttaattatgcatcctggtccaatgaatagaggaattgaaattgatacaagattggctgatgacataaacaagagtgtaattaaagaacaagttgaattaggtgttgctgtaagaatggcatgtttaaaaatattttgtgaataaa

SEQ ID NO: 229857 - DNA, 286 bp, Unknown
  Bacterial polypeptide expressing nucleotide sequence isolated from the Sargasso Sea
attgcagatgcgattattgttttaagactccaaaaagagagaatgatagaaaatttattaagtagcattgattcatatagtttggattatggcttaaccccagagaaattatctctaaataataaaagaataccaattctacatcctggtcccattaacagagatattgaaataagtagcaaagtggtagatcgatatcctaattgcttaattaataatcaagttgcaaatggtatccctataagaatggctttgctttatctattgcaaaaacacaacaagtaaa

SEQ ID NO: 229858 - DNA, 211 bp, Unknown
  Bacterial polypeptide expressing nucleotide sequence isolated from the Sargasso Sea
attcggtataacagaagaaagacttgccagattgcataaagagctagttataatgcatccaggcccaatgaaccgtggagtggagattgatgatcgcgttgcggacagcgatcaggctatcatattggaccaagttctgaatggtgtggcttccaggatgtctattctttatttattattaggcacaaaagaaaaagtagatgaaaaatga

SEQ ID NO: 229859 - DNA, 514 bp, Unknown
  Bacterial polypeptide expressing nucleotide sequence isolated from the Sargasso Sea
gatggattttagaggtaaccacatcctttctatagatcagttcgatcgtaaaggcatagaaaaattattttctgttgcagacaaattagaacctttcgcttccaaagaaaaaataacacgagtgcttgaaggcgcgatcctagggaatatgttctttgaacctagcacaagaactaggataagctttggtgcttcgtttaacttacttggaggaaatgttagagaaattacagaagtaggaagctcttccctagctaaaggtgaatctcttgcagatacagctcgagttctaagtggatacagcgatattatagttatgcgacatcctgagaatggctctgtaaaacgctttgcagattcaagtagagttccggtaataaatgctggagatggatcaaatgagcatccctctcaagctcttctagatctctatactattcaaaaagaactgtcagaaaataataaaacgttagatggccttagaatcgccttagtgggagatttgaaatatggg

SEQ ID NO: 229860 - DNA, 463 bp, Unknown
  Bacterial polypeptide expressing nucleotide sequence isolated from the Sargasso Sea
aatggcaattaaaaccaataaagctattaaaatttcacaaaaacatcttttaggtatccaagatttatcaattaacgatgttaatttgatacttgatgaagcacttgaatttataaaagttaaccaaagtaaaaataaaaagattgatgctttaagaggaaaaactcaaattaatctcttttttgaaccatcaactagaacacaaagctcatttgaattagcaggcaaaagactaggagctgatgtgatgtctatgaatataagtaattcagcaattaaaaaaggagaaaccttaattgacacagcgatgacattgaatgcaatgcatccagatattattgtaataagacatcaagattctggtgcttgtaacttattatctcaaaaagtaaattgtgctgttttgaatgctggagatggtagaagagagcatcctacccaagctttattagatgcgttaaca

SEQ ID NO: 229861 - DNA, 418 bp, Unknown
  Bacterial polypeptide expressing nucleotide sequence isolated from the Sargasso Sea
aatgcacttagttgaaacagctgatttaaataaaaaggaaattgaattcatattaaatgaagcccaaaaatttatttcttttaataaaatgaaaattaaaaaaaataatttgctcgaaggtaggactatttttaatttattttttgaagactcaacaagaacaagaacaagttttgaggttgctgctaaaagattaggcgctgatctaataaacgttgctgtcaaagatagctcaattaataaaggtgagactttacttgatacgatgactactattaattctatgaatcccgatgttttaataataaggcacccagatgagggtataagtaaaaaaatttcaatgagcgttgatgcatgtgtcataaatgctggggatggaagtcatgaacatccaactcaggctttattggatgct

SEQ ID NO: 229862 - DNA, 505 bp, Unknown
  Bacterial polypeptide expressing nucleotide sequence isolated from the Sargasso Sea
atgattaagaaggcaaatattccagaaattactcaaaagcatcttcatggtataaaaaatctttctattgaagatatcaataaaattttagaattaagcaattttttcaaattaaaaaatagagagaaagataaaaattatccaatattaaaagggcgaacgattattaaccttttttttgaaccttcgacaagaacattgatatctttcgaaattgccgcaaagcgactaggtgcagatgtaattaatatgaatattgaaggctcgtctctaaggaagggggaaagtcttcacgacacagctcaaacattaggagcgatgaatccagatctagttgttattagacatggaatagataatgcgtcaaaacaaatttcagaaattattaattgtcctgtaattaatgctggagaaggaataaatgagcatcctactcaggctctactagatgcttacacaatagtaaataataagagaagtttaaaaaatatcactgtagcaatat

SEQ ID NO: 229863 - DNA, 373 bp, Unknown
  Bacterial polypeptide expressing nucleotide sequence isolated from the Sargasso Sea
atggcaattaaaaccaataaagctattaaaatttcacaaaaacatttgttaggtattcaagatttatcagtaagcgatattaattatatactggatgagtcagaagcttttattaaattaaatcaaagtaaaaataaaaaaatcgatgtgttaagaggtaaaacacaaataaacttattctttgaaccatcaactagaactcaaagctcatttgaacttgctggaaaaagacttggtgcggatgttatgtcaatgaatatgggtaactctgcaattaaaaaaggtgaaactttgattgatacagcaatgacattaaatgcaatgcatcctgacataattgtgatcagacatcaagactctggtgcttgtaatc

SEQ ID NO: 229864 - DNA, 382 bp, Unknown
  Bacterial polypeptide expressing nucleotide sequence isolated from the Sargasso Sea
aatggcaaatgtaaaaaaagctattaaaatctcacaaaaacatctcctaggaatccaagatttatcaatttctgatgtaaattttattttgtcagaagcaaaacaatttattgatctaaataaaagtaaaaataaaaaattagatgttttaagaggaaaaactcaaattaatttgtttttcgaaccatctacacgtactcaaagttcattcgaattagcaggaaaaagattaggtgctgacgttatgtcaatgaatttaaataattctgcaattaaaaaaggagaaacattaatagacacagcaatgacacttaatgcaatgcatcctgatataatagtggtcagacaccaagattctggtgcatcaaaatttactatctca

SEQ ID NO: 229865 - DNA, 328 bp, Unknown
  Bacterial polypeptide expressing nucleotide sequence isolated from the Sargasso Sea
attcaaaaattaggtgttaatagtttttctgatatgaaaaaaggtgttaaagattgtgatatagtcatgatgttaagacttcaaaatgagagaatgactagttcatttttatcatcaaatagagaatattatgaatattatggactaactccagataaattaaattttgctaaagaagatgcactaataatgcatccagggccaatgaatagaggtattgaaattgacactaagttagcagatgacataaataaaagtgtaattaaagaacaagttgagcttggtgtagccgtgcgtatggcttgtcttaaaatattttgtgaatgat

SEQ ID NO: 229866 - DNA, 195 bp, Unknown
  Bacterial polypeptide expressing nucleotide sequence isolated from the Sargasso Sea
ggataacagttgaaagattaaaaaatcataataaagaaatagtaattatgcatccggggcccataaatcgtggtgttgaaattgatagtgcagttgctgacagtaagcgagctattatcttagatcaagttttaaatggagtagcttcaagaatggcaattctttacttattatgtggtggtaaatcaacttagg

SEQ ID NO: 229867 - DNA, 355 bp, Unknown
  Bacterial polypeptide expressing nucleotide sequence isolated from the Sargasso Sea
tgcttactttattgatcatggtgtgaatgtcaattataatattgatgaggttttagaatgggcagatgctgttaatgttctcagaatacagagagagagaatgggcgttggtctaatcccctcagacagagaatatagagcattattcggtataacagaggaaagacttgtcagaagacataatgagctagttataatgcatccaggcccaatgaatcgtggagtagagattgatgatcgtgttgcagatagtgatcaggccatcattttagaccaagttctgaatggtgtggcctctaggatgtctattctttatttattactaggctcaaaagaaaaagtcgaaaataaatga

SEQ ID NO: 229868 - DNA, 489 bp, Unknown
  Bacterial polypeptide expressing nucleotide sequence isolated from the Sargasso Sea
ccatcagacaagaaaaaggatcttttgaaggattaaaggtggtaatcatgggagatatatctcattcgagagtagcaaggtcactgactgaagggctcaaaatcatgaatactggaaatgtaacattgatctccccagacgaatttaagcctgatatggccaattttccaaatacacaattcgaagaaaacccaaaacaaggcctctgtgatgctgatgtgattgttacacttcgtgttcaaaaggagcgaattgaatcggatgagagcagcctatcactcgaggaatattcaaataaatatcaattatctcaagaaaaacttgcattatctaagcctgatgcaatcgtaatgcatccagggcccatgaatcgaggaattgaaatttcaaataaagttgctgacggaaaacaatcggttatcttgaagcaagtagaaaatggggtggccgttcggatggcagttctatcagaaatattgaagcaataaa

SEQ ID NO: 229869 - DNA, 149 bp, Unknown
  Bacterial polypeptide expressing nucleotide sequence isolated from the Sargasso Sea
tgcattgattatgcaccctggtccaatgaatagaggtgtagaaattgatacaaaattagctgacgatataaatgtaagcttagtcaaggaacaagttgagttaggtgtagcagtaagaatggcatgtttaaaaaaatattgtaaataaa

SEQ ID NO: 229870 - DNA, 418 bp, Unknown
  Bacterial polypeptide expressing nucleotide sequence isolated from the Sargasso Sea
attattttatctaagcttggtgctaaaataaatgtgattggtccgaaagagtggttacctcaaaatattaataaacttccagttaaagtttttacagacatgaaaaaaggtcttaaaaattgtgatattgttatgatgcttagaattcaaaaggaaagaattgttgggaaaattatgccaaatcaaaagacttattttaaaaaatatggtttagactacaataaacttaaatatgcaaaaaataatgcttttgtaatgcatcctggtccgatgaatagaggttttgaaatagactccaaacttgctgatgatgttacaaggagtttaattcaagaacaagtcgctatgggtgtggcaatccgtatggcttgtttagatattttaattaaaaatagagataatgtcattaagtcttaat

SEQ ID NO: 229871 - DNA, 480 bp, Unknown
  Bacterial polypeptide expressing nucleotide sequence isolated from the Sargasso Sea
ttcttgatcacaaaaatagtttcgatggattgaagattgtaattattggagatttagaccactctagagttacctcctcttttgttgaaggcatatccaactttgatattgaatcactttccttttgtggccatcctgagatgtgcacaaattatcaaaatacagattttggaaaattcgaaccagatattgaaagagcgcttgaagatgctgatgtagttatgactctgcgaattcagtatgaaagatttgaaaaagatctaaatctagacttagatacatataaaagcgcataccagttatcctcagaaaaacttggctttgcaaaaagtgatgcaattattatgcatccaggaccagtaaactacgtagagataactgaggctgtttatgattctgagaattcggtgataagacaacaaattgctaatggtgttgccataagaatggctgttttatccagatttttgagtagataaa

SEQ ID NO: 229872 - DNA, 187 bp, Unknown
  Bacterial polypeptide expressing nucleotide sequence isolated from the Sargasso Sea
atgaacaaagttagacattttatagatactcaagatttgagtaaaaaagaaatttttgaaatatttcgattaatgaaaatgttaaaagaagctcgttattgtggcgcagtacctgaattgttaaaaaacaaaactctagccatgatatttgaagaaccttcaactagaactcgtgtttcatttgaag

SEQ ID NO: 229873 - DNA, 690 bp, Unknown
  Bacterial polypeptide expressing nucleotide sequence isolated from the Sargasso Sea
aatgcttaaaagcaaacatcttatcggtctagaacattttccagtttctgatttgaataaaataatcgacacttcttttaagtttaaagatatacttcagacagaaagcagaaaagctattttacttaagggtaaaactattgtaaacatgttctttgagaattctactagaacaaaaattagtttttcattggctgaaaaaagattgggcgctgacagtataaacttttctgcttcaacaagcagtgtaaaaaagggtgaaactttaaaagataccgtgcaaaatattgaatccatgaaaattgacggcgcagtaattaggcatggacatccaggatctgcattaaaattgacagaatacattgatggagcagtaattaatgctggcgatggttctcatgaacatcctactcaagccattctcgacatggtaacacttaaagagaaatttggaaaaattaaaggtcttaaagttggaatcattggtgatattttaaatagcagggtagctagaagtgacatttttgcattaaaaaaacttggagcagaaattgtagtctgtggtccaagtactttattgccaagtgatgcaaaaaaacttggaatcaatattacatacaatttagacgaagttcttaattggtgtgatgcagtcatagctttacgtattcagttggaaaggatgcattt

SEQ ID NO: 229874 - DNA, 229 bp, Unknown
  Bacterial polypeptide expressing nucleotide sequence isolated from the Sargasso Sea
tatatcattagatacttattatgatgaatatggattgaatcaatctcgaatgcaattagctaagaaggatgtcattgtaatgcacccgggtccaatcaataggggtgtagagatagaatcttcagttgcagatggtccaaactctgtaatactaaatcaggtgtcctatggtatctctgttaggatggcaattatgtcaatactatttgataatcaccatgctagctaa

SEQ ID NO: 229875 - DNA, 496 bp, Unknown
  Bacterial polypeptide expressing nucleotide sequence isolated from the Sargasso Sea
atggcaattaaaacaaataaagctattaaaatttcacaaaaacatttgttaggtattcaagatttatcaattaatgacgttaatttgatcttaaatgaatctcattcttttataaaagttaatcagagtaagaataaaaaaatagatgctcttaaaggcaaaacccagattaacttattttttgaaccgtccacaagaacacaaagttcatttgaattagcaggaaaaagacttggtgctgatgttatgtctatgaatattagtaattcagcaatcaaaaaaggtgaaactttaattgatacagctatgacactaaatgcaatgcatccagatattattgttataagacatcaagactctggtgcatgtaatttactttctcaaaaagttaattgtgcagttttaaatgctggagatggaagaagagaacaccctactcaagctttattaaatgctttaacaattataaaccgcaaagaaaaaatgaaggactaaa

SEQ ID NO: 229876 - DNA, 230 bp, Unknown
  Bacterial polypeptide expressing nucleotide sequence isolated from the Sargasso Sea
agaatattattaccgctacgggctcaataaagagaaactttcccatgccaaaggggatgcaattgttatgcatccaggtccaatgaaccgaggcgttgagattgatggcgaattagctgatgatattaatagatcagttatccaagaacaggtcgaaatgggcgtggcaataagaatggcagcaatgcatcttttggcaaggaatgaaggatcaggaaagcatggctaat

SEQ ID NO: 229877 - DNA, 727 bp, Unknown
  Bacterial polypeptide expressing nucleotide sequence isolated from the Sargasso Sea
aagctttgaggatgctatacgtacgtttagttcttatgtagatgtgattattatgcgctcccaagaacctgggcgtgcaactcaggcggcacggatgatggatgtaattaagcgccctgtgccaataattaatgctggaagtggtagcgatcaacatcctacgcaagcgttgcttgatatctatacgcttaaccgtagtttttcacaacgcggcggtatagatggaaaggtaatagggatgatgggcgatttaaagcgcggtagaactgcgcgttcactatgttatttgatgaagaattatttcaatgtacgcttagtttttattgcaccaaagattttttctatgcgggatgatgttaaagcacaccttaaggagcaaggcacttcgtttgtggaaacgaaatgcttatcagaagtaattcaagaattagatgctctttatgtcacacgcatgcaatctgagtgggatcaacaaggtgagtctaatgatgtcgatttgaatcaatacactgttgataaaaatcaacttaaaatgatgaagtcggacgcaataattatgcatcctttgccccgaggcccggagatagaccctgtggtggatattgatcctcgtgctatgtattggaggcaagagcgtaatggtatgtggatgcgtgtcgcagttttattaaaaatctttcagttagaagaggcattgtatgagctgaaatcgacgcttgtttcttaa

SEQ ID NO: 229878 - DNA, 661 bp, Unknown
  Bacterial polypeptide expressing nucleotide sequence isolated from the Sargasso Sea
tatgctaaaaaataaacacttattagggctagagggatatcctagggaggatatacaaactataattgaaacagcgtttaattttagagaagtgcttgatcgtccaatcaagaaagtgccgtccttacagggagtaacaattgttaatttgttttttgaaaattcaaccagaacaaaaataagttttgagctagcccaaaagagactaagtgctgatacagtaaatttctctgcttcatctagtagtctgaaaaaaggtgaaagctttaaagacactgctcaaaatattgaagcaatgaaaatcgatgcagttgtaatgcgccatccaactccaggtgcaccaaaacatcttacaaactttattgattcagttattattaatgctggtgatggaacgcatgagcatcccacacaggctatattagatatgatgagcttgcatgaaaaatttggaaagttaaaaggtcttaaaattggtatcattggtgatataaaacatagcagagtggcattaagtaatatttatggtttaaagataatgggagcagaggtcaccctttgcggtccgccaaatctaataccgaaaaatattgaagaattgggcgtcaattactccaacaacgtagatcaagtaattgaatgggcggacgcgttaaattcc

SEQ ID NO: 229879 - DNA, 388 bp, Unknown
  Bacterial polypeptide expressing nucleotide sequence isolated from the Sargasso Sea
aatggcagtagtaaaaaaaaacgtcgctgttaaaaacgagataaatcacttactcggtattcaaaccctttctattaaatcagctaaagatattttaaatcaagctaaagagtttattaaattaaacagaagtggttcaaaaaaattagatattttaagagggaaaacacaaataaatttattttttgaaccttcgaccagaacacaaagttcatttgacctagcgggtaaaagacttggtgcggatgttatgactatcaacatgggaaattctgctttaaaaaaaggagaaactcttgttgatactgctatgacattaaatgcgatgcaccctgatataattgtaataagacatcaagactcaggtgcgcctaatcttttgtctcaa

SEQ ID NO: 229880 - DNA, 340 bp, Unknown
  Bacterial polypeptide expressing nucleotide sequence isolated from the Sargasso Sea
gatgccaaaagaaattgaaaaatttggtgtaaatacttttactgatatgaaaaagggcctcaaagattgtgatattgtaatgatgcttagattacaaaatgaaagaatgaccagttcatatctttcatcgaatagagaatactatgaatattatggattaacgccagataaacttgatcacgcaaagtcagatgctttaattatgcatcctggtccaatgaatagaggaattgaaattgatacaagattagctgatgacataaacaaaagtgtaattaaagaacaagttgaattaggtgttgctgtaagaatggcatgtttaaaaatattttgtgaataa

SEQ ID NO: 229881 - DNA, 370 bp, Unknown
  Bacterial polypeptide expressing nucleotide sequence isolated from the Sargasso Sea
agaagtaaacattattgcaccatcgaatttaatgccaaaagacattgagaagttgggtgttaatactttttcggatatgaaaaaaggtttaaaagattgtgatatagtaatgatgttaagactacaaaatgaaagaatgagtagttcatttttgtcctctaatagagaatattatgaatactttggtctaacacccgacaagttggattatgcaaaaaaagacgctttaattatgcatccaggtccaatgaatagaggtatagaaattgatacaaaattggcagacgatatcaataaaagtgtaataaaagaacaagttgaattaggcgttgctgttagaatggcttgtcttaaaattttttgtgaatga

SEQ ID NO: 229882 - DNA, 279 bp, Unknown
  Bacterial polypeptide expressing nucleotide sequence isolated from the Sargasso Sea
aagattgtgatattgtaatgatgctgagactccaaaatgaaagaatgactagttcatttttatcgtcaaatagagaatattatgaatattatggactaactcctgataaattaaatcatgcaaaagaagatgcattaattatgcatcctggaccgatgaatagaggtatagaaatagatactaaattagctgacgatataaataaaagcgttattaaagaacaagttgaacttggagttgccgtaagaatggcttgtttaaaaattttttgtaactaat

SEQ ID NO: 229883 - DNA, 337 bp, Unknown
  Bacterial polypeptide expressing nucleotide sequence isolated from the Sargasso Sea
tgcacaaattatcaaaatacagatgttggaaaatttgaaccagatattgaaagagcgcttgaagatgctgatgtagtcatgactctaagaattcagtacgaaagatttgaaaaagatctaaatctagacttagatacatataaaagcgcatatcaattatcctcagaaaaacttggctttgcaaaaagtgatgcaattattatgcatccaggaccagtaaattatgtagaaataactgaggctgtttatgattctgagaattcagtgataagacaacaaattgctaatggtgttgccataagaatggctgttttatccagatttttgagtagataaa

SEQ ID NO: 229884 - DNA, 370 bp, Unknown
  Bacterial polypeptide expressing nucleotide sequence isolated from the Sargasso Sea
gaagtaaatatcgtggcaccttcaaatcttattcctaaagatattgaaaaactaggagtaaatattttttctgatatgaaaaaggggcttaaggaatgtgacattgtaatgatgctaagattgcaaaatgaaagaatgacaagttcatttttatcatcaaatagagagtattatgaatattatggtttaacacccgataaattaaattttgctaaagatgatgctttaataatgcaccctggaccaatgaacagaggtatagaaatagatacgaacttagctgatgatatcaataaaagtgttattaaagaacaagttgaacttggtgtagccgtaagaatggcttgcttaaaaattttttgtatttaga

SEQ ID NO: 229885 - DNA, 406 bp, Unknown
  Bacterial polypeptide expressing nucleotide sequence isolated from the Sargasso Sea
aatggcactatcaaaaaaagctattaaaatttctcaaaaacatcttctaggaatacaggacctatctatcagtgacgttaatattatacttgatgaagcaaaagattttatttctttaaacaaaagcaaaaataaaaaactcgatattttaagaggaaaaactcagataaatttattttttgaaccttcaacacgtacacaaagttcattcgaattagcaggaaaaagattaggtgctgacgtaatgtcaatgaacattacaaattcagctattaaaaaaggtgaaacactaattgatacagcaatgacattaaatgcaatgcatccagatattattgtaataagacatcaagactcgggtgcatgcaatttattatcacaaaaagttaattgtgcagtattaaat

SEQ ID NO: 229886 - DNA, 272 bp, Unknown
  Bacterial polypeptide expressing nucleotide sequence isolated from the Sargasso Sea
aattcaaagagaacgaatgagtggaggtctattaccttctattagagaatataggaatttatttggcatctcttcagatcgtttatctaggcataaaaaagaattagttataatgcatcctggccctatgaatagaggtgtagaaattgacagctctgttgcagatagtgatcaggcaataattctcgatcaagtgcttaatggtgttgcatcaaggatggcaatattatatctgctcttaggagggaaggaaataactaaaaaaagttaaa

SEQ ID NO: 229887 - DNA, 358 bp, Unknown
  Bacterial polypeptide expressing nucleotide sequence isolated from the Sargasso Sea
attggagcaaaatcaccttttaggtatacaagatctttctttttcccaaatttcagaaatattaaaacaagcaaaaacatttattactcttaacaagagctcatctaaaaaaatagatatcttaagaggaaaaactcaaattaatttattttttgaaccttctacaagaactcaaagttcttttgaacttgcgggaaagagacttggtgcagatgtcatgtctatgaacattgttaactctgctataaaaaaaggtgaaactttaattgatacagcaatgacattgaatgccatgcatccagacataattgtaataagacatcaagactcaggagctccaaaatttattatctcagaa

SEQ ID NO: 229888 - DNA, 256 bp, Unknown
  Bacterial polypeptide expressing nucleotide sequence isolated from the Sargasso Sea
atgcatggttctttcgtaccttcaactagagaatattatgaaatatttggattaaataaaaagaatttacaaagagctaagcctaatgcattgattatgcatcctggaccaatgaatagaggtgttgaaattgatacagaaattgctgacaatttgaaacaaagtgtaattagagagcaagttgaaatgggagtagcaatacgaatggcatgtcttgagcttttagataataaccttaatacaaaaacagattaat

SEQ ID NO: 229889 - DNA, 394 bp, Unknown
  Bacterial polypeptide expressing nucleotide sequence isolated from the Sargasso Sea
atgcttgaaaacattaaaattcctaaaatctctcaaacccatctgcacggtataaaagatctaagcattgaggatataaataatattttagaactcagtaaaattttcaaagagcacaacaaagaaaaggataaaaaaatacctattttaaaaggtagaacaattataaatcttttttttgaaccctctacaagaacactaatttcttttgagatagctgctaaaagattaggtgctgatgtaattaatatgaatattgaaggatcttcattaagaaaaggtgaaagtttatttgataccgctcaaactttaggagcaatgaaccctgatctagtaattatcagacatggagaaaatgatgcctcaaaagaaattgctaaaatattagaatgtc

SEQ ID NO: 229890 - DNA, 303 bp, Unknown
  Bacterial polypeptide expressing nucleotide sequence isolated from the Sargasso Sea
catgttaagtttccaaggtgaacatattctgtctgttaatcagttagacagagactgcattgaacgtatttttgcagtagcaaaaaagatggagccttatgctaaaaagcaaaagcaaacaacggtgcttgagggcgccattttagctaatttgttttttgaacccagcacacgtacgcgcgttagttttggaaccgcgtttaacctgcttggtggaggcgtgcgtgaaacaacaggcatgcaaagttcagctcttgctaaaggtgaatctttatacgatacagcgcgtgttatttcaactta

SEQ ID NO: 229891 - DNA, 400 bp, Unknown
  Bacterial polypeptide expressing nucleotide sequence isolated from the Sargasso Sea
atgggaaaagagaacatccagattagtaaagacggaaagctcaaacattttctctccacagaaagtctcagtaaggaaatattaacggaaattttagatcacgcggaaagtttcgctgttgtcagtggacgcagtataaagaaagtgcctctccttagaggaaaaacagtcattaacctttttttcgagcctagtactaggactaggtccactttcgaatttgcggcgaaacgcctgtcggcggatgttatgaacctaaatatagactccagcgcaactcgcaagggggagtctctaggagatactcttcggaccttagaagcgatgaactctgacatattcgtggtgcgccatcaagacagcggtgccgaccgaatttattgcgcgtcaagtatctagt

SEQ ID NO: 229892 - DNA, 328 bp, Unknown
  Bacterial polypeptide expressing nucleotide sequence isolated from the Sargasso Sea
ctgacatattcgtggtgcgccatcaagacagcggtgccgaccgaatttattgcgcgtcaagtatctagtaacgtgtgcgtaataaacgccggtgacggacaacatcaacaccctacccaagctcttctagacacctttactattcgacgccacaaaccggattttcaaaacttggtcattgcaatagtaggtgatatcgcccattcccgagttgcccgctcggatatttacactttcaaaaagctgggcgttccggaaataagggtagtaggcccagtcacgcttctgccatcggaagtcgaaactctaggggtaaaggtatatcaca

SEQ ID NO: 229893 - DNA, 505 bp, Unknown
  Bacterial polypeptide expressing nucleotide sequence isolated from the Sargasso Sea
atggcaattaaaaccaataaagctattaaaatctcacaaaaacatctgttaggtattcaagatttatcagtaagtgatattaattatatattggatgagtcggaagcttttataaaattaaatcagagtaaaaataaaaaaattgatgtgttaagaggcaaaacacaaataaacttattctttgagccatcgactagaactcaaagctcatttgaacttgcgggaaaaagacttggtgcagacgtcatgtcaatgaatatgagtaactcagctattaaaaaaggtgaaactttaattgatactgccatgaccttaaatgcaatgcatcctgatataattgtgatcagacatcaagattctggtgcttgtaatctattatctcaaaaagttaattgtgtcgttttaaacgctggtgatgggagacgtgagcatcctactcaagcgttattagatgcattaacaattagaaatcgaaaaaaaaaaattcaaggattaaaaatagcaa

SEQ ID NO: 229894 - DNA, 319 bp, Unknown
  Bacterial polypeptide expressing nucleotide sequence isolated from the Sargasso Sea
aatggcatcaacaaaagctgttaaaatatctaaaaaaaatctactaggaattcaagacctcaatgtttctgatgttaagcatattttatctgaggctaaacaatttatacagcttaatagaagtaaaaataaaaaaattgatatattgagaggtaaaactcaaataaatttattttttgaaccatctactagaactcaaagttcatttgagttggcaggcaaaagattaggtgctgatgtaatgtctatgaatataacaaattcagcaattaaaaagggtgaaactttaattgacactgccatgactttaaatgcaatg

SEQ ID NO: 229895 - DNA, 310 bp, Unknown
  Bacterial polypeptide expressing nucleotide sequence isolated from the Sargasso Sea
catgaagcacgtagtttctatttcagatttaagcaaaaagcaaattttatcagttctaaaacgtgcaaaagagttggttcctgttgcaaaaggtaaaaagaaatctaagagccttgatggtaaaattttagccacatgtttctttgagccatctactagaactcggttatcttttgaaactgctatgcaaaggttgggaggaacttgtattggttttgctgatccttcagccacatctcatttgaagggagaaacattagttgatggaattagaatggttgcaggatatgcagatgcagtacttttgaga

SEQ ID NO: 229896 - DNA, 391 bp, Unknown
  Bacterial polypeptide expressing nucleotide sequence isolated from the Sargasso Sea
atggcaaatgtaaaaaaagctattaaaatctcacaaaaacatcttctaggaatccaagatctatcaataagtgatgttaattttatattatctgaagctaaacaatttatcgatctaaataaaagtaaaaacaaaaagttagatgttttaaggggaaaaactcaaataaatttattttttgaaccttcaacacggacacaaagttcatttgaattagctggaaaaagattgggtgcagacgttatgtcaatgaatctaaataactctgctataaaaaaaggtgaaacgttaatagatacagcaatgactcttaatgcgatgcatcctgatataatagttgttagacatcaagactctggtgcatcaaatttattatctcagaaaagttaac

SEQ ID NO: 229897 - DNA, 556 bp, Unknown
  Bacterial polypeptide expressing nucleotide sequence isolated from the Sargasso Sea
catgttagacgatcttatttctgtagaccaacttagccctactattattgatcgtatctttgctattacacctgacatgcaggccattacacaaaacaagcaaaaaccctgtgattatttaaaaggctgtatcttgggaaacttattttttgaagccagtacacgtagccgcatgagttttagttctgcttttatgtatttgggtggacaggtaaatagcacaacgggtgtggttttttcttcgatctctaaaggtgaaagcttggcagataccgcacgcgttattgcctcttattgtgatatcttggtcattcgccaccccgatttaggctcggctgcaatggctgcagaacatgctaatattccagttatcaatgcaggtgatggcccaggcgagcaccctacccaggctttgctggatttatataccatttataaagagaaaaaaagtttaagcaacttaaatatttgtatggttggtgatttaaaatatggacgtacggtgcattcgcttgctagattactggcgctttatcccaagatcacgctcaccttt

SEQ ID NO: 229898 - DNA, 418 bp, Unknown
  Bacterial polypeptide expressing nucleotide sequence isolated from the Sargasso Sea
atgtggtccgaaacattaatacctgatgaatttcacaattttttaaaaactcctgctccaaatcaattagaagatcctgttaaatcaagaggttcaataacaatttctagatcattggaagaatcaataaaaattgctgatgcaattattgttttaagactccagaaagagagaatgatggagaatttgctaaacagtattgattcatatagttttgattatggcttaacttcagagaaattatctttgaatactaaagaaattccaattcttcatcctggaccaattaatagagatattgaaatcagtagtaagatagtagatgaatatcctaattgcttaatcaataatcaagtcgctaatggtattccaataagaatggctttactttatttattacagaaatacaaaaaataaa

SEQ ID NO: 229899 - DNA, 585 bp, Unknown
  Bacterial polypeptide expressing nucleotide sequence isolated from the Sargasso Sea
catggattttagcggtagtcatattctttctatagatcaatttaatcgctcagatattgagaagttattcagtgttgcggatagcttagaaccctactcctcaaaaatcaaagtaactcgtgtacttgaaggggccattttaggcagtatgttttttgaaccaagtacaagaactcgtattagttttggtgcctcatttaacctactaggaggcaatgtaagagaaataactgaagttggctcctcatctcttgccaaaggagaatcgttgattgataccgccaaagtattaagtgggtatagtgacataatagtaatgaggcatcctgatgaaggctcggttcaaaaatttgctgaagccagtagagttcctgtggtgaatggtggagacggggcaaatgaacatccttctcaagcattactagatctttacaccatagaaaaagaactatctcaaaataataaatctattgatgggttgagaatagccttagtaggagatctgaaatatggacgtgcagttcactcgctctgtaaaatctttctttatattcagatgttacgatcaaactcatctcacctgaa

SEQ ID NO: 229900 - DNA, 582 bp, Unknown
  Bacterial polypeptide expressing nucleotide sequence isolated from the Sargasso Sea
agctgatagatgatgtagggcctgatacacatctgattagtgcaggcgagtcttcggtatcacaccctacacagggtttgctagaccttctaaccatcagacaagaaaagggatcttttgaaggattaaaagtggtaatcatgggagatatatctcattcgagagtagcaaggtcactgactgaagggctcaaaatcatgaatactggaaatgtaacattgatctccccagaagaattcaagcctgatatggccaatttttcaaatacacaattcgaagaagacccaaaacaaggtctctgtgatgctgatgtgattgttacacttcgtgttcaaaaggagcgaattgaatcggatgagaacagcctatcactggaggaatattcaaatgaatatcaattatctcaagaaaaacttgcattatctaagcctgatgcaatcgtaatgcatccagggccgatgaatcgaggaattgaaatttcaaatgaagttgctgacggaaaacaatcggctatcttgaagcaagtagaaaatggggtggccgttcggatggcagttctatcagagatattgaagcaataaa

SEQ ID NO: 229901 - DNA, 426 bp, Unknown
  Bacterial polypeptide expressing nucleotide sequence isolated from the Sargasso Sea
aatgttatcaaaaaaacacctattaggacttgatggttatccgaagagggatatagaaagaattataaaaacaggatttaagtttagggaagttttagatcgacctattaaaaaagttccatcactgcaaggattaactattgcaaacttgttctttgaaaattcgactcgaacacgtatgagttttgagttagcccaaaggagattaagtgcggattcaatcaatttttcagcaccctctagtagtttgaaaaaaggagaaagtcttaaagacaccattcaaaatatcgaggcaatgaaaattgatgccatagtaatgaggcatcctcatgcaggttctcctaagctgttaaccaattttgtaaatgccataatcattaatgctggtgatgggacgcatgaacaccctactcaagctatcttgga

SEQ ID NO: 229902 - DNA, 219 bp, Unknown
  Bacterial polypeptide expressing nucleotide sequence isolated from the Sargasso Sea
actcagattaacttattttttgaaccatccacaagaacacaaagttcatttgaattagcaggaaaaaggcttggtgctgatgttatgtctatgaatataagtaattcagcaatcaaaaaaggtgaaacattaattgatacagctatgaccctaaatgcaatgcatccacatattattgttataagacatcaaaactctggtgcatgtaatttactttct

SEQ ID NO: 229903 - DNA, 222 bp, Unknown
  Bacterial polypeptide expressing nucleotide sequence isolated from the Sargasso Sea
cgcaacgagaatatttcaatctgtttggattgaacaaggacaaattaaacagagttgcgccaaaagccctgatcatgcatccgggccctatgaaccgtggtgtagaaatcgactcagcaattgctgatgacgttgaaaaaagcctgatccatattcaggtagaaatgggagttgccgcccgcatggcctgtcttgaagctgtctcactgggggcggtatgac

SEQ ID NO: 229904 - DNA, 431 bp, Unknown
  Bacterial polypeptide expressing nucleotide sequence isolated from the Sargasso Sea
aatggcaactaaatccaaaaaagctattaaaatatctcaaaaacatttattaggtatccaagatttatctgttagtgatgttaccactatcctgaaggaagcctctaaattcatagaattaaataaaagtaaaaataaaaaaattgatattttaaaaggtaaaactcaaataaacttattttttgaaccatcaacaagaacacagagctcattcgaattagcaggtaaaagattaggcgcagatgtaatgtcaatgaatattacaaattctgctattaaaaaaggtgaaacgttaattgatacagctatgaccttaaatgccatgcacccagatattattgtaataagacatcaagactcaggagcttgtaaccttctatctcaaaaagttaattgtgcggtactaaatgcaggtgatggtagaagagaac

SEQ ID NO: 229905 - DNA, 395 bp, Unknown
  Bacterial polypeptide expressing nucleotide sequence isolated from the Sargasso Sea
aatggcaattaaaacaaatcaagctattaaaatttctcaaaaacatctgttaggaattcaagatttatcaatcaatgatgttaatttgatacttgatgaagcaaactcatttataaaagtaaatcaaagtaaaaataagaaagttgatgttttaagaggtaagactcaaattaatttattttttgaaccttccactagaacccaaagctcttttgaattagcaggtaaaagacttggagcagatgttatgtcaatgaatattagcaactcagcaataaaaaaaggtgaaacattaatagatacagcaatgactcttaatgcaatgcatcctgatattattgtaattagacatcaagactctggggcatgtaatctactttcgcaaaaagtaaact

SEQ ID NO: 229906 - DNA, 487 bp, Unknown
  Bacterial polypeptide expressing nucleotide sequence isolated from the Sargasso Sea
ttaacaataatagatagaaaagaaaaaattcaaggattaaaaattgcaatatgcggagatatagttcattctagagttgctagatcaaatatttatttattaaatatgctgggtgctgaagtaaatatagtagcgccttcaaatttaatgccaaaagatatcgataaacttggtgtaaacagtttttctgatatgaaaaaaggtcttaaagattgtgatatagttatgatgttaagactccaaagcgaaagaatgacaagctcttttctttcatccaatagagagtattatgaatactatgggctaacacctgataaattggaatttgcaaaagatgatgcgcttataatgcatcctggtccaatgaacagaggtatagaaattgatactaacctagccgatgacataaataaaagtgtaataaaggagcaagttgaacttggtgtagcagttagaatggcttgcctgaaaatattttgtgaataat

SEQ ID NO: 229907 - DNA, 524 bp, Unknown
  Bacterial polypeptide expressing nucleotide sequence isolated from the Sargasso Sea
aatggccaattcaaaaaacgctgttaaaatttcaaaaaaacatctcctgggtattcaagatctatcaatttctgatgtaaaaactattctttcagagtcaaaaaactttatagctttgaacaaaagtaaaaataaaaaaatagatattttgagaggtaaaacacaaataaatttattttttgagccatctactagaacacaaagttcgtttgagcttgctggaaagagattaggtgctgatgttatgtctatgaatataactaattcagcaattaaaaaaggagaaactttaatagacactgcaatgaccttaaatgcgatgcaccctgatattattgttgtaaggcatcaagactcaggtgcctcaaatttattgtcacaaaaagttaactgtgcggtattaaatgcaggcgatggcagaagagaacatcccactcaagctttacttgatgctttaacaattatggaaaagaaaaataaaatagaaggtcttaaaattgcaatttgtggagatatacttcatt

SEQ ID NO: 229908 - DNA, 494 bp, Unknown
  Bacterial polypeptide expressing nucleotide sequence isolated from the Sargasso Sea
aatggctaaaaatcttatttcaataaatgacctttctaagaaagaaatcatagaattaattgagtttgctaataactttattgatgaagagggaaacttcagaaaagaggatttatttcctgagaaagttgttgcaaatgttttctgtgaaccaagcaccaggacaaaatcatcatttgccattgctgcaaaaaatttaggatgctctttaatagattttgacgttgaaaactcttcaatacgaaaaggggaatcaatttttgaaactattgatgcactaaatttaatgggtgtcgatctatgtgtatttagacactctgattcagtaataagagaattggcagactgtctgccaaagatgagctttatcaatgcgggcgaaggagcaatctcccatccaacacaagctttattggatatcaaaacaataattgatcataaaaagacactagatggattaaatattgtcattgtgggtgatcttgaccactcaa

SEQ ID NO: 229909 - DNA, 187 bp, Unknown
  Bacterial polypeptide expressing nucleotide sequence isolated from the Sargasso Sea
tggattaacacaggataaattagaatttgcaaaatcagattcaattattatgcatcctggtccaatgaaccgtggtattgaaattgatacaaaactagctgatgacaccaatatgagtgttgtaaaagaacaagttgaattaggtgttgcgataagaatggcatgtttaaaaattttttgtgaatga

SEQ ID NO: 229910 - DNA, 264 bp, Unknown
  Bacterial polypeptide expressing nucleotide sequence isolated from the Sargasso Sea
tggaaaaatcatattttcctaatgatagagaatattctcttctctatggccttgataaaaaaaggataagtaagttaaaaaaagatattttaattcttcatcctggaccaattaacagaggtgttgagattaaatctgatattgtggaatcaaataattcgattattttagaccaggtagagaatggagttgctgttagaatggcaattatctatttactagcatcaaaaatgaatatttcaaaaagtcatgaaattgtttaaa

SEQ ID NO: 229911 - DNA, 412 bp, Unknown
  Bacterial polypeptide expressing nucleotide sequence isolated from the Sargasso Sea
aatggcaactgaaaaaaaagttacagctattaaaaactcacccaaacatctattaggtattcaaaatttatcggttcaagaggctaaaaaaatattaaccgaggcaaaatctttcattaagttaaacagaagcagttctaaaaaactagatgttttaagaggcaaaacacaaatcaatttattttttgaaccttcaaccagaactcaaagttcatttgatttagcaggtaaaagacttggtgcagatgtaatgacaatgaatatgggtaactcagctttaaaaaaaggtgaaactttaattgatactgcgatgactcttaatgcaatgcatccagacttaattgtaataagacatcaagactctggtgcacccaacttactctctcaaaaagttaactgcacagtaataaat

SEQ ID NO: 229912 - DNA, 304 bp, Unknown
  Bacterial polypeptide expressing nucleotide sequence isolated from the Sargasso Sea
tttacggacatgaaaaaaggtttgaaagattgtgatattgttatgatgttaagattacaaaatgaaagaatgtctagttcttatctttcctcaaatagagaatattatgaatactacggattaacacctgataagttggaacatgctaaatccgatgctttaataatgcatcccggtccaatgaatagaggaattgaaattgatacaatgttagccgatgacattaacaaaagtgttattaaagaacaagttgagcttggtgtagctgtaagaatggcctgcctaaaaatattttgtacataaa

SEQ ID NO: 229913 - DNA, 166 bp, Unknown
  Bacterial polypeptide expressing nucleotide sequence isolated from the Sargasso Sea
taataaagaaattccaattcttcaccctggtcccattaacagagatattgaaataagtagtaaagtagtagatcgatatcctaattgcttaattaatgatcaagtttcgaatggtatccctataagaatggctttgctttatctattacaaaaatacaacaaataa

SEQ ID NO: 229914 - DNA, 523 bp, Unknown
  Bacterial polypeptide expressing nucleotide sequence isolated from the Sargasso Sea
aatggcaactaaatctaacaaagctattaaaatttctcaaaaacatttattaggaattcaagatttatcaattaatgatgttaatattattcttgatcaagcaaaagaatttatcgatttaaatagaagtaaaaataaaaaacttgatactcttaaaggtaaaactcaaataaatttgttttttgaaccttcaacaagaacacaaagctcttttgatttagccggcaaaagattgggtgcagatgttatgtcaatgaatataacaaattcagctattaaaaaaggcgaaactcttattgatacagctatgacattaaacgcaatgcatcctgatattattgttataagacatcaagactcaggtgcatgtaatttattatcacaaaaagtaaattgtgctgtgcttaatgcaggagatggtagacgagaacatccgactcaagctttattagatgcattaacaattattaatagaaaaaaaaaaattgaaggtttaagaattgcaatttgtggggacatactt

SEQ ID NO: 229915 - DNA, 432 bp, Unknown
  Bacterial polypeptide expressing nucleotide sequence isolated from the Sargasso Sea
aatggaaccaattataaaagactgcataggattacgattttattctacggaatttatacaatcgattttgagtcttgctaaaaaaataaaagaaaataatgtaacaattgatttgaagaataaaattgttgttcaactattttttgaaccatcaactcgaacacgtttgtcgtttgaaattgcgatacaaaagtctggagcaaccccgatgatgattgatattgaaacaagttcattaactaaaggtgagtctttgtttgatatggtcaaaaatattgctgcaatgaaaacagatgctattgttgttcgacattcgtcaggtggaattccatattttattagtcagcatgtatcgattcctgttttaaatgcgggtgacggttatcatgaacatccctcacaaggtttgttagatatttttacaatgcaaga

SEQ ID NO: 229916 - DNA, 385 bp, Unknown
  Bacterial polypeptide expressing nucleotide sequence isolated from the Sargasso Sea
aatgtcgtctaaagcgaccaatgcctctcccatcaatccgcaaatagacgatagcggacatctcaggcattttttgacgattgaaggtctaggcaaaacgcagctgatgaaactgctagacgccgccagtgttttcatcggcgccgatagcgataggcgaagagaacaagcaaactggcttatcggtcacaccgtcgtgaacctcttctttgaagacagtacccgcacccgcaccacttttgaaatcgcggcgaaacgccttggtgccgccgtaattaacctaaacccttcccgaatgtccacgcgcaagggcgaaaccgtactggacacggtgcggacacttgaggcaatggataccaacatctttgtcgtgcgcgacagcgca

SEQ ID NO: 229917 - DNA, 324 bp, Unknown
  Bacterial polypeptide expressing nucleotide sequence isolated from the Sargasso Sea
aatgaagattgatgctgttgtcatgaggcatccaactcctggagcagcaaaacatcttacggaatttattgatgcaatcattattaatgctggtgatggtacccatgagcatccaacccaagcaatcctcgatatgatgagtctacatgaaaaatttggaagacttaagggtctcaaaattggcattattggtgacattcttcatagccgagtagctctaagtaatatttatggattaacaagtatggcggcagaggtaacaatttgtggtccacctaatttgattccaagtttccttcaagatttaaatgtgaactataatga

SEQ ID NO: 229918 - DNA, 393 bp, Unknown
  Bacterial polypeptide expressing nucleotide sequence isolated from the Sargasso Sea
catgcccggtatccccacgaccaaactcaaggacctcaagaactgcatcgaggcgcagcaattcgacgcggagatgctcaaggagctcttcgtcgtcgccgacgcgatggccgaggtcaagcccggatcgcccgagtcccggatgctccagggctttaacatggccaccctgttctacgaaccctcgacgcgcacgcgcctctccttcgagggagccatgggcaagctcggcggcgggatcctgtccaccgaatccgcgggcgagtactccagcgcggcgaagggcgagaccctcgaggacaccatccgcacggtggagggatacgcggacatcatcgtgctgcggcacttcagcgccggcgccgcgcgaagggcggcgaacgccgcggacac

SEQ ID NO: 229919 - DNA, 346 bp, Unknown
  Bacterial polypeptide expressing nucleotide sequence isolated from the Sargasso Sea
aatgcctcattccattgaacgtcttggggtaaaaaaatttaatgacatgaaaaaaggattagatggatgcgatattgtcatgatgttaagactacaaaatgaaaggatgcaaggctcctttctgccttctgccagagaatactatgaatactttggattaactcctgataaattaaaatttgcaaaaaaagatgctttgataatgcacccaggtcctatgaatagaggaatcgaaatagatacaaatttagctgacgatataaacagaagtgtaataaaagaacaagtcgaacttggtgttgcggtaagaatggcttgtttaaaaattttttgtaaaaaaatataa

SEQ ID NO: 229920 - DNA, 181 bp, Unknown
  Bacterial polypeptide expressing nucleotide sequence isolated from the Sargasso Sea
tgctaaaaaaaatgctttcgtcatgcatccaggtccaatgaaccgtggtgtggaaatagactcgaaacttgccgatgatgttacaaggagtttaatacaagagcaggttgctatgggggttgcagtacgaatggcatgcttagacttaattattaaaaatagagatgactttggtaactaa

SEQ ID NO: 229921 - DNA, 394 bp, Unknown
  Bacterial polypeptide expressing nucleotide sequence isolated from the Sargasso Sea
atggcaattaaaacagataaagctattaaaatttcccaaaaacatttgttaggtatccaagatctatcgatcaatgatgtgaacttaatactcgacgaagctcacacatttataaaagtaaatcagagtaaaaataaaaaaatagatgttttaagaggtaaaactcaaataaatctcttttttgaaccttctacaagaactcaaagctcttttgaattagcgggtaaaagattaggggctgacgtaatgtctatgaacattagtaactcagcaattaaaaaaggtgaaacattaattgatactgcaatgactttaaatgcaatgcacccagatataattgtggttagacatcaggactcaggtgcctgtaatttgctttcacaacaaagttaat

SEQ ID NO: 229922 - DNA, 284 bp, Unknown
  Bacterial polypeptide expressing nucleotide sequence isolated from the Sargasso Sea
aatgaatgaattaaaaaaaaataagaaaaaaagattcttttcttctcctataaaattatcatcaaatcatctattagccattgaaggaatgaaaaagtctgaaatccagaaattgattgaaagagctgattattttgcaaatttagatagacatactaatacaaaagtacttcaaggttacgtggtacttaatgtattttttgagaactcaactcgtacaagagtctcatttgaacttgctgcaagaagacttggtgcagaagttattaatatatcacttataa

SEQ ID NO: 229923 - DNA, 446 bp, Unknown
  Bacterial polypeptide expressing nucleotide sequence isolated from the Sargasso Sea
gagtgcattcggtgcagacattatcttatgtggtcctaagacattaatacctgatgaatttatcaattttttaaaaactcccgcgccaaatcaaatagaagatcctgttaaatcaagaggttccataacaatttctagatcattggaagaatcaataaaaattgcagatgcgatttttgttttaagacttcagaaagaaagaatgatggagaatttacttagtagcattaatacatatagtttggacttcggcttaaccccagagaaattatctttgaataataaagaaattccaattctccatcctggtccaattaatagagatattgaaataagtagtaaaatagtagatctatatcctaattgcttaattaataatcaagtttcaaatggtatccctataagaatggctttgctttatctattgcaaaaatataacaaataaa

SEQ ID NO: 229924 - DNA, 172 bp, Unknown
  Bacterial polypeptide expressing nucleotide sequence isolated from the Sargasso Sea
gcttttgtaatgcaccctggtccaatgaatagaggttttgagattgactcaaaacttgccgatgatgtaactagaagcttaatacaagaacaagttgcaatgggagttgctattcgcatggcttgtttagatattttaattaaaaatagagataatgtccttaagtcttaat

SEQ ID NO: 229925 - DNA, 501 bp, Unknown
  Bacterial polypeptide expressing nucleotide sequence isolated from the Sargasso Sea
aatggcaattaaatcaaataaagctattaaaatttcacaaaaacatctgttaggtatccaagatttatcagtgagcgatattaattatatactggatgagtctgaagcttttataaaattaaatcaaagtaaaaataaaaaaattgatgtgttaagaggtaaaacacaaataaacttattctttgagccatcaactagaactcaaagctcatttgaacttgctggaaaaagacttggagcagatgttatgtcaatgaatatgggcaactctgcaataaagaaaggtgaaaccttgattgatacagcaatgactttaaatgcaatgcatcctgatataattgtaatcagacatcaagactctggtgcttgtaatcttctatctcaaaaagttaattgtgttgtattaaatgctggtgatggtagacgtgagcaccctactcaagcattactagatgcattaacaattagaaatagaaaaaagaaaatccaaggattaaaaat

SEQ ID NO: 229926 - DNA, 271 bp, Unknown
  Bacterial polypeptide expressing nucleotide sequence isolated from the Sargasso Sea
attttacgaattcaaagagaacgaatgagtggaggattattgccttcaattagagaatatagaaatctttttgggatctcttcagaacgtttagctaaacataaaaaagaattagttattatgcatcctggccctatgaatagaggtgtagaaattgacagttctgttgcggatagtgatcaggcaataattcttgatcaagtgcttaatggtgttgcatcaagaatggcaatattgtatctccttctgggtggaaaggaaataaattaaa

SEQ ID NO: 229927 - DNA, 562 bp, Unknown
  Bacterial polypeptide expressing nucleotide sequence isolated from the Sargasso Sea
atggattttcgcggcgcacatataattagtgttaaacagttcgaacgtgaagatgtcgaaaaagttttcgaagttgcagattctatgggacctttcgcacaccgtgagctaattacaaaagttttagagggtgcaattctcggcaatatgttttttgagccaagcactcgcaccagagtcagttttggatgcgccttcaacctgctgggcggccatgttcgagaaaccaccgatattgaaacatcttcaatagtcaaaggagaatccttgtacgatacagctcgagtgctatctggttatagcgatgtcattgttatgcgacacccgcaagcgggctctgtagaggaattttcaaaagcgagtcgcgttcctgtgattaatggtggagatggtgctaacgaacatccttcccaagcgctcttggatctttatacgataaagaaagagctcgattcaaagtcgcttcaaatagatggtatgagcatcgctatggttggagatttaaagcatggaagaactgtgcactccctatctcaattacttcacctctacaaaagcatta

SEQ ID NO: 229928 - DNA, 192 bp, Unknown
  Bacterial polypeptide expressing nucleotide sequence isolated from the Sargasso Sea
gattgaataaacatgaaaaggagatcattattatgcatcctgggcctatgaatagaggcgttgaaattgatggatctgttgcagatagcaatcaagctataattttagaccaagtgttaaatggtgtcgcatctagaatggcaatactctatctactttgcggtggaaaagcaaatgttggagaaaattaaa

SEQ ID NO: 229929 - DNA, 829 bp, Unknown
  Bacterial polypeptide expressing nucleotide sequence isolated from the Sargasso Sea
ttatttgattatgctcaaaatattaaaaattcttggccaaaccttgagcagattggtcagggaaaaacagtttgcttattattttgggagccaagcacaagaactaagctgtcatttgaacatgctgcaaaatctttaggctttaaagttcttgatttttctcctgccagctcttctataaaaaaaggagaaaccctagaagatactattaaaacattgctagctttaaaggttgatggatttattattaggcatcctgaagacaaaatttcattaaaaattgaaaaattattgcctgataacatatttttcattaacgcaggtgacggtagttatgctcatccatctcaagctttactcgatgtctataccatgaaagaaaaatgtgaagatttcagcaaattaaaagttgcagctattggcgatattaaacattgtcgtattattggatcacaaatgactctcttaaatagacttggatgcaccgatatccaattttatggaccaaaggagttactggatgataatttatctccatcatttagtgagatcacagacggatgcatggaagatagagacatcctctatgtaatcagagttaaacatgagagattaaaagataatgagaatatagatatggaagcttttaagtcgacatatcaaattaacgaatcttttattgaaaaaactaaatttactggctcagttatgcaccctggaccaattaatattgatttagagatttctgatgctgttgccacatcagaaaaatcacttatttctacacaagtagaaaatggactctatattagagcggcattattaggcc

SEQ ID NO: 229930 - DNA, 242 bp, Unknown
  Bacterial polypeptide expressing nucleotide sequence isolated from the Sargasso Sea
aatgacagttgagagtggaaagaacaagctaaacaaactttcacagaaaaaccttcgtcattttattgatattgattcattaccaaaagaactattaaaagatattttagatttggctgaatcctttgctgtagtatcaggccaaccagttaagaaagttcctttgttaagaggtaaaactatagtaaatcttttctttgaatcttctaccagaacacgaacaacttttgaaattgctgcga

SEQ ID NO: 229931 - DNA, 417 bp, Unknown
  Bacterial polypeptide expressing nucleotide sequence isolated from the Sargasso Sea
aatgtctgaagatattgaaataccaaaaataagccaaaaacatctattgggtataaaatatttatctattgatgatatagacaaaatcttagaacttgcagttttttttaaacttaggaataaagaaaaaaacaaaaattatcctatacttactggtaggacaataataaatcttttttttgaaccttccacaagaacattaatttcatttgaaattgccgcaaaaagattaggtgctgacgttatcaatatgaatatcgaagggtcatccttacgtaaaggagaaacattatttgatacagcacaaacaatcggcgctatgaatcccgatctagttgtcatcagacatagtgaagataattcggcagaagaaatttcaaatcttttggactgccctgttgtaaatgctggtgaagg

SEQ ID NO: 229932 - DNA, 665 bp, Unknown
  Bacterial polypeptide expressing nucleotide sequence isolated from the Sargasso Sea
aaagggtgaatctatttttgaaactgtagatgcactcaatcttatgggtgtagatttatgtgtattaagacatcctgaatctgtaattagagaattagctgaatgtttgccgaaaatggttttcataaatgcaggagaagggtcaatttcacatccaacacaagcacttttagatataaagacaattatggatcataaagaaaatttagatggcctgaatattgttatcgtaggagatcttgatcattcaagagttacttcctcttttgttgaaggtgtatctaattttgatttaggatctctcacattttgtgggcatcctgaaatgtgtaccaagtatcaaaatcctaagattggtaagtatgaatctcatttagagtcagcccttgaaaatgcagatgttgtgatggctttgagaattcagtacgaaagatttgaaaaagagcttaatttagatcttgaaacatataaatcagagtatcaattgtcttctgaaaagcttgaatctgcaaaaggtgacgcaattgtaatgcatccaggaccggttaactatgttgaaataacagaagctgtttatgactcagaaaattctgtaattaggcaacaggtggcaaatggtgttgcgataagaatggcagtattatcaagatttttgggcagctaaa

SEQ ID NO: 229933 - DNA, 499 bp, Unknown
  Bacterial polypeptide expressing nucleotide sequence isolated from the Sargasso Sea
aatggcaattaaaaccaataaagctattaaaatctcacaaaaacatctgttaggtatccaagatttatcagttaatgatataaattatatccttgatgagtcagaagcttttataaaattaaatcagagtaaaaataaaaaaattgatgtgttaagaggtaaaacacaaattaacttattctttgagccatcaactagaactcaaagctcatttgaacttgctggaaaaaggcttggtgcggatgttatgtcaatgaatatgggtaactctgcaattaagaaaggtgaaactttgattgatacggcaatgactttaaatgcaatgcatcctgatataattgttatcagacatcaagactctggtgcctgtaatctattatctcaaaaagttaattgtgtcgtattaaatgctggcgatggtagacgtgagcaccctacccaagcattattagatgcattaacaattagaaatcgaaaaaaaaaaattcaaggattaaaa

SEQ ID NO: 229934 - DNA, 374 bp, Unknown
  Bacterial polypeptide expressing nucleotide sequence isolated from the Sargasso Sea
ggctgaggttaatattgttgctccatcaaatcttatgccaaaagaaattgaaaaatttggtgtaaaaacttttactgatatgaaaatgggtcttaaaaattgtgatattgtgatgatgcttagattgcaaaatgaaagaatgaccagttcatatctttcatcaaatagagagtactacgaatattatggattaacccctgacaaacttgatcatgcaaaatcagatgctctaattatgcatcctggtccaatgaatagaggaatagaaattgatacaagattagcagacgacataaataaaagtgtaattaaggaacaagttgaattaggtgttgctgtaagaatggcatgtttaaaaatattttgtgaataaa

SEQ ID NO: 229935 - DNA, 175 bp, Unknown
  Bacterial polypeptide expressing nucleotide sequence isolated from the Sargasso Sea
gaaaaattaaagtttgcgaataaaaatgctttgattatgcatcctggtccaatgaatagaggggtagaaatagatactaaattggctgacgatattaatgtaagtctagtaaaagaacaggttgaacttggagtagctgttagaatggcatgtttaaaattatattgtaaatgaa

SEQ ID NO: 229936 - DNA, 343 bp, Unknown
  Bacterial polypeptide expressing nucleotide sequence isolated from the Sargasso Sea
cttatgccaaaagaaattgaaaagtttggtgtaaacacttttactgatatgaaaaagggtctcaaagattgtgatattgtaatgatgcttagattacaaaatgaaaggatgagtagttcttatctttcatcaaatagagaatattatgaatattatggattaactccagacaaacttgatcatgcaaaatcagatgctctgattatgcatcctggtccaatgaatagaggaattgaaattgatacaagattagctgacgacataaacaagagtgtaattaaagaacaagtcgaattaggtgtagctgtaagaatggcatgtttaaaaatattttgtgaataaa

SEQ ID NO: 229937 - DNA, 509 bp, Unknown
  Bacterial polypeptide expressing nucleotide sequence isolated from the Sargasso Sea
aatgcttgaaaacgttaaaatccctaaaatctctcaagcccatctgcatggcataaaaaatctcagcattgaggatataaataatattttagaactcagtaaaattttcaaagagcacaacaaggaaaaggataaaaaaataccgatcttaaaaggtagaacaattataaatcttttttttgaaccctctacaagaacactaatctcttttgaaatagctgctaaaagattaggcgctgatgtaattaatatgaatattgaaggatcttcattaagaaaaggtgaaagtttatttgatactgctcaaactttaggagcaatgaaccctgatcttgtaattatcagacatggagaaaatgatgcctcaaaagagattgctaaaatattagaatgtcctgttataaatgctggagaaggtgttaatgaacaccccacacaagcattgcttgatgcttatacaatcatgaatcacaatcgaaagcttaatgacattacagtttcaatatgtg

SEQ ID NO: 229938 - DNA, 335 bp, Unknown
  Bacterial polypeptide expressing nucleotide sequence isolated from the Sargasso Sea
aaagaaaattgaaaagtttggtgttaatacttttactgacatgaaaaagggcctcaaagattgtgatattgtaatgatgcttagattacaaaatgaaagaatgagtagttcatatctttcgtcaaatagagaatattatgaatattatggattaacgccagacaagcttgatcatgcaaaatcagatgcgttaattatgcatcctggtccaatgaatagaggaattgaaattgatacgagattagcagacgatataaacaagagtgtaattaaggagcaagttgaattaggagttgctgtaagaatggcatgtttaaaaatattttgtgaataaa

SEQ ID NO: 229939 - DNA, 793 bp, Unknown
  Bacterial polypeptide expressing nucleotide sequence isolated from the Sargasso Sea
atggataaaactgaatattattacaataatattcatttacttggcattcaaggaatgcaaaaaaatacaatttcatcaatattagagcgagctaaattttttaataataaaaaaaataataagaaaaactctatcttaaaagatcatttagttataaatttattttttgaaaactcgacccggacgaaggcatcttttgaaattgctgctaagctaatgtcagcagatatactaaatatttctgtatcaacttcatcaattaaaaagggagaaacattaattgacactgcatcaacgctgaatgcaatgcatcctgactttttaattttaagacatcctaattcaggagctgccgaaatgctctcaaaacatgttcaatgtagtataattaatggtggtgatggaaggcatgaacatccaacgcaagctttattggatgctgcagtcattattgacaaaaacaaaagtcttgaaggtttaaaaattataatatgtggtgatatttcaaatagtagagtagcaagatctaatatttatttgttaacaactatgggagctgaagtaagtgtggtagggccgccaactttaatcccaaaaaatatccagaatatgggtgttaaagtatttaataatttaaatacaagtctccagtctgcagatattataatgatactccgtctacagagtgaacgaatgaatggatcagaaactccaagcaagagagagtattataatttctttggaattaatgaagaaaatataaaactagctaaaaacgatgtttttgttatgc

SEQ ID NO: 229940 - DNA, 256 bp, Unknown
  Bacterial polypeptide expressing nucleotide sequence isolated from the Sargasso Sea
ttaagattacaaaatgagagaatgactagttcttatctttcatcaaatagagaatattatgaatattacgggttaacaactgataaactagaatatgctaaacctgatgcattaattatgcatcccggtccaatgaatagaggtatagagatagatacaatattagctgatgatataaataaaagtgtaattaaagagcaagtagaacttggagtggcggttagaatggcatgtttaaaaatattttgcacataaa

SEQ ID NO: 229941 - DNA, 862 bp, Unknown
  Bacterial polypeptide expressing nucleotide sequence isolated from the Sargasso Sea
aaaaaaaattttttagataaagtttttgatcttactgcaaccatcagcaatgattggcctaatgttgaacaaataggtgcaggcaaaacaatatgtcttttattttgggaaccaagcacaagaactaagctttccttcgagcatgctgcgaaaaaacttggttttaatgttttagatttttcgcccgagcattcttcagtaaaaaagggtgaatcgtttgaagacacaattctaactctgcttgcgatgcaagtagatggttttattatcagacatcccgaagatcatatttccaaaacaatttcatctatgttgccagagaatgtcttttatattaatgctggagacggaaatcacgcgcatccaactcaagctatgttggatgtatttactatgaacgagaagtttaatgacttatctaatcttaaagtaacaattctaggtgatgtaaatcactcaagagtgattccatctcaaatagagcttttaaaaaaatattcatgttccgacattaattttattggacctgaatcactcatttcaaagaaattctctccatcattttcggaaattcccaaagattttcttattgatagagatattctattcatcctaaggatacaaaaagaaagatttaaagatgatgatgctctagatgaaacaaatttcatcgaaaattttcaagttaatgaagagttcattaaaaatactggttttaatggttatctaatgcatccaggaccaatgaacatcgatgcagaaattaccagaaatgtagctaatggcaagaattctctagttttaaagcaagttgaaaatggactgtacctgagaacagctttgttaagtcttatgctttaag

SEQ ID NO: 229942 - DNA, 262 bp, Unknown
  Bacterial polypeptide expressing nucleotide sequence isolated from the Sargasso Sea
gatgatgcttagattgcaaaatgaaaggatgaccagttcatatctttcatcaaatagagagtactacgaatattatggattaacccctgacaaacttgatcatgcaaaagcagatgctctaattatgcatcctggtccaatgaatagaggaatagaaattgatacaagattagcagacgacataaataaaagtgtaattaaggaacaagttgaattaggtgttgctgtaagaatggcatgtttaaaaatattttgtgaataa

SEQ ID NO: 229943 - DNA, 385 bp, Unknown
  Bacterial polypeptide expressing nucleotide sequence isolated from the Sargasso Sea
aatggcaattaaaacaaataaagctattaaaatttctcaaaaacatttgttaggtattcaggatttatcaattaatgatgttaatttaatacttgatgaagcacactcatttataaaagttaatcaaagtaaaaataaaaaaatagatgttttgagtggaaagactcaaatcaatctattctttgaaccttcaactagaactcaaagttcatttgaattagctggaaaaagacttggagcagacgttatgtctatgaatataagtaactctgcaattaaaaaaggtgaaacattaattgatacagctatgactttaaatgcaatgcatccagacataattgtaattagacatcaagactccggggcttgcaacttgctttcacaa

SEQ ID NO: 229944 - DNA, 406 bp, Unknown
  Bacterial polypeptide expressing nucleotide sequence isolated from the Sargasso Sea
gggcgcccgcgtacgcctgatcgcgccggcgacactgatccccataggcgtcgaacaacttggtgtcgaagtgttccatgacatgaccctgggcctgatggattgcgatattgtgatgatgctgcggctccaacaggaacgcatgcacggtagcttcttcccctctgtgcgcgaatacttcgccttcttcggcctcgattacatgaagttggccaacgccaaggcagacgccttaatcatgcatccgggccctatgaaccggggcgttgagatcgacgcggaggtagccgatgactttggccgcagcgtcatccgcgagcaagtcgaaatgggcgtggccgtgcgtatgggctgcctagaaatcctgactgaaaacctcgaccgtaccgaagcgaggaatatatag

SEQ ID NO: 229945 - DNA, 352 bp, Unknown
  Bacterial polypeptide expressing nucleotide sequence isolated from the Sargasso Sea
tccatcaaatttaatgccaaaagatgtagataaacttggagttaatagtttttcagatatgaaaaaaggattgaaagattgtgatattgttatgatgcttaggcttcaaaatgaaagaatgaccagctcttttctttcatctaatagagaatattatgaatattatgggttaactccagataaattagaatttgctaaaggagatgctctaataatgcatccgggtccaatgaatagaggaattgaaattgacactaaacttgcagatgacataaataaaagcgttattaaagaacaagttgaacttggtgtggcagtgagaatggcttgtcttaaaatattttgcgaatga

SEQ ID NO: 229946 - DNA, 402 bp, Unknown
  Bacterial polypeptide expressing nucleotide sequence isolated from the Sargasso Sea
caaatatttacctattaactatgcttggtgctgaagtaaatttagttgcccctacaaatttaatgccaaaagaaatagaaaaatttggagttaatacttttactgatatgaaaaaaggtcttaaagattgtgacatcgtaatgatgttaagattacaaaatgagagaatgacaagttctttcttatcatcaaacagagaatattatgaatattacggattgacacctgacaaactagatcatgctaaacctgatgcattaattatgcatcctggaccaatgaatagaggaattgaaattgataccagattagctgacgacattaataaaagtgtaattaaagaacaggtagagcttggtgttgcggtaagaatggcatgcttaaaaatattttgtgaataaa

SEQ ID NO: 229947 - DNA, 1015 bp, Unknown
  Bacterial polypeptide expressing nucleotide sequence isolated from the Sargasso Sea
atggattttagcggtacccacatcctttctatagatcagttcgatcgtaaaggcatagaaaaattattttctgttgcagacaaattagaacctttcgcctccaaagaaaaaataacaagagtgcttgaaggcgcgatccttgggaatatgttctttgaacctagcacaagaactaggataagctttggagcttctttcaacttacttggaggaaatgtaagagaaattacagaagtgggaagctcttccctagctaaaggtgaatctcttgcagatacagctcaagttcttagtggatatagcgatattatagttatgcgacatcctgaaaatggatctgtaaaacgctttgcagattcaagtagagttccggtaataaacgctggagatggatcaaatgagcatccctctcaagctcttctagatctctatactattcaaaaagaactgtcagaaaataataaaactttagatggccttagaatcgccttagtgggagatttgaaatatggaagagctgttcactcattatgtaaaattctctctttttactctaatgtaaaattaaatctcatttctcctagagaactaaaacttcctccggagttattaaatcagctaaatgaatctggtctaagtctatctgagactgagaatcttgaagagggaatatctgaagtcgatattatttatataaccagaattcaagaagaaaggtttaagagcaaatcagatgccaataaatacagaggactactaagccttaaccagtctatttatactgctaattgtgaacctaataccgtaattttgcatcctttacccagagactctagaagtgatgcaaatgaattagatagcgacttatacgaaaatcccaatctagcaatttttaggcaggcagataatggcgttgtaatcaggatggccatgtttgctttagttctgggtatagaggacaaaattgaggaatcttcaaaattagtcaactggaatgtaggtttggataattagg

SEQ ID NO: 229948 - DNA, 481 bp, Unknown
  Bacterial polypeptide expressing nucleotide sequence isolated from the Sargasso Sea
aatggctaaaaatctaatatctatttctgacttatctaaaaatgaaattttagaaattattaagttttctgatagttttattgatgatgaaggtaattttagaaaagaggatctttttccagataagaccattgcaaatgttttttgtgaaccaagcaccagaactaaatcttcattctctatagctgcatcaaatttaggatgttctgttttagattttgatgtaactaattcttctatacaaaaaggagaaactatctatgagactattgatgcattacatctaatgggtgttgatttatgtgttttgcgtcattctgactcggtgataaaggatcttgcagaatatttaccaaatatgacttttgtaaatgcaggcgaaggtatgttgtcacatccaacccaaaccttgcttgatttaaagacaatattggataacaaaaaaacgatagatggactaaaaattgtaattgtagggtga

SEQ ID NO: 229949 - DNA, 284 bp, Unknown
  Bacterial polypeptide expressing nucleotide sequence isolated from the Sargasso Sea
agttaaagattgtgacatagttatgatgttaagacttcagaatgaaagaatgacaagttcttttctatcttctaacagagaatactatgaatattacggtttaacacctgacaaaataaaatatgctaaggaagatgcgcttataatgcacccaggtccaatgaacagaggaattgaaattgatactaacttagcagacgatattaataaaagtgtaattaaagaacaagttgaattaggggtagcggtaagaatggcttgcttaaagatattttgtgaataaa

SEQ ID NO: 229950 - DNA, 262 bp, Unknown
  Bacterial polypeptide expressing nucleotide sequence isolated from the Sargasso Sea
agaaagaatagttggaaaaattatgccaaatcaaaagacttattttaaaaagtatggattagattacaataaacttaaatatgctaaaaaaaatgctttcgttatgcatccaggtccaatgaatcgtggtgtagaaatagactcgaaacttgccgatgacgtaacgaggagcttaatacaagaacaggtcgctatgggtgttgcagtacgaatggcatgcttagacttaattattaaaaacagagatgactttagcaagtaa

SEQ ID NO: 229951 - DNA, 466 bp, Unknown
  Bacterial polypeptide expressing nucleotide sequence isolated from the Sargasso Sea
atggcagctaaaaccaaagctattaaaatttctcaaaaacatcttttaggaatccaagatctatcaattattgatgtaaatctaattttagatgaggctagtaaatttattgaattaaataaaagtaaaaataaaaaattgagtatattgaatggaaagactcaaataaatttgttttttgaaccttcaactagaacacaaagttcatttgagcttgcaggtaaaagattaggtgctgatgtaatgtcaatgaacattacaaattcagctattaaaaaaggtgaaactttaattgatactgctatgacattaaatgcaatgcatcctgatataatagtgataaggcatcaagactctggtgcatgcaatcttctttcacaaaaagttaactgctcagtgcttaatgctggagacggaagaagagaacatcctacacaagctttacttgatgcattaacaattataa

SEQ ID NO: 229952 - DNA, 223 bp, Unknown
  Bacterial polypeptide expressing nucleotide sequence isolated from the Sargasso Sea
aatgcaaatttggcctcataaacatatccacacactagctaatttttcaattaaagattatgagtcagtatttgaattagctaatagatttgatgcactaaagaatgcaggaacaaaaaagataccggccttacaagggactttggtaacatctttattttttgaagctagtacaagaacaaaaaatagttttgagcttgcagcaaaaagacttttctgctga

SEQ ID NO: 229953 - DNA, 363 bp, Unknown
  Bacterial polypeptide expressing nucleotide sequence isolated from the Sargasso Sea
aatggcaaatgtaaaaaaagctattaaaatctcaaaaaaacatctcttaggaatccaagatctatcaatttctgatgtaaactttattttatctgaggcaaaacaatttattgatctaaataaaagtaaaaataaaaaattagatattttgagaggcaaaactcaaattaatttattttttgaaccttcaacacgtacacaaagttcatttgaattagctgggaaaagattaggtgcagatgttatgtcaatgaatttaaataattctgcgataaaaaaaggagaaacgctaatagataccgcaatgacgctcaatgcaatgcatcctgatataatagtggtcagacatcaagattctggtgc

SEQ ID NO: 229954 - DNA, 894 bp, Unknown
  Bacterial polypeptide expressing nucleotide sequence isolated from the Sargasso Sea
acttaacgtcactcaaggaattatcaaagaatgaaatccttgaattattagatttagcagataattttattgattcagaaggctccattagaagagatctactttttccagataagaaagttgttaatattttttgcgaaccaagcactcgaactaaaatctcatttgagatagctgcttctaatctaggatgccaaataatcgattttgatttgagctcttcctctctagagaaaggtgagactctcaaagatactattgataatttatcaaagatgaacattaatctttgtgtcttaagacataaagactctgttattcatgaattaatagataaaacagattctatggtctttgtaagtggaggagaaggctctatttcccatccatctcagggacttttagacataatgacagtaaggcataggaaggatctagataattcaaatattttgattgttggcgacttggaccattcaagagttttccagtctttcattgatgggatggccaactttgattctaaaattactttatgtggacctaaagagctgtgcaaagatgttatagacgactctaatcttaattatgaagaagatcttaacaaagcacttaaaggccaggatgttgtgatggctcttaggattcagcacgaaagatttgaagacaagaaaaaccttgataaggaaagctatcttagtaactatcaaattaataatgaaaaattacagattgctaatgatgattgcatagtcatgcatcctggacctgtaaatcaaggtattgagatctcagaggatgtttataattctgctaactctgtaatattagatcaagtggctaatggcgtcgctatgagaatggctattttaataaagtatctatctcagtagt

SEQ ID NO: 229955 - DNA, 468 bp, Unknown
  Bacterial polypeptide expressing nucleotide sequence isolated from the Sargasso Sea
aaaattcattagatgggttaaagatagtaattgtaggtgatctcgaccattcacgagttacctcatcttttgtagaaggcatatcgaattttgaagttgattctttaatttttagtgggcatcctgaaatgtgcacaaaatatcaaaatccagatttaggtatttatgagccagatcttgataaagctctgcaagatgcagatgttgtgatgacacttagaatccaatatgaaagatttgaagaagatttagatttagacttagaaagttataaaaattcctatcaactttcaattgaaaaacttggatgtgcaaaagctgatgcaattattatgcatcccggcccagttaattatgttgaaatcactgagtctgtctatgattcagagaactccgtaatcagggaacagattgcaaatggggttgctataaggatggccgttttatctaattttttgagcagttaat

SEQ ID NO: 229956 - DNA, 907 bp, Unknown
  Bacterial polypeptide expressing nucleotide sequence isolated from the Sargasso Sea
atggctaataatcttttatcgataaacgatctttcaaaaaaagacctactgcagcttatagaattttcaaataatttcattgatgatgaaggcaactttcggaaagaaaatctttttccagataaaatagttgcaaatgttttttgtgagccaagtacacgaacaaagtcatcttttgcaattgctgcaaacaatctaggatgctcagtcattgatttcgatattgaaaattcctcagttcaaaagggagaatctatttttgaaactgtagatgctctcaatcttatgggtgtagatttatgtgtgttaagacatcctgattctgtaattagagaattggctgaatgtttgccaaaaatggttttcataaatgctggagaaggatcaatttcacacccgacacaagcacttttagacataaagacaattatcgatcataaagaaaatttagatggcctgaatattgttatcgtaggagatcttgatcactctagagttacttcctcttttgttgaaggtatatctaattttgatttaggatcactaatattttgtggacatcctgaaatgtgtaaaaagtatcaaaatcctaagattggtaaatatgaatctcacttagagtcagcacttgaaaatgcagatgtcgtgatggctctgagaattcagtatgaaagatttgaaaaagagcttaatttagatctcgaaacatataaatcagagtatcaattatcttctgaaaagcttgagtctgcaaaaggtgatgcaatagtaatgcatccaggtccagtcaattatgtagaaataacagaagctgtttatgattcagaaaattctgtaattaggcaacaggtggcaaatggtgttgctataagaatggctgtattatcaagatttttgggaagctaaa

SEQ ID NO: 229957 - DNA, 901 bp, Unknown
  Bacterial polypeptide expressing nucleotide sequence isolated from the Sargasso Sea
atgagacacttaacctcactcaaggaattatcaaaaaatgaaatccttgaattattagatttagcagataattttattgattcagaaggctctatcagaagagacccactttttccagataagaaagttgttaatattttttgcgagccaagcactcgcactaaaatctcatttgagatagctgcttctaatctaggatgccaaataatcgattttgatttgagctcttcttctctagaaaaaggcgagaccctcaaagacaccattgataacttagcaaagatgaacattaatctttgtgtcttaaggcataaagactcagttattcatgaattaatagatcaaacagattctatggtctttgtaagcggaggagagggttctatttcccatccatctcaaggacttttagatattatgacagtaaggcataggaaggatttggataattcaaatattttgattgttggcgacttggatcattcaagagttttccagtctttcattgatgggatggctaactttgattcaaaaattactttatgtgggcctaaagagctgtgcaaagacgttaaagattcctctaatcttaattatgaggaagatcttaacaaagcacttaaaggtcaggatgttgtaatggctcttaggattcagcatgaaagatttaaagataagaaaaaccttgataaggaaagctatcttagtaactatcaaattaataatgaaaaattacagattgctaatgatgattgcatagtcatgcatccaggacctgtaaatcaaggtattgagatctcagaggatgtttataattctgctaactctgtaatattagatcaagtagctaatggcgtcgctatgagaatggctatcttaataaagtacctatctcagtagt

SEQ ID NO: 229958 - DNA, 304 bp, Unknown
  Bacterial polypeptide expressing nucleotide sequence isolated from the Sargasso Sea
ttttctaacatgaaaaaaggattaaaggattgtgatattgtaatgatgctaagattacaaaatgaaagaatgacaagttcatttctatcttccaacagagagtactatgaatattatggactaactccggataaacttgatgaagctaaaaatgatgctcttataatgcatcctggtccaatgaatcggggaatagaaatagatacaaaattagcagacgatataaataaaagtgtaatcaaagaacaagttgaacttggtgtggccgttagaatggcttgtttaaaaattttttgcgaataat

SEQ ID NO: 229959 - DNA, 550 bp, Unknown
  Bacterial polypeptide expressing nucleotide sequence isolated from the Sargasso Sea
catggagtttcttggcaatcatatcctctccatagatcagtttgacaaagacgatatcgtaaaagttttttcaatagctgaaaaaatgatcccatatgctaaccgcgagaaaaaaactaaagtccttcagggagctattctgagtaatatgttcttcgaagccagcacaaggacaaggattagctttggaagtgctttcaatcttttgggtggagaggtaagagaaactaccggcattgaagcttcctctctcgcaaagggtgagtctttatacgatactgccagagtattgagcggctatagcgatttaattgtcatgaggcatcctgaaaaaaattctgtccaggaattttcagaggcctcaagagttcctgtaatcaatgcaggggatggagaaaatgaacaccctagtcaagctttattagacttattcaccatcaaacttgaactcgaatctaaaggtaagtccatcgacggaagcaacattgctcttgttggagatttaaaatttggaagagccgttcattctctctgtaaagcattaaattta

SEQ ID NO: 229960 - DNA, 892 bp, Unknown
  Bacterial polypeptide expressing nucleotide sequence isolated from the Sargasso Sea
catgaataaaatttccacagttgataatctagacaaagatttattaatctctttatttgattctgctcaaaatattaaaaattcttggccaaaccttgagcagattggtcagggaaaaacagtttgcttattattttgggagccaagcacaagaactaagctgtcatttgaacatgctgcaaaatctttaggctttaaagtgcttgatttttctcctgccagctcttctataaaaaaaggagaaaccttagaagatactattaaaacattgctagctttaaaggttgatggatttattattaggcatcctgaagacaagatttcattaaaaattgaaaaattattgcctgataacatatttttcattaacgcaggtgacggtagttatgctcatccatctcaagctttactcgatgtctataccatgaaagaaaaatgtgaagatttcagcaaattaaaagttgcagctattggcgatattaaacattgtcgtattattggatcacaaatgactcttttaaatagacttggatgcacagatattcaattttatggaccaaaagagttactggatgataatttatctccatcatttagtgagatcacagacggatgcatggaagatagagacatcctctatgtaataagagttaagcatgaaagattaaaagacaatgagaatataaatatggaagcttttaagtcgacatatcaaattaacgaatcttttattgaaaaaactaaatttactggttcaatcatgcaccctggaccaattaatattgatttagagatttctgatgctgttgccacatcagaaaaatcacttatttctacacaagtagaaaatgggctctatattagagcggcattattaggtcttatttcttaa

SEQ ID NO: 229961 - DNA, 250 bp, Unknown
  Bacterial polypeptide expressing nucleotide sequence isolated from the Sargasso Sea
attgcaaaatgaaagaatgacaagttcatttctctcatcaaatagagagtattatgaatattacgggcttacaccagataaattagagagagcaaaaagtgatgcaattattatgcaccctggtcctatgaataggggaatagaaatagatacaaaattagctgatgatattaataaaagtgtaattaaagaacaggttgaattaggtgttgctgtaagaatggcctgtctaaagttattttgtgaatga

SEQ ID NO: 229962 - DNA, 196 bp, Unknown
  Bacterial polypeptide expressing nucleotide sequence isolated from the Sargasso Sea
tggcttaaccccagagaaattatctttaaataaaaaagaaattccaattctacatcccggtcctattaacagagatattgaaattagcagcaaagtggtagatcaatatcctaattgcttaattaataatcaagttgcaaatggcatccctataagaatggctttgctttatctattacagaaacacaaaaagtaa

SEQ ID NO: 229963 - DNA, 199 bp, Unknown
  Bacterial polypeptide expressing nucleotide sequence isolated from the Sargasso Sea
ttcaatgaatatcaattatctcaagaaaaacttgcattatctaagcctgatgcaatcgtaatgcatccagggccgatgaatcgaggaattgaaatttcaaatgaagttgctgacggaaaacaatcggttatcttgaagcaagtagaaaatggggtggccgttcggatggcagttctatcagagatattgaagcaataaa

SEQ ID NO: 229964 - DNA, 1458 bp, Unknown
  Bacterial polypeptide expressing nucleotide sequence isolated from the Sargasso Sea
caagggggcaattgatgcagcaaatattctcaagccagcattagctagaggcgaattaagagcgataggggcaactacactaaatgaatatcaaaaatactttgaaaaagataaagctttagaaaggagatttcaaaaagttttggttgaagagccagatattgatagcgctatatcaatcttaagaggaattaaagaaagatatgagtcacatcacaaagttcaaattaaagatgaagccgtaattggttctgtaatgttatcgaatcgatacataagtaatagatttcttccagataaagcaattgacttaattgacgaggcaggatcaaaattgagaattgaaatgaattctaagccagaagaattagatgatctggatagaagaatcagacaaattgagattgaaattgttgcaataaaaagagaaaaagataaaaataaattggataagttaaatcaagaattggcgaatttgaaagaaaaaaggaatcaaattttctcaaaatggagtcaagaaaaagaattacttgataatattcagcaacaaaaacttgagatagagaactataaaaaaaaatcagaacgcgcagagagagatggagattatggattagtagcagagataaggtatggtaagattaaagatgcgcaggaaaagatcaaaaatctgaatgatgaattatcaaaattccaaaactctaattctttaattagagaagtggtaacatatgatgatatagctgaagtagtttctaagtggacagggattccggttaataaaatgttggaatctgataaagaaaaattattaaacttagaaaatgaaattcacaaaagaataataggtcagcaaaaccctgtaaatctagttagcgatgccataagaagaagtcgaacgggtttgcaagacatcaataaacctatcgggagttttttatttctagggacaactggagttggtaaaactgaggtcgcaaaagctttagctgaagttttatttaacaacgaaaataatttaactagaattgatatgagtgagtatcaggaatcgcatgcaataagtcgattaattggatctcctcctggctatgtaggttatgatgaaggtgggcaactaacagaagcggttagaaataaaccttattctgttatactgttggatgaaattgaaaaagctcatccagatgcttttaatgtcctgcttcaagttcttgatgaaggcaggttaactgataacaaaggaagagttgctgactttaaaaactcggtcattataatgacaagtaatattggaagcgataaaattttaaatgcttttgaatcaaattctagttttgaagttgcagaaaaaaaatctaaagaagcagttttgcaagaattaagattaaaggtcagacctgagtttttaaatagaattgatgatatagttcttttttcacctttaacaaaaaaaga

SEQ ID NO: 229965 - DNA, 766 bp, Unknown
  Bacterial polypeptide expressing nucleotide sequence isolated from the Sargasso Sea
atgaaacagaaacatcttcttggtttagaaaactttcctgctagtgatattgataaaataatagaaacatcttttagtttcaaagagatacttgatagacctataaaaaaagtaccttccttacagggtaagactatagtaaatcttttttttgaaaattctactcgtaccagaataagttttgaattagcacaaaagcgccttagcgctgatactgttaacttttctgcttcctccagtagcttaaagaaaggggagagctttaaagatactgtacaaaatattgaggctatgaaaattgatgccgtagtcatgaggcatccaagccctggctcttcagttcatttaacaaaatatattaaatctatagtaataaatgctggagatggcgctcacgaacatccaactcaagctattcttgatatgatgagtttaaaagagaaatttggaaaaattcgaggtcttaaaataggaattattggagatatagctcatagccgtgttgctagaagtaatatttatggtttaataaagatgggcgcagaagtaatggtttgcggatcaccaactctaataccaattgaaataatctcattaggtgtaaaagtttcgtataatctcgatgaggtattggattgggcagatgcaattaatgttttaagaattcaattagaaagaatgaatagaggtttattcccatcagttagagaatatcgaaaattatttggaataacagatgaacgattgcaaaaacataataaagaaa

SEQ ID NO: 229966 - DNA, 562 bp, Unknown
  Bacterial polypeptide expressing nucleotide sequence isolated from the Sargasso Sea
gcctgatacacatctgattagtgcaggcgagtcttcggtatcacaccctacacagggtttgctagaccttctgaccatcagacaagaaaagggatcttttgaaggattaaaagtggtaatcatgggagatatatctcattcgagagtagcaaggtcactgactgaagggctcaaaatcatgaatactggaaatgtaacattgatctccccagacgaattcaagcctgatatggccaatttttcaaatacacaattcgaagaagacccaaaacaaggcctctgtgatgctgatgtgattgttacacttcgtgttcaaaaggagcgaattgaatcggatgagagcagcctatcactcgaggaatattcaaatgaatatcaattatctcaagaaaaacttgcattatctaagcctgatgcaatcgtaatgcatccagggccgatgaatcgaggaattgaaatttcaaatgaagttgctgacggaaaacaatcggttatcttgaagcaagtagaaaatggggtggccgttcggatggcagttctatcagagatattgaagcaataa

SEQ ID NO: 229967 - DNA, 905 bp, Unknown
  Bacterial polypeptide expressing nucleotide sequence isolated from the Sargasso Sea
tagtaaagattttatctatgatttttttacagaaacaaaaaaaatcaaatattcccctgaaacatctaaaaactttaatcatgaaaaaaatatttgtgcattattttacgaaaactctactaggacaaagttaagttttcaaaaagcttgtagcaatataaatgctgtttttcataatcttgatatacaaacttctagtgttaataaaggtgaaactttttacaacacaattaaaacaattaatagtattggaatggatcttattattattagacattcatcctctggtgcgccttattttctagcaaaaaatacatattcaagcgttataaatgctggagatggtgctcatgcacatcctacccaaacactatcggatctttttacaatttttgaaatctctaataaatttgaagatttagaagtttctataataggggatattttatatagcagggttgctagatcaaacatacttggattgcttaaaatgggatctagaataaacataattggtccaagagaattagtacctgaggatatggttaatttgtactccacaattgatagatcatacaagaataaaattagttattacgaagattttgaaaaacctattttaagttcagattttttaattgccttacgtattcaaaaagaaagattcgataaaaatacagatttgaattttgacacttataaaactaagtggaagattgacttagatgttttgagaaaccttaaaagagaagatgtatttataatgcatcctggaccagttaacgaggaagttgaactttctcatgagttagttcattcagaaaactcattaatttcgaaacaagttgaaaatggagtatttgtcagacaaaaaatcatggagaaattattaaatgaaaaatagt

SEQ ID NO: 229968 - DNA, 406 bp, Unknown
  Bacterial polypeptide expressing nucleotide sequence isolated from the Sargasso Sea
agatcaaatattattttactaaatatgctaggagcagaagttaatattatgctcccttcaaatttaatgccaaaagatattgaaaaacttggagttaatagtttctcagatatgaaaaagggattgaaagattgcgatatagtaatgatgctaaggcttcagaatgaaagaatgaccagttcatttctttcatcaaatagagaatattatgaatattatggattaactccagacaagctagactttgcaaaagatgatgctttgataatgcatcctggaccaatgaacagaggtatagagatagatacgaatttagcagatgatataaacaaaagtgtaattaaagaacaagttgaacttggggtagcagtaagaatggcatgccttaaaatattttgtgaataat

SEQ ID NO: 229969 - DNA, 901 bp, Unknown
  Bacterial polypeptide expressing nucleotide sequence isolated from the Sargasso Sea
atgagacacttaacgtcactcaaggaattatcaaagaatgaaatccttgaattattagatttagcagataattttattgattcagaaggctccatcagaagagatccactttttccagataagaaagttgttaatattttttgtgagccaagcactcgaactaaaatctcatttgagatagctgcttctaatctaggatgccaaataatcgattttgacttgagctcttcatctctagaaaaaggcgagacactcaaagataccattgataatttagcaaagatgaacattaatctttgtgtcttaaggcataaagactcagtcattcatgaattaatagataaaacagattctatggtctttgtaagtggaggagaaggctctatttcccatccatctcagggacttttagacattatgacagtaagacataggaaggatctagataattcaaatattttgattgttggcgacttagaccattcaagagttttccagtctttcattgatgggatgtccaactttgattctaaaattactttatgtgggcctaaagagctgtgcaaagatgttatagacgactctaatcttaattatgaagaagatcttaacaaagcacttaaaggccaggatgttgtgatggctcttaggattcagcatgaaagatttgaagacaagaaaaaccttgataaggaaagctatcttagtaactatcaaattaataatgacaaattactaattgctaatgatgattgcatagtcatgcatcctggacctgtaaatcaaggtattgagatctcagaggatgtttataattctgctaactctgtaatattagatcaagtagctaatggtgtcgctatgagaatggctattttaataaagtatctatctcagtagc

SEQ ID NO: 229970 - DNA, 892 bp, Unknown
  Bacterial polypeptide expressing nucleotide sequence isolated from the Sargasso Sea
catgaataaaatctccacagttaatgatctagacaaaaagtttttagaatctttatttgaatctgcacaaaatattaaaaaatcttggccaaatctagaacaaataggtaaaggaaagactgtttgtttgttattctgggagcctagcaccagaacaaaactgtcatttgagcatgctgcaaaatctttgggttttaatgtacttgatttctcgccttcaagttcttcaatagaaaaaggtgagactcttgaagatacaattaagacattattagctttgaaagttgatggtttcatcattcgacacccagaagataagatttcattacaaattgaaaaactactacccgaagatatattttttattaatgcgggtgatggtagttacgctcatccatctcaagctttattggatgtctacactatgaaagataaatgtgaagattttagtgaattaaaagtagcagctattggagatattaagcattgtcgaattatagggtctcaagtgactcttttaaatagactcggttgtactgacattcagttttatggaccaaagcagctgctggatgataatttatcgccatcatttagtgagatagcagataattgcatggaagatagagatattctctatgtaattagagtaaaacatgaaagattaaaagctaatgaaaatatagatatggaatcttttaaatctttataccaaattaatgaatcttttattaaaaaaaccaaatttaatggctcaattatgcaccctggtccaattaatgttgatctggagatctctaatggtctggctacatcagaaaaagcacttatttctactcaagtagaaaatggactttacattagagccgcattattaagccttatttcatag

SEQ ID NO: 229971 - DNA, 408 bp, Unknown
  Bacterial polypeptide expressing nucleotide sequence isolated from the Sargasso Sea
taactactatgggagcagagataaaggtttgtggccctccaaacttgacaccaaattttcttcaatatatggatgtaaagtataattctagcttagacgaggtaattgaatgggcagatgctttaaatgtacttcgtatacaaaaagagaggatggggcgtgggttaataccatcaactcgtgaatatagagcaacatttggaatcactgacgaaagattgaaaaagcataaaaaggagattgttattatgcatcctgggcctatgaaccgaggagttgagattgatggggtcattgctgatagcgaccaagctatcattctggatcaagtattaaatggtgtggcatcaagaatggcaattctctaccttctctgtggaggtaaagtcaaccatggagatgattaaa

SEQ ID NO: 229972 - DNA, 487 bp, Unknown
  Bacterial polypeptide expressing nucleotide sequence isolated from the Sargasso Sea
aatggctataaacaataacgctattaaaatttctcaaaaacacctattaggtatccaagatctttctatttcagatgtaaaacttatcttagatgaagcaaagaaatttatttcacttaataaaagtaaaaacaaaaagttagatattcttagaggaaaaactcaaataaatcttttttttgaaccttcaacgagaacccaaagttcttttgaactagctggaaaaagacttggtgcagatgtgatgtcgatgaatataactaattctgctattaaaaaaggtgaaacattaatcgacactgcaatgacactaaatgcaatgcatccagatataattgtagtaagacatcaagatagtggtgcgtcaaatcttctttcacagaaagtaaattgttcagttttaaatgctggtgatggtagacgtgaacatccaacacaagctttacttgacgcgcttacaataatcgaaaaaaagaaaaaaattgaa

SEQ ID NO: 229973 - DNA, 387 bp, Unknown
  Bacterial polypeptide expressing nucleotide sequence isolated from the Sargasso Sea
aatggcaaatcataacaaagctattaaaatctcaaaaaaacatcttttaggtattcaagatctatcgatatcagacgtaaactttattttgtctgaggcaaaacaatttatagatctaaataaaagtaaaaacaaaaaattaaatattttaagaggaaaaactcagatcaatttattcttcgaaccatcgacaagaactcaaagctcatttgagcttgctggtaaaagattaggtgcagatgtgatgtctatgaacttgaataattctgcaattaaaaaaggtgaaactttaattgatacagcaatgactttaaacgctatgcacccagatataatagttgtaagacatcaagactcgggtgcatcaaatttattatctcaaaaagt

SEQ ID NO: 229974 - DNA, 166 bp, Unknown
  Bacterial polypeptide expressing nucleotide sequence isolated from the Sargasso Sea
acttggctttgcaaaaagtgatgcaattattatgcacccaggaccagtaaactacgtagagataactgaggctgtttatgattctgagaactcggtgataagacaacaaattgctaatggtgttgccataagaatggctgttttatccagatttttgagtagataa

SEQ ID NO: 229975 - DNA, 901 bp, Unknown
  Bacterial polypeptide expressing nucleotide sequence isolated from the Sargasso Sea
atgagacacttaacgtcacttaaggaattatcaaaagatgagattgttgaattattagacttagcagataattttattgattcagaagggtccattagaagagacccacttttcccagataagaaagttattaatattttttgtgagccaagcactcgcactaaaatctcatttgagatagctgcttctaatctagggtgccaaataatcgattttgatttgagttcttcttctctagaaaaaggtgagaccctcaaagatacaattgataatttagcaaagatgaacattaatctttgtgtcttaaggcataaagactcagttattcatgaattgatagatcaaacagactctatggtctttgttagcggaggagagggttctatttcccatccatctcaaggacttttagatattatgacggtaaggcatagaaaggatctagataattctaatattctgattgttggtgatttagatcattcaagagttttccaatctttcattgatgggatggctaactttaattctaaaattactttatgtgggcctaaagagctttgcaaagatgttatggaatcttctaatcttaattatgaggaagatcttaataaagcactaaaaagtcaggatgttgttatggcgcttagaattcagcatgaaagatttgatgacaagaaagaccttgataaggaaagctatcttgatgattatcaaattaataatgaaaaattacagatcgctaatgatgattgcatagtcatgcatcctggaccagttaatcaaggcattgagatttcagaggatgtttataattctgcgaactctgtaatattagatcaagtagctaatggcgtcgccatgagaatggctatcttaattaagtatctatcgcagtagt

SEQ ID NO: 229976 - DNA, 834 bp, Unknown
  Bacterial polypeptide expressing nucleotide sequence isolated from the Sargasso Sea
attctgctcaaaatattaaaaattcttggccaaaccttgaacaggttggtcatggaaaaacagtttgcttattattttgggaaccaagcacaagaactaagctgtcatttgagcatgctgcaaaatctttaggctttaaagtgcttgatttttctcctgccagctcttctataaaaaaaggggagaccttagaagatactattaaaacattgctagctttaaaggttgatggctttattattaggcatcctgaagacaagatttcattaaaaattgaaaaattattacctgataacatatttttcattaatgcaggtgatggtagttatgctcatccatctcaagctttactcgatgtctataccatgaaagaaaaatgtgaagatttcagcaaattaaaagttgcagctattggcgatattaaacattgtcgtattattagatcacaaatgactctcttaaatagacttggatgtaccgatatccaattttatggaccaaaggagttgctggatgataatttatctccatcatttagtgagatcacagacggatgcatggaagatagagacatcctctatgtaatcagagttaagcatgaaagattaaaagataatgagaatatagatatggaagactttaaatcgatatatcaaatcaacgaatcttttattgaaaaaactaaatttactggttcagtcatgcaccctgggccaattaatattgatttagagatttctgatgctattgccacatcagaaaaatcacttatttctacacaagtagaaaatggactctatattagagcggcattattaggtcttatttcttaaa

SEQ ID NO: 229977 - DNA, 396 bp, Unknown
  Bacterial polypeptide expressing nucleotide sequence isolated from the Sargasso Sea
aatggctgtaattaaaaaacttaaagctgttaaaaaagaacaaaatcaccttctgggtattcaagatctctctttttctcaagttagcgaaattctaaatcaagcaaaaacatttatcacattaaataaaagttcttcaaaaaaaattgatatcttaagaggaaaaactcaaattaatttattttttgaaccttctactagaacacaaagttcttttgagttagccggaaaaagactgggcgctgatgttatgtcaatgaatattgttaactctgctattaaaaaaggagaaaccttaattgatactgcaatgactttaaatgcaatgcatcctgatataatcgtagtaaggcatcaagattcaggtgctccaaaatttgctatcacaaaaagtaa

SEQ ID NO: 229978 - DNA, 877 bp, Unknown
  Bacterial polypeptide expressing nucleotide sequence isolated from the Sargasso Sea
tatgagctttaaaggcgaacacatcctctccgttaaacagtttgaccgtgacaaaattcagcaggtttttgatattgcccgcagtatggaaccttatgcgacgcgccagaagcgcaccactgtgctcgaaggtgccattttaggtaatttgttttttgaacccagcaccagaacccgtgtcagctttggttgtgcctttaatctgttaggtggcgaagttcgtgaaaccactggcatgcaatcctctgcgttatccaaaggtgaatccttgtttgatacagcccgggtgatcagtagttacagtgatgtgattgcaatgcgccatccacaagctggttcagtggctgaatttgctgaaggcagccgcgtgccggtgttaaacggtggtgacggtgccaacgaacacccaactcaggctttgctggatttgttcaccatagaaaaagagctggccgcttcacagcaacctatagatggtatgcatatcgccatgattggtgatttaaagtttggtcgtaccgtgcattcattatctaagttactggcgttgtacaaaaacattcagttcaccctgatagcgccaaatgaactggcgatgccggatgacatcgtctcgctgattgaaaatgcaggtcacagagtgacagtaacggatcaactggcaggcaacttaaacgcggatatcgtctatcaaacccgtattcaggaagagcgctttccgtcgcaggaagaagccaataaataccgcggtaaattccgcttaaatcaggatatttacaccaaacactgtaaatccaataccgtcattatgcatccgctgccccgggattcccgtatcgaagccaatgagctggataacgacttaaacctgaacccg

SEQ ID NO: 229979 - DNA, 875 bp, Unknown
  Bacterial polypeptide expressing nucleotide sequence isolated from the Sargasso Sea
tctgggtatccaaaatttatctattcaagaagctagcctaatacttgatgaagcaaaaaactttataaagttaaacagaagtgcatcgaagaaattagatttattaagaggaaaaactcaaattaatcttttttttgaaccgtctacgagaactcaaagttccttcgaactggctggaaaaagattgggagtagatgttatgacaatgaatgttggaaactcttctttaaaaaaaggtgaaacaatattagacacagcaatgtctctaaacgctatgcatccagatattatagttgttagacaccaagactctggggcccctaaccttctttctcaaaaagtaaattgcactgtcataaacgctggcgatggtttaagagaacatccaactcaggcactcctagacgctttaacaattattaatagaaaaggaaaaattgaaggccttaaaattgcaatttgcggtgatatccttcattcaagggtagctagatcaaatatatatttgttaaatatgttaggtgctgaagtaaatgtaattgcaccaaaaactttattacctaattcaataagtaaacttggagtaaaaggatttacaaatatgaaagaaggattggcatcctgtgacatagtaatgatgttaagattgcaaaatgagagaatgactggttcgtttttaccttcaaaaagagaatactatgaatattttggtttaactcctgataaattaaaattagctaaaaaggacgctttaattatgcatccaggtccaatgaatagaggtgttgaaatagatactaaacttgctgatgatataaatgttagtttagtaaaggagcaagttgagctaggggttgctgtcagaatggcatgct

SEQ ID NO: 229980 - DNA, 664 bp, Unknown
  Bacterial polypeptide expressing nucleotide sequence isolated from the Sargasso Sea
gctcagaatattgaggcaatgaaaatagatgcggttgttatgagacatccttctccaggtgctccatataatttgaaagaatttatcgatgctaaaatcataaatgctggagatggcactcatgaacaccctacacaagccattcttgacatgatgagtatacaagaaaaatttggaaagattgaaggacttaacatcgctattattggagatatctaccatagtagggtagcacgaagtaatatatatggacttgtaactatgggcgctaatgtaactgtttgtggtcctccaaatttaatacctcaagaaatttctgaattaggggtaaatattaattataatattgatgaagtagtagagtgggctgatgctgttaatgttttgaggattcaaagagaaagaatgggtgtagggctaataccttcgaatagagaatatcgaaaattatttggtattactaatgaaagaatgattcgaagaaaaaaagaactggtaataatgcaccctggccctatgaatagaggtgttgagattgatagtgaagttgcagatagtgaccaagcaataattctagatcaagtattgaatggtgttgcttcaaggatgtcaattttatatttaatactaggtgcaaaagatggggtaaaaaatgaagattaat

SEQ ID NO: 229981 - DNA, 577 bp, Unknown
  Bacterial polypeptide expressing nucleotide sequence isolated from the Sargasso Sea
atgacatcgacaaaacatgtcaggggagtagatgacctcgggaaagacgggattctggaaattctggaactaagcaatcattttctcgaggtaagtaatcgaaggatcccgaaggtccctgcgctccgagggaaaacagtcgcttcgttgtttttcgaagattcaactcggactcgcttaagttttgaaaaggccgctaaaagattatccgcagatgtcatgaacttcagtgtgtcttcatcttcagtgaaaaaaggtgaaagcctcagggacactatcgagacgatctcctctatgggggcagaagctatagtcgttcgccataaatctgtcggagttccctggatgataactgaatggacagacgcttcagtcgttaatgctggtgatggagcccatgaacatccaacacaatcgttagctgattgttacaccattacacggcagtttggaagcgtagaaaggaaacgaattgttattgtaggggatatcaagcactccagagttgcacgatctaacgtaaaggcattcagcgctcttggagcaaaggtcgcactagtggcccctccgactctgt

SEQ ID NO: 229982 - DNA, 529 bp, Unknown
  Bacterial polypeptide expressing nucleotide sequence isolated from the Sargasso Sea
agacgcgaacacccaactcaagctttattggatgctttaccaataattaatagaagaggtaaagtgaagggtttaaaaatagctatatgtggagatatattacattcaagagtagcaagatctaatatttatttgatgaatatgcttggtgctgaagtaaacattgttgctccaaaaactttattacctcactcgattgaacgtctaggagtaaaagcttttactgatatgaagaaaggtttagataattgtgatattgtcatgatgctaaggttgcaaaatgaaagaatgcaaggatcttttcttccttcggctagagagtattatgaattctttggtttaacaccagataaattaaaaatggcaaagaaaaatgctttgataatgcatccgggtccaatgaatagaggtgttgagatagatacaaacttagcagatgatattaatagaagcgttattagagaacaagttgagttaggagtggctgttagaatggcttgcttaaaaattttttgtaagagaaattaat

SEQ ID NO: 229983 - DNA, 586 bp, Unknown
  Bacterial polypeptide expressing nucleotide sequence isolated from the Sargasso Sea
aatggcaattaaaacaaataaagctattaaaatttcccaaaaacatctgttaggtatccaagatttatctattaatgatgttaatcttatacttgatgaagctcacgattttataaaagtaaaccaaagcaaaaataaaaaaattgatgcactaaggggaaaaacacagatcaatttattttttgagccctcaacaagaacgcaaagttcatttgaattagcaggaaaaagacttggagctgatgtgatgtcaatgaatataagtaattctgcaattaaaaaaggtgaaactcttattgatacagcaatgacactaaatgctatgcatcctgacattattgtaataagacaccaagactctggcgcatgtaatctactttctcaaaaagttaattgtgcagttttaaatgctggagatggaagaagagagcaccccactcaagctttattggatgctctgacaattataaatcgaaaaaaaaaaattgaaggtttaagaattgccatctgtggagatatcctacattcaagagttgcaagatctaatatttatttactgaatatgttaggagcagaagtaaatata

SEQ ID NO: 229984 - DNA, 878 bp, Unknown
  Bacterial polypeptide expressing nucleotide sequence isolated from the Sargasso Sea
ttatctgtccagaagccaaaaaatactaaacgaagctaaatctttcattgaattaaatagaggtagctccaaaaaacttgatgtgcttcggggaaaaactcaaatcaacttattttttgaaccttccactagaacgcaaagttcattcgatttagcaggtaaaagattaggtgctgatgttatgacaatgaacatgggtaattcagctcttaaaaagggtgaaactttaatagatacagcaatgacattaaatgcaatgcatccagatattatcgtactgagacatcaggactctggagctccaaatttactttctcaaaaagttaattgcacagtcataaatgcaggtgacggaagaagagaacatccaactcaagctttattagatgcgttaacaataataaataggaagagaaatattgagggtttaaaaattgcaatatgtggcgatatccttcactctagagtcgcaagatcaaatatttatttaatgaatatgttaggagcagaagtaaatgtgatcgcaccaaaaactttaatgcccacaggtatagaaaatttaggagttaaagctttcacaaatatgaaaaaagggttagatggatgtgacattgttatgatgttaagattgcagaatgaaagaatgcaaggttcatttcttccatcaaagagagagtactatgaattttttggtttaaccccagaaaaactcaaattcgctaaaaaagatgctttactcatgcacccaggtccaatgaatagaggtgtagagattgatacaaagttagcagatgacataaatgtaagtttagtaaaggagcaagttgaactaggagtagcaattaggatggcatgcttaaaaatatattgtaaataaa

SEQ ID NO: 229985 - DNA, 580 bp, Unknown
  Bacterial polypeptide expressing nucleotide sequence isolated from the Sargasso Sea
atggcaaatgtaaaaaaagctattaaaatctcgcaaaagcatctcctaggaatccaagatctatcaatttctgatgtaaattttattttatcagaagcaaaacaatttattaatctaaataaaagcaaaaataaaaaattagatgttttgagaggcaaaactcaaatcaatttattttttgaaccttccacacgtacgcaaagttcgtttgaattagcaggaaaaagattaggtgcagatgttatgtcaatgaatttaaataattctgcaattaaaaaaggagaaactttaatagacactgcaatgactcttaatgcaatgcatcctgatataatagtggtcagacatcaagattctggtgcatcaaatttattatctcagaaagttaactgtgctgtactaaacgccggagatggaagaagagagcaccctactcaagcattgttagatgctctaactattatagatagaaaagaaaagattgaaggattaaaaattgcaatatgtggagatatagttcattcaagagtagcgagatcaaatatttatctattaaatatgttgggtgccgaaagttaat

SEQ ID NO: 229986 - DNA, 526 bp, Unknown
  Bacterial polypeptide expressing nucleotide sequence isolated from the Sargasso Sea
gggagatggaactaatgaacacccaacacaagcacttctagattattgtgttattagggaaatttttaagaagaaaaaaataaaatttggtatatgtggagatataaaacacagcagagtggctcattcaaatattaagcttctttctaaattaggatatgaaatacatataattgctcctaaatattttttaaatagaaatgatttaaaaaaaattaataataatattatttttcataaaaatcttaattctctcaaaaagctagatattttaatgatgctaagagttcaaaaggagagaattcctaagggtgcaaagaatatgatgagttcatttaaaaaagaattttgtttacaaaataagcacctattaaataagccttacttgatgcacccaggccctgtaaatagaaatatagaaattagcgatgatgttttagacaattaccctaaatccttaattttaaaacaagttgaaatgggagtttatcttagaatggcttgtttacagtatatccttaaataa

SEQ ID NO: 229987 - DNA, 909 bp, Unknown
  Bacterial polypeptide expressing nucleotide sequence isolated from the Sargasso Sea
gacaaaagcgcacaaccgtgctagatggcgccattctcggtaaccttttctttgagccaagtacccgtacgcgagtgagctttggtaccgcgttcaaccttttaggtggcgaagttagagaaaccacaggcatgtcgagctctgcgctggctaaaggtgagtcattgtacgacacagcccgtgtgctgagcggctattccgacattattgcaatgcgacatcctgcggcgggttcagttgcagaatttgccgaaggtagtcgcgtgccggttatcaacggtggtgatggtgcaaacgaacaccccacccaagcgctgttggacttattcacgattaagcgagagcttgaatacaatggccaaggcattgacggattacacatcgccatgattggtgatttgcgctatggccgaactgtgcactctttgtcgcgcttactgtgtttgtttaaaaacattcgctttacgctcatttcgccaaaagagctggccatgcctcagcccatcatagacgccatcgaaaatgcggggcaccagcttacgattaccgatacccttgaagggaatatggatgcggacatatgctaccaaacacgcattcaggaagagcgctttccttctcaagaagaagccaacaaataccgaggtaagttccgccttaatcagtcgatttacacgaaacactttcagtcgaagaccgttatcatgcatccacttccacgagattcacgtatggaagccaacgaattagataacgatctaaacctcaatccaaacctcgccatttttagacaaaccgacaatggtgtacttgtcagaatggcattgtttgcgcttactctgggtgtagaaaaccttctcactaagtacgagcgtgacgttgtttggtacagcaataagagtaagtaat

SEQ ID NO: 229988 - DNA, 775 bp, Unknown
  Bacterial polypeptide expressing nucleotide sequence isolated from the Sargasso Sea
aatgaaaaaattatttaaaaataattctgaagttaataaatcttcccctgtaaaattatcatcacatcaccttttagcaatagaaggcatgaaaaaaactgaaattcagaagctacttgatagagctgactattttgcaaatttagataaacacgccaacactaaatatctgtctggatatgtggtactaaatgtcttttttgaaaattcaactcgtactagggtttcatttgaacttgcagctagaagacttggagcagaagtaattaatatttctttaattaactcatctataaagaaaggagaaagcttattagataccgctagtactttaaacgcaatgaaacctgatttattgatagtgagacatccctatagtggcgcaccactcctattcgcagaatatttaagttgtagtattatcaatgctggtgatggaagacacgagcaccctacccaagctttattagatgctctaacaattaaaagaagaataggaaacctagagggtttaaagattagtatatgtggggacatttctaacagtagagtagcgagatcaaatatacatttgttaacaactatgggtgctgaagttagatgtgttgctccatcaacattaatgccttcgagcttaggtaaattaggcgtgaaatgctttaatgatatgaaagaaggaattaaagatgctgatgtagtaatgttattacgtcttcaaaatgaaagaatgtcaggcacggaaaatccttctgaaagagaatattttaattttttt

SEQ ID NO: 229989 - DNA, 628 bp, Unknown
  Bacterial polypeptide expressing nucleotide sequence isolated from the Sargasso Sea
atgcatcctgatattatagtaattagacatcaagactctggagcaccgaatttattatcacaaaaagtaaattgttcagttattaacgcaggcgatggaagacgtgaacatccaactcaagcacttttggatgcattaacaatcattaatagaaaaggaaaagtcgaaggtttaaaaattgcaatctgtggtgacatacttcattcaagagttgccagatcaaatatatatctgatgacaatgcttggagctgaagtgaatgtagtagctccaaaaactttgcttccacattctattgaacgccttggggtaaaatcttttacaaatatgcataaaggattagataattgcgatatcgtaatgatgctaagattacaaaatgaaagaatgcatggatcttatcttccttcagctagagagtattatgaatattttggtttaacacttgacaaactaaaaatggcaaaaaaaaatgcattaataatgcatccagggcctatgaatagaggtgttgaaatagatacaaacttagctgatgacattaatcggagcgtaattagagaacaagttgaacttggtgtagctgtaagaatggcatgtttaaaaattttttgtaaaaaaacataat

SEQ ID NO: 229990 - DNA, 799 bp, Unknown
  Bacterial polypeptide expressing nucleotide sequence isolated from the Sargasso Sea
attgcctaaaacaaaagcaattagaacttcaacgggatcaaaaattttaaatgatgctgagaaaattgcattaaaatattattctagcgtaataaaaaaaactaaaatatctataaaaaaatcaagaaatatttttaaaaagattcatttagttgaaactgccgatcttacaaaaaaagaaatagaatttatattggatgaatcaattaaattcatatcttttaataaaaaaagaattaaaaaaattgatttacttgaaggtagaacaatttttaatttattttttgaagattctacaagaactcgtacaagttttgaagtggctgctaaaagattaggtgcagacttaattaatgtagctgtaaaagatagctcaataaataaaggtgaaactttactagatactatgacaactattaattctatgaatcctgacatattaatagttagacatccagaagaaggaattagtaaaaaaatttcaaatacagttgatgcatctgtaattaatgctggagatggtagtcatgaacatcctacacaagcattactagatgctttaacaataaaaaataaatttaaaaatttttcaaaactgcgaatagcgatatgtggtgatattctgcacagccgtgttgctagatcaaatataattatcttatctaaacttggtgcaaagattaatgtaataggtcctaaagaatggttaccaaaaaatattaaaaaacttcctgttaaagtttttactgatatgaaaaaaggtttacataattgcgatataataatgatgcttcgaatc

SEQ ID NO: 229991 - DNA, 799 bp, Unknown
  Bacterial polypeptide expressing nucleotide sequence isolated from the Sargasso Sea
aaaaaatagttttgagcttgcagcaaaaagactttctgctgatgtccaaacgtttgctccatcttccagctctttaacaaaaggcgaaacaataattgatacagccattacttattctgctatgggggcagatacattagttatcagacattcatcaagttacataacttttgagatcgcaaaaaaacttgatgcaattaatgccaagacttcggttcttaatgcgggagatggattacatagtcaccccagccaaggattacttgacatctatacattgataaaattcttttccaaaaaaacactgaatccagaagttttaaattccaaaaaaattttaataattggcgacgttaatcattcaagggttgccagatcaaatctttgggctttgagtgcatttggcgccgatataatcttatgtggtcctaaaacattaatacctgatgaatttatcaattttttaaaaacccccgcgccaaatcaaacagaagatcctgttaaatcaagaggttccataacaatttctagatcattggaagaatcaataaaaattgcagatgcgattattgttttaagactccagaaagagagaatgatggaaaatttactaagtagcatcgattcatatagtttggattatggcttaactccagaaaaattatctttaaataataaagaaattccaattctacatcccggtcccattaacagagatattgaaattagtagcaaagtggtagatcgatatcctaattgcttaatcaataatcaagttgcaaatggtatccctataaga

SEQ ID NO: 229992 - DNA, 787 bp, Unknown
  Bacterial polypeptide expressing nucleotide sequence isolated from the Sargasso Sea
tatgggcgacctagtcactatggatgatctaagtaatgaagagattgtatccgttcttgatgacgcaaacaggttgcttcccgtggccaaaggagctctgcaccttccacttctggagggtaaagtcttggcaaacatgttttttgaaaactccactagaacaaggatgtcttttgaagcagcaatgaagaggttgggaggatcagtcctaaactttagttcagtgggaacatcagttgccaagggtgagactctgtatgacacaatgcaaatgatcgatggatatgcagatattgccgcaattagacacccaaggcaaggagcagctcagtatagcgctgattccgttgagattccaatcctcaatgctggagatggagccggcaatcaccctactcaaacaatgctagacctatttacaataaataattcacacggatccctggatggattgaacgtaatcctggtgggtgacttacgatatggtaggactgtgcacagcctatctcacgccttggttaggtttggtgctagcctgacaatggtttcccccccaaatcttagaatgccaaaggaaatagtttctgatctaaggtcacacggtggtgaagtgagtgaggcagaattgcttcaaaatcaaattccagatgccgacgtaatatacatgacaagaatacagaaggagaggttccctgacgaggatgaatattcaaaggtcgcaggcatttacaaactcacagcttcagatctttccggggccaagaaagctatgatagttatgcacccc

SEQ ID NO: 229993 - DNA, 648 bp, Unknown
  Bacterial polypeptide expressing nucleotide sequence isolated from the Sargasso Sea
tagacactgcaatgactttaaatgcgatgcaccctgatattattgttgtaagacatcaagattcaggtgcctcaaatttattgtcacaaaaagttaactgtgcggtattaaatgcaggtgatggcagaagagaacatccaactcaagctttgcttgatgctttaacaataatggaaaagaaaaataaaatagaaggtcttaaaattgcaatttgtggagatatacttcattcaagagttgctagatcaaatatttatttattaaatatgttgggcgcagatataaatatagttgcaccatctaatttgatgccaaaagatctagaaagatttggtgtcaacacttttacaaatatgaaagaaggagtgaaagattgtgacattgtgatgatgttaagattacaaaatgaaagaatgacaagttcatttctctcatcaaatagagagtattatgaatattatggtcttacaccagataaattagagaaagcaaaaagtaatgcaattattatgcaccctggtcctatgaatagaggaatagaaatagatacaaaattagctgatgatattaataaaagtgtaattaaagaacaggttgaattaggtgttgctgtaagaatggcctgtctaaagttattttgtgaatgat

SEQ ID NO: 229994 - DNA, 737 bp, Unknown
  Bacterial polypeptide expressing nucleotide sequence isolated from the Sargasso Sea
aagaggtaaaacacaaataaacttattctttgagccatctactagaactcaaagctcatttgaacttgctggaaaaagacttggtgcggatgttatgtcaatgaatatgggtaactctgcaattaaaaaaggtgaaactttgattgatacagcaatgaccttaaatgctatgcatcctgatataattgttatcagacatcaagactctggtgcttgtaatctattatctcaaaaagttaattgtgttgtattaaatgctggtgatggtagacgtgagcaccctactcaagcattattagatgcattaacaattagaaatcgaaaaaaaaaaattcaaggattaaaaatagcaatatgcggggatatacttcattcaagagtagctagatcaaatatttatcttcttacaatgttaggagctgaaattaatatagttgctccatctaatcttatgccaaaagaaattgaaaaatttggtgtaaacacttttactgatatgaaaaagggtctcaaagattgtgatattgtaatgatgcttagattacaaaatgaaaggatgaccagctcatatctttcatcaaacagagagtactacgaatattatggattgacccctgacaaacttgatcatgcaaagtcagatgctttaattatgcatcctggtccgatgaatagaggaatagagattgatacaagattagcagacgacataaataaaagtgtaattaaggaacaag

SEQ ID NO: 229995 - DNA, 427 bp, Unknown
  Bacterial polypeptide expressing nucleotide sequence isolated from the Sargasso Sea
catattgcattcaagagttgcaagatcaaatatatatttattaactatgttaggagccgaagtaaatatcattgggccatcaaatttattgccaaaagatttagaaaaatttggagttaatatctatacagatatgaaaaaaggagtgaaagattgtgatatagtaatgatgctcagacttcaaaatgaaagaatgacaagttcatatttatcatcaaatagagagtattatgaatattatggtttatcacctgaaaaattagaatttgccaaaactgatgcattaatcatgcaccccgggcccatgaatagaggtatagaaatagatacaatgttggcagatgatataaataaaagtgttattaaggagcaagttgaacttggtgttgcaataagaatggcttgtttgaaaattttttgtagctaa

SEQ ID NO: 229996 - DNA, 574 bp, Unknown
  Bacterial polypeptide expressing nucleotide sequence isolated from the Sargasso Sea
aatggcaacatcattcaagaaagctgttaaaatttctcagaaaaacttattaggaattcaagatttatctatttcagatataaacgttattttagatgacgctaaacaattcatttcattaaataagagtaagaataaaaaattggatattcttagaggtaaaactcaaattaatcttttttttgaaccatctaccagaactcaaagttcttttgaacttgcgggtaaaagattgggtgctgatgtaatgtcaatgaatattgtaaattcagcaattaaaaagggtgaaactcttatcgatactgcaatgactctaaatgcaatgcatcctgatataatagtcataagacaccaagattctggagcttgtaacttactttcacagaaagttaattgtgctgtaatcaatgctggtgatggaagaagagaacaccctactcaggcattattagatgctctaacaattattgatagaaaaaaaaaaattcaaggtcttaaaattgcaatttgtggagatatacttcattcaagagttgcaagatcaaatatttatcttcttaatatgttgggtgca

SEQ ID NO: 229997 - DNA, 511 bp, Unknown
  Bacterial polypeptide expressing nucleotide sequence isolated from the Sargasso Sea
tcctacgcaagctttattagacgctttaaccataaaaataaataaaaaaagaatatctggattagaagtagcaatattaggagatgttttacatagtagagtggccaggtctaatatttacttgttaaaaaaactaggagcaaaaattagagtaattgctccacctactttattaccgtctaatatagaaggacttggaataaaaacttttaaaaatcttgaaaaaggtcttgaaggtgtagatataataatggtgcttagaatacaaaaggaaagaatgacgggaacttatgttccttcagaaaaagaattttttagattttggggcttagatagaaaaaaattagaacttgcaaaaaaaaatgcattagttatgcatcctggtccaataaacagaggcattgaaattgatagcgatgttgcagacgatattgggagatcattgattttagagcaagtaaaacttggagtggctatcagaatggctgtaataaaagaactaactagttaa

SEQ ID NO: 229998 - DNA, 841 bp, Unknown
  Bacterial polypeptide expressing nucleotide sequence isolated from the Sargasso Sea
gcaatcaggtcatctacaggttcaaaaattcttaaagatgcagaaaatatagctttaaaatattattcatcaatttcctcaaaaacaaaaataaaattaaaacgaaaaaaaaatattttcaaaaaaattcatttagtagaaacagctgatttaactaagaaagaaattgagcatatcttagatgaatctaaaaaatatatatcttttaatacaaggaaaattaaaaaaataaatattctagaaggaagaacaatatttaatcttttttttgaagattcaactagaacaagaacaagttttgaagttgctgcaaaaaggttaggagcagatctcattaatgtagttgtaaaagatagttctattaacaaaggtgagaccttactcgatactatgactactattaattcaatgaatcctgacgttttaattgtcagacatccagaggaaggaattagtaaaaaaatttccgaaacagtagatgcgtctgtaattaacgctggtgacggtagtcatgagcatcccacacaagccttattagacgcacttactataaaaaataaatttgaaaatttttcaaaattaaaaattgcgatatgcggggatattttacatagccgtgttgctcgatcaaacataattatactatcaaagttaggtgcaaaaataaatgttattgggcctaaggaatggttaccaaaaagtttaagaaaactacctgtaaacgtttatactgaaatgaaaaagggattacaaaattgtgatattgttatgatgctacgtattcaaaaagaaagaatagttgggaagataatgccaaatcaaaagacttatttaaaaagta

SEQ ID NO: 229999 - DNA, 765 bp, Unknown
  Bacterial polypeptide expressing nucleotide sequence isolated from the Sargasso Sea
aatggccacagacacaaaaaaagctattaaaaattctcccaaacacttactaggtattcaagacttaaaagtttctgaaattaaacatatactaaatgaagctcaacaatttattgagcttaatagaagcaaaaataaaaaaatagatattttaaaaggtaaaacacaaattaatctattttttgaaccctctacaagaacacaaagttcttttgaactggcaggaaaaagattgggtgctgacgtaatgtcaatgaacattataaattctgcaattaaaaaaggtgaaactttaattgataccgcaatgacactaaatgctatgcacccagatataattgttattagacatcaggactcaggtgcctgtaatttattatctcaaaaagtaaattgtgctgttttaaacgcaggtgatggaagaagagaacaccctactcaagccttgttagatgcgctaactataataaatagaaaaaaaaatatagagggtttaaaaattgcaatatgtggggacatacttcattcaagagttgctagatcaaatatatatctattaacgatgttaggtgcagaagttaacattatcggaccgacgaacttactgccaaaagatttaaataaatttggagtaaatattttcactgacatgaaaaagggagtaaatgattgcgatatagttatgatgttaagacttcaaaatgaaagaatgacaagttcttacctctcatcaaatagagaatattacgaatattatggattatc

SEQ ID NO: 230000 - DNA, 883 bp, Unknown
  Bacterial polypeptide expressing nucleotide sequence isolated from the Sargasso Sea
atgaagtcaaaattactaaaatcaggacatataaaattatacaaaagggaaaattcaaattattggcaactaaaaattaaattacctaaaataaaagcaattaggatatctacaggatcaaaaatattaaatgatgcagaaaaaattgctttaaaatattattctactttaattaataaaacaaatatctctattaaaaaatcaaaaaatatttttaaaaaaatacatttagttgaaactgctgatctaaaaaaaaatgaaatagaatttattttaaatgaatcaactaaatttattgcttttaacaaaaaaagaataaaaaaacttaatttgcttgaaggtcgtacaatttttaatttattttttgaagattctacaagaacccgtacaagttttgaagtcgccgctaaaagattaggtgcagatttaattaatgttgtagttaaagatagctctattaataagggtgaaacacttctagatactatgacgactattaattcaatgaaccctgatatattaatagtaagacatccagaagatgggataagtaaaaaaatttcaaatacaatagatgcgtccgttattaatgcaggagatggaagtcatgaacatcctacacaagcattgctagacgctttgactataaaaaataagtttaaagatttttcaaaattaaaaattgccatatgtggagatattctgcacagccgcgtagccaggtcaaacataattatattatctaaacttggtgctaagattaacgtaatcggacctaaggaatggttacctaaaaatattaaaaaacttccagttaaagtttttactaatatgaaaatgggattacacaattgtgatattgttatgatgctccgaattcaaa

SEQ ID NO: 230001 - DNA, 657 bp, Unknown
  Bacterial polypeptide expressing nucleotide sequence isolated from the Sargasso Sea
tatgaataattgggaacataatcacattcttgatctatctacgttttctttagaggattacaacacagttttagaactaacaacaagatttaaagatgtccataaatcaagttctagaaaacttcccgcgcttcaaggaagattaatctgcaacttatttttcgaaccaagtactagaacaagaagtagctttgaacttgcagcaaaaagactatctgctgatgttcaaaatttttctgtatcagcaagttctctaagcaaaggagagactcctttagacactattctgacatacatctcaatgggggctgatatcttagtaattaggcatgagtcaacaaatgttcctgcagagttagctaattatgtagacataaataatatcaatacatccattcttaatgctggtgatggatttcatagccatccaagtcaagggcttttggatctatttacacttgctacttttttcaatccaaacgaaccatcaactaatagtctttgcaataaaaagataacaatagttggagatattcttcattctagagtcgcaagatcgaacctttgggctctaactgcatgtggagctgaagtaacactatgtggacctccaagcttgcttccagaggaattcattgattttgttctcaatcctcc

SEQ ID NO: 230002 - DNA, 883 bp, Unknown
  Bacterial polypeptide expressing nucleotide sequence isolated from the Sargasso Sea
aatggccaattcaaaaaacgctgttaaaatttcaaaaaaacatctcctaggtattcaagatctatcaatctctgatgtaaaaactattctttcagaatcaaaaaacttcatagctttaaacaaaagtaaaaataaaaaaatagatattttgagaggtaaaacacaaataaatttattttttgaaccatccactagaactcaaagttcgtttgagcttgctggaaagagattgggtgctgatgttatgtctatgaatataactaattcagcaattaaaaaaggagaaactttaatagacactgcaatgaccttaaatgcgatgcaccctgatattatcgttgtaaggcatcaagactcaggtgcctcaaatttgctgtcacaaaaagttaactgtgcggtattaaatgcaggcgatggcagaagagaacatccaactcaagctctgcttgatgctttaacaattatggaaaagaaaaataaaatagaaggtcttaaaattgcaatttgtggagatatacttcattcaagagttgctagatcaaatatttatttattaaatatgttgggtgcagacataaacatagttgcaccatctaatttgatgccaaaagatctagaaaaatttggtgtcaacacttttacaaatatgaaagaaggagtgaaagattgtgacattgtgatgatgttaagattacaaaatgaaagaatgacaagttcattcctttcatcaaatagagagtattatgaatattatgggctcacaccagataaattagaaaaagcaaaaagtgatgcaattattatgcaccctggtcctatgaataggggaatagaaattgatacaaaattagctgatgacattaataaaagtgtaattaaagaa

SEQ ID NO: 230003 - DNA, 778 bp, Unknown
  Bacterial polypeptide expressing nucleotide sequence isolated from the Sargasso Sea
atgttaaatcataaacatttattaggattagagaattttccaaaagaaggcttacagaaaattattgacaccgcatttaattttcgcgaggtacttgacaggccaattaaaaaggtgccatctctacaaggtgtgacaatagttaatctgttttttgaaaattctacacgcacacgtataagttttgagttagcacaaaaaaggttaagcgctgatacagttaatttttctgcatcatcaagtagtttaaaaaaaggtgaaagttttaaagatactgcccagaatattgaggccatgaaaatagatgcagttgttatgaggcaccctgctccaggttcaccaaaacatttaacggaatttattaatgctaaagttatcaatgctggcgatggaactcatgaacatcctacacaagcaattttagatatgatgagcctgcaagagaggtttggaaagataaaggatcttaatgtggcaattatcggagatattgatcacagtagggtagcgagaagtaacatatatggtttagtcacaatgggtgctaatgttactatttgcggtcctccaaatttaatcccggattactttgctgatcttgatgtgactgtaaattacaatattgacgaggtgttggaatgggcagatgctgttaatgttcttagaatacaaagagagagaatgggcgttgctctaattccttcagatagagaatatagggcattatttggaattacagaggaaagacttgctaggagggataatgagctagttgtaa

SEQ ID NO: 230004 - DNA, 868 bp, Unknown
  Bacterial polypeptide expressing nucleotide sequence isolated from the Sargasso Sea
gatttaacaaaagctgatgtaatgtcaattatagaggtagcaaatcttttcaaaaaaaataataaagaaaaaaataaaaatattccaatcttaaatggaagaacaataatcaatttattctttgaaccatcaactagaactctgatatcttttgaagtagccgctaaaagacttggggcagatatgattaatatgaatatagaaggctcttctctgcgaaaaggtgaaacattaatagatactgctgacacacttaacgcgatgaatccagatttagtcataattagacatggatcgtcaggctctatagaagaaatttcttctcgacttaagtgtcctattataagtgcgggagaaggcactgaagaacatcctacacaagctcttttagacgcatatacaattcaagataatcaaaaaaagtttgaagaaataaccgtttcaatttgtggcgatattgaacatagtcgagttgctagatcgaactatcatttattaaaaaaaatgggatccaaaataaggtttgttaccccagattatttcaaacccaaagatttagattcctttgatgttgaatattttgacaatttagagttagggattgagtctgcagatattgtaatgatgcttcgaattcaaaaagaacgaataaacgatgtcaatttaccttctatagatgagtactttaaacattttggcttaacatacaaaaaactaactaatgcaaaaaaggatgtacttgtaatgcatcccggtcctattaatagaaacatagaaattgaaagctcattagctgatgatttggataaatctgttataaatgagcaagttgaaaatggtgttgcagttagaatggcctgtctagcag

SEQ ID NO: 230005 - DNA, 517 bp, Unknown
  Bacterial polypeptide expressing nucleotide sequence isolated from the Sargasso Sea
atggcaactctaaaaaaagtttcagctattaaaaacgctcccaaacatctattaggtattcaaaatttatcagttcaagaggcaaaaagtatattaactgaggcaaaaactttcattaaactaaatagaagtagctctaaaaaactagatcttttaagaggaaaaactcaaattaatttattttttgaaccttcaactagaactcaaagttcatttgacttagctgggaaaagattaggtgctgacgtaatgactatgaatatgagtaattcagctctaaaaaaaggggaaactttgattgatactgcgatgacattaaatgcaatgcatccagatttaattgttataagacatcaagactctggtgcaccaaaccttctttcacaaaaagttaattgtactgtaataaatgcaggtgatggaagaagagaacatcctactcaagcgctcttagatgctttaacaaaaattaacagaaaaggaaacattgaaggattaaaaattgcaatatgtggtg

SEQ ID NO: 230006 - DNA, 362 bp, Unknown
  Bacterial polypeptide expressing nucleotide sequence isolated from the Sargasso Sea
tgttattgctccaaagactttaatgcccccatctattaataaacttggtgttaaaggattcacaaatatgaaagagggattgaaatcttgtgacatagttatgatgttaagattacaaaatgaaagaatgaaaggatcttttttgccttcaaaaagagaatattatgaatattttggattaactcctgacaaattaaaattagcaaaaaaagatgctttaattatgcaccctggtccaatgaatagaggtgtagaaattgatacaaagcttgctgacgatattaatgtcagtttagttaaagagcaagttgagctgggggtagctgtaagaatggcatgcttaaaattatactgtaagtaat

SEQ ID NO: 230007 - DNA, 697 bp, Unknown
  Bacterial polypeptide expressing nucleotide sequence isolated from the Sargasso Sea
agatacattaaaaggtaaaacgcaaattaatctattttttgaaccttctactagaactcaaagttcatttgatttagcgggaaaaagactgggtgctgatgtaatgtctatgaacataacaaactctgcaatcaaaaaaggtgagactcttatagacactgctatgacattaaatgcaatgcatccagatattattgtaataagacatcaagattctggtgcgtgcaatcttttatctcaaaaagtaaattgtgcagtattaaatgcaggcgatggaagacgtgaacatcctacacaagctttattagatgcattgacaattataaatagaaaaaaaaaggttgaaggtttaagaatagcgatttgtggggatattctccattcaagggttgctagatcaaatatttatttacttaatatgcttggtgctgaagtaaatattgtagcaccaacaaatcttatgcccaaaaatattgaaaaattaggtgtaaatatttttacagatatgaaaaagggagttaaagattgtgatattgtaatgatgttaagactacaaaatgaaagaatgactagttcgtttttatcttcaaatagagaatactacgaatattatggtttaactcctgataaattaaatcatgcaaaaccagatgcattaataatgcatcccggaccaatgaatagaggaatagaaata

SEQ ID NO: 230008 - DNA, 456 bp, Unknown
  Bacterial polypeptide expressing nucleotide sequence isolated from the Sargasso Sea
aaggattgagaatagccatttgtggagatattcttcattctagagtagcaagatctaacatttatttattaaatatgcttggtgctgaagtaaatattgttgctccatcaaatcttatgccaaaagatatagaaaaattgggcgtaaatatattttctgatatgaaaaaaggtcttaaagattgcgatattgtaatgatgttaagattgcaaaatgaaagaatgacaagttcattcttatcctcaaatagagaatattatgaatactatggtttaacaccagataaattgaattttgctaaagatgatgctttaattatgcatccaggaccaatgaatagaggtatagaaatagatactaatttagcagacgacatcaataaaagtgtaattaaagagcaagttgaacttggtgtagccgtaagaatggcttgtttaaaaattttttgtatataaa

SEQ ID NO: 230009 - DNA, 277 bp, Unknown
  Bacterial polypeptide expressing nucleotide sequence isolated from the Sargasso Sea
tggttgtgatatagttatgatgttaagattacaaaatgaaaggatgcaaggatcttttcttccgtctaaaagagagtattacgaattctttggtttaactccagaaaaattaaaatacgcaaataaagatgcgttgatcatgcacccaggtccaatgaatagaggtgtagaaatagacactaaattagcagatgacataaatgtaagtttagtaaaagaacaagttgaattaggagttgccgttaggatggcttgcttaaaaatatattgtaaataa

SEQ ID NO: 230010 - DNA, 712 bp, Unknown
  Bacterial polypeptide expressing nucleotide sequence isolated from the Sargasso Sea
attgggggcagatgtgatgtcaatgaatattacaaattcagctataaaaaaaggtgagactcttattgacactgctatgacattaaatgcaatgcatccagatattatagtaataagacatcaagactctggggcttgtaacttattatcacaaaaagtaaattgtgcggtacttaatgctggtgacggaagaagagagcatccaacacaggcgttattagatgctctaactataattaatagaaaaaaaaaaatcgaaggcttaaaaattgcaatatgtggtgatatacttcattctcgagttgctagatcaaatatttatcttctaactatgcttggtgccgaagtaaatatagttgcaccatcaaatcttttacctaaagatattcaaagatttggggtcaatactttttcagatatgaaaaaaggtgttaaagattgtgatattgtaatgatgctaagattgcagagcgaaagaatgaccagttcatttctatcttcaaatagagagtattatgaatattatggattatcacctgacaagttaaattatgctaaagaagatgcattaataatgcatccaggaccaatgaacagaggaattgagatagatactaaattagcagatgatattaataagagtgttatcaaagaacaagttgaacttggtgtcgccgtaagaatggcgtgtttaaaaattttttgtaactaa

SEQ ID NO: 230011 - DNA, 908 bp, Unknown
  Bacterial polypeptide expressing nucleotide sequence isolated from the Sargasso Sea
tgctgatttacccaagaaagaaattgagcacatcttagatgaatctaaaaagtatataacttttaataaaaggaaaattaaaaaaattaatgttttagaaggaagaacaatatttaatcttttttttgaagattcaacaagaacaagaacaagttttgaagttgctgctaaaaggctaggagcagatctcattaatgtagtggtaaaagatagttctattaataaaggtgagaccctactcgatactatgactactattaattcaatgaatcctgatgttttaattgtcagacatccagaggaaggaattagtaaaaaaatttcagaaacagtagatgcgtctgtaattaatgctggtgatggtagtcatgagcatcccacacaagcgttattagatgcacttactataaaaaataaatttgaaaatttttcaaaattaaaaattgctatatgcggggatattttacatagccgtgttgctcgatcaaacataatcatactatcaaagttaggcgcaagaataaatgttattgggcctaaggaatggttaccaaaaagtttaaataaactacctgtgaatgtttatacagaaatgaaaaagggattacaaaattgtgatattgttatgatgctacgtattcaaaaggaaagaatagttgggaaaataatgccaaatcaaaagacttattttaaaaagtatggattagattacaataaacttcaatatgcaaaaaaaaatgctttcgttatgcatccaggcccaatgaaccgtggtgtagaaatagactcgaaacttgccgatgacatcacgaggagcttaatacaagaacaggtcgctatgggcgttgcagtaagaatggcatgcttagacttaattattaaaaatagagatgatttcagtaactaat

SEQ ID NO: 230012 - DNA, 667 bp, Unknown
  Bacterial polypeptide expressing nucleotide sequence isolated from the Sargasso Sea
aatggcaaccaaaacaaaagctattaaaatttcacaaaaacatctattaggaattcaggatttatcaataaatgatgttaagctaattttagatgaagcaagcaaatttatagagttaaataaaagtaaaaacaaaaagcttgatattttaaaaggaaaaactcaaataaatttattttttgaaccatctacaagaactcaaagttcttttgaactagcaggaaaaagattgggtgcagatgtaatgtcaatgaatattacaaattcagctataaaaaagggagaaactttaattgatactgcaatgacgttaaatgcaatgcatccagatataatagttattagacatcaagattctggggcatgtaatttactttcacaaaaagttaattgttctgttttaaatgctggtgatggaagacgagaacatccaacgcaagctttgttagatgcgttaactattattaatagaaaaaaaaaaattgaaggattaaaaattgcaatatgtggtgatatattacattcaagagtagccagatcaaatatttatttactaaatatgcttggggcagaagtaaatattgttgctccaacaaatttattaccaactgatatagataaatttggtgtaaatattttttcagatatgaaaaaaggtgtaaaagat

SEQ ID NO: 230013 - DNA, 674 bp, Unknown
  Bacterial polypeptide expressing nucleotide sequence isolated from the Sargasso Sea
agctcttaaaaaaggtgaaactcttattgatacagcgatgacattaaacgcaatgcatcctgaccttattgttattaggcatcaagactctggggctccaaatttattatctcaaaaagtaaattgtgcggtgataaatgctggagatggtagacgagaacatcctacacaagcactactagatgctttaacaattataaacagaaaaggtaaaattgaaggacttaaaatagcaatatgtggggacatacttcactcaagagtagcaagatcaaatatatatttaatgaatatgttaggtgcagaagtaaatgttatagctccgaaaactttaatgccaaaatcgattgaaagattaggggcaaaaccttttaccaatatgaaaaaaggattagatggttgtgatatagttatgatgttaagattgcaaaatgaaagaatgcaaggatcttttcttccatctaaaagagagtattacgaattttttggtttaacctcagaaaaattaaagtatgcaaacaaagatgcattaatcatgcacccaggtccaatgaatagaggtgtagaaatagatactaaattagcagatgacataaatgtaagtttagtaaaagaacaagttgaattaggagttgccgttaggatggcctgcttaaaaatatattgtaaataaa

SEQ ID NO: 230014 - DNA, 775 bp, Unknown
  Bacterial polypeptide expressing nucleotide sequence isolated from the Sargasso Sea
gatgacgccactcgccgccaagcgcccgctgcagctgaacgaccaaggtcagctgcgccacttcctctcactcgacggcctgccccgcgagctgctgaccgaaatcctcgacaccgccgactccttcctcgaagtcggcgcgcgcgcggtgaagaaggtcccgctactgcgcggcaagaccgtgtgcaatgtgtttttcgagaactccacgcgtacccgcaccaccttcgagctggccgcccagcgcctgtcggccgacgtcatcagcctcaacgtctccaccagttccaccagcaagggcgagaccctgttcgacaccctgcgcaacctcgaggccatggccgccgacatcttcgtcgtgcgccatgccgactccggcgccgcgcacttcatcgccgagcacgtctgcccgaacctggcgatcatcaacggcggcgacggccgtcacgcgcacccgacccagggcatgctcgacatgctcaccatccgtcgccacaagggcgacttcgagaatctgtcggtggccatagtcggcgatatcctgcactcgcgggtggcgcgctcgaacatgctggcgctgaaaaccctgggctgcccggatatccgcgtgatcgcaccgaagaccctgctgcccatcggcctggaacaaagctacggcgtgcgcgtgttcagcgacgccaatgaaggcctcaaggacgtcgacgtggtgatcatgctgcgcctgcaacgcgagcgcatgcagggcggcctgctgcccagcgagggcgagtctacc

SEQ ID NO: 230015 - DNA, 892 bp, Unknown
  Bacterial polypeptide expressing nucleotide sequence isolated from the Sargasso Sea
tcacaaacacatccttacactttcaaatttctcaatagacgattataaatcagtttttgagttaactgaaagatttaaatctcttaataatgctggtactaaaaaaatacctgctttacaaggaaatttaataacctcaatattttttgaagatagtactagaactcgcaatagctttgaactggcagctaagaggctttctgctgatgttcaaagcttttcgccatcttccagttctttaaataaaggagagactctgatcgatacggcactaacatatgctgcaatgggatctgatattttaatcatcagacattcatcaagtcatgtccctttagaaatttcaaaaaaactcgatgcttctaatgcaaaaacttcggttcttaatgctggtgatggtttacatagccatccaagtcaaggtttactagatctctatacattaataaaattcttttctccaaaattattgaatccagagatattaaattcaaaaaaaatattaatcataggggacgtaattcattcacgagttgctaggtcagatatctgggcgttgaccgcatttggtgcaaacataatattgtgtggtcctccaacacttatccctgatgaatttataaattttgtaagtagttcgcctccaaatcagttagaagatccaatttcttcaagaggttcgatcacaatttctaggtcattaaaagaatctattaaatatgcagatgcagtaattgttctacgattacagaaagaaagaatgattgagaatctactaagcagtatcaaatcatatagtgacaatttttgtttaactccagaaaagctactactaagtaaaaaagatatccctattttgcacccagggcccattaatcgtggtatgaaatag

SEQ ID NO: 230016 - DNA, 601 bp, Unknown
  Bacterial polypeptide expressing nucleotide sequence isolated from the Sargasso Sea
aatggcaaatataaaaaaagctattaaaatctcacaaaaacatcttttaggtatacaagatctatcaatttctgatgtaaattttattttatcagaagcaaaacaatttattaatctaaataaaagtaaaaataaaaaattagatgttttaaggggaaaaactcaaattaatttattttttgaaccttctacacgtacacaaagttcatttgaattagctggaaagagattgggtgcggatgttatgtcaatgaatttaaacaattctgcaattaaaaaaggtgaaacattaattgacacagcaatgacacttaatgcgatgcaccctgatataattgtagtgagacatcaagattctggtgcatcaaatctattatctcaaaaagttaattgtgcagtacttaatgctggtgatggaagaagagaacaccctactcaggctttattagatgcattaactattattgacaggaaagagaaaattgaaggattaaaaattgcaatatgtggagatatagtccactcaagagtagcaagatcaaatatttatttacttaatatgttgggagcagatgtaaatattattgcgccttcaatttaa

SEQ ID NO: 230017 - DNA, 898 bp, Unknown
  Bacterial polypeptide expressing nucleotide sequence isolated from the Sargasso Sea
atggcaactgtaaaaaaagtttcagctattaaaaaaactcccaaacatctattaggtattcaaaatttatcagttcaagaagcaaaaagtatattaattgaagcaaaatctttcattcaattaaatagaagtaactcaaaaaaattagatctgcttagagggaaaactcaaattaatttattttttgaaccttcaactagaacgcaaagttcatttgacttagcggggaaaagattaggtgctgatgtaatgacaatgaatatgagtaactctgctcttaaaaaaggtgaaacactgatcgatacagcaatgacgttaaatgcaatgcatccagatataattgttataagacatcaggattctggtgcaccaaaccttctttctcaaaaagtaaactgtaccgttataaatgcgggtgatggtagaagagagcaccctactcaagcgttgctagatgctttaacaataattaatagaaaaggaaacattgaaggattaaagattgcaatatgtggcgacatacttcactcaagagtagctagatcaaatatttatctaatgaatatgttgggagcagaagttaatgtgatagcgccaaaaactttaatgccccatgatattgaaaaattaggagttaaatcttttactgatatgaaaaaaggattgggtggttgtgatatagttatgatgttgagattacaaaatgaaagaatgcaaggatcttttcttccatcaaaaagagaatactatgaattttttggattaactccagaaaaactcaaattagctaataaagatgctttgcttatgcatcctggtcctatgaacagaggtgttgagattgatacaaaattagctgatgatattaatgttagtctagtaaaggaacaagtgaata

SEQ ID NO: 230018 - DNA, 733 bp, Unknown
  Bacterial polypeptide expressing nucleotide sequence isolated from the Sargasso Sea
tgaagttgccgctaaaagccttaatgcagatataatttccatagctgaaaggtcgagtagccttacaaaaggtgaatctctaagagatacagccagaaatattcaatcattgggggcagatgcaattgttttaaggcactcatcacccgggtctcctctttttctttctgaaattgtggaagtacccgtaattaatgctggagatggtgcacacgagcatcctagtcaggcactactcgatatatttacacttcgcgaaaaatggggatccctcaaaggaaaaaaaattaccattcttggagacatattatttagcagggttgcacgctcaaatatctggggaatgctgaagttgggtgcgaaaatcactctttcgggcccctccactctcgttccaaagaaaatggaagactggggcttgacagtttcttacaatttagaatcagcagtagaggatgcagatgcaattatgttgttacgcattcagcatgagagacaaaccgaaactcactttccctcactgaaagagtattccaaaatgtttggactacgagaaggagagtttgaattaaagaaaaatgcattaattttacaccctggccccattaatcgaggggttgaaatcgattcaaaaatggccgattcgagtcaatctgttgttttggagcaggtttccaatggagtttatgtgaggatggccattctacacttttgttgtaacggcaaagattag

SEQ ID NO: 230019 - DNA, 472 bp, Unknown
  Bacterial polypeptide expressing nucleotide sequence isolated from the Sargasso Sea
ttgcaatttttaatccaaggattaaaaattgcaatatgtggagatattttgtattcacgtgtagctagatcaaatatttacttgttaaccatgcttggagctgaagtaaatatagttgctcctacaaatttgatgccaaaagaaatagaaaaatttggtgttaatacttttactgatatgaaaaaaggactgaaagattgtgatattgtaatgatgttgagattgcaaaatgagagaatgaccagttctttcttatcatctaatagagaatattatgaatactatggtttaacaccagacaaattagatcatgcaaaatctgacgcccttattatgcatcctggtccaatgaacaggggtatcgaaattgataccaggttagctgacgatattaacaagagtgttattaaggaacaggtagaacttggtgttgctgtaagaatggcgtgtttaaaaatattttgtgaataaa

SEQ ID NO: 230020 - DNA, 781 bp, Unknown
  Bacterial polypeptide expressing nucleotide sequence isolated from the Sargasso Sea
atggcggttataaaaaagttttcagctgttaaaaaaacccaagaacatctcttaggaatccaaaatttatctattcaagaagcaaatcttatcttagatgaagcaaaaaattttataaaactaaacagaagtgcttctaaaaaactagacttgttaagaggaaaaacccaaattaatttattttttgaaccctctactcgaactcaaagttcatttgaactggctggtaagagattgggtgccgacgtaatgacaatgaacgttggaaattcttcgttgaaaaaaggtgaaactatactagacacagcaatgtcgcttaacgcgatgcatcctgatattatagtagttagacaccaagattctggtgctccaaatcttttatctcaaaaagttaactgtgcagtaattaatgctggagatggtttaagagaacatcctactcaagcactcttggatgctttaacaataattaatagaaaaggaagaattgaaggtttaaaaattgctatttgtggagatatacttcattcgcgagtagctagatcaaacatttatttattaaacatgcttggagcagaagttaatgttattgctccaaaaactttaatgccaaaatcaataaacaagcttggtgttaaaggatttacaaatatgaaagaaggtttgaaatcatgtgatatcgttatgatgctaagattacaaaatgaaagaatggcaggttctttcttgccttcaaaaagagaatactatgagtactttggattaacacctgacaaataaa

SEQ ID NO: 230021 - DNA, 373 bp, Unknown
  Bacterial polypeptide expressing nucleotide sequence isolated from the Sargasso Sea
gcagaagttaatgtcattgctcccaaaactttaatgcccaactcaataaataagcttggtgttaaagggtatacaaatatgaaagaaggtctgaaatcctgtgatatcgttatgatgcttagattacaaaatgaaagaatggcaggttccttcttgccttcaaaaagagagtactatgaatactttggtttaacacctgacaaattaaaatttgcaaaaaaagatgctttgataatgcaccctggtccaatgaatagaggtgttgaaatagatacaaaacttgctgacgatatcaatgttagcttagttaaagaacaagtagagctaggagtggctgtaagaatggcatgtttaaagctgtactgtaaataat

SEQ ID NO: 230022 - DNA, 700 bp, Unknown
  Bacterial polypeptide expressing nucleotide sequence isolated from the Sargasso Sea
ttgccaaaattaaaagcgatcaggtcatctacaggatcaaaaattcttaaagatgcagaaaatatcgctttaaaatattattcatcaatttcttcaaaaacaaatataaaattaaaacgaaggaaaaatatttttaaaaaaattcatttagtagaaactgctgatttgaccaagaaagaaattgtgtacatcttagatgaatctaaaaaatatataacttttaataaaaagaaaattaaaaaaataaatgttttagaaggaagaacaatatttaatttattctttgaagattcaacaagaacaagaacaagttttgaagttgctgctaaaaggttaggagcagatttaattaatgtagtagtaaaagatagctccataaataaaggtgaaaccttactcgatactatgactactattaattcaatgaatcctgatgttttaatcgtaagacatccagaggaaggaattagtaaaaaaatttcagaaacagtagatgcgtcagtaattaacgcgggtgatggtagtcatgagcatcccacacaagcattattagatgcacttactataaaaaataaatttgaaaattttgcaaaattaaaaatcgctatatgcggggatattttacatagccgtgtcgctcgatcaaacataatcatactatcaaagttaggtgcaaaaataaatgttattgggcctaaag

SEQ ID NO: 230023 - DNA, 718 bp, Unknown
  Bacterial polypeptide expressing nucleotide sequence isolated from the Sargasso Sea
aatgttgtagttaaagatagttctataaataaaggtgaaacattattagatactatgacgactattaattctatgaatccagatatattgattgttaggcatccagaagaaggaattagcaaaaaaatttcaaatactgtagatgcttctgtaattaatgcgggggacggaagtcatgaacaccctacacaagcactactggatgctttaactataaaaaataaatttaaagatttttccaaactacaaattgcaatctgtggtgacattcttcacagcagagttgctagatcaaatataatcatattatcaaaactaggtgcaaagattaatgttataggtccaaaggaatggctaccaaaaaatataaaaaaacttccggttaaagtttttactaacatgatgaagggtttgaataattgcgatattgtaatgatgctcagaatacaaaaagaaagaattgttggtaaaattatgcctaatcaaaagatttattttaaaaagtatggattagactacaataaacttaaatatgctaaaaagaatgcttttgtgatgcatccaggtccaatgaatagaggtgtagaaatagattcagatttagctgatgatattacaaggagtttaatacaagaacaagttgcaatgggtgtggctgttcgtatggcatgtttggatttaattattaaaaatagagataatcttgttagaaattaat

SEQ ID NO: 230024 - DNA, 601 bp, Unknown
  Bacterial polypeptide expressing nucleotide sequence isolated from the Sargasso Sea
catcaagactcagggagctccaaatttattatctcagaaagtaaactgctcagttataaatgctggagacggaagaagagaacatcctactcaagctttgttagatgcattaacaataattaataggagaggaaaagtcgaaggattaaaaatagcaatatgtggagatatacttcattcgagagttgccaggtcaaatatatatttaatgaatatgttaggggcagaagtgaatgttgtagctccaaaaactttacttcctcattctatagagcgtcttggagtaaagtctttcacaaatatgaaaaagggtttggatagttgtgacatagttatgatgttaagattgcaaaatgaaagaatgcaaggttcctttttaccttctgcaagagaatactatgaattttttggtttaacaccagataaattaaaattagcaaaaaaaaatgcattaataatgcatcctggtccaatgaatagaggcgttgagattgatacaaatcttgctgatgacattaacagaagtgtaataagagaacaagttgaacttggtgtagctgtaagaatggcatgcttaaaaatattttgtaaaaaaagctaa

SEQ ID NO: 230025 - DNA, 676 bp, Unknown
  Bacterial polypeptide expressing nucleotide sequence isolated from the Sargasso Sea
aaccttactggatactatgactacaattaattcaatgaatcccgatgttttaatcgtaagacatccagacgaaggaattagtaaaaaaatttccgaaacagtagatgcgtctgtaattaatgcgggtgatggtagtcatgagcaccccacacaagcattattagatgcacttactataaaaaataaatttcaaaattttacaaaattaaaaattgctatatgcggggatattttacatagccgtgttgctcgatcaaacataatcatactctcaaagttaggcgcaaaaataaatgttattggacctaaggaatggctaccaaaaaatttaaataaactacctgttaatgtttatacagaaatgaaaaaaggattacaaaattgtgatattgttatgatgctacgtattcaaaaagaaagaatagttggaaaaataatgccaaatcaaaagacttattttaaaaagtatggattagattacaataaacttgaatatgcaaaaaaaaatgctttcgttatgcatccaggcccaatgaaccgtggcgtagaaatagactcaaaacttgcagatgatgtcactaggagtttaatacaagaacaggtagctatgggcgttgcagtaagaatggcatgcttagacttaattattaaaaacagagatgactttattaagtag

SEQ ID NO: 230026 - DNA, 838 bp, Unknown
  Bacterial polypeptide expressing nucleotide sequence isolated from the Sargasso Sea
ttttttgaagctagtacaagaacaaaaaatagctttgaacttgcagcaaaaaggctctctgccgatgtacaaacgtttgcaccttcctctagttctttaactaaaggcgaaacaataattgatacagccttaacttattctgctatgggagcagatacattagttgttagacattcatcgagttacataacttttgagatagctaaaaaacttgatgcaataaatgcgaagacttcggttcttaatgcgggagatggattacatagtcatcctagccaaggattgcttgacatttatacattaatgaaattcttttccaaaaagtcactgagtccagatgttttaaattccaaaaaaattttaataattggagatgttaatcattcaagggttgcaagatcaaatctttgggctttgagtgcattcggcgcagacatcatcttatgtggtcctaaaacattaatacctgatgaatttataaattttttaaaaaccccggctccaaagcaaatagaagatcctgttaaatcaagaggctccataacaatttctagatcattagaagaatcaattaaaattgcagatgcaattattgttttaagactccagaaagagcgaatgatggagaatttactaagcagcattgattcatatagtttggattatggcttaactccagaaaaattatctttgaatagtaaagaaattccaattcttcatcctggacctattaatagaggtattgaaatcacaagtaaagtagtagatgaatatcctaattgcttaatcaataatcaagttgcaaatggtatcccaataagaatggctttactttatc

SEQ ID NO: 230027 - DNA, 623 bp, Unknown
  Bacterial polypeptide expressing nucleotide sequence isolated from the Sargasso Sea
attgtcaatagataagctctctttaaataatattaatcaaattctcaatttagctgaaaaatatgtagagctgaatagaaaagaagaaaaaaaaattttaaggctttctggcaaaactttagtcaacctttttttcgaaaactcaaccagaacaagaacatcttttgagcttgcaggcaaaagattaggagcagatgttattaatatgtcaatacatggctcttctattaaaaaaggagaaacactactagacactgcaatgactttgaatgctatgcatccagatgttttagtagttcgtcataacgaatcaggagcaataaatttactttcaaaaaaaattgatggagtagttattaatgctggtgatggcagtcactctcaccctactcaagctcttttagatgcactaaccgttagaagaaggctcaaaaaattagatggtcttaagattgctatatgtggtgatattattcatagccgagtagcaaggtcaaatattgaattatttaatataacaggttctcaagtaagagtaattgcacctacaacactcataccaaaagatatagaaaaaatgggggttgaagtataccattctatgaaagctgggcttaaagatt

SEQ ID NO: 230028 - DNA, 544 bp, Unknown
  Bacterial polypeptide expressing nucleotide sequence isolated from the Sargasso Sea
gatacaattcgcactatgggatgttatagtgatatcatagtattaaggtctagaacctctggtgatgcacacatagcagccagtgtgagtgaagttcctataataaatgcgggcgatggtacgggagaacacccaacacaaactcttcttgatctgtataccatacaggaaaattttggaagaataaaagacttgacaattacatttgtgggtgatatagttaacggtagaactgtacattctcttagtaaggttttaaagaattgtcaagtaaattattgtgatacctatgatcttgataagctcccaaagtctgatgtttattatcttacaagagttcaaaaggaaagaggaagtaaaggttcatatcaattaacgaaagagcatgttgaacaaatgccggaggattgtatagtgatgcatccatttcctcgtaataatgaaataccgaaatggtttgatgatgatcctagagcaaaatattttgaacaaatgaaaaatggattatatatgaggatggcaatactcatgtcatataaataat

SEQ ID NO: 230029 - DNA, 807 bp, Unknown
  Bacterial polypeptide expressing nucleotide sequence isolated from the Sargasso Sea
atattacaattgcaaatcttttttttgaaaatagtactagaactaaaatatcttttgaattagctcaaaaaagattaggagctgatgtaattaatttttcgagttcttcttcttctgttaagaaaggtgaatcattacttgatacaataaataatattctggctatgaaagttgatatgattgtcttaagacatcccaatccaggatcatctatacttctttcaaaacatacagaatcttgtataataaacgctggagatggatcgcacgagcacccaacacaggctttacttgattcattctcaatatttgaaaaaattggagacttaaaggataaaaatatattaattgttggagatattcttcactcaagagttgctctctctaatttatatttactaaatctattaggagccaatataaagatttcctctccgcttagtctagttccaaaggatattgaaaaattaaatgtatccgttgaaccagatattaaaaaagcattaagatggtgtgatgctgttaatgtactaagagttcaaagagaaagaatgataaaatcatatttcccagacaatagagagtattctatgctttttggtctagatgaaaataaaattagttctattaaaaaagatattttaattctacatcctggtcctataaatagaggagtagaaattacttctgatcttgtagattcaaataattctattattttagaacaagtagaaaatggagttgcaattagaatggcaataatgtacttattggcttctaaattaaacttttcaattaatgaataat

SEQ ID NO: 230030 - DNA, 758 bp, Unknown
  Bacterial polypeptide expressing nucleotide sequence isolated from the Sargasso Sea
gccatcaactagaacacaaagttcatttgaacttgctggaaaaagacttggtgcagatgttatgtcaatgaatatgggtaactctgcaattaagaaaggtgaaactttgattgatacggccatgaccttaaatgcaatgcatcctgatataattgtgatcagacatcaagactctggtgcatgtaatctattatctcaaaaagttaattgtgtcgtattaaatgctggtgatggtagacgcgaacaccctacccaagcattattagatgcattaacaattagaaatcgaaaaaaaaaaattcaaggattaaaaatagctatatgtggtgacatacttcattcaagagttgctagatcaaatatttatcttcttacaatgttaggagcagaagttaatatagttgcgccatccaatcttatgccaaaagaaattgaaaagtttggtgttaacacttttactgatatgaaaaaaggtctcaaagattgtgatattgtaatgatgcttagattacaaaatgaaagaatgaccggttcatatctttcatcgaatagagaatactatgaatattatgggttaacgccagataaacttgatcatgcaaagtcagatgctttaattatgcatcctggtccaatgaatagaggaattgaaattgatacaagattagctgatgacataaacaaaagtgtaattaaagaacaagttgaattaggtgttgctgtaagaatggcatgtttaaaaatattttgtgaataaa

SEQ ID NO: 230031 - DNA, 661 bp, Unknown
  Bacterial polypeptide expressing nucleotide sequence isolated from the Sargasso Sea
acattacttgacacaatgacaactataaattctatgtcacctgacgtacttatagtaagacatccagaagaaggtataagtttaaaaatctctaaaatagttagtgcatgtgttataaatgcaggagatggtagccatgaacatcccactcaagcattactagatgctttaacaataaaaaaaagatttggtaattttaaaaaattaaaaattgcaatatgtggagatatcttacatagcagggtcgctagatcaaatattgaaattttaacaaaactcggatgcaaaataaacgtggttggaccaaaatctttaattccaaaagatatagataaagttaaagtttacagtaccatgaaagaaggcttaaagaattgtgatatagtaatgatgttaagaattcaaaaagaaaggataatcagtaaacatgtgccaaatgaaaaaatttactttgaaaaatatggtcttgattacaataaactagattatgcaaataaaaatgcttttgttatgcatccaggccctatgaatagagatgtagaaatagattctaaactcgctgatgatgtgactagaagtttaattcaagaacaagtaactatgggagttgctataagaatggcttgcttagaaattttaattaacaatagggatatttaaa

SEQ ID NO: 230032 - DNA, 802 bp, Unknown
  Bacterial polypeptide expressing nucleotide sequence isolated from the Sargasso Sea
aaaaaaatacacttagttgaaacagctgatttaaacaaaaaagaaattgaattcatattagacgaagcccataaatttatttcttttaataaaatgaaaattaaaaaaaatactttgcttgaaggtaggacaatttttaatttgttttttgaagattcaacaagaacaagaacaagttttgaagttgctgctaaaagattaggcgctgatctaataaacgttgctgtcaaagatagctcaattaataaaggtgaaactttacttgatacgatgaccactattaattctatgaatcccgatgttttaatcataaggcacccggatgagggtataagtaaaaaaatttcaatgagcgttgatgcttgtgtcatcaatgctggggatggaagtcatgaacatcctactcaggctttattagatgctttgacgataaaaaatagattcaaaacttttaataaattacaaattgccatatgtggcgacattcttcatagtcgtgtagcaagatcaaatattacaattttatcaaaattaggagcaaagataaatgttattggaccaaaggagtggttgcctaaaaatataaaaaaacttccagtaactgtcttcactgatatgaaaaaaggtctcaaaaattgtgatattgttatgatgcttagaattcaaaaagaacgaattgttgggaaaattatgccaaatcaaaagacttattttaatagatatggattagattacaataagcttgaatatgcaaaaaaaaatgcttttgtcatgcaccctggcccaatgaatagaggttttg

SEQ ID NO: 230033 - DNA, 538 bp, Unknown
  Bacterial polypeptide expressing nucleotide sequence isolated from the Sargasso Sea
atgcatttagttgaaacagctgatttaaataaaaatgaaattgaatttctattaagtgaagctcaaaagtttatttcttttaataaaaatagaattaaaaaaaataatttacttgaaggtagaacgatttttaatttgttttttgaggactccactagaacaagaacaagttttgaagttgcggccaaaagactaggtgcagatttaattaatgtagctgtcaaagatagctcaattaataaaggtgagactttattagacacaatgacaaccattaattctatgaatcctgacgttttaataattagacatccagatgagggtataagtaaaaaaatttcattgagtgtggatgcttgtgttataaatgccggtgatggaagtcacgaacatcctactcaagctttactagatgctttaacaataaaaaatagattcaaaaattttactaaattgcagattgctatttgtggcgatattcttcatagtcgagtagcaagatcaaatataatcattttatcaaaattagggcaaagat

SEQ ID NO: 230034 - DNA, 775 bp, Unknown
  Bacterial polypeptide expressing nucleotide sequence isolated from the Sargasso Sea
atgtcatttgaggaagctgggaaaattttgggctctgacgttattaatgtgtcggctagtgggagcagtgttgagaagggagaatccttggtgaatacggcgaaaactattgaggcgatgaatgtagatgctgtagtgatcaggcatccacattctggagctccgtacatattggccgatcaattcgcttcagcctcagttgtaaatgcaggtgatggtacacatgcccatcctacccaggcattattagatttgtttactgtccttgaacatgtcgattcaatagagggactcaaaattgcaatcgtaggagatgtaatacatagtcgagttgctaggtctaacattcatggatttcttaaattaggggcccatgtctttttagcaggccctgctacgttattgcctaaggccatgccttggttaaggtattacgagtcagaaggtagcctttccatgaccacaaatgtggatgaagctttgaaagacgccgatgtggttatgactcttaggcttcaaaatgagagacaaatttccggatacatacctagtgagcgtgaatatatagctaattggcaaataaactctagcagaattgataaaaattgtcctgatgcatggataatgcatcctggccctatgaatgaagggattgagattagtgaatcgattgctaatggaccaaaatcattgattcagaagcaagttgaaaatggagttgttatcagaatggcggtgttaagccatgtgtgcggggtgaaacataacaaatgaa

SEQ ID NO: 230035 - DNA, 428 bp, Unknown
  Bacterial polypeptide expressing nucleotide sequence isolated from the Sargasso Sea
gatgagcggttggcaccatcgccacattctcgatctggcggccttctccagggaggattacgccgccgtgctcgatctggcggagcggtttcgttccctgcctgtcaccggtgcccgcaaactcccggctttgcagggccgtttggtggcgaccctgttcttcgagcccagcacccgcacccgtagcagctttgagctggccgccaagcgcctctcagccgatgtgcagagcttttcgccctccagcagctctctgagcaaggaggaaagcgtgctggatactgcccgcacctatgtggccatgggcgcggatgtgttggtggtccggcatcgctccactggggtgccccagcaattggccgaggatctggagtcggctggggagcgcacggttgtgctgaacggcggcgatggcctgcacagccatc

SEQ ID NO: 230036 - DNA, 535 bp, Unknown
  Bacterial polypeptide expressing nucleotide sequence isolated from the Sargasso Sea
ccggtcatgcacacccccacgcaggggcctgctcgacatgttcaccatccgtcactacaagaaggattttccaacctgacggtggcgatcgtcggcgacatcctgcactcgcgcgtggcgcgttccgacatccacgcgctgacgacgctgggttgcgccgaagtgcgtgccatcggcccgcgcacgctgttgccgggcggactggagcacatgggcgtgcgggtcttccacaacatggaagagggcctgaagggcgtggatgtggtcatcatgctgcgcctgcagaacgagcgcatgagcggtgcgctgttgccctccgcgcaggaatacttcaaggcctacggcctcacgcaggaccgcctggcgctggccaagccggacgccatcgtcatgcaccccggcccgatgaaccgcggcgtggagatcgactccgccgtggccgacggtgtgcaatcggtgatcctgaatcaggtgacgttcggcatcgcggtgcgcatggcggtcatgggcatcgtggctggcaacaacgactaag

SEQ ID NO: 230037 - DNA, 436 bp, Unknown
  Bacterial polypeptide expressing nucleotide sequence isolated from the Sargasso Sea
tgtgaagacatacttcattcaagagtggctagatcaaatatttatcttcttacaatgttaggagcagaagttaatatagtgcacccatcaaatcttatgccaaaagaaattgaaaagtttggtgtaaacacttttaccgatatgaaaaagggtctcaaagattgtgatattgtaatgatgcttagattacaaaatgaaagaatgaccagttcttatctttcatcaaatagagaatattatgaatattatggattaacgccagacaaacttgatcatgcaaaatcagatgctttgattatgcatcctggtccaatgaatagaggaattgaaattgatacaagattagctgacgacataaacaagagtgtaattaaagaacaagttgaattaggtgttgctgtaagaatggcatgtttaaaaatattttgtgaataaa

SEQ ID NO: 230038 - DNA, 740 bp, Unknown
  Bacterial polypeptide expressing nucleotide sequence isolated from the Sargasso Sea
taaaagattaggtgcagatttaataaatgtagtagtaaaagatagttcaataaataaaggtgaaactttactagatacaatgactacaatcaattctatgaatccagatgttttaattgtaaggcatcctgaagaaggtattagtaaaaaaatttcagaaactgttgatgctagcattattaatgccggcgacggtagtcatgaacatccaactcaagcactacttgatgcattaactattaaaaataagtttaataatttttcaaaattaaaaattgcaatatgtggagatattctacacagtcgagttgccagatctaacataatcatactatcaaaattaggttcaaaaattaatgtagtaggacctaaagaatggttacctaaaagtttaagaaaactgcctgtgagagtatttactgacatgagaaaaggtttagagaattgtgatattgtcatgatgcttcgaattcaaaaagaaagaatagtgggtaaaattatgcctgatcagaggagttattttaaaaagtatggattagactacaataaactaaaatatgctaaaaaaaatgctttcgtgatgcaccctggcccaatgaacagaggagtggaaatagaatctaaactagctgatgatatcacaataagtctaattcaggaacaagtagctatgggagtggctgttagaatggcttgtctagatttgataataaagaatagagataacaatgttagttaat

SEQ ID NO: 230039 - DNA, 877 bp, Unknown
  Bacterial polypeptide expressing nucleotide sequence isolated from the Sargasso Sea
aatggcgcggccgggcataagcgcgccatcgacgccttgccctccccggcctgcttccctaaagcaccggttcatgcccgacatcttcatacccgacgccacccccgacctgacaggccgggcgttgtttccgcacaagcatcttctgtcgatcgcggacctgaaaccctgggaaatccgcttcctgctggatgaggcggagcattgggcgcagacgaacaagggccaggcgcgcaagcatgacggacggctggcggggatgacgcagatcaacgcctttttcgagaatagcacgcgcacattgttgtcgttcgaaattgcgggaaagcggctgggcgcggatgtcgtcaacatggcggcggccacgtcgagcgtgaagaagggcgagacgctgatcgacacggcgatgacgctgaacgccatggcggccgatgtgatcgtgatccgccatgcgagttcgggcgcggtgcggttgattgcggacaaggtggattgtccggtgctgaacgccggcgatggatggcaccagcatcccacgcaagcgctgctcgacgcgctgacgatccggcggcgcaagggcgggttcgaggggctggtggtcgcgatctgcggcgatgtgctgcatagccgggtggcgcggtcgaacatgctgtgcctggccgcgctgggcgcgcaggtgcgggcggtggcgccgccgacgctgttgccgccggaggtggagttgctgggggcgacgccctttacgcggatggacgaggggctggacggggccgacgtggtgatgatgctgcggttgcagaatgagcggatggacggggcgttcaccccctctccgcgcgaatatcatgcgctgtacgggctgacgccggagcggctg

SEQ ID NO: 230040 - DNA, 574 bp, Unknown
  Bacterial polypeptide expressing nucleotide sequence isolated from the Sargasso Sea
atgattaaagatccagtaaataaaaatattgtttcacaaaaagacttacgtcactttttagatattgaaaatctatcgcaatcattaatattagatattctcgatctagcagaatcatttgcgggtgtatcagggcaacctgtaaaaaaagtacctctccttagaggaaaaactatagttaacttatttttcgaagcaagtacaagaacgagaactaccttcgaattagcagctaagagattgtctgctgattttcttaatattaatatagattatagcgcaacaaaaaaaggcgaaactttacttgatactttaaggaatttagaagctatgcattgtgatatgtttattgtaagacacccttcttcaggagctgcagaatttatttcaaaaaatgtttcgcagaatattagtgtaataaatgctggagatggtaggcatgctcacccaacccaagctatgctagatgtttttacaattcgaaaatatttctctgactttaagaaacttaaaattgcaattgttggtgatatccttcattcaagagtcgctagatctttgatgcacgccttta

SEQ ID NO: 230041 - DNA, 658 bp, Unknown
  Bacterial polypeptide expressing nucleotide sequence isolated from the Sargasso Sea
aatggcaattaaaacaaatcaagctattaaaatatctcaaaaacacctattaggaattcaagatttatcaatcaatgatgttaatttaatacttgatgaagcaaattcatttataaaagtaaatcagagtaaaaataaaaaagttgacgttttaagaggtaaaactcaaattaatttattttttgaaccttctactagaactcaaagctcttttgaattagctggtaaaagacttggcgctgatgttatgtcaatgaatattagcaactctgcaattaaaaaaggtgaaacattaatagatacagcaatgactcttaatgcgatgcatcctgacattattgtaattagacatcaagattctggagcatgtaatcttctttcacaaaaagtaaactgtgcagttcttaatgctggtgatggaagaagagagcaccctactcaggctttattagatgcattaacaatcataactcgtaaaaaaaagatacaaggattaaaaattgcaatctgtggagatattcttcattcaagagttgctagatcaaatatttacttacttagtatgttgggggcagaagtgaacataatcgctccaacaaatcttatgccaaaagaaattgaaaaatttggtgttaatacttttactgatatgaaaaaa

SEQ ID NO: 230042 - DNA, 592 bp, Unknown
  Bacterial polypeptide expressing nucleotide sequence isolated from the Sargasso Sea
tgcccggcatttctcgccccagcaccccatgccggaagcgctgcaaggacgccggattgtgattgttggagacatccttcactcgcgagtggcccgttccaatctctgggctttgacggcctgtggagcggatgtggtgttgtgcggtcctcccagcctcgttccagatgactttgctgccttcgtggatgagccccccccaggcctgctagaggatctggtgccccaacggggcaaggtcagcgtggtgcggcgcctggagcatgctctgccggccgccgatgccgtgatgaccttgcggcttcagaaggaacggatgggccagcagctgctcaccagcttggagcgctatcaccgtgacttcgggctgagccatgagcgcatgcagctctgcggtgagaacgttcccgtactgcatcccggcccggtcaatcgcggcgtcgaattgagtgggtcgcttttggatgacccgcgcgtcagccttgtggaagagcaggtcaggaatggcgtgcccacccggatggccttgctctatttgatggcagcttccgaatccgcaactgaggcctctttggtgtcgagcagctcctga

SEQ ID NO: 230043 - DNA, 688 bp, Unknown
  Bacterial polypeptide expressing nucleotide sequence isolated from the Sargasso Sea
attgccaaaattaaaagcaattaggtcatctacaggttcaaaaattcttaaagatgcagaaaatatagctttaaaatattattcatcaatttcttcaaaaacaaatatacaattaaaacgaacgaaaaatatttttaaaaaaattcatttagtagaaacagctgatttaaccaagaaagaaattgagcacatcttagatgaatctaaaaaatatataacttttaataaaaggaaaattaaaaaaataaatgttctagaaggaagaacaatatttaatctattctttgaaaattcaacaagaacaagaacaagttttgaagttgctgctaaaaggctaggagcagatctcattaatgtagtggttaaagatagctctattaataaaggagaaacattatttgatactatgactacaattaattcaatgaatccagatgttttaatcgtaagacatccagaggaaggaattagtaaaaaaatttcagaaacagtagatgcgtctgtaattaatgctggtgatggcagtcatgagcatcccacacaagcattattagatgcacttactataaaaaataaatttgaaaatttttcaaaattaaaaattgctatatgtggggatattttacatagtcgtgttgctcgatcaaacataatcatactatcaaagttaggtgcaaaaataaatgtt

SEQ ID NO: 230044 - DNA, 190 bp, Unknown
  Bacterial polypeptide expressing nucleotide sequence isolated from the Sargasso Sea
ttccccgtactgcatcccggccccgtcaatcgcggcgtcgaattgagtggctcgcttctggatgacccgcgcgtcagcctcgtggaagagcaggtcaggaatggcgtgcccatccggatggccttgctctatctgatggcagcgtccgaatccgcaactgaggcctccttggtgtcgagcagctcctgag

SEQ ID NO: 230045 - DNA, 891 bp, Unknown
  Bacterial polypeptide expressing nucleotide sequence isolated from the Sargasso Sea
gaatccaagatctatcaatatcagatgttaattttattttatccgaagcaaagcaatttattgatctaaataaaagtaaaaataaaaaattgaatgttttaagaggaaaaactcaaataaatttattttttgaaccttcaacacgtacacaaagttcatttgaattagctggaaaaagattaggtgcagacgttatgtcaatgaatctaagcaattctgctattaaaaaaggagagacattaatagatacagccatgactcttaatgcaatgcaccccgatataatagtggtcagacatcaggactctggggcatcaaatttattgtcccaaaaagttaactgttctgtgcttaatgctggagatgggagaagagaacatccaactcaagcattgctagatgcattaactattatagatagaaaaaaaaagattgaaggattaaaaattgcaatatgtggagatatagttcattcaagagtagcaagatcaaatatttatctattaaatatgttgggagcagaagttaatattattgctccatcaaatttaatgccaaaagatattgataaactcggtgttaatagtttttcagatatgaaaaaaggattaaaagattgtgatattgttatgatgcttagacttcagaatgaaagaatgaccagttcttttctttcatcaaatagggaatactatgaatactatggattaactcctgataaattagactttgctaaagatgatgctttaataatgcatcctggcccaatgaacagaggaatagaaattgatactaatttagccgacgatataaataaaagtgtaataaaagaacaagttgaacttggcgttgctgtgagaatggcatgtcttaaaatattttgcgagtgag

SEQ ID NO: 230046 - DNA, 757 bp, Unknown
  Bacterial polypeptide expressing nucleotide sequence isolated from the Sargasso Sea
ttgggtattcaaaatctttcagttcaagaagctaaggacattttaaacgaagctaaatcttttattaaactcaatagaagtgattctaagaaattagacattttaagaggaaaaactcaaattaatttattttttgaaccatcaactagaacacaaagttcatttgatcttgcaggaaaaagattaggtgcagatgtgatgagcatgaatataatcaattcttcacttaaaaaaggagaaactcttatcgacactgctatgacgttgaatgcaatgcatcctgatattattgtgataagacaccaagattctggtgcccccaaccttctagcacaaaaagttaactgcgctgttataaatgcaggtgatggaagaagagaacatccaactcaagcactgttagatgctcttacaataattgacagaaagaaaaaaattgaaggtttaaaaattgcaatttgtggtgacattcttcattcaagagttgctagatcaaatatttatctgatgaatatgttgggtgctgaagtaaacgtagttgctcctaaaactttaatgccaaagtctatagaaaaactaggtgcaaaagcatttactgacatgaaaaaagggttggactcttgcgatattgtaatgatgttaagattacaaaatgagagaatgcaaggatcttttttgccatcaaaaagagagtactatgagtattttggtttaactcccggaaaaattaaaatatgcaagcaaaagatgctttagt

SEQ ID NO: 230047 - DNA, 718 bp, Unknown
  Bacterial polypeptide expressing nucleotide sequence isolated from the Sargasso Sea
gataaatgtagtagtaaaagatagttcaataaataaaggcgaaaccttactggatacaatgactacaatcaattcaatgaatccagatgttttaattgtaaggcatcctgaagaaggcattagtaaaaaaatttcagaaactgttgatgctagcattattaatgccggtgacggtagtcatgaacatccaactcaagcactacttgatgcattaactattaaaaataaatttaataatttttcaaaattaaaaattgcaatatgtggagatatcctacacagtcgagttgccagatctaacataatcatactatcaaaattaggttcaaaaattaatgtagtagggcctaaagaatggttacctaaaagtttaagaaagctgcctgtgcgagtatttactgacatgagaaaaggattagagaattgtgatattgtcatgatgcttcgaattcaaaaagaaagaatagtggggaaaattatgcctgatcaaaagacttattttaaaaagtatggattagactacaataaactaaaatatgctaaaaaaaatgcttttgttatgcatcctggcccaatgaacagaggagtagaaatagactctaaactagctgatgatatcacaataagtctcatacaagaacaagtagcaatgggagtagctgttagaatggcttgtctagatttgataataaaaaatagagataacaatgttagttaa

SEQ ID NO: 230048 - DNA, 628 bp, Unknown
  Bacterial polypeptide expressing nucleotide sequence isolated from the Sargasso Sea
aatgctatgcatccagatattattgtaattaggcaccaagactctggtgcatgcaatcttttgtctcaaaaagttaattgtgcagtacttaatgccggcgatggaagaagagaacatcctactcaagcactattagatgcattaacaataattaatagaaaaaaaaaagttgaaggattaaaaattgcaatctgtggtgacattcttcattctagagtagcgagatcaaatatttatcttcttacaatgttaggtgctgaagttaatattataggtccatctaatttattgcctaaagatctagaaaaatttggtgtaaatatttttactgatatgaaaaaaggcgttaaagattgtgatattgtaatgatgttaagattacagaatgaaagaatgacaagttcttacctttcttctaatagagaatactatgaatattatggtttatctccagaaaaactagaatatgcaaaaaaagatgctttagttatgcatcctggtccgatgaatagaggtatcgagatagatacaatattagctgacgatataaataaaagcgtaataaaggaacaagttgaacttggtgttgctgttaggatggcatgtttaaaaattttttgtagttaat

SEQ ID NO: 230049 - DNA, 802 bp, Unknown
  Bacterial polypeptide expressing nucleotide sequence isolated from the Sargasso Sea
atgggttttaaggataaacatttgctagggatagaacccatgcgccctgaagcaatagtagaaattttagatcttgctgaaaattacgtacaattaaatcgatcgcaggacaaaagagccgaggctctgacagggctgacccaaatcaatatgtttttcgaaaactcgacacgaacccaggcaagttttgagttggcagggaaaaggttgggagctaacgttatgaacttatctaaggaggcaagttctcttaagaaaggtgaaactcttattgacacagcactcactttaaacgctatgaaacctgaccttttaatagtcaggcatcctcaatctggggcagtggatctacttgcacaaaaggttaactgctctgtcttaaacgccggagatggtcgacatgaacatcctacccaagcacttctggatgctttaacaatccgccgcgctaaaggaagattacacagattaagcattgcgatttgcggagatattgctcattcaagagttgctcgctccaacattattcttcttggaaaaatggaaaaccgggtgagattaataggaccatctacactaatgccttctgaaatcgatgacttgggagtcgaagtttaccaagacatgcgtacaggtttaaaagatgtggacgtagtaatgatgctaagattgcaaaaagagcgaatggatggaggctttataccatctgaaagagaatattattaccgctacgggctgaataaagagaaactgtctcatgccaaaggggatgcaattgttatgcatccaggtcccaaatgaa

SEQ ID NO: 230050 - DNA, 824 bp, Unknown
  Bacterial polypeptide expressing nucleotide sequence isolated from the Sargasso Sea
tatggagactttgagtgtaaatcacatattaggaattaaagatttaaccaaagccgatattgatttgattttttcaactgccgacgaatttaaagatgttattaatcgtccaataaagaaagttccaacccttagagacattaccatagctaatttattttttgagaactctacaagaactaaattatcttttgagttagctgaaaaaaggctttcggctgatgtgataaatttttcaagcgcttcgtcttctgttaaaaaaggagaaacgcttttagatacagtgaacaatattttatccatgaaagtggatatggtagttatgaggcatccaaatcctggagcgcaccagtttttgagcagaaacattgacgcaagaattgtaaatgcaggggatggagcgcacgagcatccaactcaggctcttttagattctttttcaatccgagaaaatcttggagaagttgaagggaaaaaagtagttatcgttggagatattttgcattcaagagttgcattgagcaatatttatgctttgcaaaagcagggtgcagaagtaatggtgtgtggtccagctacactaattccaaagtttattgattctcttggtgtaaaagtcgagcacaatttacagaaggctttggattggtgcgatgtggcgaatatgttgagaatacaacttgaacgtcaggattcgaaattttttccttccataagggaatatactatgcagtatggtttgacaatggagcatttgaataatttgaaaaaggagattgttgtaatgcatccagggcctataaatagaggcgtagaaattactt

SEQ ID NO: 230051 - DNA, 767 bp, Unknown
  Bacterial polypeptide expressing nucleotide sequence isolated from the Sargasso Sea
ttttgaaccttctacaagaacacaaagttcttttgagctagctggtaaaagacttggcgcggacgtcatgtcgatgaacattactaattctgcgataaaaaaaggtgaaaccttaattgatactgcaatgacattaaatgcaatgcatcctgatataattgtaattcgacatcaagactctggcgcatgtaatcttttatcacaaaaagttaattgtgctgttcttaatgctggtgatggtagaagagaacatcctactcaagcgttgttagatgctttaacaattattgatagaaaaaacaaaatacaaggtttaagaattgcaatatgtggggacattcttcattcaagagtagcgagatcaaatatttacttactaaatatgttgggcgctgaagtgaatatagtagcaccgtctaatttgcttccaaaagatattgtcaaacttggagtaaatacattttcaaatatgaaaaaaggattaaaggattgtgatatagttatgatgcttagattgcaaaatgaaagaatgacaagttcatttttatcttctaacagagaatactatgagtattacggactaacgcctgataagctaaatgaggcaaaaaaagatgctttaatcatgcatcctggacccatgaatcgtggaatagaaatagacacaaatttagctgacgacataaataaaagtgtaataaaagaacaagttgaactaggtgtggctgttagaatggcttgtttaaaaattttttgtgaaaaatgaa

SEQ ID NO: 230052 - DNA, 793 bp, Unknown
  Bacterial polypeptide expressing nucleotide sequence isolated from the Sargasso Sea
aaaatttctcaaaaacatctcttaggtattcaaaatttatcagtttcagatgtcaattttatacttaaagaagctaaacaatttattagtttgaataaaagcaagaataaaaagatagatgttcttagaggaaaaacacaaattaatttgttttttgagccttctacaagaacacaaagctcttttgaattagctggaaaaagattaggtgcagatgttatgtctatgaatatagtaaattctgcaattaaaaaaggagaaacattaattgataccgcaatgacattaaatgccatgcatccagatttaattgttatcagacatcaagactcgggtgcttgtaatttattatcacaaaaagtaaactgttctgtaattaacgctggtgatggaagacgcgaacatccaactcaagcgttattggatgcattaacaataattgaaaaaaaagaaaaaattcaaggtttaaaaattgctatttgtggagatattttgcattcaagagtagctagatcaaatatttatttattaactatgcttggcgctgaagtaaatataatttcaccaacaaacttaatgcctgaagatattgaaaaatttggcgttaacaaattttcaaatatgaaaaaaggcctaaaagattgtgatattgtcatgatgttaagattgcaaaatgaaagaatgactagttcatttttatcatcaaatagagaatattatgaatattatggtttaactcaagacaagttaagttgtgccaaagatgatgctttaattatgcatccgaggtcct

SEQ ID NO: 230053 - DNA, 424 bp, Unknown
  Bacterial polypeptide expressing nucleotide sequence isolated from the Sargasso Sea
cttcattcaagagtcgcaagatcaaatatttatttacttaatatgctcggtgcagaagtaaacattgtagcaccaacaaatcttatgcctaaagatatagaaaaactaggtgtaaatattttttcggatatgaaaaaaggagttaaagattgtgatattgtaatgatgttaagactacaaaatgaaagaatgactagttcatttttatcctctaatagagaatactacgaatattatggtttaactcctgataaattaaattatgcaaaagaagatgcattaattatgcatccgggaccaatgaatagaggaatagaaatagatactaacttagctgacgatataaacaaaagtgtaattaaagaacaagtagaattgggtgtcgcagtaagaatggcttgcttaaaaattttttgtacttaaa

SEQ ID NO: 230054 - DNA, 565 bp, Unknown
  Bacterial polypeptide expressing nucleotide sequence isolated from the Sargasso Sea
aatggcaaatgtaaaaaaagctattaaaatctcacaaaaacaccttctaggaatccaagatctatcaattttagatgtaaattttattttatcagaagcaaaacaatttattgatctaaataaaagcaaaaataaaaaattagatgttttaaggggtaaaactcaaattaatttattttttgaaccttcaacacgtacacaaagttcattcgaattggctggaaaaagattgggagcagatgttatgtctatgaatttaaataattctgcaataaaaaaaggagaaacgttaattgatactgcaatgacacttaatgcaatgcatcctgatataatagtagtcaggcatcaggattctggtgcatctaatttattatcgcagaaagttaattgcgctgtgcttaatgctggtgatggaagaagagaacatccaacccaagcgctgttggatgcattaactataatagatagaaaagaaaagattgaaggattaaaaatagcaatatgtggagatatagttcattcaagagtagctagatcaaatatttatttacttaatatgttg

SEQ ID NO: 230055 - DNA, 645 bp, Unknown
  Bacterial polypeptide expressing nucleotide sequence isolated from the Sargasso Sea
acactgcgatgacattaaatgcaatgcatccagatattattataataaggcatcaagactctggttcaccaaaccttctttctcaaaaagtaaattgttctgtaattaatgcaggagatggaagaagagaacatccaacccaagctcttcttgatgctttaacaattatcaatagaaaaggaaatattgaaggattaaaaatagctatttgcggtgacatacttcattcaagagttgctagatcaaatatctatttaatgaatatgttaggcgcagaagtgaatattattgctccgaaaacattaatgcctactgaaattgaaaagttaggagttaaagcattcactgatatgaaaaaaggtctggatggatgcgatatagttatgatgttaagattacaaaatgaaagaatgcaaggatcatttctaccttcaaaaagagagtattatgaattttttggacttactccagaaaaattaaaatttgcaaaaaaagatgccttgttaatgcatcccggtcctatgaatagaggtgttgaaattgatacaaaattagcagatgacattaatgttagtcttgtaaaagaacaagttgaatttggtgtagcagtaaggatggcatgtttaaaattatattgtaaataaa

SEQ ID NO: 230056 - DNA, 871 bp, Unknown
  Bacterial polypeptide expressing nucleotide sequence isolated from the Sargasso Sea
aatggcaattaaaaccaataaagctattaaaatctcacaaaaacatctgttaggtatccaagatttatcagttaatgatattaattatatcctggatgagtcagaagctttcattaaattaaatcagagtaaaaataaaaaaattgatgtgttgcgaggtaaaacacaaataaatttattctttgaaccatcaactagaactcaaagctcatttgaacttgctggaaaaagacttggtgcagatgttatgtctatgaatatggtcaactctgcaattaagaaaggtgaaactttgattgatacggcaatgactttaaatgcaatgcatcctgatataattgtaatcagacatcaagactctggagcttgtaatctattatctcaaaaagttaattgtattgtattaaatgctggtgatggtagacgtgagcatcctacccaagcattattagatgcattaacaattagaaatcgaaaaaaaaaaattcagggattaaaaatagctatatgtggagacattcttcattctagagttgctagatcaaacatttatcttcttacaatgttaggagctgaagttaatatagtcgctccttctaatcttatgccaaaagaaattgaaaagtttggcgtaaatacttttacagatatgaaaaaaggtctcaaagattgtgatattgtaatgatgcttagattacaaaatgaaaggatgactagttcatatctttcatcaaatagagaatattatgaatattatggattaacaccagacaaacttgatcatgcaaaaccagatgctttaattatgcatcctggtccaatgaatagaggaattgaaattgatacaagattagctgacgatataaacaag

SEQ ID NO: 230057 - DNA, 720 bp, Unknown
  Bacterial polypeptide expressing nucleotide sequence isolated from the Sargasso Sea
gattgggtgctgatgtaatgtcaatgaatattgttaactccgctattaaaaaaggagaaactttaattgatacagcaatgacattaaacgcgatgcatcctgacattatagttataagacatcaagattcaggtgccccaaatttattatcacaaaaggtcaattgtgctgtaataaatgctggtgacggaagacgtgaacatcctacacaagcattgttagacgcacttaccataataaacaggaaaggaaaaattgaaggattaaaaatagctatttgtggagatattttacattcaagagttgctagatcaaatatttatttaatgaatatgcttggagctgaggttaatgtggtggctccaaaaactttactacctcattcgattgataaattgggtgttaaatcttttactgatatgaaaaagggcttagataaatgcgacatagtaatgatgttaagacttcaaaatgaaagaatgcacggatcttttcttccttcagcaagagaatattatgaatattttggtttaactcctgacaaattaaaagtagcaaaaaaaaatgctcttgttatgcatccaggtccaatgaatagaggtgtagaaatagatactaacttagctgatgatataaatagaagtgtaataagagaacaagttgaacttggtgttgcagttagaatggcctgtttaaaaattttttgtaaaaaaagctaat

SEQ ID NO: 230058 - DNA, 600 bp, Unknown
  Bacterial polypeptide expressing nucleotide sequence isolated from the Sargasso Sea
aatgaaaaataaattatcagtttcaaatttattgggtattaaatacataagtcttgaagatatttactccatttttaatgcagctgataattttaaggaagttattaatagaaaaattaaaaaagtacctagtttgagagatataactattgcaaatttattctttgaaaacagcactagaactaaaatttcatttgaattggcgcaaaaaagattatcagctgatgtagtaaacttcagctcaagtggctcatcaataaaaaagggggaaaccttgtctgatacggtcaacaatattctttctatgaaggttgatatgattgtaatgagacatccaagtcctggagcaagtgtcttcttatcaaaaaatgttaactcatgtataattaatgctggagatggttgtcatgaacacccaactcaagctcttcttgatgcttttacactaaaatcaaaactagggagtttttcaaataaaaatatcttgattgttggtgatattttacattccagggtagcactttccaatattttagtttttaaaaagctaggtgctaatgttaaagtctgtgggccactatcattaattccaaaatatat

SEQ ID NO: 230059 - DNA, 589 bp, Unknown
  Bacterial polypeptide expressing nucleotide sequence isolated from the Sargasso Sea
aatggcaactgaaaaaaaagttacagctattagaaacactcccaaacatctattaggtattcaaaatttatcagttctcgaggcaaaagagattttaaacgaagcaaaatccttcataaaattaaacagaggaagttctaaaaaactagatgtccttaggggaaaaactcaaataaacttattttttgaaccttctacaaggacacagagttcatttgatttagctggaaaaagactaggagcggacgtaatgacgatgaatatgggtaactctgcattaaaaaaaggtgaaacattaattgacactgccatgacattaaatgccatgcatcctgacattattgttataagacatcaagactcgggtgcaccaaatcttctttcacaaaaagtaaattgtacggtcatcaatgcaggtgatggaaggagagaacaccccacacaagcattacttgatgctttaacaattattaatagaaaaggtaacattgagggattaaaaattgcaatatgcggagacattcttcattcaagagttgctaggtctaacatttatttaatgaatatgttgggtgcagaaagtaaatgt

SEQ ID NO: 230060 - DNA, 573 bp, Unknown
  Bacterial polypeptide expressing nucleotide sequence isolated from the Sargasso Sea
aatgcaaatttggcctcataaacatatccacacactcgctaatttttcaattgaagattacaagtcagtatttgaattagctaatagatttgatgcactaaagaatgcagggacgaaaaagataccggccttacaggggactttggtaacatctttattttttgaagctagtacgagaacaaaaaatagctttgaacttgcagcaaaaaggctatctgccgatgtacaaacatttgcgccatcctcaagttctttaacgaaaggcgaaacaataattgatacagccataacttattctgctatgggtgcagatacattagttataagacattcatcaagttacataacctatgagatcgctaaaaaacttgatgcaataaattctaagacttcaattcttaatgcaggcgatggtttacatagtcaccctagtcaaggattgcttgacgtctatacattaataaaattctattccaaaaaaacactgaatccagatgttttaaattccaaaaaaatcttaataattggagacgttaaccattcaagggttgccagatcaaatctttgggcttt

SEQ ID NO: 230061 - DNA, 437 bp, Unknown
  Bacterial polypeptide expressing nucleotide sequence isolated from the Sargasso Sea
ttgtggcgacattcttcactctagggtagcaaggtctaatatatatttacttaacatgttaggtgcagaagtaaatatcgtagctccctcaaatttgatacctaaagatatagataaactaggagtaaataaatttactgatatgaaaaaaggtgtaaaggattgtgatatagttatgatgcttagattacaaaatgagagaatgacaagttcatttttatcttccaatagagaatattatgaatactacggtctaacaccagataaattaagttttgctaaagaggatgctttaataatgcatccaggacctatgaatagaggaatagaaattgatactaaattagcggatgatatcaataaaagtgtaatcaaagaacaagtagaactcggagttgctgttaggatggcatgtttaaaacttttttgtgaataat

SEQ ID NO: 230062 - DNA, 421 bp, Unknown
  Bacterial polypeptide expressing nucleotide sequence isolated from the Sargasso Sea
atgagcggttggcaccatcgccacattctcgacctggcggccttctccagggaggattacgccgccgtgctcgatctggcggagcggtttcgttccctgcctgtcaccggtgcccgcaaactcccggctttgcagggccgtttggtggcgaccctgttcttcgagcccagcacccgcacccgtagcagctttgagctggccgccaagcgcctctcagccgatgtgcagagcttttcgccctccagcagctctctgagcaagggggaaagcgtgctggatactgcccgcacctatgtggccatgggcgcagatgtgttggtggtccggcatcgctccactggggtgccccagcaattggccgaggatctggagtcggctggggagcgcacggttgtgctgaacggcggcgatggcctgcaca

SEQ ID NO: 230063 - DNA, 712 bp, Unknown
  Bacterial polypeptide expressing nucleotide sequence isolated from the Sargasso Sea
gatgaaaataaaccatagtattcagattcaagacaataaactcaagcactttctgaatatcaagtccttacccaaagctcatattttagagataatatcaagagcagaggatattcataataataacaaaatatcaaaatactcgaataaagtagttgctagcttattttttgagccaagcacacgaacaaaaacaacttttgaattagcctcaaaaaagatttcagcagattttattaatattgatatatctaattcttcaacttcaaaaggcgaatctatattggatatgattaaaacaatagaagctatgagctgtcaaatgtttgtagttagacattctgttcctggcacagcgcattatattgcagaatcagtaagtaataatatctctgtaattaatgccggagatgggtctaatgaacaccccactcaagcaatgcttgatatgtttactatcaaaaaacataaagggcgtttcgacgatctaaaagtttcaatagttggtgatattcttcactctcgtgtagcaaaatcacttatctattcactaaatattttagggactagagaaataaatattgttggtcctgaaagcttaataccagagaactacagcaaaatgagtgtaaattatttttctgatatgaacaaaggcattgaggatgcagatgttatcattatgcttagattgcaaaaagaaaggatgcat

SEQ ID NO: 230064 - DNA, 640 bp, Unknown
  Bacterial polypeptide expressing nucleotide sequence isolated from the Sargasso Sea
tgatggaattgttatgagacatcctactccaggttcatgccaacaattaagtgaatatgtagattcagtaattattaatgcaggagatgggactcatgaacatcctactcaagcaatgctagatatgatgagtcttcatgaaaaattcggatcattatcaggtttgaaagtagctataataggtgatattttgcatagccgagtagctctatccaatatttatggattaaataagatgggggcaaaagtaatgctttgtggtcctcctcatttaattcctcctaatattgaagagttgggagttttagtagttcatgatttaaatcaagtgttagaatgggcagatgctataaacgttcttcgcattcaaagagagcgaatgggtattgggttaatcccctcagttagagaatatagagatttttttggtatcacaaaaaaaaggttgctatctgcaaaaaaagaaattgtcgtaatgcatccaggacccatgaatagaggcgttgaaatagatagtgatgtggcggaaagtgagcaggctattatattagatcaggttttaaatggagttgcaataagaatgagtattttatattctcttttaggcaatgagaaagaactaaaaaatgaagaaaaataa

SEQ ID NO: 230065 - DNA, 547 bp, Unknown
  Bacterial polypeptide expressing nucleotide sequence isolated from the Sargasso Sea
ctgggcatcgatggcatgacccgtgctgatctcgaggaactccttgagttgactgacacgttcgcggaggtcggccgtcgaccgattcccaaggttccagcactgcgcggtcggacggtggcgaccgtcttcttcgagaactcgaccaggacccggatgtcgttcgatacggcggctcggcgcctctcggccgacaccatcgccttcagcatcggcggttcatcgatctccaagggcgagagtctgcgcgacaccgtcgaggtggtggcctcctacggggtcgacgccctggtcgtgcgccatccgatggccgggacggcccatcgggtggctgactggacgaatgcttcggtggtcaacgctggagatggttgccatgaacatcccactcaagcgctgctggactgctacacgctccgcgagcactgcggggctctggatggcatgcggatcgcaatcgtgggcgacgttcgccattcccgggtggcccgctccaacatccttgccttcacgaccttgggtgccgaggtggtgctcgggcaccggc

SEQ ID NO: 230066 - DNA, 418 bp, Unknown
  Bacterial polypeptide expressing nucleotide sequence isolated from the Sargasso Sea
atgttaggtgtcaacgaagttagaataattggtcctcatactcttataccaaacgaaatcgaaaaacttggtgtccatgtttaccatgaaatgaatagcggcctaaaagatgttgatgttgttgttatgctaagactgcaacgcgaacgtatgcgtggcgcattattaccaagtgaaaatgaatattttaagaggtatggtctaactgttcaaagactgaaacacgcaaaaaaagatgcaattgtaatgcatccagggccaataaatcgaggtgttgaaattgattctgatgttgcagatgggaaacactctgtgatactacaacaagtcagtcatggtattgctatacgaatggcaattatggcaatggtaatgggtcaaataaacaaaaatgcaaacaaggaaaagaaaaaataat

SEQ ID NO: 230067 - DNA, 570 bp, Unknown
  Bacterial polypeptide expressing nucleotide sequence isolated from the Sargasso Sea
tactttcacaaaaagttaattgtgcggtgctaaatgctggtgatggaagaagagaacaccctactcaagctcttttagatgctttaacaattataactcgaaaaaaaaaaattgaaggattgaaaattgcaatatgtggtgacattctacattcaagagtagcaagatcaaatatttatcttctcaatatgcttggagctgaagtaaatataattgctccaacaaatcttatgccgaaagaaatcgaaaaatttggtgttaatacttttactgatatgaaaaaaggattgaaagattgtgatatcgtcatgatgctaagattgcaaaatgaaagaatgacaagctcatatctttcatcaaatagagagtattatgaatattacggtttaactcccgataaacttgagcatgctaaatctgatgcattaattatgcaccctggtccaatgaatagaggtatagaaatagatacaatattagcagatgacataaataaaagcgtaattaaagaacaagttgaactaggtgttgctgtaagaatggcttgtttaaagatattttgtacatgat

SEQ ID NO: 230068 - DNA, 541 bp, Unknown
  Bacterial polypeptide expressing nucleotide sequence isolated from the Sargasso Sea
aacgctggagatggtagaagagaacatccaacacaagctttacttgatgctttgactataattgataggaaaggaaagattgaaggtcttaaaattgcaatatgtggagatatattacattcaagagttgctagatcaaacatatatttgatgaacatgttaggtgctgaagtaaatgttgttgctcctaaaactttaatgcctaattcaataaaaaaacttggtgtcaaagctttcacaaacatgaaaaagggattggactcttgtgatatcgttatgatgttgagacttcaagatgaaagaatgcaaggatcttttcttccatcaaaaagagaatattacgagtattttggattaactcctgaaaaattaaagtatgctagtaaggatgctttagttatgcatcctggtccgatgaatagaggtgtggaaatagataccaaattagcagacaatattaatgttagtcttgtaaaagaacaagtagaactaggtgtggcagtaagaatggcatgtttaaaaatatattgtaaaaaataaa

SEQ ID NO: 230069 - DNA, 640 bp, Unknown
  Bacterial polypeptide expressing nucleotide sequence isolated from the Sargasso Sea
aatggccaaccaaaataaagctattaaaatctctcaaaaacatttattaggaattcaagatctttcaattaaagatgttaattacattttaaatgaatccaagcaatttatagatcttaacaaaagtaaaaataaaaaattagatatactaagaggaaaaacacaaattaatttgttctttgagccttcaacaagaacacaaagttcttttgaattagctggtaaaagattgggtgctgatgtgatgtctatgaacattggaaattctgcaataaaaaaaggtgaaacgttaatagatacagcaatgactttaaatgcaatgcatcctgacataatagttgtaagacatcaagactctggagctacaaatcttttatctcaaaaagttaattgctctgttcttaatgcgggtgatggaagaagagaacatcctacgcaagctttgcttgatgctttaactataattgacagaaaaaagaaaattgaaggtttaaagattgcgatatgtggagatatacttcattcaagagtagcaagatcgaatatttatcttcttaatatgcttggagcagaagtaaacattgttgctcctacaaatcttatgccaagagacattaaaaaatttggtgtaggtattttt

SEQ ID NO: 230070 - DNA, 286 bp, Unknown
  Bacterial polypeptide expressing nucleotide sequence isolated from the Sargasso Sea
cctttctgatgctgatgtagttgttgcacttcgtgtgcaaaaagagcgaattgagtcttgtgagaatgatctgtctctagatcaatattcaaaaatttaccagctatctcaagacaaactagaattatgcaaaccggatgcaatagtcatgcatccaggtcctatgaatagaggagttgaaatttccaacgaagttgccgatggaaagcaatctgtcattctgaagcaggtggaaaatggggtggcaatccgaatggctgtcttaactgaaatattgaaacaataa

SEQ ID NO: 230071 - DNA, 637 bp, Unknown
  Bacterial polypeptide expressing nucleotide sequence isolated from the Sargasso Sea
aatgcaatgagacctgatttattggtggtcaggcattcttcttcaggggcagcaaatctcttatcagaaaaagtaaattgctcagttcttaatgctggagatggcagtcatgaacacccgacacaagcattacttgattttttgactataaagcataggaagaaaaaaaaagagggattgataattgctatttgcggagacataaatcatagtcgggtagctcgatcaaatatagctctattatctaagtttaacaatcaagtccggcttattggtcctagcaatttattgtcggcctcatttaaagaaatgggtctagagacatacaatcgcatggaagatggtgttagaggagctgatgtcatcatgatgctcagactacaaaaagaacgtatgaaggttggatttattccatcaaggcgtgagtatttcaatcgctttggtcttgataatcagaaactgtcattagctaaaagtgatgcaattgttatgcaccctggtccaatgaatagaggagttgaaattgatggcattattgctgatgacctaaatagaagcgtgatccaagaacaagtagaaatgggtgttgccttgagaatggcggtacttcacctactagttggtaggaaagaataag

SEQ ID NO: 230072 - DNA, 520 bp, Unknown
  Bacterial polypeptide expressing nucleotide sequence isolated from the Sargasso Sea
ctcatccaacccagggcgatgttagatatctttacgattagaaagtatttttctgattttacaaagataaaagttgctattgttggagatattttacattcaagagtagctagatctttaatgcatgctttaagaatcctagaggttcctgatattagagttattggacctaaaacattattgccagctggtatagagtatatgggtgtaactccatatgttgacatggataaaggaattaaagattgtgatgttgtaataatgcttagattgcaaaatgaaagaatgaattcaagttttattccagacgaacatgaatactataacttatatggtttttctccaaaaaggctagaacttatttcaaaaaaaggaatagttatgcatcccggaccagttaatcgtggagttgaaataagttccgaggtagctgatggagacagatctgtaatattgcaacaagtttcaaacggcatcgctgtacggatggcaattttatcactttccatgcagccttaga

SEQ ID NO: 230073 - DNA, 868 bp, Unknown
  Bacterial polypeptide expressing nucleotide sequence isolated from the Sargasso Sea
ttgtttcaactaatggctaaaaatctaatatctatttctgacttatctaagaatgaaattttagaaattattaagttttctgatagttttattgatgatgaaggtaattttagaaaagaggatctttttccagataagactattgcaaatgttttctgtgaaccaagcaccagaactaaatcttcgttctctatcgctgcatcaaacctaggatgttctgtattagattttgatgtaagtaattcttctatacaaaaaggagaaacaatctatgagactattgatgcacttcatctaatgggtgttgatttatgtgtactaagacattctgactcagtgataaaggatcttgcagaatatttaccaaatatgacttttgtaaatgcaggcgagggtatgttgtcacatccaactcaaaccttgcttgatttaaagacaataatggataataaaaaaactctagatagccttaaaattgtaattgtgggtgatcttgatcactctcgtgttacttcatcttttctcgaggttctcaaaaattttgagctagaggcacttgttttgtcaggtcatcccgcaatgtgcacaaaatatatagacaataaacagggggtatatgaaccagatttgaataaagctttggacaatgctgacgttgtgatggctttaagaattcaacatgaaagattcgaacaagagctagatttagatttagaaacttacaaacaagactaccaactaacttctgaaaagatggataatgcaaaaggagatgcaataattatgcatccaggaccagtaaattatatagaaatctcagagtctatttatgattcagagcaatcagtgattagacagcaggtcaaaa

SEQ ID NO: 230074 - DNA, 667 bp, Unknown
  Bacterial polypeptide expressing nucleotide sequence isolated from the Sargasso Sea
atgggggcagaagctatagtggtccgccataagtctgtcggagttccttggataataactgaatggacagacgcttcaatcgttaatgctggtgatggagctcatgaacatccaacccaatcactagctgattgttacaccattacacgtcagcttggaagcgtagaaggaaaacgaattgttattgtaggggatatcaagcactccagagttgcgcggtctaacgtaaaggcattcagcgctcttggagcaaaggtcgcactagtagccccaccgactctgttgccctcatccatagataattggccggtggatgtcatagaagatttcgacgttgcaataaaagaagctgacgtcctatatctcctccgtatgcaacttgaacgtcaggaagaatcgttagttccatcgctgcgcgagtatacaaatttctacggtttgaccctagaccgttctcaaaagcttcagaagtcttcagtaataatgcacccggggccaatgaatcgaggggttgaaatcacaggagatgttccagatttaccaaatgcgcttattacgaaccaagtaggaaatggagtaatcgtaagaatggcgattctctaccacctacttggctctggagtagctctctccggactacatagtgagggtgaagaagatggttaat

SEQ ID NO: 230075 - DNA, 921 bp, Unknown
  Bacterial polypeptide expressing nucleotide sequence isolated from the Sargasso Sea
aatggcaaatgtaaaaaaagctattaaaatctcacaaaaacatcttctaggaatccaagatctatcaatttctgatgtaaattttattttatcagaagcaaaacaatttattgatctaaataaaagtaaaaataaaaaattggatgttttaagaggaaaaactcaaataaatttattttttgaaccttcaacacgtacgcaaagttcatttgaactagcaggaaaaagattgggtgcagatgttatgtcgatgaacttaaataattctgcaattaaaaaaggggaaactttaatagacactgcgatgacactcaatgcaatgcatccagatataatagtagtgagacatcaggactctggtgcatcaaatttactatctcaaaaagttaattgtgcagttctaaatgctggagatggaagaagagaacatccaacccaagcattgttagatgctctaactattatagatagaaaagaaaaaattgaaggattaaaaattgctatatgtggagatatagttcattcaagagttgcgagatcaaacatttatttacttaatatgttaggagcagaagtaaatattattgcaccttcaaatttaatgccaaaagatattaataaacttggagttaatagtttttcagatatgaaaaaaggattaaaagattgtgatatagttatgatgcttagacttcaaaatgaaagaatgaccagttcctttctttcatcaaatagggaatactatgaatactatgggttaacaccagataaattaaactttgctaaagctgatgccttgataatgcaccctggtccaatgaacaggggaatagagattgatacaaatttagccgacgatataaataaaagtgtaataaaagaacaagttgaacttggagtagctgtaagaatggcgtgtct

SEQ ID NO: 230076 - DNA, 580 bp, Unknown
  Bacterial polypeptide expressing nucleotide sequence isolated from the Sargasso Sea
aatggcaattaaaacagataaagctattaaaatttcccaaaaacatttgttaggtatccaagaactatcgatcaacgatgttaacttaatactcgacgaagctcactcatttataaaagtaaatcagagtaaaaataaaaaaatagatgttttaagaggtaaaactcaaataaatctcttttttgaaccttctacaagaactcaaagctcttttgaattagcaggtaaaagattaggggctgacgtaatgtctatgaacattagtaactcagcaattaaaaaaggtgaaacattaattgatactgcaatgactttgaatgcaatgcacccagatataattgtggttagacaccaggactcaggtgcatgtaatttgctttcacaaaaagttaattgtgcagttttaaatgcaggagacggaagaagagaacacccaactcaagcgttgttagatgctttaacaatcataaaccgaaaaaaaaaaatcgagggactaaagattgctatttgtggtgatatacttcattcaagagtagctagatcgaatatttatttactaaatatgttgggagctgaagta

SEQ ID NO: 230077 - DNA, 740 bp, Unknown
  Bacterial polypeptide expressing nucleotide sequence isolated from the Sargasso Sea
gagttcatttgacttagctgggaaaagactaggtgcagatgtgatgacgatgaatatgggtaactctgcattaaaaaaaggtgaaacattaattgacactgctatgacattaaatgcgatgcatccagatataattgttataaggcatcaagattctggcgcaccaaatcttctttcacagaaagtaaattgtacagtaataaacgctggcgatggaagaagagaacatcctactcaagctttgcttgatgctttaacaatcattaatagaaaagatagcattgagggattaaaaattgcaatatgtggggacattcttcattcaagagttgctaggtctaatatttatttaatgaatatgttaggcgcagaagtaaatgtcattgcaccaaaaactttaatgcctacaggtatagagaacttaggagtaaaatcatttacggacatgaaaaaaggattagatggatgcgatattgttatgatgttgagattacaaaatgaaagaatgcaaggatcatttcttccatctaagcgtgagtattatgaattttttggactgactcctgaaaaactaaaatttgcaaaaaaagatgctttgctgatgcatcctggcccaatgaacagaggagttgaaattgataccaaactagcagatgacataaatgtcagtctcgtaaaagaacaagttgaattaggagtagcggtcaggatggcttgtttaaaattgtactgtaaataaa

SEQ ID NO: 230078 - DNA, 430 bp, Unknown
  Bacterial polypeptide expressing nucleotide sequence isolated from the Sargasso Sea
ctatcaaatatatatgcacttaatcttttaggagcaaatattaaaatatcatgtcctttaagtttgataccaagagaaattgagagtcttaatgtctcaattgagacagatataataaaagccctgaagtggtgtgatgcagttaatgttttaagagttcaaaaggaaagaatggaaaaatcttattttccaaatgatagagaatattcaatgttatatggacttgataccacaaaaataaatgatataaaaaaagatatcttaattcttcaccctggaccaattaatagaggagtagaaattacttctgaaattgtagaatcaaataattcaattattttagatcaagtagagaatggtgtagccataagaatggctgttatttatttactagcatcgaagatgaatttttcaataagtgaacaatgaa

SEQ ID NO: 230079 - DNA, 425 bp, Unknown
  Bacterial polypeptide expressing nucleotide sequence isolated from the Sargasso Sea
tttacattcaagagttgctagatcaaatatatatttattaacaatgctaggagctgaagtaaatattattggaccaactaatttattaccaaaagatttagaaaaatttggagtgaatatttttactgatatgaaaaaaggagttaaagattgtgatattgtaatgatgcttagacttcaaaacgaaagaatgacaagttcatacttatcatcaaatagagagtattatgaatattatggtttatcaccagaaaaactagattatgcaaaaactgatgcgttagtaatgcatccgggaccaatgaatagaggtatagaaatagatactatgctagctgatgatataaataaaagtgttattaaagagcaagtagaactaggtgttgcggttagaatggcatgcttaaaaattttttgtagttaat

SEQ ID NO: 230080 - DNA, 889 bp, Unknown
  Bacterial polypeptide expressing nucleotide sequence isolated from the Sargasso Sea
atggctataataaaaaagttttcagctgttaaaaaaatcgaaaaacacctcctaggtatccaaaacttatctattcaagaagcaactctcatcttagatgaagcaaaaaattttataaagttgaatagaagtacgtctaaaaaattagatttgctgagaggtaaaactcaaattaatttattttttgaaccctctacccgaacacaaagttcttttgagctagctggcaagaggctaggtgctgacgtgatgacaatgaatgttgggaattcttcattaaaaaaaggcgaaactatcctagatactgcaatgtcacttaatgcaatgcaccctgatataatagtcgtcagacaccaagattctggtgcgccaaatcttttatctcaaaaagttaattgtactgtaattaatgctggtgacggtttaagggaacatcctactcaggctctacttgacgctttgacgataattaatagaaaaggaaaaattgaaggcttaaaaattgctatttgtggggacatactacattctcgagttgcgagatcaaatatttatttgcttaatatgcttggagcagaggttaacgttattgcgccaaaaactttaatgcctacttcaattaataaacttggcgtcaaaggatttactaatatgagagaaggtttaaaatcctgtgatatcgttatgatgttaagattgcaaaatgaaagaatgaaaggatcttttttaccttcaaaaagagaatactatgaatattttggattaactcctgataaattaaaacttgcaaaaaaagacgcattaattatgcatcctggtcctatgaatagaggtgttgaaattgatacaaaacttgctgatgacatcaatgttagtttagtgaaagaac

SEQ ID NO: 230081 - DNA, 582 bp, Unknown
  Bacterial polypeptide expressing nucleotide sequence isolated from the Sargasso Sea
tctgggtatacaaaatctatcagttctggaagctaaacaaattttaaaggaagcaaaagaatttataagcttaaacagaagtgtttcaaaaaaattagatacattaagaggaaaaactcaaattaatttattttttgagccatctacaagaactcaaagttcatttgatttagctggaaaaagattaggtgctgacgtcatgagtatgaatatgaataactcagctcttaaaaagggtgaaactcttatcgatacagcaatgacattaaatgcaatgcatcctgatcttattgttattagacatcaagactcaggagctccaaatctattatctcaaaaagtaaattgtgcagtaataaatgctggagatggtagacgagaacatccaacacaagcactacttgatgctttaacaattataaacagaaaaggtaaaattgaaggacttaaaatagcaatatgtggagatatacttcattcaagagtagcgagatcaaatatctacttaatgaatatgttgggtgctgaagtaaacgttatagctccaaaaactttaatgccaaaatcaattgaaagattagg

SEQ ID NO: 230082 - DNA, 469 bp, Unknown
  Bacterial polypeptide expressing nucleotide sequence isolated from the Sargasso Sea
aaagttcaaggattaaaaattgcaatttgtggtgacattttgcattcaagagtagcaagatcaaatatttatttaatgaatatgttaggcgctgaagttaatgttgtagcacctaaaactttattgcctcattcggtagaacgccttggcgttaaggtttttaatgatatgaaaaaaggattaagggattgtgatatagttatgatgttaagattacaaaatgaaagaatgcatggttcattcttgccgtcacctagggaatattatgaatattttggtcttactccagacaaactttcggcagcaaaaaaggatgctttaataatgcacccaggtccaatgaatagaggagttgagatagacacaaatttagctgatgatatcaataggagtgttataagagaacaagttgaacttggtgtagctgttagaatggcttgcttaaaacttttttgtaataaaaaataat

SEQ ID NO: 230083 - DNA, 400 bp, Unknown
  Bacterial polypeptide expressing nucleotide sequence isolated from the Sargasso Sea
gtgatcaggcatcaagactctggtgcttgtaatcttttatctcaaaaagttaattgtgttgtattaaatgctggtgatggaagacgtgagcaccctactcaagctttactggatgcattaacaattagaaatcgaaaaaagaaaattcaaggattaaaaattgctatatgtggagatatacttcattctagagtagctagatcaaacatttatcttcttacaatgttaggtgcagaagttaatatagttgcaccatccaatcttatgccaaaagaaattgaaaagtttggtgttaatacttttacagacatgaaaaagggcctcaaagattgtgatattgtaatgatgcttagattacaaaatgaaaggatgactagttcatatctttcatcaaatagag

SEQ ID NO: 230084 - DNA, 808 bp, Unknown
  Bacterial polypeptide expressing nucleotide sequence isolated from the Sargasso Sea
atggcaactaaatcaaacaaagctattaaaatctctcaaaaacatttgttaggcatccaagatttatcaattaatgatgttaatttgattctagatgaatctcaaaaattcataaaacttaaccaaagtaagaacaaaagattgaatgttctaaatggaaaaacacaaattaatcttttttttgaaccctcaactagaacacaaagttcatttgaattggcaggaaaaagattaggtgcagacgtaatgtctatgaatatgggaaattcagcaattaaaaaaggtgaaacattaattgatacagcaatgactttaaatgcaatgcacccagacataattgtaataagacatcaagactcaggtgcttgtaatcttttatcacaaaaagtaaattgtgcggtactaaatgcgggggatggaagacgagaacaccctactcaagcattacttgatgctttaacaataattaataggaaagataaaattcaaggattaagaattgcaatttgtggagatattctccattcaagagtagctagatctaatatttatttattaactatgttaggtgctgaagtaaatattgtagcaccatcaaatcttatgcctaaagaaatagaaaaatttggagtaaatacttttaccgatatgaaaaaaggactaaaggattgcgatattgtgatgatgttaagacttcaaaatgaaagaatgaccagttcatttttatcatcaaatcgagaatattatgaatattatggcttaacaccagacaagctagatcatgcaaaaccaagatgcaattataatg

SEQ ID NO: 230085 - DNA, 763 bp, Unknown
  Bacterial polypeptide expressing nucleotide sequence isolated from the Sargasso Sea
atggcaattaaaactaataaagctattaaaatttcacaaaaacatctgttaggtattcaagatttatcaattaatgatgttaatttaatacttgatgaagcacattcgtttataaaagtaaatcaaagcaaaaataaaaaggttgatgttcttaaaggtaaaactcaaattaatctattttttgaaccatcaacaagaactcaaagttcatttgaattagctggtaaaagacttggagctgatgtcatgtctatgaatattagtaattcagcaattaaaaaaggtgagacattaatagatacggcgatgactctaaatgcaatgcatccagatatcattgtaataagacatcaagattcaggtgcatgtaacctactctcacaaaaagtaaattgtgctgttttaaatgctggagatggaagaagagaacaccctactcaagctttattagatgctttaacaattattaatcgcaaaaaaaaaatcgaaggtttaaaaattgcaatttgtggtgacatacttcattcaagagtagcaagatctaatatttatttacttaatatgctgggagcagaagttaatattgttgctcctagcaatctaatgccaaaagaaatagaaaaatttggtgttaatacttttacagacatgaaaaaaggtttgaagaactgtgatatcgtaatgatgttaagattacaaaatgaaagaatggccagttcttatctttcatcgaatagagaatattatgaatattatggattaa

SEQ ID NO: 230086 - DNA, 562 bp, Unknown
  Bacterial polypeptide expressing nucleotide sequence isolated from the Sargasso Sea
aatggcaataccaactaataaagctattaaaatttcccaaaaacatttgttaggaatccaagatttatcaataaatgatgtaaatttaatacttgatgaagctaaagactttataaaggttaatcaaagtaaaaacaaaaaaatagatgtgctaaaaggtaaaactcaaataaatttattttttgagccatccacaagaacacaaagttcttttgaacttgcaggaaaaagacttggggctgatgtaatgtctatgaacattagcaattcagccataaaaaaaggtgaaacgttaattgatactgcaatgacattaaacgcaatgcatccagatataattgtcattagacatcaagattctggtgcatgtaatttactttcacaaaaagttaattgtgcggttttaaatgcaggtgatggtaggcgtgagcatccaacacaagctttacttgatgctttaacaatcattaaccgtaaaaaaaaaatagagggtttaaaaatagcaatttgtggagatatattacattctagagtagctagatcaaatatctatttactaaat

SEQ ID NO: 230087 - DNA, 259 bp, Unknown
  Bacterial polypeptide expressing nucleotide sequence isolated from the Sargasso Sea
gaccagcctggagcgctaccaccgcgatttcgggctgagccatgagcggatgcagctctgcggtcagaacgttcccgttctgcaccccggccctgtcaatcgcggtgttgaactgagtggctcgctcttggatgaccagcgcttcagcctggtggaagagcaggtcaggaatggcgttcccacacggatggccttgctctacttgatggcagcttccgaatccgcaactgaggcctccttgatgtcgagcagctcctga

SEQ ID NO: 230088 - DNA, 208 bp, Unknown
  Bacterial polypeptide expressing nucleotide sequence isolated from the Sargasso Sea
gtcaaagcgcagtttgtcctgcgcgccgccgacctcgaaggcgcccgtcacaatatgaaagtgctgcacccgctgccgcgcattgatgaaatcaccaccgatgtcgataaaacgccgcacgcctggtacttccagcaggccggcaacggcatcttcgcacgccaggcgttactggcactggtactgaatagcgagctggctctgtaag

SEQ ID NO: 230089 - DNA, 838 bp, Unknown
  Bacterial polypeptide expressing nucleotide sequence isolated from the Sargasso Sea
aaaagcaaaaataaaaaaattgatattttaagaggtaaaactcaaatcaatctctttttcgagccgtcaacaagaacacaaagttcttttgagttagcaggtaagagattgggtgcagatgtaatgtcaatgaatattgtaaattcagcaattaaaaaaggtgaaaccctaattgatactgcaatgacattaaacgcgatgcatccagatatcatcgttatcagacatcaggattcaggagcgtgtaatctactttcacaaaaagtaaattgtgctgtattaaatgctggagatggaagaagagaacatccaactcaagctttattagatgcattaacaattattgatagaaagaaaaaaataggtggattaaaaattgcaatttgcggtgatattctccattcaagagttgcaagatcaaatatttatttacttaatatgctaggggctgaattaaatattgttgcaccatcaaatttaatgccaaaagatattgagaaattaggaataaacaaatttactaacatgaaagacggcgtcaaagattgtgatattgtcatgatgttaagattacaaaatgaaagaatgacaagttcatttttatcatcaaacagagagtattatgaatattatggtttaacaccagataaacttaaattagcaaaagaggatgcacttataatgcatcctggtcctatgaatagaggtatcgaaatagatacaaaacttgctgatgatattaacaaaagtgtaattaaagaacaggttgaactgggtgtagctgtacgaatggcttgcttaaaaatttttggacaaccaatgaagaaaaaaatttatt

SEQ ID NO: 230090 - DNA, 598 bp, Unknown
  Bacterial polypeptide expressing nucleotide sequence isolated from the Sargasso Sea
aatggctacggcctcgcatcaaacgtacccgcaccgccacctccttggcatcgaaggtctgtcggccgagcagattactgttcttctcgaccgttcggagcagtacgtcgatcagaatcgccgtgttgataaaaaacagtcgctgctgcacggccgtacacagatcaatctgttctttgagagttcgacgcgtacgcgcacatccttcgagctggcgggcaagcggctgggagccgacgtcattaatatgtcggccgaaacgtcctctatccgcaaaggtgagaccctaatcgattcggcaatgactcttaacgccatgcacccagacgtactagtggtgcgccatccacattcaggggctgtcaatctgctggcccagaaggtcgattgcgccgtcataaacgccggtgatggcagccacgaacacccaacacaggccctattggacgcactcaccatccgacgacggcggggacatctcgacaggctgatcgtcgcgatatgtggggatatcctgcacagccgggtagcacgctcaaatattcaactgttgatcaccatgggcgcccgcgttcgcgtggtagcccaccgacacttg

SEQ ID NO: 230091 - DNA, 793 bp, Unknown
  Bacterial polypeptide expressing nucleotide sequence isolated from the Sargasso Sea
atggataatttcaattattattttgataatattcatttattaggcattcaagggatgaataaaaaaactattcaatcaattttagaaagagcgcaatactttaatcaaaaaaagaaaaatagaaaaaataaaattttgaaagacaaccttgtaataaatttattttttgaaaattcaaccagaacaaaagcatcatttgaaattgctgcaaagtctatgtcagcagatattttgaatatttcagtatcatcttcttcaattaaaaaaggagaaactctaatagatacagctgctacattaaacgctatgcatcctgattttttaattttaagacatccaaattctggtgctgcagaaatgctttctaagcatgtagaatgcagtattataaatgcaggtgatgggaggcatgaacatccaactcaagctcttttagacgctgcagtaattaaagaagaaggcattaatcttgaaggattaaaaatcgctatttgcggagatatactaaatagtagagttgctcgatcaaatatatatttattaacaacaatgggagcgcaagtaagcgtgattgggcctccaacactaattcctaaagatattgaaaggatgggcgtaaaagtattttttgatcttgattctggattgaaatcatctgacattattatgattttaagattacaaaacgaaagaatggacggctcagaaaccccaagtaaaagagagtattatagtttttttggtattaatgaaaataatttaaagttagcaaaaaaaaatgctctggtgatgc

SEQ ID NO: 230092 - DNA, 772 bp, Unknown
  Bacterial polypeptide expressing nucleotide sequence isolated from the Sargasso Sea
aatgaaagaactatcagtaaatcatttactaggcataaaatacatcaataaaaacgatattgatttaatttttgaaactgctgatcatttcaaagaagtcattaatcgacctattaaaaaagtaccttcattgagagatattactattgctaacatcttttttgaaaatagtacaagaaccaaattatctttcgaattagctcaaaaaagactttctgctgatgtgattagtttttcagcagctcaatcctcggttaaaaaaggagaaacgttgattgatacagtcaataatattctttctatgaaagtagatttggttgttatgcgacacagtaatcctggagcagctcatttcttggctaataatgtgaacgcaagtatagtaaatgctggtgatggagctcatgaacatccaacacaagctttgttagatagttacaccattcgtgaaaaattaggtgatgttggtggaaaaaaagtcgtgattgtaggtgatatattgcattcgagagttgctttatcgaacatatatgctttgcaaatgcaaggagctgaagtgaaagtttgtggtccaaatacattaattcctaaatacattgattcacttggagtaaaagtagaacctaatttaagaaaagcacttgaatggtgtgatgttgccaatatgttacgcgttcaaaacgaacgtttagatgtaaattattttccttctactcgagaatatgcacagcaatttggtttggataaagatttattagattccttaaacaaa

SEQ ID NO: 230093 - DNA, 670 bp, Unknown
  Bacterial polypeptide expressing nucleotide sequence isolated from the Sargasso Sea
cttattgatacggcaatgacattaaatgctatgcaacctgatattattgttgttagacatcatgatgctggcgcagtaaaattattatctgagaaagttaattgcggtgtcattaatgctggagatggaccacatgaacaccctacgcaagctttattagatgcattaactataataagaagaaaaaaacaaatttctggtctaaaaatagcaatctgcggagacattatgcatagtagggtagcaaggtctaacatacatttacttaatacattaggagctgaaattagagttattggtccagccacattaatgcctaaaaatatagaaagtcttggggtaaaagtattttataatatgaagaaaggcttaaaggatgctgatattataataatgcttaggcttcaacttgaaagaatgtctggttcctttgtaccatcaatcagagaatattttagattttatggactagatagagaaaaattgaagtatgccaaaagtgatgcattaatcttacatccaggaccaatgaatagaggtgttgagattgattcagaacttgcagatgacttagatagatctgcaattttcgaacaagtaagaatgggtgttgctgttaggatggcatgcctaaaatctcttgttgagataaatggagaagtaaaataat

SEQ ID NO: 230094 - DNA, 686 bp, Unknown
  Bacterial polypeptide expressing nucleotide sequence isolated from the Sargasso Sea
aaaaggagaaagttttaaagatactgcccagaatattgaggctatgaaaatagatgcagttgtcatgaggcatcctgttccaggctcaccaaaacatttaacggaatttattgatgctaaagttatcaatgctggagatggaactcatgagcatcccactcaagcaattttagatatgatgagccttcaagagaagtttggaaaaataaaagatcttaatgtggcaataattggagatattgagcacagtagagtagcgagaagtaacatatatggtttagtcactatgggtgctaatgttactatatgcggtccttccaatttaattccggattacttttctgattttggcgtgaatgtaaattataatactgacgaggttctagaatgggctgatgctgtgaatgttctcagaatacaaaaagagagaatgggtattggtcttattccttcagacagagaatacagagcattatttggtataacagaggaaagactcgctagaaggcataaagagctagttataatgcatccaggcccaatgaaccgtggagtggagatcgacgatcgtgtcgcagatagcgatcaggccattatattagaccaggttctgaatggtgtggcttctaggatgtctattctttatttattattaggcacaaaagaaaaagtaaatgaaaaatgaa

SEQ ID NO: 230095 - DNA, 760 bp, Unknown
  Bacterial polypeptide expressing nucleotide sequence isolated from the Sargasso Sea
aaggagccctcccaagaaccaaagttcctttgaattagcaggcaagagattgggtgcagatgtaatgtcaatgaatataaccaattcagcaattaaaaaaggagaaacacttattgatactgctatgacattaaatgctatgcacccagatataattgttattagacatcaagattctggtgcttgtaatttattatctcaaaaagttaattgcgcagttttaaatgctggtgatggaagaagagaacatccaacacaagcattgctagatgccttaactataattaatagaaaaaaaaatatagagggtttaaaaattgcaatttgtggtgacatattacattcaagagttgctagatcaaatatatatctattaacaatgttaggagctgaagtaaatattattggtccaacaaatctattaccaaaagatttgggaaagtttggagtcaatatttatactgatatgaaaaagggagttaaagattgtgatattgttatgatgctcagacttcaaaatgaaagaatgacaagttcatacttatcatcaaatagagaatattatgaatattacggtttgacccctgaaaaattagaatttgctaaaactgatgcattaattatgcatcccggaccaatgaacagaggtatagaaatagataccatgttggcagatgatataaacaaaagtgttattaaggagcaagttgagcttggagttgcagtaagaatggcttgtttaaaaattttttgtagttaa

SEQ ID NO: 230096 - DNA, 688 bp, Unknown
  Bacterial polypeptide expressing nucleotide sequence isolated from the Sargasso Sea
atgaaagtaaaattaccaaaaataaaagctataagattttctactggttctaaaataattaaagatgctgaaagtattgctttaaaatattattcttctttatcaaaaaaaactaatataaatataaatagagcaaaaagtgtttttaaaaaaattcatttagtagaaacatctgatttaacgaaaaaagaaatagaacatatcttaaatgaatcaaaaaaatatataacgtttaataaaaaaaaaataaagaaattaaatatacttgaaggacgtacaatttttaatttgttttttgaagattcaacaagaacaagaacaagctttgaagttgctgcaaaaagattaggcgcagatttaataaatgtagtagttaaagatagctcaattaataaaggtgaaactttatttgatacaatgacaactattaattcaatgaacccagatgtgttaatagtaagacatccagaagaaggtataagtaaaagaatatcaaaaacggttgatgctagtgtaattaacgccggtgatggaagccatgaacatccaacacaagcacttttagatgcattaaccataaaaaataagtttaataatttttctaaattaaaaattgcgatatgtggtgatattcttcatagtcgagtagctagatctaatattattatactttcaaaaattaggtgct

SEQ ID NO: 230097 - DNA, 820 bp, Unknown
  Bacterial polypeptide expressing nucleotide sequence isolated from the Sargasso Sea
atgactaatccaacggacattcaacaagaaaactcaccggtctactcataccgccatctgctcagtatagaaggtttgagtaggtttgatatagagaagctccttgatctcgcagacgaatacgttgaaacaaatcgtcaagcggataaaaaacacgcaatattgaggggacgaaccctcattaatatgtttttcgaaaactccacaaggaccagaacttcatttgaactagccggtaaacgtcttggtggtgacgttataaatatgtcggtaagcagcagttcgattaaaaagggtgaaacgctgatcgatactgctatgacgctgaacgcgatgcatccagatgttttggtcgttagacatgcaaactccggttccgtccatttgttagcagaaaaggttaattgttcggttattaatgcgggggatggaagtcatgagcatccgacacaagctcttttagatgcgttagctattcgccgtagattggggcgtggcttggaagggcttatcgttgctatttgcggtgacattgcccacagcagagtggcacgttcaaacattcatctcttgtcaattatgggagctagagtgcgggcagttgcgccaccaacactcattccggaagggcttgaaaggttgggagtcgaagtgcaccataatatgagcagtggtcttaaagacgctgatataattatgatgttaaggctgcaaacagagcgtatgaagggaagttacgttccatcaataagagaatattacgaactctatggtttaaattctaacaagcttaaaatggcaaagccggacgcattaataa

SEQ ID NO: 230098 - DNA, 812 bp, Unknown
  Bacterial polypeptide expressing nucleotide sequence isolated from the Sargasso Sea
aatggcaactaaatccaaaaaagctattaaaatatctcaaaaacatttgttaggtatccaggatttatctgttagtgatgttacaactatcctgaatgaagcctctaatttcatagaattaaataaaagcaaaaataaaaaaattgatattttaaaagggaaaactcaaataaacttattttttgaaccatcaacaaggacacagagctcgttcgaattagcaggaaaaagattaggtgcagatgtaatgtcaatgaatattacaaattctgctatcaaaaagggtgaaacgttaatagatactgctatgacgttaaatgcaatgcatccagacattattgtaattagacatcaagactcaggggcttgtaaccttctatctcaaaaagttaattgtgcagtattaaacgcaggtgatggtagaagagaacatccaactcaagcattattggatgctttaacaattataaatagaagaaaaaaaatagaaggtcttaaaattgcaatatgtggagacattttacattcaagagtagcaagatcaaatatttatcttctaaacatgttgggtgcagaagtgaatattgtggctccttcaaatttaatgccaaatgaaattgaaaaatttggagtaaatattttttctgatatgaaaaaaggagttaaagattgtgacatagtaatgatgttaagattacagaatgaaagaaatgacagttcgtttctatcatctaacagagaatattatgagtattatggcttaacacctgataaaattcaatatgctaaagaggatgctttaataatgcatc

SEQ ID NO: 230099 - DNA, 256 bp, Unknown
  Bacterial polypeptide expressing nucleotide sequence isolated from the Sargasso Sea
tcagcacgaaaggcaaagctcatcccactttccctccttggcggaatatacgaccatgtttggcttgaacatggcgagaagccagtggcttaagccggataccctgattttgcaccccggaccaatcaacaggggagtcgaaatcgattcggagctggcggattctcccagggccgtgattctggatcaagtaaagaacggcatagccgtgcgcatggcgattctctacctttgcgcaacgaccgaaaatgactga

SEQ ID NO: 230100 - DNA, 508 bp, Unknown
  Bacterial polypeptide expressing nucleotide sequence isolated from the Sargasso Sea
aagagcaaaaggacgtctgcatagattgaatatcgcaatttgcggagatatcgcacacagtagagtcgcaagatcaaacctactccttctcgggaagatggaaaatagaattcggcttatcggtccacctacactaatgccttcgcagattagtgaatttggcgtagaagtatatcacgatatgcatgcgggacttagggatgtcgacgtcgttatgatgcttagactccaaaaagagcgaatggatggaggctttattccatcagtacgggaatattttcaacgatacggtttagattacaaaaagttgtcccatgcaaaagacgatgcgatcgtcatgcatcccggcccgatgaatagaggcgtggaaatagatggtgatattgcagacgatgtaaccagaagtgtgattcaagaacaagttgaaatgggtgtcgccgtgcggatggcaattatggaattattatcaagaaattacagtaataagcagaaaaagttattatcatga

SEQ ID NO: 230101 - DNA, 746 bp, Unknown
  Bacterial polypeptide expressing nucleotide sequence isolated from the Sargasso Sea
aatgacaaatgttaaaaaaacaagctccataccacttatagtaaaattatcttctcaacatctattatccattgaaggcatgaataaaagcgaaattctatctattttagatagagctgattactttgcagatgtagaggtatctaaaataaaaaaagaaatgagtggttttgttctattaaacgttttttttgaaaattctactagaacaagagtttcttttgaattagcaggaagaaggcttggtgccgaagttattaatatttctgtaaataaatcttctataaaaaagggagaaagcttaatggatactgcaaatactctcagtgcaatgaaacctgatgtcttaatagttaggcatccagatagtggcgctccaaaacttttttctgaatatctgaattgtagtatagtcaatgcaggtgatggaagacacgagcatcccactcaagcacttttagatgcattaactattagaagaagattaggaagattagaaggtttaaaaatttctatctgcggagatatagctaatagcagagtagcaagatcaaacatacatttgttaacaacattaggagttgaagtaagatgtattgcgccaccaactttaatgcctaaggatttagaaaagttaggggttcagtgttttgataatctaaatgatggcattaaaaattctcatgcaattatgttgctgcgtttacaaaatgaaagaatgtcaggtacagaaactccttcggaaa

SEQ ID NO: 230102 - DNA, 607 bp, Unknown
  Bacterial polypeptide expressing nucleotide sequence isolated from the Sargasso Sea
accgtacaaaatattgaatcaatgaaaattgacggtgcagttataaggcatggacatccaggatctgcattgaaattgacagaatacattgatggagcagtaattaatgctggagacggttcccatgagcatccaactcaagccattctagatatggtaacccttaaagaaaaatttggaaaaattaaaggtcttaaagttggaattatcggtgatattttaaatagtagggtagccagaagtgatatttttgcattaaaaaaacttggagcagaagttgtagtttgtggtccaagcactttattgccaagtgatgcaaaaaaacttggaataaatattacatacaatttagatgaagttctcaattggtgtgatgcagttatagctttacgaattcagatggaaagaatgcatttaggaagaatcccatcaaaaagggaatatcatagcgaatttggtttgacttttgaaagaataagcaaattgaaaaaagatatagttattatgcatcctggaccaatgaatcgtggtgtagaaattgatagtaaagttgctgattcagataatgctgtcattcttgaccaagtgttaaacggagttgcctcga

SEQ ID NO: 230103 - DNA, 436 bp, Unknown
  Bacterial polypeptide expressing nucleotide sequence isolated from the Sargasso Sea
tatgcggagaatacttcattctcgagtagctagatcgaatatatacttattaaatatgttgggagcagaagttaatgttattgctccaaaaactttaatgcctccttcaatagacaaccttggtgttaaagggtttactaatatgaaagagggtttgaagtcatgtgacattgtcatgatgctaagattgcaaaatgaaagaatgaagggatcttttttaccttctaaaagggagtattacgaatattttggactaacaacagataaattaaagcttgctaaaaaagatgctttaataatgcaccctggtccaatgaataggggtgtggaaatagatacaaaacttgctgatgatattaatgttagcttagttaaagaacaagttgaattgggagtagctgttagaatggcatgcttaaaattatactgtaaatga

SEQ ID NO: 230104 - DNA, 589 bp, Unknown
  Bacterial polypeptide expressing nucleotide sequence isolated from the Sargasso Sea
ctcaggagcttgcaacttattatcccaaaaagttaattgttctgtaattaatgctggtgatggaagacgcgagcatcctactcaagcattattggatgcattaacaataattgaaaaaaaaaaaaaaattcaaggtttaaaaattgctatatgtggtgacatcctgcattcaagagtagctagatcaaatatttatttactaactatgcttggtgctgaagtaaatatagtttcaccaacaaacttaatgccagaatatattgaaaaatttggtgttaataaattttctgatatgaaaaaaggactaaaagattgtgatattgtcatgatgttaagattacaaaatgaaagaatgactagttcatttttatcatcaaatagagaatattatgaatattatggtttaactcaagacaaattaagttgtgctaaagatgatgcattaattatgcatccaggtcctatgaacaggggtattgaaatagatacaaatttagctgatgacataaatagaagtgtaatcaaagaacaagttgaactaggtgtcgctgtgagaatggcatgcctgaaaatattttgtgaaaaatga

SEQ ID NO: 230105 - DNA, 331 bp, Unknown
  Bacterial polypeptide expressing nucleotide sequence isolated from the Sargasso Sea
ctcagtaaataaacttggagttaaaagattcacttttatgaaggaaggtttaaaatcatgtgatatcgttatgatgctaagattacaaaacgaaagaatggcagggtctttcttaccctcaaaaagagaatattacgaatactttggattaacgcctgataaactaaaatttgcaaaaaaagatgcattaataatgcatccgggaccaatgaatagaggcgttgaaatagatacaaagctcgctgatgatatcaatgttagcttagttaaagaacaagtggagctaggagtggctgtaagaatggcatgtttaaaattatactgtaaataa

SEQ ID NO: 230106 - DNA, 745 bp, Unknown
  Bacterial polypeptide expressing nucleotide sequence isolated from the Sargasso Sea
aataaaaaagatcacttcaatagacgatctatcagcaaaagatattagatcgattgctgatcgggctattaaatttaaaaaatcacaaaaaaactttatttctaaaaaaaccaaaaacatatttaatttatttctagaaccttcaactagaactactgtcagctttgaactggctgcaaaaaaacttggccataattcaataaatattaattttgaaaagagctctttatccaagggagaaacttttaaagacactatggatactttaattagcatgaagcccgatgctctaataatcagagatagaaataatttttcacctagagatattgaaaagaaaaataaaatcccagttattaacgcaggtgatggaaccaatgagcaccccacacaggcactcttagattattgtgtaattaaatcgatattcaaaaataagaaaattaaaataggtatttgtggtgacattaaacacagtagagtagctcactcaaatataaaacttttaacaaaattaggctatgaaatacatataatagctccatcatatttcttgaacaaatctgaaattaataaaattaacaataaagttatttaccacaaaaatttaaatcatattaataaacttgacgttttaatgatgctaagagtacaaaaagaaaggattgtaaaaggtgctaaaaatttgatgagatcatttaaaaaagatttttgtttacaagaaaaacacctaaccaataaaccc

SEQ ID NO: 230107 - DNA, 409 bp, Unknown
  Bacterial polypeptide expressing nucleotide sequence isolated from the Sargasso Sea
aatgacagttgagagtggtaagaacaagctaaacaaactttcacagaaaaaccttcgccattttattgatattgattcattaccaaaagaactattaaaagatattttagatttagctgaatcatttgctgtggtatcaggccaaccagttaagaaagttcctttgttaagaggtaaaactatagtaaatcttttttttgaatcttccactaggacacgaacaacttttgaaattgctgcgaaaagactttcagcagatgttctaaatttacaagttgaacatagtgctaccaaaaaaggcgaatccttacttgatactttaagaaatttgcaagctatgcattgcgatatgtttattgttagacacccctcctctggagctgcagaatttatatcaaaacatgttggt

SEQ ID NO: 230108 - DNA, 789 bp, Unknown
  Bacterial polypeptide expressing nucleotide sequence isolated from the Sargasso Sea
attgagaggaaaaactcaaattaacttattttttgaaccctctacaagaacacagagctcgtttgagttagctggcaaaagattgggcgctgatgtaatgacaatgaatgtaggtaattcctcattgaaaaaaggagaaactatactggatacagcaatgtcgcttaacgcaatgcatccagatatcatagtggtaagacaccaagactctggtgctccaaatcttttatcccaaaaggttaattgtacagtaattaatgctggtgacggattgagagaacacccaacacaagcgctcttggatgctttaactataataaatagaaaaggaaaaattgaagggttaaaaattgcaatttgtggagacatacttcattctcgagtagccagatcaaatatctatttattaaatatgctaggagctgaagttaacgttatagctccaaaaactttaatgccaaactcaattcataaacttggtgttaaaggatttacaaatatgaaagaagggcttaaatcctgcgatattgtgatgatgttaagactgcaaaatgaaagaatgaaagggtcttttttaccttctaaaagagagtactacgagtattttggtttaacgcctgataaattaaaacttgccaaaaaagatgctttaataatgcatcctggaccaatgaatagaggagttgaaatagatacgaaactcgctgatgatataaacgtaagtttagttaaggaacaagtcgaattaggtgtagctgttagaatggcatgtttaaaattgtactgtaa

SEQ ID NO: 230109 - DNA, 781 bp, Unknown
  Bacterial polypeptide expressing nucleotide sequence isolated from the Sargasso Sea
aactcaaattaatcttttttttgaaccgtctacgataactcaaagttcctttgaactggctggaaaaagattgggagtagatgttatgacaatgaatgttggaaactcttctttaaaaaaaggtgaaacaatattagacacagcaatgtctctgaacgcgatgcatccagatattatagttgttagacaccaagactctggggcccctaaccttctttctcaaaaagtaaattgtactgtcataaacgctggcgatggtttaagagaacatccaactcaggcactcttagacgcgttaacaattattaatagaaaaggaaaaattgaaggccttaaaattgcaatatgcggtgatatccttcattcaagagtagctagatcaaatatatatttgttaaatatgttaggtgctgaggtaaatgtaattgcgccaaaaactttattacctaattcaataagtaaacttggagtaaaaggatttacaaatatgagagaaggattggcatcctgtgacatagtaatgatgttaagattgcaaaatgagagaatgaccggttcgtttttaccttcaaaaagagaatactatgaatattttggtttaactccagataaattaaaattagctaagaaggacgctttaattatgcatccaggtccaatgaatagaggtgttgaaatagatactaaacttgctgatgatataaatgttagtttggtaaaggagcaagttgagctaggagttgctgtaagaatggcgtgcttaaaattatattgtaaataa

SEQ ID NO: 230110 - DNA, 445 bp, Unknown
  Bacterial polypeptide expressing nucleotide sequence isolated from the Sargasso Sea
aaaaattgctatatgcggggatattttacatagccgtgttgctcgatcaaacataatcatactatcaaagttatgtgcaaaaataaatgttattggtcctaaagaatggttaccaaaaagtttaaataaactacctgtaaacgtttatacggaaatgaaaaagggattacaaaattgtgatattgttatgatgctacgtattcaaaaagaaagaatagttggaaaaattatgccaaatcaaaagacttattttaaaaaatacggtttagattacaataagcttaaatatgctaaaaaaaatgctttcgttatgcatccaggtccaatgaaccgtggtgtagaaatagactccaaacttgccgatgacgtcacgaggagcttaatacaagaacaggtcgctatgggtgttgcagtacgaatggcatgcttatacttaattattaaa

SEQ ID NO: 230111 - DNA, 574 bp, Unknown
  Bacterial polypeptide expressing nucleotide sequence isolated from the Sargasso Sea
taaccttttatctcaaaaagtgaattgtacggttattaatgctggggatggcctaagagaacatccaactcaagcattattagatgctttaactataattaatagaaaaggaaaaattgaaggtttaaaaattgctatatgcggagatattcttcattccagggtagctaggtcaaatatttatttattgaacatgcttggagccgaagtaaacgtaattgctcccaaaactttaatgccaatttcaattaacaagcttggggttaaagcatttacgaacatgaaagaaggtttaaagtcatgtgatattgtcatgatgctcagactacaaaatgaaagaatgaaaggatcctttttaccttctaaaagagaatattatgaatattttggattaacacccgacaaattaaagcttgcaaaaaaagatgctttattgatgcacccagggccaatgaatagaggtgttgaaatagatacaaagcttgctgatgatattaatgttagtttagtaaaagagcaagtcgaattaggtgttgctgtaagaatggcgtgcttaaaattatattgtaaatga

SEQ ID NO: 230112 - DNA, 460 bp, Unknown
  Bacterial polypeptide expressing nucleotide sequence isolated from the Sargasso Sea
atatgtggagatattctacatagccgtgttgctcgatcaaacataatcatactatcaaagttaggtgcaaaaataaatgttattgggcctaaagaatggttaccaaaaagtttaaataaactacctgtaaacgtttatactgaaatgaaaaagggattacaaaattgtgatattgttatgatgctacgtattcaaaaagaaagaatagttgggaagataatgccaaatcaaaagacttattttaaaaagtatggtttagattacaataaacttaaatatgcaaaaaaaaatgctttcgttatgcatccaggtccaatgaaccgtggtgtagaaatagactccaaacttgccgatgacgtcacgaggagcttaatacaagaacaggtcgctatgggtgttgcagtacgaatggcatgcttagacttaattattaaaaacagagatgactttagtaagtagt

SEQ ID NO: 230113 - DNA, 463 bp, Unknown
  Bacterial polypeptide expressing nucleotide sequence isolated from the Sargasso Sea
aaaattcaaggattaaaaatagctatatgcggagacatacttcactctagagttgctagatcaaatatttatctccttacaatgttaggggcagaggtaaatatagttgcaccatctaatcttatgccaaaagaaattgaaaaatttggtgtaaacacttttactgatatgaaaaaaggtctcaaagattgtgatattgtaatgatgcttagattgcaaaatgaaagaatgacaagctcatatctttcttcaaacagagagtactatgaatattatggattaacaccagacaaacttgatcatgctaaatcagatgctttaattatgcatcctggtccaatgaatagaggaattgaaattgatacaagattagctgacgacataaacaagagtgtaattaaagaacaagttgaattaggtgttgctgtaagaatggcatgtttaaaaatattttgtgaataaa

SEQ ID NO: 230114 - DNA, 622 bp, Unknown
  Bacterial polypeptide expressing nucleotide sequence isolated from the Sargasso Sea
gtcagacatccttgaggaaggaattagtaagaaaattgcaatgaatgtagatgcatgtgtaattaatgctggagatgggagtcacgaacacccaacccaagcattattggatgctttaacaataaaaagtagatttaaaaatttctcaaaattacaaatagcaatatgtggtgatattcttcatagtagagtagctagatcaaatataataattttgtcaaaacttggtgcaaagataaatgtcattggtcctaaagaatggcttccaaaaaatttggtaaaacttccagttaaagtttttacagatatgaaaaaaggactcaaaaattgtaatattgtgatgatgttaagaattcaaaaagagaggatagttggaaaaataatgccaaatcaaaactcttattttaaaaaatatggattagattacaataaacttaaatatgcaaaaaaaaatgcttttgttatgcatccagggccaatgaatcgaggagttgaaattgactctgaacttgcagatgatgtaacaagaagtttaattcaggaacaagttgcaatgggtgttgcaattcgtatggcatgcttagacatactaataagaaatagagataatgttaataactag

SEQ ID NO: 230115 - DNA, 622 bp, Unknown
  Bacterial polypeptide expressing nucleotide sequence isolated from the Sargasso Sea
gctggcctcgaagcaccttcttggcatcgaggggctcaatcctctcgagatcaatgccctcattgaccgcggcgacatgttcgccgacctcatacaggaagagcaggcgattacgccgcccctgtcggaggtgctaaaggggcgcaccgttctcaacctgtttttcgaaaactccacccgcacccgcgtgtcctttgaactggcggccaagaacatcggcggttcggtgctcaatatcaatgttgccgggtcatcggtgaaaaagggcgagacgctgctcgacacggcgacaacgctgaacgcaatgcatccgcatatactggttgtcaggcacaattgttcgggtgccgcgcagcttctgagccagcatatcgacgccgccgtgatcaatgccggtgacggcaggcacgagcatccgacccaggcgcttcttgacgcactgacgatcaaacgccgcgtcggccggattgaggggttgaagatcgccatctgcggcgatatcgccaacagccgcgtcgcccgctccaacattcatctgctgtcgacactcggcgccgaaatccggctggtctgccctgccacgctgcttcccgacgccgtcgatgcgatgggggtcgaaatc

SEQ ID NO: 230116 - DNA, 541 bp, Unknown
  Bacterial polypeptide expressing nucleotide sequence isolated from the Sargasso Sea
attaaatgcaggtgatggcagaagagagcatccaactcaagctttactcgatgctttaacaattatagagaagaaaaataaagttgaaggtcttaaaattgcaatttgtggagatatacttcattcaagagttgctagatcaaatatttatttattaaatatgttgggcgcggatataaatattgttgcgccatctaatttaatgccaaaagatctacagaaatttggtgttaacacttttacaaatatgaaagaaggagtgaaagattgtgacattgtaatgatgttaagattgcaaaatgaaagaatgacaggttcatttctctcatcaaatagagagtattatgaatattacgggctaacaccagataaactagagagagcaaaaagcgatgcaattattatgcatccaggtcctatgaataggggtatagaaatagatacaaaattagctgacgacattaataaaagtgttattaaagaacaggttgaattaggtgttgctgtaagaatggcatgtctaaagttattttgtgaatga

SEQ ID NO: 230117 - DNA, 670 bp, Unknown
  Bacterial polypeptide expressing nucleotide sequence isolated from the Sargasso Sea
gatactatgacaactattaattcgatgaatcctgatgtcttaatagttagacatcctgaagaaggaataagtaaaagaatttctctaaacgttgatgcttctgtcattaatgctggagacggaagtcatgaacatcccacccaagctttattggatgctttaactataaaaaatagatttaaaaatttttcaaaattacaaattgcaatatgtggtgatattcttcatagtcgtgttgccagatccaatattataattttatcaaaacttggtgctaagataaatgtaattggacctagtgagtggctacctaaaaatattaagaaacttcctgttacagtttttactgatatgaaaaaaggtcttaaaaattgtgatattgtaatgatgcttagaattcaaaaagaaagaattgttggaaaaatcatgccaaatcaaaaaatttattttaataaatatggattagattacaataaattaaaatatgctaaaaaaaatgcctttgtaatgcacccaggtcctatgaatagaggagtggaaatagactctaaattagcagatgatgttaccaggagtttaattcaggaacaggttgcaatgggagttgctattcgaatggcctgcttagatattttaattaaaaatagagataatgtcgttaaatattaat

SEQ ID NO: 230118 - DNA, 837 bp, Unknown
  Bacterial polypeptide expressing nucleotide sequence isolated from the Sargasso Sea
tctgttaggtatccaagatttatcagttaatgatattaattatatcctggatgagtcagaagctttcataaaattaaaccagagtaaaaataaaaaaattgatgtgttaagaggcaaaacacaaataaatttattctttgaaccatcaactagaacacaaagctcctttgaacttgctggaaaaagacttggtgcagatgtcatgtcaatgaatacgggtaactcagccattaaaaaaggtgaaactttgattgatacggcaatgaccttaaatgcaatgcatcctgatataattgtgatcagacatcaagactctggtgcttgtaatctgttatctcaaaaagttaattgtgtcgttctaaacgctggtgatggcagacgtgagcatcctactcaagcgttattagatgcattaacaattagaaatcgaaaaaaaaaaattcagggattaaaaatagctatttgtggagacatacttcattcgagagtcgctagatcaaatatttatcttcttacaatgttaggagcagaagttaatatagttgcgccatccaatcttatgccaaaagaaattgaaaagtttggtgttaacacttttactgatatgaaaaaaggtctcagagattgtgatattgtaatgatgcttagattacaaaatgaaagaatgaccagttcatatctttcatcgaatagagaatactatgagtattatggattaacgccagataaacttgatcacgcaaagtcagatgctttaattatgcatcctggtccaatgaatagaggaattgaaaatgatacaagattagctgatgacataaacaaaagtgtaattaa

SEQ ID NO: 230119 - DNA, 593 bp, Unknown
  Bacterial polypeptide expressing nucleotide sequence isolated from the Sargasso Sea
tatatctagaaatatagatattccagttataaatgcaggtgacggattacatgcacacccaactcaaaccttacttgatgtttacactattcaaaaaaaattaggaacattgaaaaataaaaaaatatctattattggtgatatattgcatagtagagttgctcgctcaaatatattaggcttttcaaaactaggtgctaatgtatacattaattctcctaaaactttatctttattcaaaaataaattttttgagggagaaaattctttggtcaattttgttgatgatatagatcatgctattgagaatgctgacgtgattatgcccctaagaattcaattagaaaggcaagaacaaggaaacataccatcgctaagggagtattccaaatactggggtatcaatgaagaaaaaatcaaaattgctaaaaataatgtcatgattatgcatccaggtcctgtcaatgaaggtgtagaaatttcttctagtttggtgcacggtgataaaagtcaaataaatcttcaagtcaaacatggtttattcattagaatggcaataattaaaactatcctaagtgaggcaaataaataat

SEQ ID NO: 230120 - DNA, 813 bp, Unknown
  Bacterial polypeptide expressing nucleotide sequence isolated from the Sargasso Sea
gatacttgatgaagctcacacttttattaaagttaatcaaagtaaaaataaaaaaattgatgttttaagaggtaaaactcaaattaatttattctttgaaccctctacaagaactcagagttcatttgaattagctggtaaaagacttggagcagatgttatgtctatgaatataagtaactctgcaatcaaaaaaggtgaaacgttgattgatacagcaatgactttaaatgcaatgcaccctgacattattgtgatcagacatcaagactctggggcatgtaaccttctctctcaaaaagttaattgtgctgttttaaatgctggtgatggaagaagagaacacccaactcaagctttattggatgctttaacgatcataactagaaaaaataaaatagaaggattaaaaatttcaatttgtggagatatacttcattcaagagttgctagatcaaatatatatttacttaatatgttaggtgctgaagtaaatattgttgcaccaacaaatcttatgccaaaagaaattgaaaaatttcgtgtaaatacttttactgacatgaaaaaaggtttgaaagattgtgatatagttatgatgttaaggttacaaaatgaaagaatgactagttcatatctttcatcaaacagagaatattatgaatattatggattaactccagataaattggaacatgcgaaacctgatgctttaataatgcaccctggacctatgaatagaggtatagaaatagatacgatgttagcagatgatataaacaaaagcgtaattaaagagcaagttgagttagg

SEQ ID NO: 230121 - DNA, 622 bp, Unknown
  Bacterial polypeptide expressing nucleotide sequence isolated from the Sargasso Sea
ttagacatccggaagaaggaattagtaaaaaaaatttcagaatcagtagatgcgtctgtaattaacgctggtgatggtagtcatgagcatcccacacaagcgttattagatgcacttactattaaaaataaatttgaaaattttgcaaaattaaaaattgctatttgcggggatattttacatagccgtgttgctcgctcaaacataatcatactatcaaagttaggtgcaaaaataaatgttattgggcctaaagaatggttaccaaaaagtttaaataaactacctgtgaacatttatacagaaatgaaaaagggattacagaattgtgatattgttatgatgctacgtatccaaaaagaaagaatagttgggaaaataatgccaaatcaaaagacttattttaaaaagtatggtttagattacaataaacttaaatatgcaaaaaaaaatgctttcgtcatgcatccaggtccaatgaaccgtggagtagaaatagactccaaacttgccgatgacgtcacgagaagcttaatacaagaacaggtcgctatgggtgttgcagtacgaatggcatgcttagacttaattattaaaaacagagatgactttagtaagtagt

SEQ ID NO: 230122 - DNA, 592 bp, Unknown
  Bacterial polypeptide expressing nucleotide sequence isolated from the Sargasso Sea
atgaataagctaagcacaaaacattttattggattagagcatgctactattaatgatattaatttgattattaatactgctttaacatttagagaaatattagatcgtcctattaaaaaagttccatcattaaagggttcaaatattgttaatttattttttgaaaattctactagaacaaaattatccttcgaattagctgaaaaaagattatcagcagatgtattaaatttttcttcaagctcatctagcttaaataaaggtgaaagcttaagagatacagttcaaaatatccaagctatgaagattgactgtgcagttatgagacatccagttcccggttcttgcaagcaattaacagaatatttagattgtcctattgttaatgcgggcgatggaactcatgagcatcccactcaagcaatgctagatataacaagtatatatgaaaaatttggtaagattaaaggattaaaaattgttattgttggtgatatattgcacagtagagtggcaatgtctaatatttttggtttaaaaacaatgggcgcagaggttatgttatgtggcccttctcatttaatacctaaaa

SEQ ID NO: 230123 - DNA, 723 bp, Unknown
  Bacterial polypeptide expressing nucleotide sequence isolated from the Sargasso Sea
atttgataaatgtagtagtaaaagatagttcaataaataaaggtgaaactttactggatacaatgactacaatcaattcaatgaatccagatgttttaattgtaaggcatcctgaagaaggtattagtaaaaaaatttcagaaactgttgatgctagcattattaatgccggtgatggtagtcatgaacatccaactcaagcactacttgatgctttaactattaaaaataagtttaataatttttcaaaattaaaaattgcaatatgtggagatattttacacagtcgagttgcaagatctaatataatcatactttcaaaattaggttcaaaaattaatgtagtaggacctaaagaatggttacctaaaagtttaaaaaaactgcctgtgagagtatttactgacatgagaaaggggttagagaattgtgatattgtcatgatgcttcgaattcaaaaagaaagaatagtgggtaaaattatgcctgatcaaaggagttattttaaaaaatatggattagactacaataaactaaaatatgctaaaaaaaatgcttttgtgatgcatccaggcccaatgaacagaggagtggaaatagactctaaactagctgatgatataacaataagtctaatacaagaacaagtagcaatgggcgtagctgttagaatggcttgtctagatttaataataaaaaatagagataataatgttagttaat

SEQ ID NO: 230124 - DNA, 622 bp, Unknown
  Bacterial polypeptide expressing nucleotide sequence isolated from the Sargasso Sea
aatgcatcctgatataattgtgatcagacatcaagactctggtgcatgtaatctattatctcagaaagttaattgtgtcgtattaaatgctggtgatggtagacgcgaacaccctacccaagcattattagatgcattaacaattagaaatcgaaaaaaaaaaattcaaggattaaaaatagcaatatgtggagatatacttcattccagagtagctagatcaaatatttatcttcttacaatgttaggagctgaggttaatatagtagctccatctaatctgatgccaaaagaaattgaaaaatttggtgtaaatacttttactgatatgaaaaaggggctcaaagattgtgatattgtgatgatgcttagattacaaaatgaaaggatgaccagttcatatctttcatcgaacagagagtactacgaatattatggattaacaccagataaacttgatcatgcaaaatcagatgctttaattatgcatcctggtccaatgaatagaggaattgaaattgatacaagattagctgatgacataaacaaaagtgtaattaaggaacaagttgaattaggtgtagctgtaagaatggcatgtttaaaaatattttgtgaataa

SEQ ID NO: 230125 - DNA, 859 bp, Unknown
  Bacterial polypeptide expressing nucleotide sequence isolated from the Sargasso Sea
attgggtatccaaaatctttcaattcaagaagcaaaaaatattcttaatgaagctaaaacttttataaagttaaatagaagtaattcaaaaaaacttgatgttcttagaggaaaaactcaaataaatttattttttgaaccttcaacgcgtactcaaagctcttttgaccttgctggtaaaagattgggtgccgatgttatgactatgaatgtagtaaattcatctctcaagaaaggtgaaacattgatagatacagcaatgacattaaatgctatgcaccccgatattattgtaataagacatcaggactctggtgcccctaatttgctatctcaaaaagttaattgcgcagtcataaacgctggtgacggaagaagagagcatccaactcaagcacttctagatgctttaacaataattgacagaaaaggaaaaatagaaggtttaaaaattggaatttgcggagacatattacattcaagagttgctagatcaaatatttatttaatgaacatgttaggtgctgaagttaatgtagtagcaccaaaaactttaatgccaaaatctattgaaaaacttggggcaaaatctttcacagatatgaaaaaaggattggactcttgcgatattgttatgatgttaagattacaaaatgaaagaatgcaaggttccttcttaccatctaaaagagaatattatgaatattttggtttaactccagaaaaattaaaatatgccaacaaagatgctttggtcatgcaccccggcccaatgaacagaggtgtggaaattgatacaaaattagctgataaaatatcatgtagtctagtcaaagaacaagttgaacttggtgtggca

SEQ ID NO: 230126 - DNA, 583 bp, Unknown
  Bacterial polypeptide expressing nucleotide sequence isolated from the Sargasso Sea
ccacactatatagcaaaagaagttgggaataagattgctgttatcaatgctggagatggaatacatgctcatcctactcaagcaatgttagatatgtatacaatcagaaaatacaaaggtgattttaaaaatttaaatgtttcaattgtaggagatatactccattcaagagtagctaaatcactaatttctagcttgaatattttatctgtaaataatattaatattattggacccaaaaatctcatgcctgataatctaaaggatttaaaagtaaactatcactctaatctagaagaaggtatcgataatgtagatgtcattataatgcttagattgcagaaagaacgaatgcatgaagcactaatatcaacagatgattattataatgactatggcttgactaaaactaaaattgctgttgcaaaaaaagatgtaatagtaatgcatcctggacctattaatagaggaatagagatagattcagaggttgctgatggaccaaattcagttatattagatcaagtgtctgctggaatatctatccgaatggctattatgtcgcttatattgaagaattaaa

SEQ ID NO: 230127 - DNA, 562 bp, Unknown
  Bacterial polypeptide expressing nucleotide sequence isolated from the Sargasso Sea
atggcaatcaaaactaataaagctattaaaatttctcaaaaacatctgttaggtatccaagatttatcaattaatgatgttaatttgatacttgatgaagcacagacatttataaaagttaatcaaagcaaaaataaaaaagttgatgttttaagtgggaagacacaaattaatttattctttgagccttccactagaactcagagttcttttgaattagctggtaaaagacttggtgcagacgttatgtctatgaacattagtaactctgcaattaaaaaaggtgaaacattaattgatacagccatgactttaaatgcgatgcatccagatataattgtagttagacatcaagactctggtgcttgtaacttactttcacaaaaagtaaattgtgcagtgttaaatgctggtgatggaagaagagaacaccctactcaagctcttttagatgctttaacaattaaaactcgaaaaaataaaattgaaggtttaaaaattgcaatatgtggtgacatacttcattcaagagtagcaaggtcaaatatatatttactctaac

SEQ ID NO: 230128 - DNA, 694 bp, Unknown
  Bacterial polypeptide expressing nucleotide sequence isolated from the Sargasso Sea
aatggcaattaaaagcaataaagctgttaaaatctcacaaaagcatctgttaggtatccaggatttatcagttagtgatattaattatatcctcgatgagtccgaagctttcataaaattaaatcagagtaaaaataaaaaaattgatgtgttaagaggtaaaacacaaataaacttattctttgagccatcaactagaactcaaagctcctttgaacttgctggaaaaagacttggtgcagatgtcatgtcaatgaatatgggtaactcagcaattaaaaaaggcgaaactttgattgatactgcaatgaccttaaatgcaatgcatcctgatataattgtgatcagacatcaagactctggtgcttgtaatctattatctcaaaaagttaattgtgttgtattaaatgctggtgatggtagacgtgagcaccctacccaagcattattagatgcattgacaattagaaatcgaaaaaagaaaatacagggattaaaaatagctatatgtggagatatacttcattctagagtagctagatcaaatatttatcttcttacaatgttaggagctgaagttaatatagttgctccttctaatcttatgccaaaagaaattaaaaaatttggtgtaaatacttttactgatatgaaagcaggccctcaagattgtgacattgtgatgatgcttaga

SEQ ID NO: 230129 - DNA, 761 bp, Unknown
  Bacterial polypeptide expressing nucleotide sequence isolated from the Sargasso Sea
aatggcaattaaaaccgataaagctattaaaatctcacaaaaacatctgttaggtatccaagatttatcagttaatgatattaattatatcctggatgagtcagaagctttcataaaattaaatcagagtaaaaataaaaaaattgatgtgttaagaggtaaaacacaaataaatttattctttgagccatcaactagaactcaaagctcatttgaacttgctggaaaaagacttggtgcagatgttatgtcaatgaatatgggtaactctgcaattaagaaaggtgaaactttgattgatacggcaatgaccttaaatgcaatgcatcctgatataattgtgatcagacatcaagactctggtgcatgcaatctattatctcaaaaagttaattgtgtcgtattaaatgctggtgatggtagacgcgaacaccctacccaagcattattagatgcattaacaattagaaatcgaaaaaaaaaaattcaaggattaaaaatagcaatatgtggagatatacttcattcaagagtagctagatcaaatatttatcttcttacaatgttaggagctgaggttaatatagttgctccatctaacctgatgccaaaagaaattgaaaaatttggtgtaaatacttttactgatatgaaaaagggcctcaaagattgtgatattgtgatgatgcttagattgcaaaatgaaaggatgactagttcatatctttcatcaaatagagaatactatgaatattatggat

SEQ ID NO: 230130 - DNA, 667 bp, Unknown
  Bacterial polypeptide expressing nucleotide sequence isolated from the Sargasso Sea
gatacaataaataatattttggctatgaaagttgatatgattgtcttaagacatcccaatccaggatcatctatatttctttcaaaacatacagaatcttgtataataaacgctggagatggagcgcacgagcacccaacacaagctttacttgattcattctcaatatttgaaaaaattggagacttaaagggtaaaaatatattaatcgtcggagatattcttcactcaagagttgctctctctaatctatatttactaaatctattgggagctaatgtaaagatttcctctccgcttagtctagttccaaaggatattgaaaaattaaatgtatccgttgaaccagatattaaaaaagcattaagatggtgtgatgctgttaatgtactaagggttcaaagagaaagaatgataaaatcatatttcccagataatagagagtattctatgctttttggtctagatgaaaataaaattagttctattaaaaaagatattttaattctacatcctggtcctataaatagaggagtagaaattacttctgatcttgtagattcaaataattctattattttagaacaagtagaaaatggagttgcaattagaatggcaataatctatttattggcttctaaattaaacttttcaattaatgaataac

SEQ ID NO: 230131 - DNA, 843 bp, Unknown
  Bacterial polypeptide expressing nucleotide sequence isolated from the Sargasso Sea
cgtggtcggcaattcaaggccggtgacgctccgcgcgtggagccgggtcacgtcgctatcaacatgttcttcgagaactccacccgaacgatgaccagctttcagatggctgagcaccgtctcggcatgaagatcctcgacttcgatccgggccactccagcgtcaccaagggggagagcctctacgactcggtgcgcaccgtcgacgccattggcgccgaggttgccgtcatacgtcactccaccaaccactactacgattacctgctcgcaaccgggatgctcggcctgtcggtcgtcaatggtggggatggatctggtcaacaccctagtcagtgcatgctggacctcatgactatcgctgaggagtttggccatgtcgacggtctaacggttgcgatcagcggcgatatcgtgcactcgcgagtagctcgttctgatgctcaaatccttaccaggcttggggccaacgttgtctttactggaccgcgtgagtggatggaccatgacgtcacccgacttggcacgatggcgactctcgacgaggtcattgctgatgtcgacgtcgcgatgatgctacgcgtccagcacgagagattcgatgctggcccagacttctctgcaactgattacttacatacgtttgggctcacagacgagcgcgcagagcgaatgaagcctcatgcgatcatcatgcacccggctcctgtaaaccgaggatgtgaaatttccggtcacctcgtagaggctccctcgtctcgtatttttgagcagatggggaacggagttatggtgcggatggctattttggacaggtgttgcacggcagggagacaaatgagc

SEQ ID NO: 230132 - DNA, 508 bp, Unknown
  Bacterial polypeptide expressing nucleotide sequence isolated from the Sargasso Sea
aacaataaaaaataagtttaataatttttctaaattaaaaatagcaatatgtggtgatattcttcatagtagagttgctagatcaaatatcattatactttcaaaattaggtgctaaaataaacgtaataggaccaaaagaatggttgccaagaaatttaaacaaacttcctgttaacgtatttactaatatgaaaaaaggattagccaattgtgatattgtaatgatgcttcgtattcaaaaggagagaatagttggaaaaattatgcctaatcaaaagagttattttaaaaagtatggattagattacaataaactaaaatatgctaagaaaaacgcctttgtcatgcatccaggtcctatgaatagaggtgtagaaattgattcagctttagctgatgacattacaagaagcttaattcaagaacaagtagctatgggtgtagccgttcggatggcttgcttagatttaataattaaaaatagagataatcgtgcttacaactag

SEQ ID NO: 230133 - DNA, 532 bp, Unknown
  Bacterial polypeptide expressing nucleotide sequence isolated from the Sargasso Sea
tggagatggtagaagagaacatcctacgcaagctttattagatgctttaacaattataaatagaaaacaaaagattgaaggactaaaaattgcaatatgtggtgatatattacactcgagagtagctagatctaatatttatttgttaaatatgcttggagcagaagttaatattgttgctccaactaatttattgccaacagatatagaaaaatttggtgtaaatattttttcagatatgaaaaaaggtgtaaaagattgcgacattgtaatgatgttaagattgcaaaatgaaagaatgactagctctttcctatcatctaatagagaatattatgaatattacggtctaactccggataaacttaattatgcaaaaaaagattcaattattatgcatccaggaccaatgaatcgtgggattgaaatagatacaaagctagcagatgatacaaatatgagtgtggttaaagaacaagttgaacttggtgtggcaataagaatggcatgtttaaaaattttttgtgaatga

SEQ ID NO: 230134 - DNA, 571 bp, Unknown
  Bacterial polypeptide expressing nucleotide sequence isolated from the Sargasso Sea
atggcatctaaaacctctaaagctattaaaatctctcaaaaacatttgttaggaattcaagatctgtcagtcaatgacataaatatcattcttaacgaagcacaaacttttatatcaataaaccgaagtaaaaataaaaaaattgacgctttaagaggtaaaactcaaataaatcttttttttgaaccatcaaccagaacacaaagctcatttgaattagcaggaaaaagattaggagctgatgtcatgtcaatgaatatgggaaattcatcaataaaaaaaggtgagactctgattgatacggccatgaccttaaatgcaatgcatccagatattattgtaattagacatcaagactcaggagcctgcaaccttctttcccaaaaagttaattgtgtagtattgaatgctggagatgggcgtagagaacaccctactcaagctctacttgatgctttaacaataattaatcgaaaagataaaattcaaggattaaaaatagcaatatgtggagatattttacactcacgtgtagcaagatcaaatatttacctattaactatgcttggtg

SEQ ID NO: 230135 - DNA, 487 bp, Unknown
  Bacterial polypeptide expressing nucleotide sequence isolated from the Sargasso Sea
atggctaacccgctatatcaaaaacacatcatttccataaacgacctcagtcgcgacgacctcaatctggtgctggcgacggcggcgaaattaaaagcgaaccctcaaccggagctgctcaaacacaaggtcatcgccagttgcttctttgaagcctcgacccgtacccgcctgtcgtttgaaacctcaatgcaccgcctgggcgccagcgtggtcggcttttccgacagcgccaacacgtcgctgggtaagaaaggtgagacgctggcagataccatctcggtgatcagcacctatgttgatgcgatcgtgatgcgtcacccgcaggaaggcgcggcgcgtctggcgaccgaattctccggtaaggtgccggtactgaacgcgggtgacggttcaaatcaacatccgacacaaacgctgctggatctgttcaccattcaggaaacgcaggggcgtctgaacaacctgcatgtggcgatggtcggcg

SEQ ID NO: 230136 - DNA, 916 bp, Unknown
  Bacterial polypeptide expressing nucleotide sequence isolated from the Sargasso Sea
aatgcaggaacaaaaaagaataccggccttacaagggactttggtaacgtctttattttttgaagctagtacaagaacaaaaaatagttttgaacttgcagcaaaaagactttctgctgatgtccaaacgtttgcgccatcctcaagctctttaacaaaaggcgaaacaataattgatacagccataacttattctgctatgggggcagatacattagttatcagacattcatcaagttacataacctttgagatagcaaaaaaacttgatgcaataaatgccaagacttcagttcttaatgcgggcgatggattgcatagtcaccccagccaaggattgcttgacatctatacattgataaaattcttttcccaaaaaacactgaatccagagattttaaattccaaaaaaattttaattattggcgacgttaatcattcaagggttgccaggtcaaatctttgggctttgagtgcattcggcgccgatataatattatgtggtcctaagacattaatacctgatgaatttatcaattttttaaaaacccccgcgccaaatcaaacagaagatcctgtcaaatcaagaggttccataacaatttctagatcattggaagaatcaataaaaattgcagatgcgattattgttttaagactccagaaagagagaatggtagaaaatttactaagtagcattgattcatatagtttggattatggcttaaccccagagaaattatctttaaataataaagaaattccaattctacatcccggtcccattaacagagatattgaaattagtagcgaagtggtagatcgatatcctaattgcttaattaataatcaagtggcaaatggtatccctataagaatggctttgctttatctattacagaaacacaacaagtaa

SEQ ID NO: 230137 - DNA, 784 bp, Unknown
  Bacterial polypeptide expressing nucleotide sequence isolated from the Sargasso Sea
atgctaagtttccaaggtgaaaatatcctgtcggtcaatcagcttgatcgagattgtattgaacgtatttttgcagttgctaagaaaatggagccttatgctaaaaagcaaaagcgcaccaatgttttagagggcgcaattttagcgaacttgttctttgaaccaagcacgcgtactcgcgtaagttttggtacagcatttaacttgctaggtggtttggttcgtgaaacaacgggcatgcaaagctcagcacttgcaaaaggtgaatctttgtatgataccgcacgcgtgatctcagcgtatgcagatgcagtcgcaatgcgccaccctgacgcaggctctgttgctgagtttgccaccgggtgtgacgtgccagtgattaatggcggtgacggcccgaatgagcacccaacacaagccttactagacttactaacgattgaacgtgagctaggtcgtttcaaccaaagcatcgacggtatgcacattgccctagtaggtgatttaaaatacggccgtactgtgcactctttatctaaattactttgtcattataaagatgttaagttctcaatggtggcacctgatggcttacaaatgccagactacattttagatgccgttgataacgcaggtcataaaattcaagtagtagataaaatggaaggcaacttggccgccgatattgtttatcaaacccgtatccaagaagagcgcttcccttctcaagaagaaactaacaaataccgtggtggtttccgtatcagtcaggctattacaacgc

SEQ ID NO: 230138 - DNA, 556 bp, Unknown
  Bacterial polypeptide expressing nucleotide sequence isolated from the Sargasso Sea
ttgattgggcttgagaaactcagtgctgatcagatcctccagatacttgatactgcggaaccgtttaaggaaatctctgagcgacgcataaagaaggtcccggtcctgagaggaaagaccatagtcaacctcttcttcgaagcgtcgacccgaacacgggtatcgttcgagttcgctgaaaaaaggttgagcgctgatacagtcaatatctcaacgtctggttcgtccttggtgaagggggaaacgctggtcgatactgcgcggaacctagaggcgatgcgaatagacatggtcgtaatgcgtcatggtgcttcaggcgcagcacgtttcctcgccgagaggataccctccaccgtcattaacgcaggtgatggatggcatgagcaccccacacagggcttgcttgatttactcacgatgagagatcacatggggcacttggagggtctcaaggtctgtatagtgggagacattctccattctcgtgtagcccgatcgaatatctatggccttcgtactctgggtgctgaggtcgcggtctgcggaccgagaacgc

SEQ ID NO: 230139 - DNA, 861 bp, Unknown
  Bacterial polypeptide expressing nucleotide sequence isolated from the Sargasso Sea
aatggctattataaaaaagttttcggctgttaaaaaaatccaagaacatctcctaggaatccaaaatctttctatcaaagaagccaatctcatattagatgaagcaaaaaatttcataaaattaaatagaagtgcttctaaaaaaatggatttgctaagaggaaaaacacaaataaatttattttttgaaccatcaactagaacacaaagttcgtttgaattagctggtaaaagattaggtgctgatgtgatgactatgaatgtaggaaattcatctttaaaaaagggagaaactatattggataccgcaatgactctgaacgccatgcatccagatattatcgtagtaagacatcaggaatctggtgcaccaaatctattatctcaaaaagttaattgtgctgtaataaatgctggcgatggattaagagaacacccaactcaagcacttttagatgcattaactataaaaaatagaaaaggaaaaatcgagggacttaaaattgcaatttgtggcgatatacttcattcaagagtcgcaagatcgaatatttacttactaaatatgttgggggcagaagtaaatgttatagctccaaaaactttaatacctgactctatatctaaacttggagtcaaaagcttcacaaatatgaaagaaggtttaaaatcttgtgatatcgtaatgatgttgagattacagaatgagagaatgagtggatcatttttgccatcaaaaagagagtattatgaatattttggactaacacaagataaattaaaacttgcaaaaaaagatgctttgataatgcatccaggaacaatgaatagaggtgtcgaaatagacacaaaattagcaga

SEQ ID NO: 230140 - DNA, 460 bp, Unknown
  Bacterial polypeptide expressing nucleotide sequence isolated from the Sargasso Sea
aatgaccgagaccgccaccctaagcaatcaagatataatcacgacgaaagacctggacgcaaatgatatagagacaatcctggatacggcggattcttttaaggaaatttctacacgggctatcaagaaggtaccgactcttaggggtcgaaccatcataaacctattctttgaacctagcacacgcactcgaacttcatttgaaattgcgggaaaaaggttgagcgccgatgtcatcaatatatccggtgccggaagcagcatagttaaaggcgaaagcctgatcgatacggccaaaaatctcgaggcaatgagtcctgacatccttgttgtcaggcataactgttcgggggcaccttctcttatctctgagtttgtaaattgtcccgtgattaatgcgggcgacggaatgcacgagcatccaacccagtcactcctcgattgctcaccatccgggagc

SEQ ID NO: 230141 - DNA, 739 bp, Unknown
  Bacterial polypeptide expressing nucleotide sequence isolated from the Sargasso Sea
acagcaataacctattctgctatgggggcggatacattagttataagacattcatcaagttacataacctttgagatcgctaaaaaacttgatgcaataaattccaagacttcggttcttaatgcgggagatggattacatagtcaccctagccaaggattgcttgacgtttatacattaataaaattcttttcccaaaaaatactaaatccagaggttttaaattccaaaaaaattttaataattggagacgttaatcattcaagagttgccaggtcaaatctttgggctttgagtgcattcggcgccgatataatcttatgtggtcctaagaaattaatatctgatgaatttatcaattttttaaaaaaccccgcgccaaatcaaacagaagatcctgtcaaatcaagaggttccataacaatttctagatcattggaagaatcaataaaaattgcagatgcgattattgttttaagactccagaaagagagaatgatggaaaatttactaagtagcattgattcatatagtttggattatggcttaaccccagagaaattatcgttgattaataaagagattccaattctacatcctggtcccattaacagagatattgaaataagtagcaaagtggtggatcaatatcctaattgcttaattaataatcaagtttcgaatggtatccctataagaatggctatgctttatctattacaaaaacacaacaagtaaa

SEQ ID NO: 230142 - DNA, 934 bp, Unknown
  Bacterial polypeptide expressing nucleotide sequence isolated from the Sargasso Sea
atattggcaaatgaaattaaaattaccaaaacagagagccattcgttcatcaacaggctcaaaaatattaaaggaagctaaaaaaatagccttaaaacactattcatcatttggaattagtaacaaaattaaaaaaacatcaaaaaatatatataaaaagattcatctagttgagactgctgatttaaataagaaggaaatagaatttattttagatgaagcaaaaaaatttattaattttaataaaaaaagagtaaaaaaaagtaacctactagaaggaagaacagtttttaatttattttttgaagactcaacaagaacacgtacaagttttgaagtagctgctaaaagattaggtgcagatcttatcaatgttgctgtaaaagatagttctataaataaaggtgaaacacttttagatactatgacaactattaattcaatgaatccggatgttttaatagtaagacatccagaagaaggtattagtaaaaggatttcaaataatgttgatgcttgcgtaattaatgcaggtgacggaagtcatgaacaccctactcaagcccttttagatgctctaactataatgaatagattcaataatttctcgaaattacaaatagctatttgtggtgacattcttcatagtcgagttgcaagatctaatataatcatcttatctaaactaggcgctaaagtaaatgttattggccctaaacaatggttgccaaaaaatatcaacaaacttcccgttgaagtttatacagatatgaaaaaaggtcttaaaaattgtgatattgtaatgatgttaagaattcaaaaagagagaattgttggaaaaattatgccaaatcaaaagacttattttaataaatatggattagattacaataaactcaaatatgcaaaaaaaaatgcttttgtcatgcatcct

SEQ ID NO: 230143 - DNA, 343 bp, Unknown
  Bacterial polypeptide expressing nucleotide sequence isolated from the Sargasso Sea
cgacgcctggagcatgcgctgccgggtgcagatgccgtgatgaccctgcggctacagaaggagcggatgggccagcagttgctcaccagcctggagcgctaccaccgcgacttcgggctgagccatgaacgcatgcagctttgcggacagcaggttccagttctgcatcctggtccggtgaaccgcggcgtcgaattgaccgggtcgctcctggatgacccgcgcgtcagccttgtggaagagcaggtcaggaacggcgttcccacccggatggccttgctctacttaatggctgcttccgaatccgccacggaggcctccttggtgtcaagaagctcctgag

SEQ ID NO: 230144 - DNA, 772 bp, Unknown
  Bacterial polypeptide expressing nucleotide sequence isolated from the Sargasso Sea
cttacaagggactttggtaacgtctttattttttgaagctagtacaagaacaaaaaatagttttgagcttgcagcaaaaagactttctgctgatgtccaaacgtttgctccatcctccagctccttaacaaaaggcgaaacaataattgatacagcaataacttattctgctatgggagcagatacattagttatcagacattcatcaagttacataacctttgagatcgcaaaaaaacttgatgcaataaatgccaagacttcagttcttaatgcgggagatggattacatagtcaccccagccaaggattgcttgacatatataccttgataaaattcttttccccaaaaaaactgaatccagaggttttaaattccaaaaaaattttaataattggcgacgttaatcattcaagggttgccaggtcaaatctttgggctttgagtgcattcggcgccgatataatcttatgtggtcctaagacattaatacctgatgaatttttaaattttctaaaaaatcctgcgccaaatcaaatagaagatcctgttaaatcacgaggctcaataacaatttcaagatcattagatgaatcaataaaaattgctgatgcgattattgttttaagactacagaaagagagaatgatggagaatttactaaacagcattgattcatatagttttgattatggcttaaccccagagaaattatctttgaatagtaaacaaatcccaattctacatcccggtcccattaacagagatatt

SEQ ID NO: 230145 - DNA, 676 bp, Unknown
  Bacterial polypeptide expressing nucleotide sequence isolated from the Sargasso Sea
gatgggtgagcgcaccgtggtgctcaatgggggcgatggacttcacagtcatcccagtcagggactgctggatctgctcactcttgctcggcatttctcgccccagtaccccatgccggaagcgctgcaaggtcgccggattgtgattgtcggtgacatccttcactcgcgggtggcccgttccaatctctgggctttgacggcctgtggcgcggatgtggtgttgtgcggtcctcccagccttgttcccgaggatttttcggcattcgtggatgctccgccccctggtctgctgaaggatccggtgccgcaacggggcaaggtcagcgtggtgcggcgcctggagcatgcgctgccgggcgccgatgccgtgatgaccctgcggcttcagaaggaacggatgggccagcagttgctcaccagcttggagcgctatcaccgggacttcgggctgagccatgagcgcatgcagctctgcggagagaacgttcccgtactgcaccccggcccggtcaatcgcggcgtcgaattgagtggcacgctcctggatgacccgcgcgtcagccttgtggaagagcaggtcaggaatggcgtgcccacccggatggccttgctctatttgatggcagcttccgaatccgcaactgaggcctccttggtgtcgagcagctcctga

SEQ ID NO: 230146 - DNA, 622 bp, Unknown
  Bacterial polypeptide expressing nucleotide sequence isolated from the Sargasso Sea
atgcaaacttggcctcataaacatatccacacactagctaatttttcaattcaggattacaaagcagtatttgaattagctaatagatttgatgcactaaaaaattctggaacaaaaaagatacctgccttacaggggactttggtaacatctttgttttttgaggctagtacaagaacaaaaaatagctttgaacttgcagcaaaaaggctttctgctgatgtacaaacctttgctccatcctctagttcactaacaaaaggagaaacaatcattgatacagccataacttattctgctatgggtgcagatatattagttattagacattcatcgagttatataacctttgagatcgctaaaaaactcgatgcaataaactccaagacttctgttcttaatgcaggagatggattacatagtcaccctagtcaaggtttacttgatatttatacattaataaaattcttttccaaaaaatcactgaatccagaggttttaaattccaaaaacattttaataattggagatgttaatcattcaagagttgcaagatcaaatctttgggctctgagagcatttggcgcgaacataattttatgtggtcctaaaacattaattc

SEQ ID NO: 230147 - DNA, 424 bp, Unknown
  Bacterial polypeptide expressing nucleotide sequence isolated from the Sargasso Sea
cttgttagatattgatcaattaaacaaagaagatatcaaatatatttttgaatatgctgaaaaacttgaaactatttcaaaaggttctgttagaaagattccagctttaagaggcaaaacaattttaaattactttgcagaacctagcacgcgaacaagagtttcatttgaaaatgcaggtaaaatattatctgctgatgttattaatatgtcgtctagtggaagtagtgacgaaaaaggagagtctctttttaatagtgttcaaactttagagtcaattggtgcaaatttgttagtcattagacattatgattcaggggctccatattttgtttctcgaaatatagatataccagttataaacgcaggagacggatctcatgcgcaccctactcaaaatctaattgatttatacacggtttac

SEQ ID NO: 230148 - DNA, 709 bp, Unknown
  Bacterial polypeptide expressing nucleotide sequence isolated from the Sargasso Sea
aatttttcttactctggatcttcaattagtaaaggagaaaatttaatagatacaattaataatatcattgcaatgaaagttgatattattgttttgagacatccgtctccaggatctgcattatttgtttcaaaaaatatcaattcctgtgtaattaatgcaggagatggaacacatgaacatccttcccaagcacttctagacgcctattcattaattgaaaagttaggaaatttaaaagggaaaagaattgctattgttggagatgtattacattctcgagtggcgctctctaatatattcatattaaaacttcttggtgctgagataaaattatgtgcccccaagtcattgctcccaaagcatattgaatcattaggtgtttcatatagtgataacttaacacaaacattaaagtggtgtgatgctgtaaatatgctaagaattcaaaatgaacgaactgaacttaatttttttccttctgcaagagaatattcgagactttatggtttagacaaagaaaagtttgaaaaaattaaaaaagacatcttaattttacaccctgggccaattaatagaggagttgaaataacttctgatcttgcagattctgaaaatgcaattattctagatcaagtagagaatggtgtcgctatcagaatggccataatttatttattagcatctaaacttaagatgattgactatg

SEQ ID NO: 230149 - DNA, 736 bp, Unknown
  Bacterial polypeptide expressing nucleotide sequence isolated from the Sargasso Sea
atggcatcttcaaaaaaagctattaaaatttctcaaaaacacttattaggaatccaagacttatcgatcaatgatatcaatgtaatattagaagagtcaaagaaatttataactcttaacaaaagtaagaataaaaaaattgatattttgagaggaaagacccagattaatttattttttgaaccttctacaagaacacaaagctcttttgaattagcaggtaaaagactaggtgcagatgtgatgtcaatgaatatcacaaattctgcaattaaaaaaggtgaaacacttatagatacagcaatgactcttaatgcaatgcatcctgatataattgtaattagacatcaagattctggtgcatgtaatttattatcacaaaaagtaaattgtgctgttttaaatgccggagatggacgtagagaacaccctactcaagcacttttagatgctttgactataatagacagaaagaaaaaaattcaaggtttaagaattgcaatttgtggtgacattcttcactctagggtagctagatctaatatatatttacttaacatgttaggtgcagaggtaaatatcgtagctccttcaaatttaatgcctaaagatatagataaacttggagtaaataaatttactgatatgaaaaaaggtgtaaaggattgtgatatagttatgatgcttagattgcaaaatgagagaatgacaagttcatttttatcttcccaataga

SEQ ID NO: 230150 - DNA, 671 bp, Unknown
  Bacterial polypeptide expressing nucleotide sequence isolated from the Sargasso Sea
aatgcaaatttggcctcataaacatatccacacacttgctaatttttcaatacaagattataaatcagtatttgaattggctcatagatttgattcattaaagaatgcaggaacaaaaaaaatacccgccttacaagggacgttagttacgtcattgttttttgaagctagtacacgaacaaaaaatagttttgaactcgcagcaaaaaggctttctgctgatgtccaaacatttgcgccatcttctagttctttaacaaaaggtgaaacaataattgatacagccataacttattccgctatgggggcagatacattagttataagacattcatcaagttacataacctttgagatctcaaaaaaacttgatgcgataaattccaaaacttcagttcttaatgctggagatggattacatagtcaccccagccaaggattgcttgacatctatacattgataaaattcttttcccaaaaaacactgagtccagatgttttaaattccaaaaaaattttaataattggagacgtcaatcattcaagagttgcaagatcaaatctttggggtttgagtgcatttggcgcagaaataatcttatgcggtcctaaaacattaatacctgatgaatttatcaattttttaaaaaaccccgcgccaaatcaaattg

SEQ ID NO: 230151 - DNA, 571 bp, Unknown
  Bacterial polypeptide expressing nucleotide sequence isolated from the Sargasso Sea
cttgttatcacagaaagtaaattgtgctgtaattaacgctggtgatggaagaagagaacatcctactcaagcactgctggatgctttaacaataatagaaaaaaaaggaaaaattcaaggtttaagaattgctatatgcggtgacatattacattctagagtagccagatcaaatatatatttattaaacatgttgggtgcggaagttcatatagttgctccaactaatttaatgccaaaagatcttgaaaaatttggtgttaataaattctcagatatgaaaaaaggattaaaagattgtgatattgttatgatgcttaggcttcaaaacgaacgaatgcatagttcatttttagcttctaatagagaatattatgaatattatggactcactcctgataaactagattgtgcaaaaaaagatgctttgatcatgcatcctggtccaatgaaccgtgggatagaaatagatacaaaccttgctgatgatattaacaaaagtgtaatccaagaacaagttgaactgggtgttgctgttagaatggcttgtttaaaaattttttgtgaataa

SEQ ID NO: 230152 - DNA, 634 bp, Unknown
  Bacterial polypeptide expressing nucleotide sequence isolated from the Sargasso Sea
aatggcaattaaatcaaaccaggctattaaaatttctcaaaaacacctattaggaattcaagatttatcaattaatgatgtaaacttaatacttgatgaagcaaatttatttattaaagtaaatcaaagtaaaaataagaaagttgatgttttaagaggtaaaactcaaattaatttattttttgaaccttccactagaactcaaagctcttttgaattagccggtaaaagacttggggctgatgttatgtcaatgaatattagcaactcagcaattaaaaaaggcgaaacgttgatagatacagcaatgacgctaaatgctatgcatcctgatattatcgtaattagacatcaagattctggagcatgtaatctactttctcaaaaagtacactgtgcggttcttaatgctggtgatggaagaagagagcaccctactcaagctttgttagatgcattaacaattattactcgtaaaaaaaaaatacaaggattaaaaatagcaatctgtggagatatacttcattcaagagttgctagatcaaatatttatttacttagtatgttaggagcagaggtgaacattgttgctccaacaaatctcatgccaaaagaaattgaaaatttggtgtga

SEQ ID NO: 230153 - DNA, 248 bp, Unknown
  Bacterial polypeptide expressing nucleotide sequence isolated from the Sargasso Sea
catggctaacccgctctatcaaaaacacatcatttccataaacgacctcagccgcgatgacctcaatctggtcctcgcgacggcggcgaaattaaaagctaacccacagccggagctgttaaagcataaggttatcgccagctgcttctttgaagcgtcaacccgcacccgtttatcctttgaaacctccatgcaccgcctgggcgccagcgtggtgggtttttctgacagcagcaacacgtcgctgg

SEQ ID NO: 230154 - DNA, 563 bp, Unknown
  Bacterial polypeptide expressing nucleotide sequence isolated from the Sargasso Sea
tctgtttataaacgccggtgacggaaagcatgagcatccaactcaagctttgcttgatgctatgaccgttctacgcagaaaaagccgacttagtggacttaccgtcacaatttgtggggatatcgcccatagccgagtagctagatcaaatatttttctgtttggaaaattgggaaattctattaggcttgtaggtccagcaacactggtaccagactgctttaaagaatttggagttgaggtatttaacaatatgagagaaggactaaaaggcgctgatgtagtcatgatgttgaggctacaaaaggaaagaatggatggtggttatgttccttctgaaagagaatattttcatttttatggattagatgaagagaaactttcacaagcgaaatcagatgccataatccttcatcctggtccaatgaataggggtgtagagattgatagtgagttggctgatgacttaagtcgatcagcgatccaagagcaagttgaaatgggcgtctccataagaatggcagttatagaaagcttaattgcacgagttattgataaatgat

SEQ ID NO: 230155 - DNA, 903 bp, Unknown
  Bacterial polypeptide expressing nucleotide sequence isolated from the Sargasso Sea
taatgaactatctgaaaatgaaataatatctatcattaataatgcaaataattattatcatgataataaaataacagcgaaaaaaaaagttttaaataattttactcaaataaatcttttttttgaaaattcgactagaactcaagtaagttttgaaattgctggaactttattaggtgccaacgttgtaaattttccattaaataacagttcacaatcaaaaggagaaacacttctagatcttgccgctactttaaattctatgaaccctgatattttggtaattagacatccttattctggagctgttcaactaatttctgaaaaagtaggctgtcctgttgtaaatgcaggtgatggaaatcatgaacaccctacccaggctttactagatattctaactataaagaaaagagtaggaaggattgacaatctaaaaatagccatatgtggggatattgcacatagcagagtggctagatctaatattttttgccataaaaagttaggaaatgaaataagagttattggaccaaaaacacttataccaaaagatattgataagcttggagttcaagtattttacaatatggttgacggattacacgatatagatgtgattatggttttaagattacaaaaagaaaggatggatggtggatacttttcctctgaaagagagtattttcatctttacggtctagatgatagaaaaatgagatatgctaagccttcagcaattataatgcacccagggccaatgaatagaggtatagaaattgatggtgatcttgcagataatttggataaatctgttataactatgcaagttgaagcagggttggctattagaatgtctatcttagaactgcttttaaaaaagaaaattgaaatgtctaaaat

SEQ ID NO: 230156 - DNA, 340 bp, Unknown
  Bacterial polypeptide expressing nucleotide sequence isolated from the Sargasso Sea
tttgccaaaagatatacagaaatttggtgtaaatgtttattctaatatgaaaaaaggcgtcaaagactgcgacattgtaatgatgttaagattgcaaaacgaaagaatgacaagttcatttttgtcatcgaatagagaatattatgaatattatggactaacacctgacaaattagaatatgcgaaaaaagattcgatcattatgcatcctggacctatgaatagaggtatagaaatagatactaaattagcagatgatacaaatatgagtgtagtaaaagaacaagttgagcttggtgtagcagttagaatggcttgtttaaaaatattttgtgaataa

SEQ ID NO: 230157 - DNA, 657 bp, Unknown
  Bacterial polypeptide expressing nucleotide sequence isolated from the Sargasso Sea
aaacattaattgacacagctatgacattaaatgcaatgcatccagatataattgttgttagacatcaagattcaggagcatcaaatttattatctcaaaaagtaaattgtgctgttttaaatgctggagacggcagaagagaacaccctactcaagcattgcttgatgcattgactattattgatagaaagcaaaaaattcaaggattaaaaattgctatatgtggtgatattgttcattcaagagtagctagatcaaatatttatttacttaatatgttgggtgccgaagtaaatatagttgctccttcaaatttaatgcctaaagacattcaaaaacttggtgttaatagtttttctgatatgaaaaaaggattaaaagattgcgatattgtcatgatgttaagacttcaaaatgagagaatgacaagttcatttttatcatctaacagggaatattatgagtattatggtttaacacctgacaaattaaaatatgctaaagacgatgcattaataatgcatcctggacccatgaatagaggtatagaaatagatacaaaattagcagatgatatcaataaaagtgtaattaaagagcaagtagaactaggtgttgctgtgagaatggcctgtttaaaaattttttgtgaataat

SEQ ID NO: 230158 - DNA, 798 bp, Unknown
  Bacterial polypeptide expressing nucleotide sequence isolated from the Sargasso Sea
gatgactggaaacaatattcaactcgacaaagacggcaatctaaagcactttctttctattgaaggactcagccacccattactccatacaattctcgactacgctgaatcttttgccacagttggtaaaagacctgtaaaaaaagtaccgctactacgcgggaaaacgattgctaatttattctttgaacccagcactagaacccgtacaacttttgaactcgcagcaaaaagattatctgcagatatactcaatctgaatatttcaacttcggcaacaagtaagggagaaatactaagtgacacgcttcgcacactcgaagcaatgcattgtgatatgttcgtcgttcgtcatgctaacagtggcgcagcacactatatctcatcacaagtagctccacatatcagtgttataaatgccggagatggcagacatgagcatccaactcaagcgatgctagatatgtttactattaagcaacacaagaaagatttcgcaaaactatgtgtcgctattgtaggtgatattttacattcacgtgtcgcgcgttcagaaatacatgccttaaatatattaggtgtaaatgaagtaagaataatcggtcctcatacactaataccaaaggatatcgaaaatcttggtgtccatatttatcatgatatgaatgatggacttaaagatgttgatgttgtagttatgctgagattgcaacgagaacggatgcgtggagcattattaccaagcgaagatgaatattttaaaagattcggttttaccaataaaagactaaggcatgc

SEQ ID NO: 230159 - DNA, 770 bp, Unknown
  Bacterial polypeptide expressing nucleotide sequence isolated from the Sargasso Sea
ccgaacgtcgagttcgttcgagcttgcgggcaaacgcctaggcggcgacaccatgaacatgtcggttgcttccagcgccgtaaaaaagggtgaaactctgattgacactgccatgacactgaatgcaatgcacccggacgtactaatcgttcggcatgccgattctggtgcagtaaaactactttccgaaaaagtaaattgttcggtaatcaatgctggtgacggcacacacgaacatccgacacaggctctccttgatgccttgaccatccgtcgtcgcaaaggaagaatacatcgcctaaccgtcgctatttgtggcgatattctacatagtcgcgtagcccgctcgaatattcatcttttaaacaccatggggtcgcggatccgtcttgtagccccgccaacgcttttaccgagcgacatcgacagatttggtgtggaggtattccacaatattgaagaaggcataaaagattgtgatattgtcatgatgctgcgactacaaaatgagcgtatgcaaggaatgttcgtcccatcaatccgcgaatatttccggtattttggtttgacacgcgaaaaattggcagctgccaagccagatgcacttgtcatgcatccgggaccaatgaatcgcggtgttgaaatcgattccgacctggcagacgatctagaccggtctgttatccgcgaacaggtggaaatgggcgtagcagtccgcatggcatgcctggatgcattgaccagaaacgaactggcaaacgcgctgtgac

SEQ ID NO: 230160 - DNA, 517 bp, Unknown
  Bacterial polypeptide expressing nucleotide sequence isolated from the Sargasso Sea
ggcattgcttgatgcatattcattaaaagaaaaattaggagatttagaaggtaaaaaaatacttatcgtaggtgatatacttcattcacgagttgctctgtccaatatatatgcattaagattattaaatgctaaaataaaaatatgtagccctttaagtcttcttccaagagaaattgaatctttaggtgtatctattgaaacaaatatcgataaggctctagcatggtgtgatgcagctaatgtacttagagttcagtatgaaaggatggaaaagtcatattttcctaataatagagagtattctattctttacggaatcgataagaaaaagatagatcgtttaaaaaacaatattttaattcttcatcctgggccaattaatagaggtgttgagatcacatctgatattgtagaatcaaataattcaattattttagatcaagtagaaaatggggttgctattagaatggcagttatttatttattagcatcgaaaattaaaatttctaattag

SEQ ID NO: 230161 - DNA, 805 bp, Unknown
  Bacterial polypeptide expressing nucleotide sequence isolated from the Sargasso Sea
aatggccacagacacaaaaaaagctattaaaaattctacaaagcatcttctaggtattcaagatttaaaagtttcagaaataaagcatatattaaatgaagcccaacaatttattgatcttaatagaagtaaaaacaaaaaatcagatattttaaaaggcaaaacacaaattaatttattctttgaaccttctacaagaacgcaaagctcttttgaattagcaggtaagagattaggtgcagatgttatgtctatgaatataactaattcagcaattaaaaaaggagaaacacttattgataccgcaatgacattaaatgcgatgcatccagatataattgtcataagacatcaagattctggagcttgtaatttattatctcaaaaagttaattgtgcagtgttaaatgcaggagatgggcgtagagaacatccaacccaggcattgctggacgctttaacaataattaatagaaagaaaagtatcgaaggattgaagattgcgatctgtggtgacattctacattcaagagttgcaaggtcaaatatctatctactaacaatgttaggagcaaatgttaacattattggaccaacaaatttgttgccaaaagatttagataaatttggtgtaaatatttttactgatatgaaaaaaggtgtaagggattgtgatatagtaatgatgctaaggctacaaaatgaaagaatgtcaagttcttacctatcatcaaatagagaatattatgaatattatggtttatcacctgaaaaattggagtttgctaaaaccgatgccattaat

SEQ ID NO: 230162 - DNA, 927 bp, Unknown
  Bacterial polypeptide expressing nucleotide sequence isolated from the Sargasso Sea
aatggcgttaataaaaaagttttcagctgttaaaaaaattcaaaaacacctattaggtattcaaaacttatctattcaagaagcaaatctaatcttagatgaagcaaaaaactttataaaattaaatagaagcgcatctaaaaaattagatttattgagaggaaaaactcaaattaatttattttttgaaccctcaacaagaactcaaagctccttcgaacttgcgggtaaaagactgggcgcagatgtaatgacaatgaatgttggaaattcctctttaaaaaaaggcgaaacaattcttgataccgcgatgtctcttaatgcaatgcaccctgatattatagttgtaagacatcaagactctggtgctccaaatttattatctcaaaaagttaattgtactgtaattaatgctggtgatggtttaagagaacacccaactcaggctcttcttgatgcgcttactataattaacagaaaaggaaaaatccaaggtttaaaaattgcaatttgtggagatattcttcattcacgtgtggctagatcaaatatatatttattaaatatgttgggagctgaagttaatgttattgctccaaaaactttaatgcccacatcaattaataaacttggtgttaaagcatttacaaatatgaaagagggtttgaagtcttgtgacatagttatgatgctgagattacaaaatgaaagaatgaaaggatcttttttaccttcaaaaagagaatattatgaatattttgggttaacacctgacaaattaaaattagcaaaaaaggacgctttaataatgcatcctggtccaatgaacagaggtgttgaaatagatacgaagcttgctgatgacattaatgtaagcttagtaaaggaacaagtagaactaggggtagctgtaagaatggcatgctt

SEQ ID NO: 230163 - DNA, 459 bp, Unknown
  Bacterial polypeptide expressing nucleotide sequence isolated from the Sargasso Sea
tttgttaggtatccaaaatctctcaattcaagaggcaaaaaatattctcaacgaggctaaaacttttattaaattaaatagaagtaattcaaaaaaactagatatacttagagggaaaacccaaataaatttattttttgaaccctctactagaacccaaagttcttttgaccttgcaggcaaaagattgggggctgatgttatgacaatgaatgtggtgaattcttctcttaaaaaaggtgaaacactaatagatacagcaatgacattaaatgctatgcatccggatattatagtaataaggcatcaggattcaggtgctcctaatttgctttctcaaaaagtaaattgtgccgttatcaatgctggtgatggaagaagagagcatccaactcaagcacttttggatgctttaacaataatagatagaaaaggaaaaattgaaggcttaaagattgg

SEQ ID NO: 230164 - DNA, 808 bp, Unknown
  Bacterial polypeptide expressing nucleotide sequence isolated from the Sargasso Sea
gctttctgctgatgtccaaacgtttgcaccatcctctagttctttaacaaaaggagagacaataattgatacagccataacttattctgctatgggagcaaatacattggttataagacattcatcaagttacataacctttgagatctcaaaaaaacttgatgcgataaactctgagacttctgttcttaatgcgggagatggattacatagtcaccccagccaaggtttacttgacatctatacattattaaaattcttttccccaaaaacactgattccagaggttttaaattccaaaaaaattttaataattggagacgttaatcattctagggtggcaagatcaaatctttgggctttgagtgcattcggcgcagacataatcttatgtggtcctaagacattaatacccgatgaatttgtcaattttttaaaaacacccgcgccaaatcaaatagaagatcctgttagatcaagaggttccataacaatttctagatcattagaagaagcaataaaaattgctgatgcgattattgttttaagactccagaaagagagaatgatggaaaatttattaaatagcattgattcatatagtgtggattatggcttaaccccagagaaattatctttgaataataaagaaattccaattcttcatcctggccccataaacagagatattgaaatcagcagtaaagtagtagatgaatatcctaattgcttaattaataatcaagttgcaaatggtatacctataagaatggctttactttatctattacagaaatacaacaaataa

SEQ ID NO: 230165 - DNA, 550 bp, Unknown
  Bacterial polypeptide expressing nucleotide sequence isolated from the Sargasso Sea
atgataaacaacgaatcattaattaaattccctcattatcatctcctaggaatcgagggtttaactccaccggacttaaattatttactggagttatcagaacactttgcagagcatttagataaagaagaaacagaaaaactaaattatttaaaaaataaaatttgcatcaatcttttttttgaaaattcaacaagaaccagaacctcttttgaactagcaggtaaaaaattaggggcagatatgttaaatatttctgtggcttccagtgctattaagaaaggtgaaaccttgatagatacggccatgaccttaaatgctatgcaacctgatgttttggtagttaggcatcaagatgctggcgcagttcaattactatcagaaaaagtaaactgtggtgtaattaatgcaggagatggtcctcatgaacaccccacacaagcacttcttgatgcgcttacaattaaaaaaagaaaaggaaagatttctggcttaaaagtcgctatatgtggagatataatgcatagcagagtagctcgctcaaatattc

SEQ ID NO: 230166 - DNA, 610 bp, Unknown
  Bacterial polypeptide expressing nucleotide sequence isolated from the Sargasso Sea
tcctctggagctgcagaatttatatcaaaacacgttggtgaaaatattagtgtaattaatgctggagatggacgccatgctcatcccactcaagcaatgttagatatttttaccttaagacaaaagtttaaaagctttgaaaatcttaaggttgcaattgttggtgatattcttcactcaagagttgcaagatcattgatttcagcactaaatacactagaagttagcgaagttagagttgttgctcctaagactttaatgccgattggtgttgatgaattaggtgtaaaatcttattttgatatggatcaaggtatcaaggattgcaatgcagttatcatgttaagacttcaaaatgaaagaatgaactcaagttttataccagatatcaatgaatattataatctttatggctttactccagaaaggttaggtaaaattgataaagagggaattataatgcatccaggtccagtaaatagaggtgtagaaataagttcagaaatcgctgattcaagcagatcacttattcttcaacaagtatcaaacggtattgcagttcgaatggcgatattatctttgtcaatgcaaaaaggattagaatcatgag

SEQ ID NO: 230167 - DNA, 870 bp, Unknown
  Bacterial polypeptide expressing nucleotide sequence isolated from the Sargasso Sea
aaaaaatatatttaaaaaagttcatttagttgaaactgcagatttaacaaaaaaagaaattgaatatatcttaaatgaagcaaaaaaatatatattgtataataaaaagagaataaaaaatatgaatatactcgaaggtcgaacgatatttaatttattttttgaagattcaacaagaacaagaactagttttgaagtagcggctaaaagattaggggcagatttgataaatgtagcagtaaaagatagttcaataaataaaggtgaaactttactggatacaatgactacaatcaattcaatgaatcctgatgttttaattgtaagacatcctgaagaaggcattagtaaaaaaatttcagaaactgttgatgctagtattattaatgccggtgacggtagtcatgaacatccgactcaagcactacttgatgcattaactattaaaaataagtttaataatttttcaaaattaaaaattgcaatatgtggagatattctacacagtcgagttgccagatctaacataattatattatcaaaattaggttcaaaaattaatgtagtaggacctaaagaatggttacctaaaaatttaagaaaactacctgtgagagtatttactgacatgagaaaaggattagagaattgtgatattgtcatgatgcttcgaattcaaaaagaaagaatagtgggtaaaattatgcctgatgaaaggagttattttaaaaagtatggattagactacaataaactaaaatatgcaaaaaaaaatgcttttgtgatgcatcctggcccaatgaacagaggagttgaaatagaatctaaactagctgatgatatcacaataagcctaatacaggagcaagt

SEQ ID NO: 230168 - DNA, 893 bp, Unknown
  Bacterial polypeptide expressing nucleotide sequence isolated from the Sargasso Sea
ggccctacagggaactttggtaacgtctttattttttgaagctagtacaagaacaaaaaatagttttgagcttgcagcaaaaagactttctgctgatgtccaaacgtttgcgccatcctcaagctctttaacaaaaggcgaaacaataattgatacagccataacttattctgcaatgggggctgatacattagttatcagacattcatcaagttacataacctttgagatcgcaaaaaaacttgatgcaataaattccaagacttcagttcttaatgctggagatggattacatagtcaccccagccaaggattgcttgacatctatacattgataaaattcttttcccaaaaaacactgaatccagaggttttaaattccaaaaaaattttaataattggcgacgttaatcattcaagggttgccaggtcaaatctttgggcattgagtgcattcggcgccgatataatcttatgtggtcctaagacattaatacctgatgaatttatcaattttttaaaaacccccgcgccaaatcaaacagaagatcctgttaaatcaagaggttccataataatttctaggtcattggaagaatcaataaaaattgcggatgcgattattgttttaagactccagaaagagagaatgatggaaaatttacttagtagcattgattcatatagtttggattatggcttaaccccagagaaattatctctaaataataaagaaattccaatcctacatcctggtcccattaatagagatattgaaataagtagcaaagtggtagatcaatatcctaattgcttaattaataatcaagttgcaaatggcatacctataagaaaggctttgctttatctattacaaaaacacaacaagtaaa

SEQ ID NO: 230169 - DNA, 770 bp, Unknown
  Bacterial polypeptide expressing nucleotide sequence isolated from the Sargasso Sea
aatggcagttattaaaaagttttcagctgttaaaaaaatccaaaaacatcttcttggtatccaaaatctgtctataaatgaagcaaaattaattttagaagaagcaaaaaattttataaaattaaatagaagcgtatctaaaaaacttgatttgttaagaggaaaaactcaaattaatttattcttcgagccatccacacgaacgcagagttcatttgaattagcgggaaaaagattaggtgctgatgttatgacaatgaatgttggtaattcatcacttaagaagggtgaaacaatattagatactgcgatgtcacttaatgcaatgcatcctgatataattgttgttaggcaccaagactcgggtgcccccaaccttttatctcaaaaagtaaattgtactgtaataaatgctggagatggtttgagagaacatcctacccaagcacttttagatgctttaacaataattaatagaaaaggaaaaattgaaggtttaaaaattgctatctgtggtgacattcttcattcaagagtagctagatcaaatatatatctattgaatatgcttggtgctgaagtaaatgttatcgcaccaaaaactttattacctaattcagtaagtaaattaggtgttaaagggtttacaaatatgaaggaaggattagcctcgtgtgacattgttatgatgttaagactacaaaacgaaagaatgacaggatcattccttccttctaaaagagagtattacgaatattttggattgacgc

SEQ ID NO: 230170 - DNA, 550 bp, Unknown
  Bacterial polypeptide expressing nucleotide sequence isolated from the Sargasso Sea
ttgtgcagtaataaatgctggagacggttaagagaacaccctactcaagcacttttggatgctcttacgataattaacagaaaaggaaaaattgaaggtttaaaaatcgctatctgcggagatattcttcattcaagagttgctagatcaaatatttatttattaaatatgttaggtgctgaaattaatgtaattgctccaaaaactttaatgccatcctcaattaacaaacttggtgttaaaggttttacaaatatgaaaaaaggactaaagtcctgcgatatagttatgatgttgagattacaaaatgaaagaatgaaagggtctttcttgccttcgaaaagggagtattatgaatattttggattaacgcctgacaaattaaaatttgctaaaaaagatgcattaataatgcatcctggaccaatgaataggggtgttgaaatagacacgaagcttgctgatgatatcaatgttagtttagttaaagaacaggtggaattaggagtagctgtaagaatggcatgcttaaaattgtattgtaaataat

SEQ ID NO: 230171 - DNA, 622 bp, Unknown
  Bacterial polypeptide expressing nucleotide sequence isolated from the Sargasso Sea
atgcatccagatattatagtagttagacatcaagattcaggagcatcaaatcttttgtctcagaaagtaaattgctctgttctaaacgccggtgacggaaggagagaacaccctactcaagcattattggatgctcttactataatagatagaaaaaaaaaaattgaaggattaaaaattgcaatatgtggagatattgttcattcaagagttgctagatctaatatttatcttttaaatatgttaggtgcagaagtaaatattattgggccttcaaatttaatgccaaaagatattgataaattaggagttaaaactttttcagatatgaaaaaaggaataaaagattgtgatatagtaatgatgcttagactgcaaaatgaaagaatgaccagttccttcctttcatctaatagagaatactatgaatattatggtcttacaccagataaattagaatttgccaaggaagatgctttaataatgcatccaggtccgatgaatagaggtatagaaattgacacaaagttggctgatgacataaataaaagtgttataaaagaacaagttgagctaggtgtagctgttcgaatggcttgtcttaaaatattttgcgaataat

SEQ ID NO: 230172 - DNA, 574 bp, Unknown
  Bacterial polypeptide expressing nucleotide sequence isolated from the Sargasso Sea
atggcaacatcattcaagaaagctattaaaatttctcaaaaaaacttattaggaattcaagatttatctatttcagatataaacgttattttagaagactctaaacaatttatttcattaaataagagtaagaataaaaaattagatattcttaggggtaaaactcaaattaatcttttttttgaaccatctaccagaactcaaagctctttcgagcttgcaggtaaaagattgggtgctgatgtaatgtcaatgaatatagtaaattcagctattaaaaaaggtgaaactcttatcgatactgcaatgactctgaatgcaatgcatcctgatataattgttataagacatcaagattctggagcttgcaacttactttcacagaaagttaattgtgccgtaattaatgctggtgatggcagaagagaacaccctactcaagcattattggatgccctaacaattattgataggaaaaaaaaaattcaaggtcttaaaattgcaatttgtggggatatacttcattcaagagttgcaagatcaaatatttatcttcttaatatgttgggtgcag

SEQ ID NO: 230173 - DNA, 946 bp, Unknown
  Bacterial polypeptide expressing nucleotide sequence isolated from the Sargasso Sea
atggcagtaataaaaaaattttcagctgttaaaaaaatccaaaaacaccttttaggaatccaaaacttatctattcaagaagctaatctcatcttaagtgaggcaaaaaactttataaagttaaataggagtgcgtctaaaaaattagacttattaagaggaaaaacccaaattaatcttttttttgagccatcaaccagaacccatagttcgtttgagttagctggtaaaagattaggagcagatgtgatgacaatgaatgttggaaattcgtcacttaaaaaaggtgagactatattagatactgcaatgtcacttaatgcgatgcaccctgatattattgtggtaagacaccaggactctggtgcccccaacctactttcgcaaaaagttaattgtacagtaattaacgctggcgatggattaagagaacatcctactcaagcacttttggatgcattaacaataattaataggaaagggaaaattgaaggtttaaaaattgctatttgtggggatatacttcattcacgagtagctaggtcaaatatttatttgttaaacatgttaggtgcagaagttaatgttattgctccaaaaactttaatgcctacgtctattaacaaacttggagttaagggatttacaaatatgagggaaggcttgaaagcttgcgacattgttatgatgcttcgattgcaaaatgaaagaatgacaggatcttttttaccctcaaaaagagagtactatgaatactttggattaacacctgataaattaaaacttgctaaaaaagatgctcttataatgcatccaggaccaatgaacagaggtgttgaaatagatactaaactcgctgatgatataaatgttagtttagtaaaagaacaagtggaattaggagttgctattagaatggcatgcttaaaattatattgtaaataat

SEQ ID NO: 230174 - DNA, 1006 bp, Unknown
  Bacterial polypeptide expressing nucleotide sequence isolated from the Sargasso Sea
atgagctttaaaggcgaacacatcctctccgttaaacagtttgaccgcgacaaaattcagcaagtttttgatatcgcccgaagcatggaaccttatgccaaacggcagaagcgtacgactgtgcttgaaggagctattttaggcaatctgtttttcgaacccagcaccagaacccgtgtcagctttggttgcgcgttcaacctgttgggcggtgaagttcgcgaaaccacaggtatgcaatcctcggctttatctaaaggcgaatccttgtttgatacagcacgggtgatcagcagttacagcgatgtaatcgccatgcgtcatccgcaagcaggttcagtagctgaatttgctgaaggcagtcgcgtgccggtgttaaacggtggtgacggtgcgaatgagcatcccactcaagctttattggatttatttactatagaaaaagagctggccgcctcacaacaacctatagatggtatgcatatcgctatgattggcgatttaaagtttggccgtactgtgcattcgttatccaagttactggcactgtataaaaacatccagttcacgctgatagcacccaatgagctggctatgccggatgatattgtttccctgattgaaaacgcaggccacagagtgacagtgactgatcaattagctggtcatctgaatgcagatattgtttatcaaacccgtattcaggaagagcgtttcccctcacaggaagaagccaataaataccgcggaaaattccgcttaaaccaggatatttacaccaaacactgtaaatccaataccgtcattatgcatccgctaccacgggattcccgtatcgaagccaatgaattggataacgacttaaacctgaacccgaatctggccattttccgccaggctgacaatggcgttttggttcgtatggcgttgtttgctttaactttaggtgtagaacagttggtgactaaatacgaacgcgaagtaccttggtacagcaataaataat

SEQ ID NO: 230175 - DNA, 883 bp, Unknown
  Bacterial polypeptide expressing nucleotide sequence isolated from the Sargasso Sea
catattttaaatgaatcaaaaaaatatatttcatttaataaaaaaaaaattaaaaaaattaatatactagaaggccgtacaatttttaatctcttctttgaagactcaacaagaacacgaactagtttcgaagttgctgctaaaagattaggtgcagatttaataaatgttgttgttaaagatagctcaattaataaaggtgaaactcttcttgacactatgacaacgattaactccatgaatccagatatcttaattgtcagacatccagaagaaggaataagtaaaaaaatttctaaaacagttgatgcatctgtaattaacgcaggtgatggtagtcatgaacatccaacccaagctttgttagacgcattaacaattaaaaataagtttaataattttgctaaattaaaaattgctatatgtggagatattcttcatagtcgagtggcaagatcaaatattatcatcctttcaaaattaggtgcaaacataaatgttattggtcctaaagaatggcttccaaaaaatattaataaacttccagtaaatgtttttacagatatgaaaaagggattaaaaaattgtgatattgttatgatgcttagaattcaaaaggaaagaatagttggaaaaattatgcctaatcaaaagacttactttaaaaaatatggattagactacaataaacttaaatatgctaagaaaaatgcatttgttatgcatccaggtcccatgaacagaggtgttgaaattgattctactttggctgatgatattactagaagcttaatacaagaacaggtagcaatgggagttgcagtacgtatggcttgtttagatttaataattaaaaatagagatattcgtgtttataactaat

SEQ ID NO: 230176 - DNA, 943 bp, Unknown
  Bacterial polypeptide expressing nucleotide sequence isolated from the Sargasso Sea
aatggcaattaaaaccgataaagctattaaaatttcacaaaaacatctattaggtattcaagatctatcaattaatgacgttaatttaatattagatgaagctcaaacttttattaaacttaatcaaagtaaaaataaaaaaatagacgctcttagaggaaaaacacaaataaatttattttttgaaccatctaccagaacccaaagctcttttgaattagctggaaaaagattaggagcagatgtgatgtcaatgaatatggctaattctgcaattaaaaaaggtgaaacattaattgatacagcaatgactttaaatgcaatgcatccagatataattgttataagacatcaggactctggtgcttgtaacttattatcccaaaaagttaattgtgcagttctaaatgcgggtgatgggagaagagaacatcctacccaagcactattagatgctttaactattataaatagaaagaaaaaaattgaaggtcttaaaatagcaatttgtggtgacatactacattccagagttgcaagatcaaatatttacttacttaatatgcttggtgcagaagtaaatattgttgcaccaacaaatctaatgccgaaagaaatagaaaaatttggtgtaagtacttttaccgatatgaaaaaaggtttaaacgattgcgatatcgtcatgatgttaaggttacaaaacgaaaggatgacaagttcttatctttcatcaaatagagaatattatgaatattatggattaacacctgataaattagagcatgctaaatctgacgctttaattatgcacccaggtccaatgaacagaggtattgaaattgatacgatgttagcagatgacattaataaaagtgtaattaaagaacaagttgaacttggagtagcagtaagaatggcttgtctaaaaatgttttgtctataa

SEQ ID NO: 230177 - DNA, 898 bp, Unknown
  Bacterial polypeptide expressing nucleotide sequence isolated from the Sargasso Sea
ttgttaggtattcaagagctgtcagtaaatgatgtaaatatcattcttaacgaagctcaaacctttatatcaataaaccgaagtaagaataaaaaaattgatgttttaagtggaaaaactcaaataaatcttttttttgaaccatcaacaagaacacaaagctcatttgaattagcaggaaaaagattaggagctgatgtgatgtcaatgaatatgggaaattcagcaataaaaaaaggagagactttaattgatacagccatgaccttaaatgcaatgcatccagatattattgtaattagacatcaagactcaggagcctgcaaccttctttcccaaaaagttaattgtgtagttttaaatgctggagatggacgtagagaacaccctactcaagccttacttgatgctttaacaataattaatcgaaaagataaaattcaaggcttaaagattgcaatttgtggagatattttacactcacgtgtagcaaggtcaaatatttacctattaactatgcttggtgctgaagtaaatatagttgcccctacaaatttaatgccaaaagaagtagaaaaatttggagttaatacttttactgatatgaaaaaaggtcttaaagattgtgacattgtaatgatgttaagattacaaaatgagagaatgacaagttctttcttatcgtcgaacagagaatattatgaatattacggattaacacctgataaactagatcatgctaaacctgatgcattaattatgcatcctgggccaatgaatagaggaattgaaattgacactagattagctgacgacattaacaaaagtgtaattaaagaacaggtagagcttggagttgcggtcagaatggcatgcttaaaaatattttgtgaataaa

SEQ ID NO: 230178 - DNA, 994 bp, Unknown
  Bacterial polypeptide expressing nucleotide sequence isolated from the Sargasso Sea
tatccacacactagctaatttttcaattgaagattatgagtcagtatttgaattagctaatagatttgatgcactaaagaatgcaggaacaaaaaagataccggctttacaagggactttggtaacgtctttattttttgaagctagtacaagaacaaaaaatagttttgagcttgcagcaaaaagactttctgctgatgttcaaacgtttgcgccatcctccagctctttaacaaaaggcgaaacaataattgatacagccataacttattctgctatgggggcagatacattagttatcagacactcatcaagttacataacctttgagatcgcaaaaaaacttgatgcaataaatgccaagacttcggttcttaatgcaggagatggattacatagtcatcccagccaaggattgcttgacatctatacattgataaaattcttttccaaaaaaacactgaatccagaggttttaaattccaaaaaaattttaataattggcgacgttaatcattctagagttgccaggtcaaatctttgggctttgagtgcattcggcgccgatataatcttatgtggtcctaagacattaataccagatgaatttatcaattttttaaaaccccccgcgccaaatcaaacaaaagatcccgtcaaatcaagaggttccataacaatttctagatcattggaagaatcaataaaaattgcagatgcgattattgttttaagactccaaaaagagagaatgatggaaaatttactaagtagcattgattcatatagtttggattatggcttaaccccagagaaattatctttaaataaaaaagaaattccaattctacatcccggtcccattaacagagatattgaaattagcagcgaagtggtagatcaatatcctaattgcttaattaataatcaagttgcaaatggtatccccataagaatggctttgctttatctattacagaaacacaacaagtaa

SEQ ID NO: 230179 - DNA, 526 bp, Unknown
  Bacterial polypeptide expressing nucleotide sequence isolated from the Sargasso Sea
ggtagacgcgaacaccctactcaagcattattagatgcattaacaattagaaatcgaaaaaaaaaaattcaaggattaaaaatagcaatatgtggagatatacttcattcaagagtagctagatcaaatatttatcttcttacaatgttaggggctgaggttaatatagttgctccatctaacctgatgccaaaagaaattgaaaaatttggtgtaaatacttttactgatatgaaaaagggcctcaaagattgtgatattgtgatgatgcttagattacaaaatgaaagaatgaccagctcatatctttcatcgaacagagagtactacgaatattatggattaacgccagacaagcttgatcatgcaaaatcagatgcgttaattatgcatcctggtccaatgaatagaggaattgaaattgatacgagattagcagacgacataaataagagtgtgattaaggaacaagttgaattaggagttgctgtaagaatggcatgtttaaaaatattttgtgaataaa

SEQ ID NO: 230180 - DNA, 946 bp, Unknown
  Bacterial polypeptide expressing nucleotide sequence isolated from the Sargasso Sea
aatggcagtaataaaaaagacttcagctattaaaaactcacccaaacatcttttaggtatccaaaatttatcaattttagaagctcaaaaaattcttaatgaggcaaaagcttttattaaattaaataggagtaataccaagaaattagatactttaagaggaaaaactcaaatcaatttattttttgaaccatcaaccagaacacaaagttcttttgacttagctggcaaaagattaggtgcagatgttatgaccatgaatatgagcaactctgcgcttaaaaagggtgaaacgcttattgatactgcaatgacacttaatgctatgcatccagatttaattgttgttagacatcaagactctggtgcaccaaatcttctttcacaaaaagttaattgtgctgtgataaacgcaggagacggaagaagagagcaccctactcaagcattacttgacgctctaacaattataaatagaaaaggaaaaattgaaggacttaaaattgcaatctgtggtgacataaaacactctagagtagccagatcaaatatttacttgatgaatatgttaggggcagaagtaaatgttattgccccgaaaactttaatgccagactcgattgaacaacttggagttaaagcgtttacgagtatgaagaaaggattggagtcatgtgatattgttatgatgctaagattacaaaatgaaagaatgaagggatcctttttgccgtccaaaagagagtactacgaatattttggacttactcctgaaaaattaaaatttgcaagcaaagatgcattagtaatgcaccctggtccaatgaatagaggtgtagaaatagatactaaattagctgatgatattaatgttagtttagttaaagaacaagtcgaacttggagtggcagttagaatggcttgccttaaattatactgtaaatga

SEQ ID NO: 230181 - DNA, 943 bp, Unknown
  Bacterial polypeptide expressing nucleotide sequence isolated from the Sargasso Sea
atggcaaccaaatctaacaaagctattaaaatttctcaaaaacatttattaggaattcaagatttatcaattaatgatgttaacattattcttaatcaagcaaaagaatttatcgatttaaatagaagtaaaaataaaaaacttgatactcttaaaggtaaaactcaaataaatttgttttttgaaccttcaacaagaacacaaagctcttttgatttagctggcaaaagattgggcgcagatgtgatgtcaatgaatataacaaattcagctattaaaaaaggcgaaactcttattgatacagctatgacactaaatgcaatgcatcctgatattatcgttataagacatcaagactcaggtgcatgtaatttattatcacaaaaagtaaattgcgctgtacttaatgcaggagatggtagacgagagcatccaactcaagctttattagatgcgttaacaattattaacagaaaaaaaaaaattgaaggtttgagaattgcaatttgtggagacatacttcattctcgtgttgcaagatcaaatatttatcttttaaatatgctaggtgctgaagttaatatcgtagctccatcaaaccttatgccaaaagatattgaaaagtttggtgttaatatattttctgacatgaaaaaaggtgttaaagattgtgatattgtaatgatgttaagattacaaaatgaaagaatgacaagttctttcctttcttcaaatagagaatattatgaatactatggtttatctcctgataaattaaattatgcaaaagatgatgctttaataatgcatcctggtcctatgaatagaggaatagaaatagatacaaaattagctgatgatataaacaaaagtgtaatcaaagaacaggttgaattaggagttgctgtaagaatggcctgtttaaaaatattttgtgcataaa

SEQ ID NO: 230182 - DNA, 772 bp, Unknown
  Bacterial polypeptide expressing nucleotide sequence isolated from the Sargasso Sea
taatttattttttgaaccttctactagaactcaaagctcttttgatctagcaggtaaaagattaggggcagatgtaatgtcaatgaatattgttaactctgcaataaaaaaaggtgaaactttaattgataccgcaatgactttaaacgcaatgcatcctgacataattgtgataaggcatcaggactctggagcatgtaatcttttatcacaaaaagttaactgcgctgtattaaatgctggtgatggaaggcgtgaacatcctactcaagctttattagatgctttaactataattaatagaaaaaaaaaaattgaaggattgagaatagctatttgtggagacattgttcattcaagagtagcaagatctaacatttatttactaaatatgcttggtgcagaagtaaatattgtagctccatcaaatcttatgccaaaagatatagaaaagttaggtgtaaatatattttctgatatgaaaaaaggtcttaaggattgcgatattgtaatgatgttaagattacaaaatgaaagaatgacaagttcatttttatcatcaaatagagagtattatgagtactatggtttaacacctgataaattaaattatgctaaagatgatgcattaattatgcatccagggccgatgaacagaggaatagaaatagatactaatttagcagatgacatcaacaaaagtgtaattaaagagcaagttgaacttggtgtagccgttagaatggcttgcttaaaaattttttgtatataa

SEQ ID NO: 230183 - DNA, 602 bp, Unknown
  Bacterial polypeptide expressing nucleotide sequence isolated from the Sargasso Sea
aatggcagttaagaaaaacattacagctattaaaaacactcctaagcacctccttggaattcaaaatctatcaatattggaagctaaatcaattcttgatgaggcaaaaaaatttattaaattaaatagaagtaactcaaaaaaattagatattctaagaggtaaaacgcaaataaatttattttttgaaccatcgactagaactcaaagttcttttgatttagcaggaaagagattaggtgcagatgtaatgtctatgaacatggacaattcagcacttaaaaaaggtgaaactttaatagacactgcaatgactttaaatgcaatgcaccctgacttaatcgtaattagacatcaagactctggggcaccaaatttattatctcaaaaagtaaattgcgcggttattaatgctggtgatggtagaagagaacaccctactcaagcattactagatgctttaactataattaatagaataggaaaaattgaaggattaaagatagctatctgtggagacattcttcattcaagagtagcaagatccaatatttacttaatgaacatgttgggagctgaagtaaatgttattgctcctaaaa

SEQ ID NO: 230184 - DNA, 904 bp, Unknown
  Bacterial polypeptide expressing nucleotide sequence isolated from the Sargasso Sea
tttgtctatcgaaggaatgcctaagaccgaaatagtttctttactagagagggctgactattttgcagatatcgaaatttccaaaattgaaaagaccttaaatggatatgtaattttaaatgttttttttgagaactctactagaactagagtttcatttgaacttgcaggcagaaggttaggtgctgaagttataaatatttctgtaaatatgtcatctataaaaaagggagaaagtttattagatactgcaaatacattaagtgcaatgagaccagatgttttaatagttagacatccagacagtggagcacctaaactattttcagagtatttagattgtagcattgtaaatgctggtgatggaagacatgaacacccaactcaagctttattagatgcattgactattaaaagacggttgggacgaattgagggtcttaaaatagcaatttgtggtgatatttcaaatagtagagttgcaaggtctaacattcatcttctaacaacattgggtgctcaagttagatgtatagcaccacctacattaatgcctaaagatttatctaatcttggagtagattgttttgataatttggaagaaggtattaaaaatactaatgtagttatgttattgagattacaaaacgagcgaatgtcagggacagaaactccgtcaaaaagagaatattttcattattatggactagacaacaaaaaacttgttttagctgacacaaaagcagtaatcatgcatccaggaccaatgaacagaggtgttgaaattgcatcaaaccttgctgacgatgaaaatagaagtttaataaaaatgcaggttgagatgggtgtggcaattcgaatggcagcaattgaatctttacataacaaaaaatatgcgagatga

SEQ ID NO: 230185 - DNA, 943 bp, Unknown
  Bacterial polypeptide expressing nucleotide sequence isolated from the Sargasso Sea
atgagaaagttaagtgtagatcatcttcatggtataaagtttttaaataaggctgatgttgatcttatttttgacacagcactaaactttaaagaagtaataaacagacctattaaaaaagttccaacacttagggatattacaattgcaaatcttttttttgaaaatagtactagaactaaagtatctttcgaattagctcaaaaaagattaggagctgatgtaattaatttttcaagttcttcttcttctgttaagaaaggtgaatcattaattgatacagttaataatattctggctatgaaagttgatatgattgtcttaagacatcccaatccaggatcatctatacttctttcaaaacatacagaatcttgtataataaatgctggagatggatctcacgagcaccctacacaggctttacttgattcattctcaatatttgaaaaaattggagacttaaaggataaaaatatattaattgtcggagatattcttcactcaagagttgctctttccaatctatatttactaaatctattgggagccaatgtaaagatttcttgtccacttagtctagttccaaaggatattgaaaaattaaatgtgtccgttgaaccagatattcaaaaggcattaagatggtgtgatgctgttaatgtactaagagttcaaagagaaagaatgataaaatcatattttccagataatagagagtactctatgctttttggtctagatgaaaataaaattagttctattaaaaaagatattttaattctacatcctggacctataaatagaggtgtagaaattacttctaatcttgtagaatcaaataattctattattttagaacaagtagaaaatggagttgcgattagaatggcaataatgtatttattggcttctaaattaaacttttcaattaatgaataat

SEQ ID NO: 230186 - DNA, 898 bp, Unknown
  Bacterial polypeptide expressing nucleotide sequence isolated from the Sargasso Sea
ttgttaggtatccaggatttatcaattaatgatgttaattttatacttgaagaagcacacacatttataaaaattaatcaaagtaaaaataaaaaaatagatgtattaagaggaaagactcaaatcaatttattctttgaaccttctactagaacccagagttcatttgaattggcaggaaagagacttggagcagacgttatgtctatgaatataagtaactctgcaattaaaaaaggtgaaacattaatcgatacagctatgactttaaatgcgatgcatccagatattattgtagttagacatcaagactctggagcttgtaatttactttcacaaaaagtaaattgtgcagtgcttaatgctggtgatggaagaagagaacaccctacccaagctcttttagatgctttaacaattataactcgaaaaaataaaattgaaggattgaaaattgcaatatgtggagacattctacattcaagagtagctagatcaaatatatatttactcaacatgttaggagctgaggtgaatatagttgcaccaacaaatttaatgccaaaagaaattgaaaaattcggtgttaatacttttactgacatgaaaaaaggattgaaggattgtgatattgtgatgatgttaagattgcagaatgaaagaatgacaagttcatatctttcatcaaatagagaatattatgaatattttggattaactcctgacaaattagaacatgctaaatctgatgcattaattatgcaccctggaccaatgaatagaggtatagaaatagatacaatactagcagatgacattaataaaagcgtaattaaagaacaagttgaactaggtgtagctgtaagaatggcttgcttaaagatattttgtagataaa

SEQ ID NO: 230187 - DNA, 925 bp, Unknown
  Bacterial polypeptide expressing nucleotide sequence isolated from the Sargasso Sea
aatgactaaaaagaagcatttattgggcatcgaacatttgtcatcgcaagagataaataaaattctagacctagctgaggattatgcaaggttaaaccgttctaggtctgtatcaaagaaaccgatggcaggaatgactcaaataaatatgttttttgaaaactcgacaaggacccaagcaagctttgaaattgcgggcaaaagacttggggcagacgtaatgacaattgacgtcaaatcaagctcaatttccaagggtgaaacgctcctagacactgcaatgactctgaatgcgatgaatcccgatcttattgtagtaaggcatccaaattcaggagcagtacaacttttggcagaaaaagttaattgcgtggtcataaatgcaggagatggacgtcatgaacaccccacgcaggccttgcttgacgctctcacaataaaaacaaaaaaaggtcgattccatcggttgatagtagctatttgcggtgacatcaaccacagccgagttgcaaggtcaaacatttttctgcttggaaaaatgcaaaatagaattcggttgattggcccgtctacacttttgccagaaaccttttcggatttaggagttgaaaccagttgcaacatggcagaagggctccaggacgcagacgttattatgatgctcaggttgcaaaaagagcggatgggagatggtttaattccatctgaaagagaatattttcaccgctatgggcttgaccaaaaaaagttacttcatgccaaggatgatgcaatagttatgcatcctggtcctatgaaccgcggtgtagaaatcgatggaatgattgctgacgacataacacgaagtgttatacagcaacaagttgagatgggtgtagcagttagaatggcggcaatagaacttttaattgatcaaaaactctag

SEQ ID NO: 230188 - DNA, 940 bp, Unknown
  Bacterial polypeptide expressing nucleotide sequence isolated from the Sargasso Sea
atgaaaataaaccatagtattcagattcaagataataaactcaagcactttctgaatatcaagtccttacccaaagctcatattctagagataatatcaagagcagaggatattcataataataacaaaatatctaaatactcgaataaagtagttgctagcttattttttgagccaagcacacgaacaaaaacaacttttgaattagcctcaaaaaagatttcagcagattttattaatattgatatatctaattcttcaacttcaaaaggcgaatctatattggatatgattaaaacaatagaagcaatgagctgtcaaatgtttgtagttagacattctgttcctggcactgcgcattacattgcagaatcagtaagtaataatatctctgtaattaatgccggagatgggtctaatgaacaccctacacaagcaatgcttgatatgtttactatcaaaaaacataaagggcgtttcgacgatctaaaagtttcaatagttggtgatattcttcactctcgtgtagcaaaatcacttatctattcactaaatattttagggactagagaaataaatattgttggtcctgaaagcttaataccagagaactacagcaaaatgagtgtaaattatttttctgatatgaacaaaggcattgaggatgcagatgttatcattatgcttagattgcaaaaagaaaggatgcatgatgcattgatatctatggactcatactatgatgattatgggttaaataaaaatcgacttgaatatgcaaagagtgatgtaatagttatgcatcctgggccaattaatagaggaatagaaattgaatcttctgtagcagatggaccaaattcagttatattaaatcaagtttcatatggtatatctgtaaggatggctatcatgtcaatgttgtttgataataattgaa

SEQ ID NO: 230189 - DNA, 895 bp, Unknown
  Bacterial polypeptide expressing nucleotide sequence isolated from the Sargasso Sea
ttgggtattcaagatttatcaattaatgatgttaaaaatattttaaacgaagcaagtaaatttattgatctaaatagaagtagaaataaaaaattagacacattaaaaggtaaaactcaaattaatttattttttgaaccatccactagaacacaaagttcatttgacttagcgggaaaaagattaggagccgatgtgatgtccatgaacattactaattcagcaatcaaaaaaggtgaaactcttattgacactgccatgacattaaatgcaatgcatccagatattattgtaataagacatcaagactcaggagcatgtaatcttttatctcaaaaagtaaattgtgcagtaataaatgcaggtgatggtagacgcgaacatccaacacaagctttattagatgcattgacaataatgaacagaaaaaaaaatattgaaggattaaagattgcgatttgtggtgacatactgcattctagagtagcaagatcaaatatttatttacttaatatgcttggtgctgaagttaacattatagctccgtctaacctaatgcctaaaaaaatagaaaaactaggtgcaaatatttttacagatatgaaaaaaggcgttaaagattgtgatattgtaatgatgctaagacttcaaaatgaaagaatgactagttcatttttatcctctaacagagaatattacgaatattatggtttgacaccagataagttaaatcaagcaaaagatgatgcattaattatgcatcctggaccaatgaatagaggaatagaaatagatactaatttagctgacgatataaataagagtgtaatcaaagaacaagttgaactaggtgtagctgtaagaatggcttgcttaaaaattttttgtaactaaa

SEQ ID NO: 230190 - DNA, 937 bp, Unknown
  Bacterial polypeptide expressing nucleotide sequence isolated from the Sargasso Sea
atgctaaaacaaaaacatttattgggcttagaggattatccagccaaggacattcaaacaatcattgatactgcttttaatttccgtgaggtattggatcgaccaattaagaaagtcccatcactacagggtgtaaccattgtcaatttattttttgaaaactctacaaggactaggatcagttttgagcttgcgcagaagcgtctgagtgctgatactgtaaatttttccgcatcttctagtagtctaaaaaaaggtgagagttttaaagataccgctcaaaatatagaggcaatgaagattgatgcagttgttatgaggcatccaactccaggtgcgccaaaacatcttactcaattcattgatgcaataattattaatgctggtgatggcacacatgagcacccgacacaagccattctagatatgatgagtctttatgaaaaatttggaagacttgatggtttaaaaattggcataattggtgatatctctcatagtcgcgttgccttaagtaatatttatggactaactattatgggagcagagataaaggtttgtggcccgccaaacttgataccaaattttcttcaagatatggatgtaaagtataattctagcttggacgaggtaattgaatgggcagatgctttaaatgtacttcgtatacaaaaagagaggatggggcgcgggttaataccatcaactcgtgaatatagagcaacatttggaatcactgacgaaagattgaaaaagcataaaaaggagatcgttattatgcatcctgggcctatgaaccgaggagttgagattgatggggtcattgctgatagcgaccaagctatcattctagatcaagtattaaatggtgtggcatcaagaatggcaattctctaccttctttgtggaggtaaagtcaaacatggagatgattaaa

SEQ ID NO: 230191 - DNA, 946 bp, Unknown
  Bacterial polypeptide expressing nucleotide sequence isolated from the Sargasso Sea
atggcaactgaaaaaaaagtttcagctattaaaaacactcccaaacatctattaggtattcaaaatttgtcaattctcgaggcaaaagagattttgactgaagcaaaatccttcataaaattaaacagaggaagttcaaaaaaactagatgtcctaagaggaaaaactcaaattaacttattctttgaaccttctacaagaacacagagttcattcgatttagctggaaaaagattaggtgcagacgtgatgacgatgaatatgggtaactctgcattaaaaaaaggtgaaacattaattgatacagccatgacattaaatgcaatgcatcctgatattattgttataagacatcaagactcaggtgcaccaaatcttctttcacaaaaagttaattgcgcagtcattaacgcaggtgatggaaggagagaacaccctacacaagccttacttgatgccttaacaattattaatagaaaaggtaaaattgaaggattaaaaattgccatatgcggagacattcttcattcaagagttgctaggtctaatatttatttaatgaatatgttaggggcagaagtaaatgtcattgcaccaaaaactttaatgcctaaaggaatagatagcttaggggtgaagtcatttactgacatgaaaaaaggattagatgaatgtgatattgttatgatgttaagattacaaaatgaaagaatgcaaggatcatttcttccatcaaagagagaatattatgaatttttcggactgacacctgaaaaacttaagtttgcaaaaaaagatgctttactaatgcaccctggtccgatgaacagaggtgttgaaattgatactaaactagctgatgatattaatgtcagtctggtaaaagaacaagttgaattaggtgtagctgtcaggatggcatgtttaaaattgtactgtaaataaa

SEQ ID NO: 230192 - DNA, 946 bp, Unknown
  Bacterial polypeptide expressing nucleotide sequence isolated from the Sargasso Sea
aatggcaataaattctaataaagctattaagatttcaaaaaaacatctcctaggtattcaagatttaactgtttctgatgtaaatttaatactttctgaatcaaaaaaattcatttctgttaacaaaagtaaaaataaaaaggttgatattttaaaaggtaaaacacaaattaatttgtttttcgagccgtctactcgtacacaaagttcttttgaattagcaggaaaaagactcggtgcagatgtaatgtcaatgaatattactaactctgcaattaaaaaaggtgaaacattgatagatacggctatgacacttaatgcaatgcatccagatataatagtagtaagacatcaagactctggggcttgtaatcttttatcacaaaaagttaattgcgctgtattaaatgccggtgacggaagaagagagcatcctacacaagcattgcttgatgctttaacaattattgatagaaaaaataaaatacaaggtttgagaatagctatatgtggtgacattcttcattcgagagttgctagatctaacatttatttgctgaacatgttaggtgctgaaataaatattgttgcaccttcaaatctacttcccaaagatattaataagctaggagtaaatactttttcagatatgaaaaaaggattaaaagactgtgatatagtaatgatgttaagattgcaaaatgaaagaatgacaagttcttttttatcatcaaacagagagtactatgagtattatggattaactcctgataaattggaggaagcaaaaaatgatgcattgataatgcatccaggtccaatgaaccgaggtatagaaatcgatactcgactagctgatgatataaataaaagtgtaattaaagaacaagttgaattaggagtagcagtgagaatggcttgtttgaaaattttttgcgaaaaatga

SEQ ID NO: 230193 - DNA, 907 bp, Unknown
  Bacterial polypeptide expressing nucleotide sequence isolated from the Sargasso Sea
aatggctaataatcttttatcaataaacgatcttttaaaaaaagacatactggagttgatagaattctcaaataatttcattgatgatgaaggtaactttagaaaagaaaatctttttccagacaaaatagttgcaaacgttttttgtgagcctagcacgcgaacgaagtcatctttcgcaattgctgcaaacaatttaggatgctcagttatagattttgatattgaaaattcctcagttcaaaagggagaatctatttttgaaactgtagatgccctcaatcttatgggtgtagatttatgtgtgttaagacatcctgaatctgtaattagagaattagctgaatgtctgccgaaaatggttttcataaacgcgggagaaggatcaatttcacatccaacacaagcacttttagacataaagacaattatcgatcataaagaaaatttagatgggctgaatatagttatcgttggagatcttgatcattcacgagttacttcctcttttgttgaaggcgtatctaattttgatttaggatcactaatattttgtggtcatcctgaaatgtgtacaaagtatcaaaatcctaagattggtaagtatgaatttcatttagagacagcccttgaaaatgcagatgttgtgatggctttgagaattcagttcgaaagatttgaaaaagagcttaatttagatcttgaaacatataaatcagaatatcaattgtcttctgaaaagcttgagtctgcaaaaggtgacgcaataataatgcatccaggaccggttaattatgttgagataacagaagctgtttatgactcagaaaattctgtaattaggcaacaggtggcaaatggcgttgctataagaatggctgtattatcaagatttttgggcagctaa

SEQ ID NO: 230194 - DNA, 940 bp, Unknown
  Bacterial polypeptide expressing nucleotide sequence isolated from the Sargasso Sea
atgcttgaaaacattaaaatccctaaaatctctcaaacccatctgcatggcataaaaaatctcagcattgaggatataaataatattttagaactcagtaaaattttcaaagagcacaacaaggaaaaggataaaaaaataccgatcttaaaaggtagaacaattataaatcttttttttgaaccctctacaagaacactaatctcttttgaaatagctgctaaaagattaggcgctgatgtaattaatatgaatattgaaggatcttcattaagaaaaggtgaaagtttatttgataccgctcaaactttaggagcaatgaaccctgatcttgtaattatcagacatggagaaaatgatgcctcaaaagaaattgctaaaatattagaatgtcctgttataaatgctggagaaggtgttaatgaacaccccacacaagcattgcttgatgcttatacaatcatgaatcacaatcgaaagcttaatgatatcacagtttcaatatgtggtgatcttgaacatagtcgagtagcaaggtcaaactactatcttctaaataaaatgaaatcaaaagttagattcgtatttcctgattattttaaaccaaaagatttagataaatatgatgttgaaacgttcacaaatttagaagaaggcataaaagatgctgatatagtgatgatgcttagaatccaaaatgaaagaataaaagatttaaatcttccatcagcagacgattattttagaagttttggacttacttatgaaaagttaaaattagcaaagcctgaagtactagtgcttcaccctggtccaataaatcgaggtgtagaaatagagaatgaactagctgatgatgtaaacaaatcagtgataactgaacaggttgaaaatggagtagctgttcggatggcttgtttgtcaattatggtaaaatgat

SEQ ID NO: 230195 - DNA, 901 bp, Unknown
  Bacterial polypeptide expressing nucleotide sequence isolated from the Sargasso Sea
ttgttaggtattcaagatttatcgattaatgacgttaaaactattttagatgaagcaagtaaatttattgaattaaatagaagtaaaaacaaaaaattagacacattaaaaggtaaaactcaaattaatttattttttgaaccatctactagaacacaaagttcatttgacttagcgggaaaaagattgggtgctgatgtaatgtcaatgaatataactaattcagcaataaaaaaaggtgaaacacttattgatacagcaatgacattaaacgctatgcatccagatattattgtaataaggcatcaagattctggagcttgcaatcttttatctcaaaaagttaattgtgcagtgttaaatgctggagatggaaggcgtgaacatcctactcaagcattattagatgctttaacaatcattaatagaaaaaaaacaattgaaggattaaaaattgcaatatgtggtgacattctacattctagagttgcaagatcaaatatttatttacttaatatgcttggcgctgaagttaatatcgtagctccatcaaaccttatgcctaaggatatagaaagacttggtgtaaatattttttcagatatgaaaaaaggagttaaagattgtgatattgtaatgatgctgagacttcaaaatgaaaggatgactagttcatttttgtcgtctaatagagaatattatgagtattatggcttaactcctgacaaactagaaaaggcaaagaaggatgcaataattatgcatcctgggccgatgaatagaggtattgaaattgataccaaacttgctgacgatataaataaaagtgtaatcaaagaacaggttgagttaggtgttgctgtaagaatggcctgtttaaaaattttttgtgaaaaatgaa

SEQ ID NO: 230196 - DNA, 1027 bp, Unknown
  Bacterial polypeptide expressing nucleotide sequence isolated from the Sargasso Sea
atgaacaccgccacccaggcctcccaggattcagccgacggcgccaccgagcgcttccgctacggctttctgaagggcaatccgcagctcacgaaaaacggcgagctcaaacatctgttgtcgatcgaaggcttgccgaaggcgatcgtcaatcacattctcgataccgccgaccagttcgtcagcgtgaccgatcgcgaagtgaagaaggtgccgctgttgcgcggcaagtcggtattcaatctgtttttcgagaactcgacgcgcacgcgcacgaccttcgagatcgccgcgacgcgtttatctgcggacgtgctgaatctgaacatcaatgcttcgtcgacgagcaaaggcgagtcgctgctcgatacgatcaataacctctcggcgatgcatgccgatatgttcgtcgtgcgccatgcgtcgagcggcgcaccgtatctgatcgcgcagcactgcgcaccgcacgtgcatgtgatcaacgccggcgacggccgtcacgcacacccgacccagggtctgctcgacatgtacacgatccgccactacaagaaggatttcacgaatctgcgcgtggcgattgtcggcgacattctgcattcgcgggtcgcgcgttcggacattcatgcattgaccacgcttggcgtgccggaagtgcgcgcaatcggtccgcgcacgctgttgccgggtggcctggagcagatgggcgtgcgcgtcttccataacctcgacgaaggcctgaaagacgtcgacgtgatcatcatgctgcgtctgcaaaacgagcgaatgagcggcgcgctgctgccgtcggcgcaggagtacttcaagagctgggggttgacgccggagcgccttgcgcttgccaaacccgacgccatcgtgatgcacccgggtccgatgaaccgcggcgtcgaaatcgattcgcaggtggccgacggcccgcaatcggtgatcctgaaccaggtgacgttcggtatcgcggtgcgcatggcggtgatgggaattgtcgccggcaatcacgactaaa

SEQ ID NO: 230197 - DNA, 898 bp, Unknown
  Bacterial polypeptide expressing nucleotide sequence isolated from the Sargasso Sea
tttgttaggtattcaagatttgtcagttagtgacataaatattattcttgatgaagctcagacctttataaaagtaaatcgaagtaagaataaaaaaattgacgttttaagaggcaaaactcaaataaacctcttttttgagccgtcaaccagaactcaaagctcatttgaattagcaggaaaaagattaggagctgatgtgatgtcaatgaacatgggtaattcagcaattaaaaaaggtgaaacactaattgacactgctatgactttaaatgcaatgcatccagatatcatagtgattagacatcaagactcaggcgcttgcaatcttctttcacaaaaagttaattgtgtagtattaaatgctggagatggtcgcagagaacatcctacccaagcgttactagatgcgttaacaataattaatcgaaaagataaaatccaaggattaaaaattgcaatatgtggagatattttgcattcacgtgtagctagatcaaatatttacttgttaaccatgcttggagctgaagtaaatatagttgctcctacaaatttgatgccaaaagaaatagaaaaatttggtgttaatacttttactgatatgaaaaaaggactgaaagattgtgatattgtaatgatgttgagattgcaaaatgagagaatgaccagttctttcttatcatctaatagagaatattatgaatactatggtttaacaccagacaaattagatcatgcaaaatctgacgcccttattatgcatcctggtccaatgaacaggggtatcgaaattgataccaggttagctgacgatattaacaagagtgttattaaggaacaggtagaacttggtgttgctgtaagaatggcgtgtttaaaaatattttgtgaataa

SEQ ID NO: 230198 - DNA, 958 bp, Unknown
  Bacterial polypeptide expressing nucleotide sequence isolated from the Sargasso Sea
atgaatattaatactgatattcaatttgaaaacgataaactagttcattttcttaatatagaaggattagaccctaaacatatccaccaaataatcgatagagcaaatgagtattctcaagctgagaagaaaaaattctatgatctagagggcaaaacagtagcgagtttattttttgaaccaagtacacgtactaaaactacatttgagttagcctcaaagaaactctcagcagattttattaatatagacatagctaactcatctactttaaaaggggaatcgattatagacatgataaagactctacaagctatgagttgtgatatgtttgttgttcgccattcaattgctggaactcctcattttattgcaaaagaggtaggtaacaaaatagcggttcttaatgcaggtgatggtgctcatgctcatcctacacaagcactgcttgatatgtttacaatcaaaaaatataaaggtgattttgagggcctcaaagttgcaatcgtaggtgacatattacactcccgagtagcaaggtccttaatttcttgtcttaatatactacatgtaactgatgtgagagtaataggtccgagtgttctaatgccacaagatttagaatccatgaaaataaaatattctgaaaatttagaagatggcattgataattgtgatgttgttattatgttaagattacaaaaagaacggatgcatgaggctttgatatcagaagttgactactataatacttacggacttacaaataaaaaacttaaagcctctaaaaaagatgtaattgtaatgcatccagggccaatcaatagaggaatcgaaatagattctgaggtagcggatggagagcattccgtaattcttgatcaagtgagttctggcatatcagtaagaatggcaattatgtctataataattgataacagaaagaatgaaaaataat

SEQ ID NO: 230199 - DNA, 940 bp, Unknown
  Bacterial polypeptide expressing nucleotide sequence isolated from the Sargasso Sea
atggttgagaaggcaaatattccagaaatttctcagaagcatcttcatggcataaaaaatctttctattgaagatatcaataaaattttaaaattaagtaatttttttaaattaaaaaataaagaaaaagataaacattatccaatattaaaagggcgaacgataattaaccttttttttgaaccttcgacaagaacattgatatcttttgaaattgcagcaaaacgtttaggtgcagatgtaattaatatgaatattgaaggttcatctcttagaaaaggggaaagcctacgcgacacagctcaaacattaggagcgatgaatccagatcttgttgttattagacatggaatagataatgcatcgaaacaaattgcggaaattataaattgtcctgtaattaatgccggagaaggaataaatgaacatcctactcaggctcttctagatgcttacacaatagtaaataataagagaagtttaaagaatatcactgtagcaatatgtggtgatttagaacatagtcgagtagctcgctcaaattactatcttcttaaaaagatggaatcaaatgtaagatttgtttatccagaattctttaaaccgaaagatcttaataaatatgatgttgagacttatactaatcttgcagaaggcataactggaactgatattgtaatgatgttaagaattcaaaatgaaagaataacagatactaatctaccttccaaagaatcatattttgaagaatttggactaacttatgagaaattaaaattagcaaaacctgatgctcttgtcttgcatccaggtcctattaatagaaatgtagaaattgaggacagattagctgatgacttagataaatctgttattaatgaacaggtagaaaatggcgtagcagttcgaatggcctgtttgtcaataatggtaaaataag

SEQ ID NO: 230200 - DNA, 922 bp, Unknown
  Bacterial polypeptide expressing nucleotide sequence isolated from the Sargasso Sea
gatgaccaatccactctataagaaacatgtcatctccatttcggacctgacccggcccgacatggaactggtggtcgcaaccgcacagcggttgaaggccgagcccgacacccgcttgctgaaagacaagctggttgccagctgcttcttcgaagcctccacccgtacccgcctgtcgttcgagaccgcggtccagcgcctgggtggcaacatcatcggcttcgccgacggtggcaacaccagcgccaagaagggcgagaccctggctgactccatcaagatcatcggctcctacaccgatgcggtggtgatgcgtcatccgaaagagggggctgcccgcctcgcctccgagttctcccgcgtgccggtcatcaacggcggtgacggttccaaccagcatccgacccagaccctgctcgacctcttctccatccacgagacgcaaggcaagctggacggcctcaacgtcgccttcgtcggtgacctcaagtacggccgcaccgtccactcgctggcccaggccctcagcctgttcaactgccgcttcttcttcatctcgccggaagcgctggcgatgccggactacatctgcgaggagctggaagagaaaggcatccagttcagtgtgcacgagaccatggaagaggtgatgccggagctggacatcctctacatgacccgggttcagaaagagcgcttcgacgagaccgaatacaagcacatggccgccaagttcgtgctggaagtggccaccctggaaggcgccaagcccaccatgaagatcctgcaccccctgccccgcgtcgacgagatcgacgtcgcggtcgacaagactccccacgcctactacttccagcaggcggagaacggggtttatgcacgccaggcgctgctggctctggtactgaacgaaaccgtctaa

SEQ ID NO: 230201 - DNA, 1033 bp, Unknown
  Bacterial polypeptide expressing nucleotide sequence isolated from the Sargasso Sea
catgaccaccgacaccactggccgcaccggcaatcccgctgcggccgcgagccccgaccggttccgctacggcttcctgaagggcaacccgcagctcacgaaaaacggcgagctgaagcacctgctgtcgatcgagggcctgccgcgctcgatcgtcaaccatatcctcgatacggccgagcagttcgtcagcgtgacggaccgtgaagtgaagaaggtgccgctgctgcgcggcaagtccgtgttcaacctgttcttcgagaactcgacgcgcacacgcacgaccttcgagatcgccgcgacgcgcctgtcggccgacgtgctgaacctgaacatcaatgcatcgtcgacgagcaagggcgaatccctgctcgacacgatcaacaacctgtcggcgatgcatgccgacctgttcgtcgtgcgccacgcgtcgagcggcgcgccgtacctgatcgccgagcactgcgcgccgcacgtgcacgtgatcaacgccggcgacggccgccatgcgcacccgacgcagggcctgctcgacatgtacacgatccgtcactacaagcgcgacttcacgaagctgcgcgtggcgatcgtcggcgacatcctgcattcgcgcgtcgcgcgctccgacatccatgcactcaccacgctcggcgtgccggaagtgcgcgcgatcggcccgcgcacgctgctgcccggcggtctcgagcagatgggcgtgaaggtgttccacaacctcgacgaagggctgaagggcgtcgacgtgatcatcatgctgcgcctgcagaacgagcggatgagcggcgcgctgctgccgtccgcgcaggagtacttcaagacgtggggcctgacgcccgagcgccttgcgctcgccgcgcccgacgcgatcgtgatgcacccggggccgatgaaccgcggcgtcgagatcgattcgcaggtcgccgatggcccgcagtcggtgatcctcaaccaggtcaccttcggcatcgccgtgcggatggcggtgatgggcatcgtcgccggcaacagcgactga

SEQ ID NO: 230202 - DNA, 898 bp, Unknown
  Bacterial polypeptide expressing nucleotide sequence isolated from the Sargasso Sea
ttgttaggtattcaagacttatcagtcaatgatgtaaatataattttgaatgaagcctcaaaattcattgagttaaacaaaagcaaaaacaaaaagcttgatattttaaaaggtaaaacgcaaataaatttattttttgaaccttcgaccaggactcaaagttcttttgaattagcaggaaaaagattaggtgcagatgtaatgtcaatgaatattacaaactctgctataaaaaaaggtgaaactctaatagatacagcaatgacattaaatgcaatgcatccagatatcatcgttataaggcatcaagattcaggtgcttgtaatttgttatctcaaaaagttaattgtgcagttctaaatgcaggagatggacgaagagaacaccctactcaagctctactagatgcgttaactataataaatagaagaaaaaaaatagaaggtcttaaaatagctatatgtggagatattcttcattcaagagtagcaagatcaaatatttatttactaaacatgttaggtgctgaagtaaatatagtagctccaactaatcttatgccaaatgaaatagaaagatttggtgtcaatatttattcagatatgaaaaaaggggttaaagactgtgacatagtgatgatgttaagacttcagaatgaaagaatgacaagttcttttctatcttctaacagagaatactatgaatattacggtttaacaccagacaaaataaaatttgctaaagaagatgcgcttataatgcacccgggtccaatgaatagaggaattgaaattgatacaaacttagcagacgatattaataaaagtgtaattaaagaacaagttgaattaggagtagcagtaagaatggcttgcttaaagatattttgtgaataaa

SEQ ID NO: 230203 - DNA, 946 bp, Unknown
  Bacterial polypeptide expressing nucleotide sequence isolated from the Sargasso Sea
atggcaactgaaaaaaaagttacagctattaaaaacactcccaaacatctattaggtattcaaaatttatcagttctcgaggcaaaagagattttaaccgaagcaaaatccttcataaaattaaacagaggaagttctaaaaaactagatgtcctaaggggaaaaactcaaattaacttattttttgaaccttctacaaggacacagagttcatttgatttagctggaaaaagactaggagcggacgtaatgacgatgaatatgggtaactccgcattaaaaaaaggtgaaacattaattgacactgccatgacattaaatgccatgcatcctgacataattgttataagacatcaagactcgggtgcaccaaatcttctttcacagaaagtaaattgtacagtcatcaatgcaggtgatggaaggagagaacaccctacacaagccttacttgatgctttaacaattattaatagaaaaggtaacattgaaggattaaaaattgcaatatgtggagacattcttcattcaagagttgctaggtctaacatttatttaatgaatatgttgggtgcagaagtaaatgttattgcaccaaaaactttaatgcccaacggaatagataacttaggtgttaaatcatttaccgatatgaaaaaaggattagatgggtgtgatattgttatgatgttaagattgcaaaacgaaagaatgcagggatcttttctcccatcaaagagagaatattacgaattttttggactaacgccagaaaaactaaagtttgcaaaaaaagatgctttactaatgcaccccggtccaatgaacagaggtgttgagattgatactaaattagcagatgacataaatgttagtctggtgaaagaacaagttgaattaggtgtagctgtcaggatggcatgtttaaaattgtactgtaaataaa

SEQ ID NO: 230204 - DNA, 907 bp, Unknown
  Bacterial polypeptide expressing nucleotide sequence isolated from the Sargasso Sea
atggctaaggatctactttcaataaatgaccttacaaaagatgaaatacttgagcttataaatttttcaggtagctttatcgatgacgagggtaattttagaaaagaaaatctttttccagacaagatagttgctaatgttttctttgagccgagtactagaacaaaaatgtcatttgccgtagctgcaggcaatctgggctgtaatgttttggatttcaatattgacagctcatcagttcaaaaaggggagtcaatattcgaaacaatagatgcgcttaatttaatgggagtagatttatgtgttcttaggcatccagattcagttataagggagcttgctgagcacatgcccgatatggtatttgtgaatgcaggagagggctctatttcacatcctactcaagcattacttgatatgaaaactattcttgatcacaaaaatagtttcgatggattgaagattgtaattattggagatttagatcattcaagagttacctcctcttttgttgaaggcatatccaactttgatattgaatcactttccttttgtggccatcctgagatgtgcacaaattatcaaaatacagatgttggaaaatttgaaccagatattgaaagagcgcttgaagatgctgatgtagtcatgactctaagaattcagtacgaaagatttgaaaaagatctaaatctagacttagatacatataaaagcgcgtatcaattatcctcagaaaaacttggctttgcaaaaagtgatgcaattattatgcatccaggaccagtaaattacgtagaaataactgaggctgtttatgattctgagaactcggtgataagacaacaaattgctaatggtgttgccataagaatggctgttttatcaagatttttgagtagataaa

SEQ ID NO: 230205 - DNA, 916 bp, Unknown
  Bacterial polypeptide expressing nucleotide sequence isolated from the Sargasso Sea
cttgaagaacttactgtatctcaatcaactgagcaaagatgaaatcaatcaaattcttgatctatctgatcactaccttaattcaaatgaacagcatgaatttgaaaaccttctgaaaaatcagtcgatcgccagtctctttttcgaacccagcacgagaacaagtgcatcttttcaagttgcagcaaaaaaattaggggcagaaacgattctgatcgatgagaataaatcttctgcaaccaaaggtgagacggtacttgatacgatcagaaaccttgaagctatgggcgttagggcattcatcatacgaacaggagatataaatttattcggcccgctgatagatgatgtagggcctgatacacatctgattagtgcaggcgagtcttcggtatcacaccctacacagggtttgctagaccttctgaccatcagacaagaaaaaggatcttttgaaggattaaaggtggtaatcatgggagatatatctcattcgagagtagcaaggtcactgactgaagggctcaaaatcatgaatactggaaatgtaacattgatctccccagacgaatttaagcctgatatggccaattttccaaatacacaattcgaagaagacccaaaacaaggcctctgtgatgctgatgtgattgttacacttcgtgttcaaaaggagcgaattgaatcggatgagagcagcctatcactcgaggaatattcaaatgaatatcaattatctcaagaaaagcttgcgttatctaagcctgatgcaatcgtaatgcatccagggccgatgaatcgaggaattgaaatttcaaatgaagttgctgacggaaaacaatcggttatcttgaagcaagtagaaaatggggtggccgttcggatggcagttctatcagagatattgaagcaataa

SEQ ID NO: 230206 - DNA, 779 bp, Unknown
  Bacterial polypeptide expressing nucleotide sequence isolated from the Sargasso Sea
ttttttgagcctagtactcgtactaaaacaactttttgagctagcatcaaagagactaggtgcagattttataaatatagatatagctaattcatctacttccaaaggggagtctgtactagacatgattaaaacattggaagcaatgcagtgtagtatgtttatagttagacataacacatccggaatacctcattatatcgctaaagaagttggcgaaaagatatcagttattaacgcaggtgatggcactaatgctcacccaacacaggctatgcttgatatgtatacaattaaaaaatacaaaggaccatttgaggatttaaatatagctattgtaggtgatattctccattcacgcgtggcaaaatctttaatagctagccttaacatattaaaagttaagagtattaatattattggtccagaaatcttaatgccaaaaaatattgatcaacttaatgtcacatacttcaatgacctagaaaaaggtatccatgaaacggatgtaataattatgcttagactacaaaaagaaagaatgcatgaagcgttgatttcgacagatgactactataaaaaatatggattaacaaaggataaaatcaagaaagcaaagcaagatgtaattgtaatgcatccggggcctatcaatcgaggaattgaaatagattctgatgtagcggatggtccaaattctgtaatcttggatcaggtttcagctggaatatcgattagaatggcagtaatgtcacttatattaaaaaataaaaaataat

SEQ ID NO: 230207 - DNA, 648 bp, Unknown
  Bacterial polypeptide expressing nucleotide sequence isolated from the Sargasso Sea
acgttttagttgttaggcatgcggattcgggttccgttcatctattggctgagaaggttaattgttcggtgatcaatgcaggagatggtagtcacgagcatccgactcaagctcttttagatgctttagccatacgacggagactagggcgaggtttggaggggcttgttgtagccatttgcggtgacatagcacatagtagagttgcgcgttcgaatattcaccttttatcaatcatgggggcaagagtgcgggcggtagcaccaccaacactgatcccggaaggtctagagagattaggcgtagaaattcataatgatatgagcagcggtcttagtgacgctgatataattatgatgctgagattacaaaccgaacgaatgaggggaagctacgttccgtcgatccgtgaatattatgagctttatggtcttaacgccgacaagcttaaaatggcaaagccagacgccttaatcatgcaccctggccccatgaaccggggagtagagattgactcggagctagctgatgatattgatcggagtttaataagagaacaagtcgaaatgggtgtggcggttagaatggcctgtcttcaggcgctggtagacacgcaaactattccttgggccaaaaatcagtcttagc

SEQ ID NO: 230208 - DNA, 940 bp, Unknown
  Bacterial polypeptide expressing nucleotide sequence isolated from the Sargasso Sea
atggcaactaaaacaaaagctgttaaaatttcacaaaaacatctcttaggaattcaagatttatcaataaatgatgttaaactaattttagatgaagcaagtaaatttatagagttaaataaaagtaaaaacaaaaagttagatattttaaaaggcaaaacacaaataaatttatttttcgaaccatctacaagaactcaaagttcttttgaactagctggaaaaagattgggtgcagatgttatgtcgatgaatattactaattcagctataaaaaagggagaaactttaattgacaccgcaatgacactaaatgcaatgcatccagatataatagttattagacatcaagattctggagcatgtaatttgctttcacaaaaagtaaactgttcagttttaaatgctggtgacggaagacgtgagcaccctactcaagcattacttgatgcattaacaattataaatagaaaaaaaaaaatcgaaggtttaaaaattgcaatatgtggagatatacttcactcaagagtggctagatctaatatttatttattaaacatgctgggtgctgaagtaaatatagttacaccaactaatttattgccaactgatatcgaaaaatttggtgtaaatatttattcagatatgaaaaaaggtgtaaaagattgtgacatcgtgatgatgcttaggctgcaaaatgaaagaatgaatagttcttttttatcatctaatcgagaatactatgaatactacggtctaacaccagataaacttaatcacgcaaaaaaagattgcataattatgcatcctggaccaatgaatagaggaattgaaattgatacaaagcttgcagatgatacgaatatgagtgttgttaaagagcaagttgaacttggtgtggcaataagaatggcgtgcttaaagattttttgtgaatgat

SEQ ID NO: 230209 - DNA, 916 bp, Unknown
  Bacterial polypeptide expressing nucleotide sequence isolated from the Sargasso Sea
aatgcaggaacaaaaaagctaccgggccttacaagggactttggtaacgtctttattttttgaagctagtacaagaacaaaaaatagttttgagcttgcagcaaaaagactgtctgctgatgtgcaaacgtttgcgccatcctccagctctttaacaaaaggcgaaacaataattgatacagcaataacttattctgctatgggggcggatacattagttatcagacattcatcaagttacataacctttgagatcgcaaaaaaacttgatgcaataaattccaagacttcggttcttaatgcgggagatggattacatagtcaccccagccaaggattgcttgacatgtatacattgataaagttcttttccaaaaaaacactgaatccagaggttttaaattccaaaaaaattttaataattggagacgttaatcattcaagggttgcaaggtcaaatctttgggctttgagtgcattcggcgcagatataatcttatgtggtcctaagacattaatatctgatgaatttatccattttttaaaaacccctgcgccaaatcaaacagaagatcctgttaaatcaagaggttctttaacaatttctagatcattggaagaatcaataaaaattgcagatgcgattgttgttttaagactccagaaagagagaatgatagaaaatttactaagtagcattgattcatatagtttagattatggcttaaccctagagaaattatctttaaataataaaggaataccaattctacatcctggtcccataaacagagatattgaaataagtagccaagtggtagatcgatatcctaattgcttaattaataatcaagttgcaaatggtatccctataagaatggctttgctttatctattgcaaaaacacaacaagtaa

SEQ ID NO: 230210 - DNA, 949 bp, Unknown
  Bacterial polypeptide expressing nucleotide sequence isolated from the Sargasso Sea
aatgaaaattaatcatgatattcagctttcagacggaaagcttaaacattttctaaatattaataatctgccaaaatctattattgaagatatcatcaatcgagcggaagaatttcatgataactctaaaataactaaatacactggcaaggttgtggcaagtcttttttttgaacctagcactagaactaaaacaacctttgagttagcaacaaaaaaaatatcgtcagattttataaatatagatattgccaactcatccacatctaaaggtgagtcaatcattgatatgataaagacaatagaagcgatgaagtgtaatatgtttgtagtcaggcattctgttccaggaacagcacattttatagctgaatcagttagtagtgatatagccgtaataaatgcaggagatggatcaaacgagcatcctactcaagcaatgttagatatgtttacaataaagaaacataaaggctcatttgaggacttaaaaatctctattgtgggtgatattcttcattcacgtgttgctaaatcattaatttttgctcttaacacgcttggagcaaaacaaattaatattgtgggtcctaaaaagttaattcctgataattataccaagatgaatgtgaaatattttgaggatatgagcgagggaataagctattccgacgtaataatcatgcttagactacaaaaagagagaatgcacgatgcacttatatcattggatacttattatgatgaatatggattgaatcaatctcgaatgcaattagctaagaaggatgtcattgtaatgcacccgggcccaatcaataggggtgtagagatagaatcttcagttgcagatggtccaaactctgtaatactaaatcaggtgtcctatggtatctctgttaggatggcaattatgtcaatactatttgataatcaccatgctagctaa

SEQ ID NO: 230211 - DNA, 943 bp, Unknown
  Bacterial polypeptide expressing nucleotide sequence isolated from the Sargasso Sea
aatggcatcaacatctaagaaagctgttaaaatttctcaaaaacatttattaggtattcaagacttatctatatcagatattaactacattctttctgaagcaaaagagtttattttattaaataagagtaaaaataaaaaattagatattcttagaggtaaaactcaaattaatttattttttgaaccgtctacacgaactcaaagttcatttgaattagctggaaaaagattgggagctgatgtgatgtcaatgaatatagttaactcagcaataaaaaaaggtgaaactttaattgatacagctatgacacttaatgctatgcaccctgatataattgtaattagacatcaagattctggtgcatgtaatttgttatcacaaaaagtaaattgtgcagtgttaaatgctggtgatggtagaagagaacatcctacacaagcattattagatgcgctaacaataattgatagaaaagaaaaaattcaaggacttaaaattgctatatgtggagatatcctacattctagagtagcaagatcaaatatttacttactaaacatgttgggtgcagaagtaaatatagttgctccatcaaatttgttacccaaggacattgatagacttggtgtaaatacattttctgatatgaaagaaggtttaaaagattgtgatattgtaatgatgttaaggttacaaaatgaaagaatgactagttcttttttatcttcaaatagagagtactacgaatactacggtttaacgccagataaattaaatcatgcaaaagaagacgcattgataatgcatcctggtcccatgaatagaggaattgaaattgatacaaaacttgctgacgatataaataaaagtgtaattaaagaacaagttgaacttggtgtagcggtaagaatggcttgtttgaaaattttttgtgaataa

SEQ ID NO: 230212 - DNA, 469 bp, Unknown
  Bacterial polypeptide expressing nucleotide sequence isolated from the Sargasso Sea
aaagaaaaaattgaaggtttaaaaatagcaatctgcggggacatactccattcaagagtagctagatcaaatatttatttactaaatatgctcggtgcagaagtaaatgtaattgcgcctaaaactttaatgcctaaatcgataaaaaaacttggtgttaaaggatttactaacatgaaagaaggtttgaaatcttgcgatattgttatgatgctaagattacaaaatgaaaggatggcaggatctttcttgccttcaaaaagagaatactacgaatattttggattaacccccgataaactaaaattcgcaaaaaaagatgctttattaatgcacccaggcccaatgaatagaggtgttgagatagatacaaaacttgctgacgatataaatgtaagtttggttaaagagcaagttgaacttggagttgctattagaatggcttgtttaaaactttactgtaaataat

SEQ ID NO: 230213 - DNA, 898 bp, Unknown
  Bacterial polypeptide expressing nucleotide sequence isolated from the Sargasso Sea
ctgttaggtatccaaaacttatctataaaagagataaaccttattataagtgaagcaaaaaatttcataaggctcaatagaagtgcatctaaaaaacttgatttgcttagagggaaaacccaaataaatttattttttgaaccatctacaagaactcaaagttcatttgaactggctggtaaaagattgggagctgatgtgatgactatgaatgttggaaattcctcattaaaaaaaggtgagactatattagatacagctatgacgctcaatgcgatgcatcctgacattattgttgtaaggcatcaagactctggtgcaccaaatcttttatctcaaaaagtaaattgtgctgtaataaatgctggtgatggattaagggagcatcctactcaggctctattggatgcattgactataattaataggaaaggaaaaattgagggacttaaaattgcaatatgtggtgatatcctccattctagagttgctaggtctaatatttacttgatgaacatgttgggagcagaagtaaatgtaatttcaccaaaaactttgatgccagtttcaatagaaaaattaggagcaaaagcatttacagatatgaaaaaaggtttggatggttgtgatatcgtaatgatgttgagattgcaaaacgaaagaatgcaaggatcttttttaccatctaagagggagtactatgagttttttggattaagtccagaaaaacttaaatttgcaaaaaaagatgctctcattatgcatcctggaccaatgaatagaggtgtagaaattgatactaaactcgctgatgacattaatgtaagtttagtaaaggagcaagtagaactaggagttgctgtcagaatggcatgtttgaaactgtattgtaaataaa

SEQ ID NO: 230214 - DNA, 931 bp, Unknown
  Bacterial polypeptide expressing nucleotide sequence isolated from the Sargasso Sea
aatgctaaaaagcaaacatcttatcggtttagaacattttccagtttctgatttgaataaaataattgatacttctttcaaattcaaagatatccttcaaactgagagtagaaaagctattttacttaaaggaaaaactattgttaatatgttttttgaaaattcaacaagaactaaaattagcttctctttagcagaaaagagattaggtgcagatagtatcaatttttctgcctcaactagtagtgttaaaaaaggagaaaccttaaaagatactgttcaaaatattgaatctatgaaaattgatggagctgttattagacatagtcatccaggatctgcattaaaattaactgaatatattgatggagcagtcattaatgcaggtgatggttctcatgaacatcctactcaagctatccttgatatggttacattgaaagaaaaatttggtaaaataaaaggtctcaaggtaggaatcgttggagatatattaaatagtagagtagccagaagtaacatttttgcattaaaaaagcttggtgcaaaagttgttgtttgtggtccaagtactttacttcctagtgatgctaaaaaactaggtataaatattacatacaacttgaatgaagttttaaattggtgtgatgcagttattgcacttcgaattcaattggaaagaatgcatttaggaagaattccttcaaaaagagaatatcacagtgaatttggtctgacctttgaacgaattagcaaattaaaaaaagatattgttataatgcaccccggtccaatgaatcgtggtgtagaaattgatagtagagtagctgattccgataatgcagtaattttagatcaagttcttaatggtgtagcctcaagaatgtcaatcctttatttgttgcttggagaggggaatataaaattatga

SEQ ID NO: 230215 - DNA, 493 bp, Unknown
  Bacterial polypeptide expressing nucleotide sequence isolated from the Sargasso Sea
agatgcattaactataataaatagaaaaaaaaatatagaaggtttgaaaattgctatttgtggtgacatattgcattcaagagtcgctagatcaaatatatatttgttaacaatgttgggggctgaagtaaatataattggaccaacaaatctgttaccaaaagatttagaaaaatttggtgtcaacatttttactaatatgaaaaaaggagttaaagattgtgatatagttatgatgctcagacttcaaaatgaaagaatgacaagttcatacttatcatcaaatagagaatattacgaatattacggtttaacccccgaaaaattagagtttgccaaaaatgatgctttaattatgcatccaggaccaatgaatagaggtatagaaatagataccatgttggcagacgatataaacaaaagtgttattaaggagcaagttgaacttggagtcgcggtcagaatggcttgtttaaaaattttttgtagctaa

SEQ ID NO: 230216 - DNA, 361 bp, Unknown
  Bacterial polypeptide expressing nucleotide sequence isolated from the Sargasso Sea
actggccatgccgcaatacattctggatatgttgaacgaaaaaggtatcgcctggagcctgcacggcactatcgaagaggtgatggcggaggtcgatatcctctacatgacccgcgtacaaaaagagcgtctggacccgtccgaatacgccaacgtgaaagcacagtttgtcctgcgcgccagcgatttgaacggcgccagagcaaacatgaaggtgctacatccgctgccgcgcatcgatgaaatcaccaccgacgtcgataagacgccgcacgcctggtatttccagcaggctggcaacggcatcttcgcccgccaggcgttactggcactggtactgaatagcgaactggcactgtaa

SEQ ID NO: 230217 - DNA, 916 bp, Unknown
  Bacterial polypeptide expressing nucleotide sequence isolated from the Sargasso Sea
ttgaagaatttactttatctcaatcaactgagcaaagatgaaatcaatcaaattcttgatctatctgatcactaccttaattcaaatgaacagcatgaatttgaagaccttctaaaaaatcagtcgatcgccagtctcttttttgaacccagcaccagaacaagtgcatcttttcaagttgcagcaaaaaagttaggggcagaaactattctgatcgatgagaataaatcttctgcaaccaaaggtgagacggtacttgatacaatcagaaaccttgaagctatgggcgttaggggattcatcatacgaacaggtgatacaaatctattcggcccgctgatagatgatgtagggcctcatacacatctgattagtgcaggtgagtcttcggtatcacaccctacacagggtttgctagaccttctgaccatcagacaagaaaaaggatcttttgaaggattaaaagtggtaatcatgggagatatatctcattcgagagtagcaaggtcactgactgaagggctcaaaatcatgaatactggaaatgtaacattgatctccccagaggaattcaagcctgatatggccaattttccaaatacacaattcgaagaagatccaaaacaaggcctctgtgatgctgatgtgattgttacacttcgtgttcaaaaggagcgaattgaatcggatgagagcagcctatcactcgaggaatattcaaatgaatatcaattatctcaagaaaaacttgcattatctaagcctgatgcaatcgtaatgcatccagggccgatgaatcgaggaattgaaatttcaaatgaagttgctgacggaaaacaatcggttatcttgaagcaagtagaaaatggggtggccgttcggatggcagttctatcagagatattgaagcaataaa

SEQ ID NO: 230218 - DNA, 943 bp, Unknown
  Bacterial polypeptide expressing nucleotide sequence isolated from the Sargasso Sea
aatggcaactaaatcaaaaaaagctattaaaatatctcaaaaacatttattaggtatccaggatttatccgttagtgatgttaccactatcctgaatgaagcctctaaattcatagaattaaataaaagcaaaaataaaaaaattgatattttaaaagggaaaactcaaattaatttattttttgaaccatcaacaagaacacaaagctcgttcgaattagcaggaaaaagattaggtgcggatgtaatgtcaatgaatattacaaattctgctatcaaaaaaggtgaaacgttaatagacactgctatgacattaaatgcaatgcatccagacattattgtaataagacatcaagactcaggagcttgtaaccttctatctcaaaaagttaattgtgcagtactaaacgcaggtgatggtagaagagagcatccaacgcaggcattattagatgctttaacaattataaatagaagaaaaaaaatagaaggtcttaaaattgcaatatgtggagatatactacattcaagagtagcaagatcaaatatttatcttctaaacatgttgggtgcagaagtaaatatcgtggcaccaacaaacttgatgccaaatgaaattgaaaaatttggtgtaaatattttttccgatatgaaaaaaggtgttaaagattgcgacatagtaatgatgttaagattacaaaatgaaagaatgacaagctcgtttctatcatctaacagagaatactatgagtattatggcttaacacctgataaaattcaatatgctaaagaggatgctttaataatgcatccaggaccaatgaatagaggaattgaaattgatacgaacttagcagacgatataaacaaaagtgtaataaaagaacaagttgaattaggcgtagcagtaaggatggcctgcttaaagattttttgtgaataa

SEQ ID NO: 230219 - DNA, 892 bp, Unknown
  Bacterial polypeptide expressing nucleotide sequence isolated from the Sargasso Sea
aggaattcaagatttatcaataaatgatgttaacctaatacttgatgaagcaaattcatttataaaagtaaatcaaagtaaaaataaaaaagttgatgttttaagaggtaaaactcaaattaatttattttttgaaccttctactagaactcaaagctcttttgaattagctggtaaaagacttggggctgatgttatgtcaatgaatattagtaattcagcaattaaaaaaggtgaaacattgatagatacagcaatgacacttaatgcgatgcatcctgatattattgtaattagacatcaagattctggagcatgtaatctactttcacaaaaagtaaattgtgcagttcttaatgctggtgatggaagaagagaacaccctactcaagctttattagacgcattaacaattattactcgtaaaaaaaaaattcaaggattaaaaatcgcaatctgtggagatatacttcattcaagagttgctagatcaaatatttacttattaagtatgttaggagcagaagtgaacataattgctccaacaaatcttatgccaaaagaaattgaaaaatttggtgtcaatacttttacagatatgaaaaaaggattaaaagattgtgatattgtaatgatgttgagattacaaaatgagcgaatgacgagttcatatctttcatccaacagagaatattacgaatattatggattaactcctgataaattagaacatgccaaatctgatgctttaattatgcatcctggtccaatgaacagaggtatagaaatagatacaatgttagcggatgatatcaacaaaagtgtgattaaagagcaagttgaattaggtgtcgcagtaaggatggcttgtcttaaaatattttgtacataa

SEQ ID NO: 230220 - DNA, 769 bp, Unknown
  Bacterial polypeptide expressing nucleotide sequence isolated from the Sargasso Sea
ctgttaggaatccaaaacctatctattcaagaggctaatcttattttagatgaagcaaaaaactttataaaattaaatagaagtgcctctaaaaagttagatttactaagaggaaaaactcaaatcaatttattttttgaaccttctacaagaacacaaagctcatttgaactagctggtaaaagattgggagctgacgttatgacaatgaacgttgtaaattcttcactaaaaaaaggtgaaactattttagatacagctatgtctttaaacgctatgcacccagatattatagtagttagacatcaagattctggggcgcctaatttattgtctcaaaaagtaaattgtacagtaattaatgctggcgacggtttaagagaacaccctactcaggcactgttagacgctttaactataattaatagaaaaggaaaaattgaaggtttaaaaattgctatctgtggtgatattttacattcacgagttgctagatcaaatatttatttattaaatatgttgggtgcagaagtcaatattgttgctccaaaaactttaatgccggcctcaattaataaactaggtgtaaaaggatttacaaatatgaaggaaggtttgaaatcatgtgacattgttatgatgttaagattgcaaaatgaaagaatgaaaggatcatttctaccttcaaaaagagagtattacgaatactttgggttaacacctgataaactaaagcttgctaaaaaagatgcattaattatgcatcctg

SEQ ID NO: 230221 - DNA, 661 bp, Unknown
  Bacterial polypeptide expressing nucleotide sequence isolated from the Sargasso Sea
aactttaattgatactgccatgactttaaatgctatgcatccagatattattgtaataagacatcaagattcaggtgctccaaatttattgtcacaaaaagtgaattgtgctgtaataaacgctggtgacggtagacgtgaacatcctacacaagctttattagatgctcttactataattaatagaaaaggcaaagttgaaggtttaaaaatagcaatctgtggagatattctccattcaagagttgctagatcaaatatttatttaatgaatatgcttggggccgaagttaatgttgttgctccaaaaactttactaccacattctatagaacgtcttggggtaaaagcctttaccaatatgaaaaaaggtttagagagttgtgatattgtcatgatgctaagattgcaaaatgaaagaatgcacggatcatttctaccatctgctagagaatattatgagtattttggtttaacaccagataaattaaataaagcaaaaaaagatgctttgataatgcatccgggcccaatgaacaggggtgttgaaatagacacaaatttagctgacgatattaatagaagtgtaataagagaacaggttgaacttggtgtagctgtaagaatggcttgtctaaaaattttttgtaaaagaaattaa

SEQ ID NO: 230222 - DNA, 868 bp, Unknown
  Bacterial polypeptide expressing nucleotide sequence isolated from the Sargasso Sea
taatcgatacttcattttagttcaaagacatacttcagacagaaagcagaaaagctattcttctcaaggaaaaactgttgtaaacatgttttttgaaaattctactagaactaaaattagtttttcattagctgaaaaaagattaggtgctgatagtattaatttttctgcttcaacaagcagtgttaaaaagggtgaaacattgaaagatactgtacaaaatattgaatccatgaaaattgatggtgcagtaataaggcatggacacccagggtctgcattaaaattgacagaatacattgatggagcagtaattaatgctggcgatggttctcacgaacatcctactcaagccattcttgatatggtaacacttaaagagaaatttggaaaaattaaaggtcttaaagttggaattatcggtgatattttaaatagtagggtagctagaagcgacatttttgcattgaaaaaacttggagcagaggttgtagtttgtggtccaagtactttattgccaagcgatgcaaaaaaacttggaataaatattacatacaatttagatgaagttctcaattggtgtgatgcagttatagctttacgtattcagttagaaaggatgcatttaggaaggattccatcaaaaagagaatatcatagcgaatttggtcttacttttgagagaataagtaaattgaaaaaagatatagttattatgcacccgggaccaatgaatcgaggtgtagaaattgatagtaaagtggctgattcagataatgctgtcattcttgatcaagtgttaaatggagttgcatcgagaatgtcaattctttatttacttttgggtgaaggagatatcgagatatga

SEQ ID NO: 230223 - DNA, 931 bp, Unknown
  Bacterial polypeptide expressing nucleotide sequence isolated from the Sargasso Sea
atgcttaaaagcaaacatcttatcggtctagaacattttccagtttctgacttgaataaaataatcgacacttcttttaagtttaaagatatacttcagacagaaagcagaaaagctattttacttaagggtaaaactattgtaaacatgttctttgagaattctacaagaactaaaattagtttttcattggctgaaaaaagattgggcgctgacagtataaacttttctgcttcaacaagcagtgtaaaaaagggtgaaactttaaaagatactgttcaaaatattgaatctatgaaaattgacggtgcagtcataaggcatggacatccaggatcggcattgaaattgacagaatatatagatggagcagtaattaatgctggtgatggttcgcatgaacatccgactcaagctattcttgatatggtaacacttaaagagaaatttgggaaaattaaaggtctaaaagttggaatcattggcgatattttaaacagcagagtagccagaagtgacatttttgcattgaaaaagcttggagcagaagttgtagtttgtggtccaagtactctattaccgagtgatgcaaaaaaacttggaatcaatattacatacaatttagatgaagttcttaattggtgtgatgcggttatagctttacgaattcagttggaaagaatgcatttaggaaggattccatcaaaaagagaatatcatagtgaatttggtcttacgtttgagagaataagtaaattgaaaaaagatatagttattatgcatcctggaccaatgaatcgtggtgtggaaattgatagtaaagttgctgactcagataatgctgttattcttgaccaagtattgaatggtgttgcctcgagaatgtctattctttatttactattaggtggaggaaatatggagctatgat

SEQ ID NO: 230224 - DNA, 571 bp, Unknown
  Bacterial polypeptide expressing nucleotide sequence isolated from the Sargasso Sea
ttattatctcaaaaagttaattgttcagttcttaatgcgggagatggaagaagagaacatccaactcaagctttattagatgcattaacaattataaacagaaaaaaaaaaattgaaggattaaaaattgcgatatgcggtgacatacttcattcgcgtgttgcgagatcgaatatttatcttctaaatatgcttggtgctgaagtaaatatagttgctccatcaaaccttatgccaaaggatattgataaacttggagttaatattttctacgatatgaagaagggagttaaagattgcgatatagtaatgatgttaagattacaaaatgagcgaatgactagttcatttctatcatcaaatagagaatattatgaatattacggtctatctcctgataaattaaattatgctaaggatgatgcattaataatgcaccctggtccaatgaatagaggaattgaaatagatactaaactagctgatgatattaataaaagtgtaattaaagaacaagttgaactaggtgtcgctgtaagaatggcttgcttaaaaattttttgtacataaa

SEQ ID NO: 230225 - DNA, 604 bp, Unknown
  Bacterial polypeptide expressing nucleotide sequence isolated from the Sargasso Sea
atgtctgactttaccggtaaccacattctttcggttaatcaattcgatcgcgaggccattgagaaagtgttctcagttgccaattccatgcaaccctatgccaaacgacaaaagcgcacaaccgtgttagatggcgccattctcggtaacctcttctttgagccaagtacccgtacgcgagttagctttggtaccgcattcaaccttttaggtggtgaagttagagaaaccaccggcatgtcgagctctgcgctggctaaaggtgagtcattgtacgacacagcccgtgtgctgagcggctattccgacattattgcaatgcgacatcctgcggcgggttcagtggcagaatttgccgaaggtagtcgtgtacctgttatcaacggtggtgatggtgcaaacgaacacccaacccaagcactgttggacttgttcacgattaaacgtgaactggaatacaatggtcacggcattgacggcttacacatcgccatgattggtgatttgcgttacggccgaacagtacactctttatctcgcttgttatgtttgtttaaaaacattcgctttacgctcatttcgccaaaaggagctggccatggcc

SEQ ID NO: 230226 - DNA, 937 bp, Unknown
  Bacterial polypeptide expressing nucleotide sequence isolated from the Sargasso Sea
aatggcatcaacaaaagctattaaaatatctaaaaaacatctcctaggaatacaagatctaaatatttcagatgtaaaattcattcttactgaagcaaaacaatttattcaattaaatagaagcaaaaataaaaaaatagatattctgagaggcaaaacgcaaattaatttattttttgaaccttcaacgagaactcaaagttcttttgagttagcaggcaagagattaggtgcagatgttatgtcaatgaatattaccaattcagcaataaaaaaaggtgaaactttaattgatacggctatgacattaaatgctatgcatccagatataattgtaattagacatcaagactctggtgcttgcaatttgctttcacaaaaagtcaattgtgcggtaattaacgccggagatggaagaagagaacatccaactcaagctttgttggatgcattaactatactagatagaaaaaaaaaaattgaaggtcttaaaattgctatatgtggagatattttgcattcaagagttgcaagatcaaatatttatttacttaatatgttgggagctgatgttaatattatagctccaaccaacttaatgccaaaagatattaataaattaggtgtaaacattttttctaatatgaaagatggattaaaagaatgtgatattgttatgatgctcagattacaaaatgagagaatgacaagttctttcctgtcttcaaatagagaatattacgaatattatggacttactccagataagttagaatatgcaaaaaaagatgctttaataatgcatccaggtccaatgaacagaggtatagaaatagatacaaaacttgctgatgatattaataaaagcgtaataaaggaacaagtagaactaggtgttgctgtaagaatggcatgcttaaaaattttttgtgaataa

SEQ ID NO: 230227 - DNA, 710 bp, Unknown
  Bacterial polypeptide expressing nucleotide sequence isolated from the Sargasso Sea
aatggcaactgctaaaaaagtttcagctattaaaaacactccaaaacatctattaggtattcaaaatttatcagttctcgaagcaaaagaaattttaaccgaagcaaaatccttcataaaactaaacagaggaagttctaaaaaactagatatccttagaggaaaaactcaaattaacttattttttgaaccctctacgaggacacagagttcatttgacttagctggaaaaagactaggtgcagatgtgatgacgatgaatatgggtaactctgcattaaaaaaaggagaaacattaattgacactgctatgacgttgaatgcaatgcatccagatataattgttataaggcatcaagactcaggtgcaccaaatcttctctcacagaaagttaattgtactgtaataaatgctggtgatggaaggagagaacatcctacacaagccttacttgatgctttaacaattattaatagaaaagataacattgagggattaaaaattgcaatatgtggagatattcttcattcaagagttgctagatctaatatttatttaatgaatatgttaggtgcagaagtaaatgtcattgcaccaaaaactttaatgcctacgggtatagataacttaggagtgaaatcatttacggacatgaaaaaaggattagatggatgcgatattgttatgatgctgagattacaaaatgaaa

SEQ ID NO: 230228 - DNA, 889 bp, Unknown
  Bacterial polypeptide expressing nucleotide sequence isolated from the Sargasso Sea
aatccaagatttatctattaaagatgtaaatattatactagatgaagcttctaaatttattgaattaaataaaagcaaaaataaaaagcttgatattttgaagggaaaaacccaaataaatttattttttgagccttctacaagaacacaaagttcatttgaattagcaggaaaaagattgggtgcagatgtaatgtcaatgaatattacaaactcagcaataaaaaaaggtgaaactttaattgatactgcgatgactttaaatgcaatgcatcctgatataattgtaattagacaccaagactccggtgcatgcaatctactctctcaaaaagttaattgtgccgttttaaatgctggagatggaagacgcgaacatccaacacaggcattattagatgctttaacaatcataaatagaaaaaagaaaattgaaggtttgaaagtggcaatctgtggcgacatattacattctagagttgccagatcaaatatttatctattaaacatgcttggcgcggaagtaaatgttgttgctccaacaaatttattgcctactgatatagataaatttggagtaaatgttttttctgatatgagaaaaggagtcaaagattgtgacatagtaatgatgttaagacttcaaaacgaaagaatgacaagttcatttttgtcatcaaatagagaatattatgaatattatggactcactccagataaacttaatcatgctaaaaaagactcgcttattatgcatcctggtccaatgaatagaggtattgaaatagacactaaactagctgatgacacaaatatgagtgttgttaaagaacaagttgagttaggtgtagcaattagaatggcttgtttaaaaattttttgtgaatga

SEQ ID NO: 230229 - DNA, 919 bp, Unknown
  Bacterial polypeptide expressing nucleotide sequence isolated from the Sargasso Sea
atgaagaatttttcccaaaatgacattatatctatacgtgatttatcaaaggataatctagaagaaatctactctaaaacaaacgaaattatcgaaatgaaggctgaagagagacgtgaaatagctagaggcaaaactctaggttatctattctttgaaccaagtactagaactagacttagttttcaatcagcaatggctctacttggtggtacctcatttggaattgctgatgcaacatcatcttctgttcaaaagggtgaaagtttagctgacactgtaagaataatgtctggatatactgatgcaattgttttacgtcattctctagacggctccagtaaatttgcagcagaggtatcttcaaaacctattatcaatgcaggtagtggaactgaagaacatcctacacaagcgattcaggatttgtatacaataaaaaaagagctaggcaagattgatggaaaaaatattggaattgttggtgatctcaaatatggacgaactgtttactcgttattgtatggactaagcaattatgatgttaatgttcatctgatatctccagaatcactaaaaattagaagcgattctacatacaatctaaaagaaaatctatcgtatactgaatctgaaaatctagatgaatacatagaggacttggatgttttgtatgtaacaagaattcaaaaagaaagatttcctgacgaagaagaatatgtcaaagtaaagggcagttatgtgataggtcaagatgttgtaaataaaatgaaagacgattcaatactattacatcctcttccaagaattgatgaaatttcaactgatgttgattcttcaaaacaagcaaaatatttccagcaagctgaatatggaaaattcacacgtgcagcaattttgagcctacttttacaataag

SEQ ID NO: 230230 - DNA, 895 bp, Unknown
  Bacterial polypeptide expressing nucleotide sequence isolated from the Sargasso Sea
tctgggtatacaaaatctatcagttcaggaagctaaacaaatcttaaaagaagcaaaagaatttataaacttaaacagaagtccttctaagaaattagatacattaagaggaaagactcaaatcaatttattttttgagccgtctactagaacacaaagttcctttgatttagccggaaaaagattaggagccgatgtcatgactatgaatatgaataactcagctcttaaaaaaggtgaaactcttattgatacagcaatgactttaaatgcaatgcatcctgatcttattgtaattagacatcaagactctggagctccaaatttattatctcaaaaagtaaattgtgcagtaataaacgctggagatggtagacgtgaacatcccactcaggcattactagatgctttaacaattattaacagaaaaggtaaaattgaaggacttaaaatagcaatatgtggagatatacttcattcaagagtagcaagatcaaacgtctacttaatgaatatgttaggagcagaagtaaatgtgatagctccgaaaactttaatgccaaaatcaattgaaagattaggagtaaaatcatttaccaatatgaaaaaaggattagaaggttgcgatatagttatgatgttaagattgcaaaatgaaaggatgcaaggatcttttcttccgtctaaaagagaatactacgaattttttggtttgacgccagaaaaactgaaatatgcaaataaggatgcattaatcatgcacccaggtccaatgaatagaggtgtagaaattgacactaaattagcagatgacattaatgtcagcttagtaaaagaacaagtcgaattgggagttgccgtaaggatggcttgcttaaaaatatactgtaaataa

SEQ ID NO: 230231 - DNA, 580 bp, Unknown
  Bacterial polypeptide expressing nucleotide sequence isolated from the Sargasso Sea
ttgattgataatgtcggttcaaacacaagtctgattagtgcaggcgaagcttcaatatcgcatcccacacaaggtcttcttgatctattgacgattaggcaacaaaaaagttcatttgatgatctcaaggttgtgatcatgggggatatctcacactcaagagttgcgaggtcattgactgaagggctgaacatcttgaatgcagcaaatattacattgatttcgcctgaggaatttaaacccaatatggccaacttcccaaatacagacttcgagaaagacccaaacaaaggcctttctgatgctgatgtagttgttgcacttcgtgtgcaaaaagagcgaattgagtcttgtgagaatgatctgtctctagatcaatattcaaaaatttaccagctatctcaagacaaactggaattatgcaaaccggatgcaatagtcatgcatccaggtcctatgaatagaggagttgaaatttccaacgaagttgccgatggaaagcaatctgtcattctgaagcaggtggaaaatggagtggcaatccgaatggctgtcttaactgaaatattgaaacaataaa

SEQ ID NO: 230232 - DNA, 406 bp, Unknown
  Bacterial polypeptide expressing nucleotide sequence isolated from the Sargasso Sea
agatcaaatatttatttaatgaatatgcttggagcagaagtaaatgtaattgctcctaaaacattaatgccaaaatcaatcgaacgattgggtgtgaagtctttcactaatatgaaaaaaggtttagatggttgtgacattgttatgatgttgagattacaaaatgaaagaatgcaaggatcatttcttccttctaaaagagaatactatgagtactttggtttaactccagaaaaattaaagtttgctaacaaaaatgctttgatcatgcatcctggcccaatgaacagaggagtagaaatagatactaaattagctgatgatattaatgtaagtctagtaaaagaacaggttgaacttggagtagctgttagaatggcatgtttaaagttatattgtaaatgaa

SEQ ID NO: 230233 - DNA, 1297 bp, Unknown
  Bacterial polypeptide expressing nucleotide sequence isolated from the Sargasso Sea
atgaccgttccccagcaagccttcctccgcgacgccatgcgccgcctcaacatgacgcgcgaagcgttcgccagccgcatcggcgtcagccggcgtgcgctggatacctggctgctgcccgacgattcgcaggaatcgcgcgggatgcccgagatcgtcgaacgcttcgtgtcggaaatcgtcgagcgctcggtaccggagggcggaggatatacgcaaagcgtagataaccaggggctcgccaagcagttctttttcgaaggcaagccgcaactgctgtcggtcgaccagttctcgcgggaatcggtcgaggcgctgtttcgcgtagccgacgtgatgcagccgatcgcgcgccgccacaagatttcgcgcgtgctggaaggcgcggtgctcggcaacctgttcttcgaggccagcacgcgtacacgcgtgtcgttcggcgccgccttctgccggctcggcggttcggtatgcgacacgacgggcttcacgttctcgtcgatggccaagggcgaatcgatctacgacacgagccgcgtgatggccggctatgtcgacgcgctcgtgatccgccatccggagaaaggctcggtggccgagttcgcgcgcgcgaccaacctgcccgtgatcaacggcggtgacggccccggcgagcacccgagccaggcgctgctggatctctatacgatccagcgcgagttctcgcggctcggcaagatcgtggacggcgcgcacatcgcgctggtcggcgacctcaagtacggccgcacggtgcactcgctcgtcaagctgctcgcgctgtaccgcgggctcaagttcacgctcgtgtcgccgccgacgctcgagatgccggcctacatcgtcgaccagatcgcgacgaacggccatgtgatcgagcagacgaccgatctcgcggccgggctgcgcggcgcggacgtcgtctatgcgacgcggatccagaaggagcgcttcaccgacgagtcgttcgaaggctacacgccggatttccagatcaaccaggcgctcgtcgattcggtgtgcaagccggacacgctgatcatgcacccgctgccgcgcgacagccggcccggtgcgaacgacctgtcggtcgacctgaaccgcgacccgcgcctcgcgatcttccgccagaccgacaacggcattccggtgcggatggcgatcttcgcggtgctgctcggcgtcgagaacctcgtccagcattcgatgcgcgacgcgacgtggcgcccgccggcgtatctcgggccggaggatgcggtgtttcacggggtggattgaa

SEQ ID NO: 230234 - DNA, 710 bp, Unknown
  Bacterial polypeptide expressing nucleotide sequence isolated from the Sargasso Sea
agcggatgtaatgtctatgaatatcagtaattcagcaattaaaaaaggtgaaacattgattgatacagcaatgactttaaatgcaatgcatccggacattattgtaattagacatcaagattctggagcatgtaacttgctctcacaaaaagtcaattgtgctgttttaaatgctggtgatggaagaagagagcatcctactcaagctctactagatgctttaacaattattactcgcaaaaataaaattgaaggtctaagaatagcaatatgtggtgacatactccattctagagttgcaagatcaaatatttacttacttaatatgttaggtgcagaggtaaatataattgctccaacaaacttaatgcctaaggaaatagaaaaatttggagttaataaatttactgatatgaaaaaaggtttaaaagattgtgatatcgtcatgatgttaagattacaaaatgaaagaatgacaagttcttacctttcatcaaacagagaatattatgaatattatggtttaactcctgataaattagaacatgctaaatctgatgctttaattatgcatccaggtccaatgaatagaggtatcgaaattgatacaatattagcagatgacataaataaaagtgtaattaaagaacaagttgaacttggtgttgcagtaagaatggcttgtctaaaaatattttgtacaaaatgaa

SEQ ID NO: 230235 - DNA, 946 bp, Unknown
  Bacterial polypeptide expressing nucleotide sequence isolated from the Sargasso Sea
aatggcaattgttaaaaaattttcagctattaaaaaaatccagaaacatcttctaggaatccagaatttatctattcaagaagctaacctaatacttgacgaagcaaaaaactttataaagttaaatagaagcgcatccaagaaattagatttattaagaggaaaaactcaaattaatcttttttttgaaccctctacgagaactcaaagttcctttgaactggctggaaaaagattgggagcagatgtgatgacaatgaatgttggtaactcttctctaaaaaaaggtgaaacaatattagatacggcaatgtctctaaacgcgatgcatccagatattatagttgttagacaccaagactctggagcccctaaccttctttctcaaaaagtaaattgtactgttataaacgctggtgatggtttaagagaacatccaactcaggcattattagacgcgttaacaattattaatagaaaaggaaaaattgaaggtttaaaaattgcaatatgcggagatattcttcattcaagggtggctagatcaaatatatatttgttaaatatgttaggtgctgaggtaaatgtaattgcaccaaaaactttattacctaattcaataagtaaacttggagtaaaaggatttacaaatatgaaagaaggattagcatcctgtgacatagtaatgatgttaaggctacaaaatgagagaatgaccggttcgtttttaccttcaaaaagagaatactatgaatattttggtttaactcctgataaattaaaactagctaaaaaggacgctttaattatgcatcctggtccaatgaatagaggtgttgaaatagatactaaacttgctgatgatataaatgttagtttggtgaaggaacaagttgagctaggggttgctgttagaatggcatgcttaaaattatattgtaaataa

SEQ ID NO: 230236 - DNA, 775 bp, Unknown
  Bacterial polypeptide expressing nucleotide sequence isolated from the Sargasso Sea
aataaatttattttttgaaccttctacacgtacacaaagttcatttgaattagctggaaaaagattgggagcagatgttatgtcgatgaatttaaacaattctgcaattaaaaaaggggaaacattaattgatactgcaatgacacttaatgcaatgcatcctgacataatagtagttaggcaccaggactctggagcatcaaatttattatctcagaaagttaattgttctgttcttaatgctggagatggaagaagagaacatccaacacaagcattgctagatgcattaactattatagatagaaaagaaaaaattgaaggattaaaaattgcaatatgtggtgatatagttcattcaagagttgcaagatcaaatatttatcttcttaatatgcttggcgcagaagttaatattatcgctccttcaaatttaatgcctagagatattgaaaaacttggagttaacattttttcagatatgaaaaaaggaataaaagattgtgatatagttatgatgcttagacttcaaaatgaaagaatgactagttcattcctttcatcaaatagagagtactatgaatattacggattaacaccagataaattaaattttgctaaagatgacgcactaataatgcatcctggtccaatgaacagaggtattgaaatcgatacaaatttagctgatgacataaataaaagtgtaataaaagaacaagttgaacttggcgtagctgtaagaatggcatgtcttaaaatattttgtgaatga

SEQ ID NO: 230237 - DNA, 634 bp, Unknown
  Bacterial polypeptide expressing nucleotide sequence isolated from the Sargasso Sea
acactaaatgctatgcatcctgatatcattgtcatcagacatcaagattctggtgcatgtaatcttttatcacaaaaagtaaattgcgcagttttaaatgcgggagatggtagacgagaacacccaacccaagctcttcttgatgcattaacaataattgatagaaaagacaaagttcaaggattaagaatagctatttgtggtgatattttgcattcacgagtagcaaggtcaaatatttatttgttaaacatgttaggagcagaagtaaacattgttgctccatcgaatttaatgccaaaagatattgagaagttgggcgttaatactttttcggatatgaaaaaaggtttaaaagattgtgatatagtaatgatgttaagactacaaaatgaaagaatgagtaattcatttttgtcctctaatagagaatattatgaatactttggtctaacacccgacaagttggattatgctaaaaaagatgctttaattatgcatccaggtccaatgaatagaggaatagaaattgatacaaaattggctgacgatatcaataaaagtgtaataaaagaacaagttgaattaggcgttgctgttagaatggcttgtcttaaaattttttgtgaatgaa

SEQ ID NO: 230238 - DNA, 780 bp, Unknown
  Bacterial polypeptide expressing nucleotide sequence isolated from the Sargasso Sea
tagttgctaatgttttctttgagcctagtactagaacaaaaatgtcatttgctgtagcagcaggcaatttgggctgtaatgttttggatttcaacattgatagttcatcaattcaaaaaggggagtcaataattgaaacaatagatgcgcttaatttaatgggagtagatttatgtgttcttaggcatccagattcagttataagggagcttgctgagcacatgcccgatatggtatttataaatgcaggagaggggtctattgcacatcctactcaagcattacttgatatgaaaactattattgatcataaaaacagtttcgatggattgaagattgtaattattggagatttagatcactctagagttacctcctcttttgtagaaggcatatccaactttgatattgaatcactttccttttgcggccatcctgagatgtgtacaaattatcaaaatacagatgttggaaaatttgaaccagatattgaaagagcgcttgaagatgctgatgtagttatgactctgcgaattcagtatgaaagatttaaaaaagatctaaacttagacttagatacatacaaaagcgcatatcagttatcctcagaaaaacttggctttgcaaaaagtgatgcaattattatgcatccagggccagtaaattacgtagaaataactgaggctgtttatgattctgagaactcggtgataagacaacaaattgctaatggtgttgccataagaatggctgttttatcaagatttttgagtagataaa

SEQ ID NO: 230239 - DNA, 1066 bp, Unknown
  Bacterial polypeptide expressing nucleotide sequence isolated from the Sargasso Sea
attgccaaaattaaaagcgataagatcatctacgggttcaaaaattcttaaagatgcagaaaaaatagctttaaaatattattcatcaatttcttcaaaaataaatatcaaattaaaaagaagtaaaaatatttttaaaaaaattcatttagtagaaacagctgatttaaccaagaaagaaattgagcacatcttagatgaatccaaaaaatacataacttttaataaaaggaaaattaaaaaaattaatgttctagaaggaagaacaatatttaatcttttttttgaagactcaacaagaacaagaacaagttttgaagttgctgctaaaaggctaggagcagatctcattaatgtagttgtaaaagatagttctattaacaaaggtgagaccttgctcgatactatgactactattaattcaatgaatcctgacgttttaatcgtaagacatccagaggaaggaattagtaaaaaaatttcagaaacagtagatgcgtctgtaattaacgctggtgatggaagtcatgagcatcccacacaagcgttattagacgcacttactatcaaaaataaatttgaaaattttgcaaaattaaaaattgctatatgcggagatattttacatagccgtgttgctcgatcaaatataaccatactatcaaagttaggtgcaaaaataaatgttattggacctaaggaatggttaccaaaaagtttaaataaacttccagtgaatgtttatacggaaatgaaaaagggattacaaaattgtgatatagttatgatgctacgtattcaaaaagaaagaatagttgggaaaataatgccaaatcaaaagacttattttaaaaagtatggtttagattacaataaacttaaatatgcaaaaaaaaatgctttcgttatgcatccaggcccaatgaaccgtggtgtagaaatagactccaaacttgccgatgacgtcacgaggagcttaatacaagaacaggtcgctatgggtgttgcagtacgaatggcatgcttagacttaattattaaaaacagagatgactttagtaagtag

SEQ ID NO: 230240 - DNA, 879 bp, Unknown
  Bacterial polypeptide expressing nucleotide sequence isolated from the Sargasso Sea
ctattatagatactggatatagatttaaggaagttcttgagagacctattaagaaagttccctcattgcaaggcaaaactattgttaatcttttctttgaaaattcaacccgaacaagaattagttttgaattagcacaaaaaagattaagcgctgacactgtaaatttttcagcatctacctcaagccttaaaaaaggtgaaacctttaaagatacagttcaaaatattgaagctatgaagattgatgctgtcgttatgagacacccaacccctggttcaccactacatctaacaaaatatatagatgcgattattattaatgcaggggatggtacccatgagcatcctactcaggcaatactagatatgatgagtttgcatgaaaaatttggatatctaaaaggacttaaggttgcaattgtaggagatatatcacatagtagagttgcgttaagtaacatttatggtcttcaaataatgggtgctgaagtgacgctttgcggtccacctacgttgattccaactcacgctgaagatttaggggtgaaggtcaactataatttagatgaggtgattgagtgggccgatgccatcaatgtactgagaattcaaagagagcgaatgcagggaggtcttcttccatccatacgtgaatatcgtaccctttttggaattactaaagagcgccttgaaaaccataaaaaagaagttgttattttgcatccaggaccaatgaataggggtgtagaaattgatagtgtcgtagctgatagtgaccaagccattatcttagaccaagttcttaatggagttgcatcacgaatggcgatactttatttactgcttggaggaaagcaagagaaggaacccaaatagt

SEQ ID NO: 230241 - DNA, 578 bp, Unknown
  Bacterial polypeptide expressing nucleotide sequence isolated from the Sargasso Sea
catcaatttattatctcaaaaagtcaattgtgcagttcttaatgctggagatggaagaagagaacatccaacgcaggctttgttagacgctttaactattatagatagaaaagaaaaaattgaagggttaaaaattgcaatatgtggagatattgttcattcaagagttgcaagatcaaatatttatttgcttaatatgttaggagcagaagtaaatattattgctccatcaaatttaatgccaaaagatattgataaacttggggttaacagattttcagatatgaaaaaaggattaaaagattgtgatatagttatgatgcttagacttcaaaatgaaagaatgactagctctttcctatcatctaacagagaatattatgaatattatggattgacaccagataaattaaaatttgctaaagatgatgctttaataatgcaccctggaccaatgaatagaggtatagaaatcgatacaaatttagctgatgatataaataaaagtgtaattaaagaacaagttgaacttggtgttgcggtaagaatggcttgccttaaaatattttgtgaatgat

SEQ ID NO: 230242 - DNA, 820 bp, Unknown
  Bacterial polypeptide expressing nucleotide sequence isolated from the Sargasso Sea
atggcaaatgtaaaaaaagctattaaaatctctcaaaaacatctcctaggaatccaagatctatcaatttctgatgtaaattttattttatcggaagcaaaacaatttattagcctaaataaaagtaaaaataaaaaattagatgttttaagaggaaaaactcaaattaatttattttttgaaccttcgacacgtacacaaagttcatttgagttagctggaaaaagattgggtgcagatgttatgtcgatgaatttaaataattcagcgattaaaaaaggggaaacattaatagatactgcaatgacacttaatgcaatgcatcctgatataattgtagttagacaccaggactctggtgcatcaaatttattgtcccagaaagttaattgtgctgtgcttaatgctggtgatggaagaagagagcatccaacacaagcactattagatgcactaactattatagatagaaaagaaaaaatagaaggattaaaaattgcaatatgcggggatatagttcattctcgagtagcaagatcaaatatttaccttcttaacatgctgggagcagaggttaatattattgctccttcaaatttaatgcctaaagatattgacaaacttggagttaacaggttttcagatatgaaaaaaggattaaaagattgcgatatagttatgatgcttagacttcaaaacgaaagaatgacaagttcttttctttcatcaaatagagagtattacgaatattatggattaacacctgataaattagactatgcaaaagacgatgctttaataatgcatcctggtccaatga

SEQ ID NO: 230243 - DNA, 934 bp, Unknown
  Bacterial polypeptide expressing nucleotide sequence isolated from the Sargasso Sea
atgaaaaatactcacttgctagggcttaaagattatcctagagaagatatccagacaataatagatacaggttttagatttaaagaaattttagataggccaataaaaaaagtaccttctttgcagggtaaaactattgttaatcttttttttgaaaattccacgcggacaaggataagttttgaacttgctcaaaaaagattgagcgctgatactgtcaatttctccgcttcaacatctagcttaaaaaaaggcgaaacatttaaagataccgtacaaaatattgaagcaatgaaaattgatgctgtagttatgaggcaccctacgcctggatcaccactgcatcttacaaagtacattgatgcaatagttataaatgcaggagatggaacacatgagcatcctactcaagctatactagacatgatgagtttgcatgaaaaatttggctatttagaaggtttaaaagttggcatactaggagatatatctcacagcagagttgcgcttagtaatatttatggtcttcaaacgatgggcgctgaagttactttatgtggaccatctacgctagtacctccatttgctgaagaattaggcgtcaaagttaattacaatgttgacgaggtgattgaatgggctgatgcaataaatgttttaagaattcagcgagagagaatgaaaggtgggcttttaccatctattcgtgagtatcgaaatctttttggcattaccaaggatcgcttatctaagcacaagaaagaaattgtaatcatgcaccctggtccaatgaatagaggtgtagagattgatagcgttatcgcagatagcgatcaagcaattatcttggatcaagttttaaatggcgttgcatcaagaatggcgattctatatctgttattaggtggaaagcctgaagaggaatctagttaaa

SEQ ID NO: 230244 - DNA, 919 bp, Unknown
  Bacterial polypeptide expressing nucleotide sequence isolated from the Sargasso Sea
aatgaataatttttcccaaaacgacattatttctatacgagatttatcaaaagatgatttagaacaagtctttgcgaaaactaatgaaatcatggaaatgccggcagaacaaagacgtgagatagcaagaggaaaaactctgggatatctattctttgaaccaagcactagaacccgacttagtttccaatctgctatggcgctaattggaggaacctcatttggaattgctgatgcaacttcttcttctgttcaaaaaggtgaaagtttggctgacactgttagaattatggcaggttatacagatgcaattgttttacgtcattcattagatggctcaagtaaatttgcagctgaggtttctgataaaccgctaatcaatgcaggcagcggtacagaagaacatccgacacaagcaattcaagacttgtatacaatacaaaaagaacttggaaaaattgacggaaaaaatattggaattgttggagacttgaagtatggacgaacagtttactctttgttatatggtctgagtaactatgatgtgaaggttcatctaatctctccagaatctttgaaagttagaagtgattctatatacaatctcaaagaaaatctttcatttaccgaatctgaaaatctagatgaatacattgaggacttggatgttttgtatgtaacaagaatacaaaaagaaagattccccgatgaagaagaatatgtcaaagtaaaaggcagttatgtaattggtcaagacgttgtaaacaaaatgaaagatgatgcaatcttattacatccacttccaagaattgatgaaatctctacagatgttgattctacaaagcaagcaaaatatttccaacaagcagaatatggaaaatttactcgtgcagcaattttgagtatgctattacaataa

SEQ ID NO: 230245 - DNA, 547 bp, Unknown
  Bacterial polypeptide expressing nucleotide sequence isolated from the Sargasso Sea
aatgcttgaaaacattaaaatccctaaaatctctcaaacccatctgcatggcataaaaaatctcagtattgaggatataaataatattttagaactcagtaaaattttcaaagagcacaacaaagaaaaggataaaaaaataccgatcttaaaaggtagaacaattataaatcttttttttgagccctctacaagaacactaatctcttttgaaatagctgctaaaagattaggcgctgatgtaattaatatgaatattgaaggatcttcattaagaaaaggtgaaagtttatttgataccgctcaaactttaggagcaatgaaccctgatcttgtaattatcagacatggagaaaatgatgcctcaaaagaaattgctaaaatattagaatgtcctgttataaatgctggagaaggtgttaatgaacaccctacacaagcattgcttgatgcttatacaatcatgaatcacaatcgaaagcttaatgatatcacagtttcaatatgtggtgatcttgaacatagtcgagtagcaaggtcaaactac

SEQ ID NO: 230246 - DNA, 846 bp, Unknown
  Bacterial polypeptide expressing nucleotide sequence isolated from the Sargasso Sea
agttctcaaataattttatagatgatgaaggtaattttagaaaagaaaatttatttccagagaaaatagtcgcaaatgttttttgtgaaccaagcacaagaacaaagtcttcttttgcaatagctgcaggaaatttaggttgttctgtagttgattttaatattgataactcttcagtccaaaaaggcgagtctatttttgaaactgtagatgctttaaatttaatgggcgttgatctttgtgtattacgtcatccaaagtctgttataagagaattagcagaatctctaccaaagatggtttttataaatgcaggtgagggagccatatcacatccaacccaagctcttttagatattaaaaccattattgatcataaaaattcattggatggattaaaaatcgtaatagtgggcgatcttgaccattcaagagttacatcatcttttgtagaaggtatttcaaattttgatgttgattctttgatttttagcggccatcctgaaatgtgttcaaagtatcaaaatccagaaattggtaaatatgaaccagactttgaaaaagcacttcaagatgcagatgttgttatgacgcttagaattcaatatgagagatttgaaaaggatcttgatctagatttggagacttataagaattcttatcaactctcaacttcaaagcttggttgtgctaaagcagatgcaatcattatgcacccaggcccagttaattatgttgaaattactgaagctgtatatgattctgaaaattcagtcattaggcagcaaatagcaaatggagttgcaataaggatggcagtgttatcaagatttttgagcagctagc

SEQ ID NO: 230247 - DNA, 580 bp, Unknown
  Bacterial polypeptide expressing nucleotide sequence isolated from the Sargasso Sea
tgcttgtaatttgttatctcaaaaggttaattgtgcagttcttaatgcaggagatggtcgaagagaacaccctactcaagctcttcttgatgcattaacaataataaatagaagaaaaaaaatagaagggcttaaaatagctatatgtggagatattcttcattcaagagtagcaagatcaaatatttatttacttaacatgttaggtgctgatgtaaatatagtagcaccaactaatcttatgccaaatgaaatagaaaaatttggggtcagtattttttcagatatgaaaaaaggagttaaagattgtgacatagtgatgatgttaagacttcaaaatgagagaatgacaagttcttttctatcgtctaatagagaatactatgaatattacggtttaacacctgacaaaataaaatttgctaaagaagacgcacttataatgcatccaggtccaatgaatagaggaattgaaattgatacaaacttagccgacgatattaataaaagtgtaataaaagaacaagttgaattaggggtagcggtaagaatggcttgcttaaagatattttgtgaataa

SEQ ID NO: 230248 - DNA, 703 bp, Unknown
  Bacterial polypeptide expressing nucleotide sequence isolated from the Sargasso Sea
agttcatcctcatcagtaaagaaaggtgaatctttaacagatacagtaaacaatatactggctatgaaagtagatatgattgttttaagacatccaaatcccggatctccattacttttgtccaaacacacaaattcctgcattataaatgcaggagatggtgcccatgaacatccgacgcaagctttgcttgattgtttttctttaactgaaaatttaggtgatcttaaaggtaaaaatattctaattgtaggggatatcctccattctagggttgcactatcaaatatttatgctcttaaacttttaggagctaatattaaattatcatgtcctctaagtttaattccaagagaaattgaaagtcttgatgtttcaattgaaactgatatattaaaagctttaaaatggtgtgatgcggctaatgtcctaagagttcaaaaagaaagaatggaaaaatcttattttccaaataacagagaatattccatgttatttggtcttgataccaataaaatagataatattaaaaaagatatattgatattgcatccaggtccaattaataggggggtggaaattacctcagaaattgtggaatcaaataattccattattttagatcaagttgaaaatggagtagccataagaatggccattatttatttacttgcatcaaagatgaatttttcaataaattaac

SEQ ID NO: 230249 - DNA, 940 bp, Unknown
  Bacterial polypeptide expressing nucleotide sequence isolated from the Sargasso Sea
atggcaactaaaaccaaagctattaaaatttctcaaaaacatctcctaggtattcaagatttatcaataaatgatgttaatttaatcttaaaagaagctgaaaaatttattgaattaaacaaaagtaaaaataaaaaattagatttacttaagggaaaaacacaaattaaccttttttttgaaccatcaacaagaacacaaagctcatttgaactagcaggaaaaagattaggtgcggatgttatgtcaatgaatataacaaactcagcaattaaaaaaggtgaaacgctaatagacactgcaatgacattaaatgcaatgcatcctgatataatagttattagacatcaagattcaggagcttgtaatcttttatctcaaaaagttaattgtgctgttttaaatgctggtgatggaaggagagagcaccctacccaagcattacttgatgcattaactatattgaataggaaaaaaaaaattcaaggattaaaggttgcaatttgtggagatattctacattcaagagtagcaagatctaatatttacttgctaaacatgttgggtgccgaagttaatattgtagctccttcaaaccttttaccaaaagatatagaaaaatttggggttaatattttttcaaatatgaagaaaggtgtaaaagattgcgacatagtaatgatgcttagacttcaaaatgaaagaatgagtagttcattcctgtcatctaatagagagtattatgaatactatggactaacacaggataaattagaatatgcaaaatcagattcaattattatgcatcctggtccaatgaaccgcggtattgaaattgatacaaaactagctgatgacaccaatatgagtgttgtaaaagagcaagttgaattaggtgttgcgataagaatggcatgtttaaaaattttttgtgaatgat

SEQ ID NO: 230250 - DNA, 885 bp, Unknown
  Bacterial polypeptide expressing nucleotide sequence isolated from the Sargasso Sea
tttttgagcccagcacgcgcacccgcagcagttttgagttggcggcgcggcgtctatcggctgatgtgcagagcttctcgcctgccagtagcgccttagccaaaggcgaaagcctgctggatacagcccgcacctatgtcgctatgggggctgatgtgttggtggtgcgtcaccgctgcgctggagtgcccgctgagctggccagagatctagaagctgcaagctgccgtacggctgtgctgaacgctggtgatggcctccatagccatcccagccaggccctgttggatctctttaccctcgcccgccatttcaaccctgaagctcccaccctggaggccttggctggcaagcggattgtcattgttggcgacgtgctgcattcacgggtagcgcgctccaacctgtggtcgctgacggcctgtggcgttgatgtcgtgctctgcggcccggccagcctcttgccggatgcctttgcccagttcaccgaagctcctcctccaggccaggtcaaggatttggtgctccagcgcggcagcctgcgcattgagcgcgatcttgatcaggcccttgagggtgctgatgcggtgatgacgctgaggttgcagcaggagcgcatgaaggagcagctcatcaccagcctcgaggcctatcagcgccgctatgggctcagtcactcccgccttgaacgctgcggtaagccagtgcctgtgctccatccagggccggtgaaccgcggtgtcgagctcagtggcgagctgctcgatgacccgagccgttcgctggtggaagagcaggtgcgcaacgggattccggtgcgcatggctctgctttatctgatggcggccagtgagcccgccagctcagctgctgggttgagctgag

SEQ ID NO: 230251 - DNA, 1021 bp, Unknown
  Bacterial polypeptide expressing nucleotide sequence isolated from the Sargasso Sea
atgaaccagttcgaaggatcccacatcctctccgtaaaccagttagatcttgattcaatccaaactatttttaatgtcgcccaccgcatgatgccctatgcacttcgtgagaagcgcacaaaagtgctcgaaggcgccattttaggtaacctgtttttcgagccaagtacccgtacccgcgtcagttttggctgtgcctttaacttactcggcggccatgtgcgtgaaaccactggtatggcctcttcgtccttatctaagggtgaatccctgtacgataccgcccgcgtactctcaacctattccgatgtgattgcgatgcgccaccctgactcatactctgtcaaagagtttgccgaaggtagccgcgtccccgtaatcaatggcggtgatggttcgaacgagcacccaacccaagcattgctcgatttgtttaccattcaaaaagagttaggtcatgctggccgaggtatcgatggcatgcatatcgctatggtcggtgatttaaagtttggccgcaccgtgcattcattgtcgcgcttgctgtgcatgtataagaacatcagcttcacactgatttcaccagctgaattagctatgcctgattatgtgatctcagacattgaaaatgctggccatagcatcaaaataacagaccagcttgaaggccacttagataaagcagatattctttatctgacccgcattcaagaagagcgcttcccatcccaggaagaagcaaacaaataccgcggtaaattccgtttgaatcgcagtatttacacccaacattgcaaatctaacactgtgatcatgcacccactgccacgggattcgcgagcacaagctaatgagttagataatgatttaaacagccatcctaatctcgctatcttcagacaggcggacaatggactgttaattcgtatggcactgtttgcattgacactcggggttgactcacaactcgaaaaatatgagtgtcctgttaattggtattcacgtaaagccgatcgctaat

SEQ ID NO: 230252 - DNA, 469 bp, Unknown
  Bacterial polypeptide expressing nucleotide sequence isolated from the Sargasso Sea
atggcaatcaaatcaaacaaagctgttaaaatttctcaagaacatttgctcggaattcaagatttgtctattacagatgttaacttaattcttaatgaagcaaaacaatttatagaacttaacaaaagtaaaaagaaaaaattagacatattaaggggtaagacacaaattaatttatttttcgaaccctctacaagaacacagagttcatttgaacttgcaggaaaaaggcttggcgcggatgttatgtcaatgaatatagtaaattcagcgattaaaaaaggagaaacattaattgatacagcgatgaccttaaatgctatgcacccagatttaattgtaataaggcatcaagactcaggtgcttgtaatttgctatcacagaaagttaattgttctgttataaatgctggtgatggaagaagagaacatcctactcaagcattgctagatgctctaacaatataga

SEQ ID NO: 230253 - DNA, 958 bp, Unknown
  Bacterial polypeptide expressing nucleotide sequence isolated from the Sargasso Sea
tatggatcaaataaaaattaacgaattctctcataaacatatattatctattgaagacctttctcctttagacattaatttaatacttgaccgtgcagagaaatatgcaaatcaaaataaattacaaaacaaaaaaatatctaaattaaaaggaagaacactcatcaaccttttttttgaaagctccaccagaacaagaacatcatttgagcttgcaggaaaaagacttggagcagatgttataaatatgtctattgaagggtctgcaataaaaaagggcgagacactagttgatacagcaatgactttaaatgctatgcacccagatttaatggttgttcgccataatgaatcaggcgcagtaaatttacttgcaaaaaaagttaatagttctgtaattaacgctggcgatggatgccattctcacccaacccaagcacttttagacgcattaacaataagaagaaatttaaagaaattagatggacttaatgtagctatttgtggagatgtaatgcacagtagagttgcgcgatctaatatacaattactaaacattatggggtcaaaggtaagaattgtagcaccttctactctaattcctgattcaattgataaaatgggtgtcgatatttatcataatatgacagatggtttaaaaaattgtgatattgtaatgatgcttagacttcaaaatgaaagaatgcatggttctttcgtcccatctacaagagagtactatgaaatttttggcttgaacaaaacaagtttacaaaaagccaagcctaatgcactcatcatgcaccctggaccaatgaatagaggggttgagattgatacagaaattgcagacaatttaaaacaaagtgtaattagagaacaagttgaaatgggagtagcaattagaatggcttgccttgaactattagataaaagtataaataaaaagacaaattaa

SEQ ID NO: 230254 - DNA, 571 bp, Unknown
  Bacterial polypeptide expressing nucleotide sequence isolated from the Sargasso Sea
ctgaatgctggcgatggtgctggaaatcaccctactcagactatgcttgatctcttcactatcagacaggcacatggcactctggaaggacttaatgtggtccttgtcggagatttgagatatggtagaacggttcacagcctttcccatgcattagttaggttcggagccaaacttactctggtatcgccatcaacgctgaaaatgccagtcgagatagtttcggatctcagagaacatggttcagaaatcacggagacagagtcattggaggaccaaatcgcaggagccgatgtgatctatgtgactaggatccagaaggagaggttccctgacgaggacgagtacgccaaggtagccgggatatacaaaatcgaggcgtcggacctttccggcgccaagaaggggatgatcatcatgcacccgctaccaagggtggatgagatagggcccgacgtggactctaccgaattcgctagatacttcgagcaggccttcaatggagtccccactaggatggccctgctatgcaggagtctaggcattgatgttccgaagaaggtgaagtaat

SEQ ID NO: 230255 - DNA, 1018 bp, Unknown
  Bacterial polypeptide expressing nucleotide sequence isolated from the Sargasso Sea
aatgcaaatttggcctcataaacatatccacacactagctaatttttcaattaaagattatgagtcagtatttgaattagctaatagatttgatgcactaaagaatgcaggaacaaaaaagataccggccttacaagggactttggtaacgtctttattttttgaagctagtacaagaacaaaaaatagttttgagcttgcagcaaaaagactttctgctgatgtccaaacgtttgcgccatcctccagctctttaacaaaaggcgaaacaataattgatacagccataacttattctgctatgggggcagatacattagttatcagacattcatcaagttacataacctttgagatcgcaaaaaaacttgatgcaataaatgccaagacttcggttcttaatgcgggagatggattacatagtcaccccagccaaggattgcttgacatctatacattgataaaattcttttcccaaaaaacactgaatccagaggttttaaattccaaaaaaattttaataattggcgacgttaatcattcaagggttgccaggtcaaatctttgggctttgagtgcattcggcgccgatataattttatgtggtcctaagacattaatacctgatgaatttatcaattttttaaaaacccccgcgccaaatcaaacagaagatcctgttaaatcaagaggttccataacaatttctagatcattggaagaatcaataaaaattgcagatgcgattattgttttaagactccagaaagagagaatgatggaaaatttactaagtagcattgattcatatagtttagattatggcttaaccccagagaaattatctttaaataataaagaaattccaattctacatcccggtcccattaacagagatatcgaaattagtagttcagtggtagatcgatatcctaattgcttaattaataatcaagttgcaaatggtatccctataagaatggctttgctttatctactacagaaacacaacaagtaa

SEQ ID NO: 230256 - DNA, 880 bp, Unknown
  Bacterial polypeptide expressing nucleotide sequence isolated from the Sargasso Sea
tttatcaattaatgatgttaatttgatacttgatgaagcacacacatttataaaagttaatcaaagcaaaaataaaaagataaatgtgttgagaggaaagactcaaatcaatttattctttgaaccctctactagaactcagagttcatttgagttggctggtaaaagacttggagcagacgttatgtctatgaatataagtaactctgcgattaaaaaaggtgaaacattaatcgatacggctatgactttaaatgcgatgcatccagatattattgtaataagacatcaagattctggagcttgtaacttactttcacaaaaagttaattgtgcggtgctaaatgctggtgatggaagaagagaacaccctactcaagctcttttagatgctttaacaattataactcgaaaaaataaaattgaaggattgaaaattgcaatatgtggtgacattctacattcaagagtagcaagatcaaatatttatcttctcaatatgcttggagctgaagtaaatataattgctccaacaaatcttatgccgaaagaaatcgaaaaatttggtgttaatacttttactgatatgaaaaaaggattgaaagattgtgatatcgtcatgatgctaagattgcaaaatgaaagaatgacaagttcatatctttcatcaaatagagagtattatgaatattacggtttaactcccgataaacttgagcatgctaaatctgatgcattaattatgcaccctggaccaatgaatagaggtatagaaatagatacaatattagcagatgacataaataaaagcgtaattaaagaacaagttgaactaggtgttgctgtaagaatggcttgtttaaagatattttgtacataa

SEQ ID NO: 230257 - DNA, 898 bp, Unknown
  Bacterial polypeptide expressing nucleotide sequence isolated from the Sargasso Sea
tttgttaggtatccaagatttatctgtaaatgatgttaacactatcctgaatgaagcctctaaattcattgagttaaataagagtaaaaataaaaaaattgatattttaaaagggaaaactcaaataaacttattttttgaaccttcaacaagaacacagagctcattcgaattagcaggaaaaaggttaggtgcagatgtaatgtcaatgaatattacgaattctgctatcaaaaaaggtgaaacgttaattgatacagcaatgaccctaaatgcaatgcacccggatattattgtaataagacatcaagactcaggggcatgtaaccttttgtctcaaaaagtcaattgtgcagtactaaatgcaggtgatggtagaagagaacatccaacacaagcattattagatgctttaacaattaaaaatagaagaaaaaaaatagaaggtcttaaaattgcaatatgtggagatatactacattcaagagtagcaagatcaaatatttatcttctaaacatgttgggtgcagaagtgaatatcgtggcccctacaaatttaatgccaaaagaaattgaaaaatttggtgtaaatattttttctgatatgaaaaaaggagttaaagattgcgacatagtaatgatgttaagattacaaaatgaaagaatgacaagctcgtttctatcatccaacagagaatactatcaatattatggcctaacacctgataaaattcaatatgctaaagaggatgctttaataatgcatccaggaccaatgaatagaggaattgaaattgatacaaacttagcagacgatataaacaaaagtgtaataaaagaacaagttgaattaggcgtagcagtaaggatggcctgcttaaagattttttgtgaataa

SEQ ID NO: 230258 - DNA, 475 bp, Unknown
  Bacterial polypeptide expressing nucleotide sequence isolated from the Sargasso Sea
aatggcggttataaaaaaattttcggctgttaaaaaaatccaaaaacacctacttggtatacaaaacctatcaatacaagaagcaaatcagatcttagacgaagcgaagaattttattaaattaaatagaagtgcatcaaaaaaactagatttattaagaggtaaaacccaaataaacttattttttgaaccatcgactagaacacaaagttcttttgaattagcaggaaaaagattaggcgctgatgttatgacaatgaatgtcagcaattcatcattaaaaaaaggtgaaacaatattagatacagcaatgactttaaatgcaatgcatcctgatattattgtagttaggcatcaagactctggggcacctaaccttttatctcaaaaagtaaattgtactgtaataaatgctggtgatggtttgagagaacatcctactcaagctttattagatgcattaactataatttaa

SEQ ID NO: 230259 - DNA, 1021 bp, Unknown
  Bacterial polypeptide expressing nucleotide sequence isolated from the Sargasso Sea
atgaaccagttcgaaggatctcatatcctctccgtaaaccagttagatcttgattcaatccaaactatttttaatgttgcccatcgtatgatgccctatgcacttcgtgagaagcgcactaaggtgctcgaaggcgccattttaggtaacctgtttttcgagcctagtacccgtacccgcgtgagttttggctgtgcctttaacttactcggcggccatgtgcgtgaaaccacaggcatggcctcttcgtccttgtctaagggcgagtctctgtacgataccgcgcgtgtactctcgacctattccgatgtgattgcgatgcgccaccccgactcttattcagtgaaagagtttgctgaaggtagccgagtgccagtaatcaacggtggtgatggttcgaatgagcatccgactcaagccctgctcgatttgttcaccattcaaaaagagttaggccatgctggccgcggtatcgatggcatgcatatcgccatggtcggcgacttaaaatttggtcgtaccgtgcattccctgtcgcgcctactgtgcatgtacaagaacatcagcttcacactgatttcgcctgctgaattagcaatgcctgactatgtgatctccgacattgaaaatgctggccatagcatcaaaataacagaccagcttgaaggccacttagataaagccgacattctttatctaacccgcattcaagaagagcgcttcccatcccaggaagaagcgaacaaataccgcggtaaattccgtttgaatcgcagtatttatacccagcattgcaaatctaacactgtgatcatgcacccgctgccacgggattcgcgtgcgcaagctaatgagttagataatgatttgaacagccatcctaatctcgctatcttcagacaggcggacaatggactgctaattcgtatggcactgtttgcattgacactcggggttgactcgcaactcgaaaaatatgagtgtcccgttaattggtattcacgtaaagccgatcgctaat

SEQ ID NO: 230260 - DNA, 949 bp, Unknown
  Bacterial polypeptide expressing nucleotide sequence isolated from the Sargasso Sea
atggataatttcaattattattttgataatattcatttattaggcattcaaggaatgaataaaaaaagtattcaatcaattttagaaagagcgcaatattttaatcaaaaaaagaaaaatagaaaaaataaaattttgaaagacaaccttgtaataaatttattttttgaaaattcaaccagaacaaaagcatcatttgaaattgctgcaaagtctatgtcagcagatattttgaatatttcagtatcatcctcttcaattaaaaaaggagaaactctaatagatacagctgctacactaaacgctatgcatcctgattttttaattttaaggcatccaaattctggtgctgcagaaatgctttctaagcatgtagagtgtagcattataaatgcaggtgatgggaggcatgaacatccaactcaagctcttttagacgctgcagtaattaaagaagaaggtattaatcttgaaggattaaaaatcgctatttgcggagatatactaaatagtagagttgctcgatcaaatatatatttattaacaacgatgggagcgcaagtaagcgtgattgggcctccaacactaattcctaaagatattgaaaggatgggcgtaaaagtattttttgatcttaattctggattgaaatcatctgacattattatgattttaagattacaaaacgaaagaatggacggctcggaaaccccaagtaaaagagagtattatagtttttttggtattaatgaaaataatttaaagttagcaaaaaaaaatgctctggtgatgcatccaggacctatgaatagaggggtagaaatagcctccttattggctgataataatgaaattagccttgtaaaaaaacaggttgaaatgggtgtttcagtcagaatagcttgcttagaaatgttgaaattatcaagaaataaattgttaaaatgaa

SEQ ID NO: 230261 - DNA, 295 bp, Unknown
  Bacterial polypeptide expressing nucleotide sequence isolated from the Sargasso Sea
atgaacgaaggattaaaatcctgtgatatcgttatgatgttaagattacaaaatgaaagaatgacaggttcttacttaccctcaaaaagagaatattacgagtattttggactcactccagataaattaaagttagccaaaaaggatgctttaataatgcatccgggaccgatgaacagaggagttgagattgatactaaattagcagatgacataaatgtaagtttggtgaaagagcaagttgaattaggtgttgcagtcagaatggcgtgtctaaaattatattgcaagtaat

SEQ ID NO: 230262 - DNA, 840 bp, Unknown
  Bacterial polypeptide expressing nucleotide sequence isolated from the Sargasso Sea
gatggctaaaaatttactttcaattaaagacttatcgaaagacgaaattttagatttaataaaattttcaaataattttatagatgatcaggcaaattttagaaaagaagatctttttccagataagacagttgcaaatatattttgcgaacctagcactagaacaaaatcatcatttgcaatagctgctggaaatttaggatgttctgttattgattttgatattgataactcttcaattcaaaaaggtgaatctatttttgaaaccgttgatgctcttaatttaatgggagttgatctatgtgttcttaggcatcctaaatctgtgatacaagatttagcagaagctcttcctaagatggtttttataaatgctggtgaagggtctatatctcatccaacacaagccttgttagacatgaaaacgattatggatcataaaaactccttggatggccttaagattgtaattgtgggtgatcttgatcattctagggttacttcctcattcatagaaggcatatctaacttttccatagattcattaactttttctggccatccagaaatgtgcaccaaatatcaaaacccgaacattggaaattatgagccagatttgaataaagcactaatagatgctgatgttgtcatgacattaagaattcaatacgaaaggtttgatgaggaattaaatttagatttagagacgtataaaaatgcctatcagctttcttcggaaaagcttgagaacgcaaagggagatgctattatcatgcatcccggcccagtgaattatgttgaaataacagagtcggtttatgattcagaaaactcagttat

SEQ ID NO: 230263 - DNA, 940 bp, Unknown
  Bacterial polypeptide expressing nucleotide sequence isolated from the Sargasso Sea
gatgtcttgtgatattaaaatacccgaaataagtcaaaaacatttattaggaataaaatatctttctattgaagatataaataaagttttggagcttggaaatttttttaaactaaaaaataaagaaaaaaataaaaattatcctatccttaccggaagaacagtaattaatcttttttttgaaccttctacaaggacattaatatcctttgaaattgcagctaaacgattgggagctgacgtagttaatatgaatattcaaggctcctctcttagaaaaggtgagacgttatttgatacagctcaaactattggagcaatgaatcctgatctcgtgataataagacacaatgaggataattctgcagagaaaatttcaaatcttttgaattgtcctgtaatcaatgctggagagggtgtaaatgaacaccctactcaagcactgcttgatgcatttacgatccttagtcacaaaaaaactcttaaagatcttactgtctcaatctgtggggacctagaacatagtcgtgttgcaagatcaaattactatttgttaactaaaatgggctctagcgtcagatttgtttatccaaaatattttgaacctagtgatttaaataaatataaagttgagacgtttaatgatttaaataaaggaataaaagactctgatatagtaatgatgctcagaattcaaaatgagagaattttagataccgaattgccaagcacaaaagattactttttaaaatatggtcttacatcagaaagattgaaaaatgctaaagaagatgttctcgtaatgcatccaggccctattaatagagatgtggaaatagagagttcattagctgatgacgtaaataaatcagttattaatgaacaagtagaaaatggtgttgccatcagaatggcctgcttagcaattttacttaaataa

SEQ ID NO: 230264 - DNA, 898 bp, Unknown
  Bacterial polypeptide expressing nucleotide sequence isolated from the Sargasso Sea
ttgttaggtattcaagatttatcaattaatgatgttaatttgatacttgatgaagcacacgcgtttataaaagttaatcaaagtaaaaataaaaaaatagatgttttgaggggaaaaactcaaatcaatctattctttgagccttctactagaacacaaagttcatttgaattagctggaaaaagacttggagcagacgttatgtctatgaatataagtaactctgcaattaaaaaaggtgaaacattaatcgatacagccatgactttaaatgcgatgcatccagatattattgtagttagacatcaagactctggagcttgtaacttactttcgcaaaaagtaaattgtgcagtgctaaatgctggtgatggaagaagagagcaccctactcaagcccttttagatgctttaacaattataactcgaaaaaataaaattgaaggattaaaaattgcaatatgtggagacatactgcattcaagagtagcaagatcaaatatttatcttctcaatatgcttggagctgaagtaaatataattgctccaacaaatcttatgcccaaagaaattgaaaaatttggtgtcaatacttttactgatatgaaaaaaggattgaaagattgtgatatcgttatgatgctcagattacaaaatgaaagaatgacaagttcatatctttcatcaaatagagagtattatgaatattacggtttaactcctgataaacttgagcatgcgaaatctgaagcattaattatgcaccctggaccaatgaatagagggatagaaatagacacaatattagcagatgacataaacaaaagtgtaattaaagaacaagttgaactaggggtagctgtaagaatggcttgcttaaaaatattttgtacatgat

SEQ ID NO: 230265 - DNA, 907 bp, Unknown
  Bacterial polypeptide expressing nucleotide sequence isolated from the Sargasso Sea
gatggctaagaatttattatcaataaatgacttatctaaaaaagaaatattagatttaattgagtttgctaataatttttttaacgaagaaggtgatttccgtagagaaagtttatttcctgataaaaccatagctaatgttttttgcgaacctagtacaagaacaaaatcttcatttgcaatagctgcaaagaatttaggttgttcagtaatagactttaatattgaaagttcttctgtccaaaaaggagaatctatttacgagacaattgatgcattaaacctaatgggagtagatttatgtgtgcttagacatcctgaatccatcattcgagaattagcagaaactttaccaaaaatggtatttataaatgcaggagaaggttctatttcacatccgacacaagctcttttagatttaaaaacgataattgatcataaagacactttggatggtttaaacattgtcatcattggagaccttgatcattcaagagttacttcatcttttgtagaaggtatttctaattttgagatcggctctcttacattttgtggacatcctgaaatgtgttcaaaatatatagatccaaatattggacgatatgaagctgatatggcaaaagctttgcaagatgctgatgtcgttatgactttaagaattcaatacgaaagatttgaaaaggaattgaatttggatttagaaacatataaaagcgagtatcaattatcatcagagaagcttgagaatgctaaaggagatgcaattattatgcatccaggacctgtaaattatatagaaataactgaggctgtatacgactcagaaaactctgtcatacgacagcagattgctaatggcgttgcggtaagaatggcagttttatcaagatttttgggtagttaa

SEQ ID NO: 230266 - DNA, 651 bp, Unknown
  Bacterial polypeptide expressing nucleotide sequence isolated from the Sargasso Sea
ttaatgatacagcaatgactctaaatgcgatgcatcctgacattattgtaataaggcatcaagattctggggcatgcaatttattatctcaaaaagtaaattgtgtagtattaaatgctggtgatggaaggcgtgagcaccctactcaagcattactggatgctttaacaataagaaatagaaagaaaaaaattgaaggattaaaaattgctatatgtggagatattcttcactcaagagtcgcaagatcaaatatttatttattaactatgcttggtgctgaagtaaatattgttgctccaacaaatttaatgccaaaagaaatcgaaaagtttggtgttaatacttttactgatatgaaaaaaggattgaaagattgtgacattgtaatgatgctaagattacaaaatgagagaatgacaagctcttatttatcgtcaaatagagagtattatgaatattatggtttaacaccagataaattggatcatgcaaaatctgatgcactaataatgcatcctggcccaatgaatagaggtatcgaaatagatactagattagcagacgatataaataaaagtgtaatcaaagaacaagttgaacttggagttgctgttaggatggcctgtttaaaaatattttgtgaataaa

SEQ ID NO: 230267 - DNA, 1294 bp, Unknown
  Bacterial polypeptide expressing nucleotide sequence isolated from the Sargasso Sea
catgagcgtcccacaacaagccttcctacgcgacgcgatgcgtcgcatgaacatgacccgcgaagcgttcgcgagccgtatcggcgtgtcgcgccgcgcactcgacacgtggctgctgccggacgattcgcaggaatcgcgcgccatgccggagatcgtggagcgtttcgtgtcggaaatcgtggtgcatggcgaaccaggcgaaaagcatacgcaaagcgtagactcgcagtcgcttgccagccagatgctgttcgagggcaaaccgcaactgctgtccgtcgatcaattctcgcgcgactcggtcgaagcgctgtttcgcgtcgccgacatcatgcagccgatcgcacggcgccgtaaaatctcgcgcgtgctcgaaggcgcggtactcggcaatctgtttttcgaggccagcacccggacccgcgtgagcttcggcgcggcgttctgccggctcggcggctcggtgtgcgacaccaccggcttcacgttttcgtcgatggccaagggcgagtcgatttacgacaccagccgcgtgatgagcggctatgtggatgcgctggtgatccgtcatccggagcaaggctcggtggccgaattcgcgcgcgccaccaacgtgccggtgatcaacggcggcgacggccccggcgagcatccgagccaggcgctgctcgacctgtacacgatccagcgcgagttctcgcgcctgggcaagattgtcgacggggcgcatatcgcgctggtcggcgacctgaaatacggccgcacggtgcattcgctggtcaagctgctggcgctctatcgcggcatcaagttcacgctgatctcgccgcccatgctcgaaatgccgagctatatcatcgagcagatttcacgcaacgatcatgtgatcgagcagactcacgatctgaccgccggcctgcgcggcgccgacgtggtgtacgccacgcgcattcagaaagagcgcttcaccgacgaatcgttcgaaggctacacgccggatttccagatcaatcaggcgctgatggacagcgtatgcggtgccgacacgttgatcatgcacccgctgccgcgcgacagccggccgggcgcgaacgatctaagcgtcgacctgaatcacgatccgcggctggcgattttccggcagaccgataatggcattccggtgcggatggcgattttcgcggtactgctgggcgtcgaaaagctggtccagcattcgatgcgcgacgccgcgtggcgcccgcccgcttatctcggtccggacgacgcggtgtttcacggcatcgattga

SEQ ID NO: 230268 - DNA, 748 bp, Unknown
  Bacterial polypeptide expressing nucleotide sequence isolated from the Sargasso Sea
atgaggggttggcaccatcgccacattctcgatctggcggccttctccagggaggattacgccgccgtgctcgatctggcggagcggtttcgttccctgcctgtcaccggtgcccgcaaactcccggctttgcagggccgtttggtggcgaccctgttcttcgagcccagcacccgcacccgtagcagctttgagctggccgccaagcgcctctcagccgatgtgcagagcttttcgccctccagcagctctctgagcaagggggaaagcgtgctggatactgcccgcacctatgtggccatgggcgcagatgtgttggtggtccggcatcgctccactggggtgccccagcaattggccgaggatctggagtcggctggggagcgcacggttgtgctgaacggcggcgatggcctgcacagccatcccagccagggattgctggatctgcacaccctggcccgtcacttcgcaccgcagcatccgatgccggaagcgttgcaggggcgacggatcgtgattgtcggcgacatcctgcactcccgggtggcccgctccaatctctgggccctcaccgcctgcggtgctgatgtggtgctctgcggcccgccgagtttggtgcctgatgccttccgtgagttcgtggaggctccgccgccgggcagtctgcggatccggttccacagcggggatcggtgcgggtggagcggcgtctggagcgtgccttgcccggcgcggatgcggtgat

SEQ ID NO: 230269 - DNA, 304 bp, Unknown
  Bacterial polypeptide expressing nucleotide sequence isolated from the Sargasso Sea
atgacgctgcgtctgcagaaggaacggatgacgcagcagctgctgacggggttggagcgataccaccgcgatttcgggctgagccatgagcggctcagcctgtgcgggcagcctgtgccggtgcttcaccccggtccggtcaaccgtggcgtcgagatgaccggagcgctgctggatgatccgtcgatctgtctggtggaggagcaggtgcggaacggggtcccgatccgcatggctttgctttacctaatggctgcggctgaatcggctgcggaatcgaccctggtatcaatcagctcctgag

SEQ ID NO: 230270 - DNA, 732 bp, Unknown
  Bacterial polypeptide expressing nucleotide sequence isolated from the Sargasso Sea
ttgaacttgctggaaaaagactcggtgcagatgttatgtcgatgaatatgggtaactcagcaattaaaaaaggtgaaactttaattgataccgcaatgacattaaacgcaatgcatcctgatataattgtaataagacatcaagattctggtgcttgtaatctattgtctcaaaaagttaattgtgttgtattaaatgctggtgatggaagacgtgagcaccctacccaagcattattagatgcattaacaattagaaatcgaaaaaaaaaaatacaaggattaaaaatagcaatatgtggtgatatacttcattcaagggtagctagatcaaatatttaccttcttacaatgttaggagctgaggttaatattgttgctccatcaaatcttatgccaaaagaaatagaaaagtttggtgtaaacacttttacagatatgaaaaaaggtcttaaagattgtgatattgtaatgatgcttagattacaaaatgaaaggatgactagttcatatctttcatcaaatagagagtactacgaatattatggattaacacctgacaagcttgatcatgcaaaatcagatgctttaattatgcatcctggtccaatgaacaggggtattgagattgatacgagattagcagacgacataaacaagagtgttattaaagaacaagttgaattaggtgttgctgtaagaatggcatgtttaaaaatattttgtgaataaa

SEQ ID NO: 230271 - DNA, 940 bp, Unknown
  Bacterial polypeptide expressing nucleotide sequence isolated from the Sargasso Sea
atggcaaccaaatcaaaagctattaaaattactcaaaaacatttattaggaattcaggatttatctatttctgatatcaatctcatattagaggaagctagcagcttcattaatttaaacaaaagtaaaaataaaaaattagatattttaaagggtaaaactcaaattaatcttttttttgaaccatcaacaagaacacaaagctcttttgaattagcaggtaaaagattaggtgctgacgtaatgtcaatgaacattacaaattcagcaattaaaaaaggtgaaacattaatagatactgccatgaccttaaatgctatgcatcctgatataatagttataagacatcaagactcaggtgcatgtaacctactttctcaaaaggtaaattgtgcagttttaaatgcaggagatggacgaagagaacatccaacacaagcattattagatgctcttacaataattaatagaaaaaaaaaaattcaaggtttaaaaattgcaatttgtggtgatattcaacactcaagagtagctagatcaaatatttatcttttaaatatgttgggtgccgaagttaacattgttgcaccctcaaatcttatgccaaaagaaattgaaaaatttggggtaaatatgttttcagatatgaaaaaaggagtaaaggattgtgacattgtaatgatgttgagattacaaaatgaaagaatgacaagttcctttctttcctccaacagagaatattatgaatactatggtttaacacctgacaaacttagatatgctaaagaagattgtatcattatgcatccaggaccaatgaatagaggaattgaaattgatacaaagttagctgatgacacaaatatgagtgttgtaaaagagcaagttgaattaggtgtagctattagaatggcatgtttgaaaattttttgtgaataat

SEQ ID NO: 230272 - DNA, 655 bp, Unknown
  Bacterial polypeptide expressing nucleotide sequence isolated from the Sargasso Sea
atggctgatgaagctgccaacttagggttttatcatacccacttgctcggaatagaaggtctttctagagccgagatttcttctttattagataaatcggaagaatatgtagaacaaaaccgcaaggcggacaaaaaagttgatttgcttcgcggcagaacgattattaatttgttttttgagaattctactagaactagaacctcttttgaactcgccggtaaaaggctcagcgccgatgtaataaatatggctatgggaaatagttctataaaaaagggcgagacactcatagatacagcaatgactttaaacgctatgcacccggatatattggtggtgaggcatggtgagagtggggcaacgcaattattagcagaaaaagtaaactgttcggttataaatgctggagatggcagccatgaacatcctacccaagccctgttagatgcacttactattagaagaagattaaaaaaattagaagggctagttattgctatatgtggcgatattgcccattctagagttgctcgatcaaatattcatcttttgggtactatgggagctgaagttagagtagtagcaccacccacactgctacccccagcggtcgaacagcttggtgtaacagtttttcacgatatgaaaaaag

SEQ ID NO: 230273 - DNA, 937 bp, Unknown
  Bacterial polypeptide expressing nucleotide sequence isolated from the Sargasso Sea
gtaaataatttattaggaataaaatatataaaaaaacaagacattgatttgatatttgatacagctgatcattttaaagaagtccttaatagaccaattaagaaagttccaagcttaagagatataaccattgcaaatcttttctttgaaaatagtacaagaacaaaattatcttttgaattagcagagaaaagacttagtgctgatataatcaatttttcaggctcatcctcatcaataaaaaaaggggagacattaatagatactgtaaataatattttagcaatgaaggtagatatgattgttattaggcaccctaaccctggtgctgctttattgctttccaagaatgttgattcatgtattgtaaatgctggtgatggaactaatgaacatcctacacaagcacttcttgatgcttattcattgaaagaaagattaggagatctagatggtaaaaaaatacttattgttggagatatactccactcaagagttgctttatcaaacatatatgctttgagactactaaatgctaaaataaaaatatgcagtcctttaagtctaatacctagagaaattgagtctttaggtgtatctattgaaactgacttagataaagctttgtcttggtgcgatgcagtcaatgtgttgcgagttcaacatgaaagaatggaaaaatcttattttcctaataatagagagtattctcttctctatggccttgataacaaaaggataagcaagttaaaaagagatatcttaattcttcatcctggaccaattaatagaggtgttgagattaaatctgatattgtagaatcaaataattcgattattttagatcaggtagagaacggagttgctattagaatggcaattatattcttattagcatcaaaaatgaatatttcaaaaagtcatgaaactgtttaaa

SEQ ID NO: 230274 - DNA, 533 bp, Unknown
  Bacterial polypeptide expressing nucleotide sequence isolated from the Sargasso Sea
tcccacacaagcgttattagatgcacttactataaaaaataaatttaaaaatttttcaaaattaaaaattgcgatatgcggggatattttacatagccgtgttgctcgatcaaacataatcattctatcaaagttaggtgcaaaaataaatgttattggacctaaggaatggctaccaaaaagtttaaataaactacctgtgaacgtttatacggaaatgaaaaatggattacaaagttgtgatattgttatgatgctacgtattcaaaaagaaagaatagttgggaaaataatgccgaatcaaaagacttattttaaaaagtacggtttagattacaataaacttaaatatgcaaaaaaaaatgctttcgttatgcatccaggtccaatgaaccgtggtgtagaaatagattcgaaacttgccgatgacgtcacgagaagcttaatacaagaacaggttgctatgggtgttgcagtacgaatggcatgcttagacttaattattaaaaacagagatgactttagtaagtagt

SEQ ID NO: 230275 - DNA, 811 bp, Unknown
  Bacterial polypeptide expressing nucleotide sequence isolated from the Sargasso Sea
tatgaattcaaagctacttaaatcaggacacataaaattatataaaagagaaaattcaaaatattggcaaatgaaagtgaaattgccaaaattaaaagcaatcagatcatctacaggttcaaaaattcttaaagatgcagaaaaaatagctttaaaatattattcatcaatttcttcaaaaacaaatatcaaattaaaaagaagtaaaaatatttttaaaaaaattcatttagtagaaacagctgatttaaccaagaaagaaattgagcacatcttagatgaatctaaaaaatatataacttttaataaaaggaaaattaaaaaaattaatgttttagaaggaagaacaatatttaatcttttttttgaagattcaacaagaacaagaacaagttttgaagttgctgctaaaaggctaggagcagatctcattaatgtagtggtaaaagatagttctattaacaaaggtgagaccttactcgatactatgactactattaattcaatgaatcctgacgttttaattgtcagacatccagaggaaggaattagtaaaaaaatttcagaaacagtagatgcgtctgtaattaacgcgggtgatggtagtcatgagcatcccacacaagcgttattagatgcacttactataaaaaataaatttgaaaatttttcaaaattaaaaattgctatatgcggggatattttacatagccgtgttgctcgatcaaacataatcatactatcaaagttaggtgcaaaaataaatgttattggtcctaaggaatggttaccaaaaagtctaaataaacta

SEQ ID NO: 230276 - DNA, 1147 bp, Unknown
  Bacterial polypeptide expressing nucleotide sequence isolated from the Sargasso Sea
tatgaattctaaaattcttaaatcaggccatataaaattatataaacgtgaaaattcacaattttggcaaatgaaattgaaattgccaaaacttaaatcaataagatcttcaacaggatctaaaattttaaaagaagcagaaaaaattgctttaaatcattattcttctttatctaaaaaaactaaaattaaagtaagaagaacaaaaaatatattcaaaaaaattcatttagttgaaacagcagatttaacaaaaaaagaaattgaacatatcttaaatgaagccaaaaaatatatattgtttaataaaaaaaaaataaaacatatgaatatacttgaaggacgaacaatatttaatttattttttgaagactcaacaagaacgagaactagttttgaagttgcggctaaaagattaggggctgatttgataaatgtagtagtaaaagatagttcgataaataaaggtgaaacattactggatacaatgactacaatcaattcaatgaatccagatgttttaattgtaagacatcctgaagaaggcattagtaaaaaaatttcagaaactgttgatgctagcattattaatgccggtgacggtagtcatgaacatccgactcaagcactacttgatgcattaactattaaaaataagtttaataatttttcaaaattaaaaattgcaatatgtggagatattctacatagtcgagttgccagatctaacataatcatactatcaaaattgggttcaaaaattaatgtagtaggacctaaagaatggttacctaaaagtttaagaaaactacctgtgaaagtatttactgacatgaaaaaaggattagagaattgtgatattgttatgatgcttcgaattcaaaaagaaagaatagttggaaaaattatgcctgatcaaaggagttattttaaaaagtatggattagactacaataaactaaaatatgctaaaaaaaatgcttttgtgatgcatcctggcccaatgaacagaggtgtagaaatagactctaaactagctgatgatatcacaataagtctaatacaggaacaagtagcaatgggagtggctgttagaatggcttgtctagatttgataatcaaaaatagagataacaatgttagttaa

SEQ ID NO: 230277 - DNA, 462 bp, Unknown
  Bacterial polypeptide expressing nucleotide sequence isolated from the Sargasso Sea
atatttgttgggttggtgatgcaaataataatgtcataaatagcctaatagaagcttcagttaaattttcattaaaacttaaaattgcttgtccaaaaaaatatgaacctaataaaaatttattaaattgggtaaaaaagcacaaaggaaaagttaaaatatttaacgatattaaaaaagcagctgagaaaagcgatgtaatttttactgataaagtaatctctatgaatgacaaagtaaacagattaagaaagttaaaagactttaaaaattttcaaataaattcaaaagttatgaattttgcaaaaagtgacgctatatttcttcattgtctaccaagaggacctgaggtttcagataaagtattttttggaaaacaatctaaagtttggcaacaagctttaaataggatttatgttcaaaaaagtattttattatattgttttggtaaactaaggtaat

SEQ ID NO: 230278 - DNA, 715 bp, Unknown
  Bacterial polypeptide expressing nucleotide sequence isolated from the Sargasso Sea
aatgagcaaagaaagattatacatatttgatacaactcttagagatggagctcaaacgcaaggagttgatttttctttggaagacaaagaaaaaattgctttagctttagacaatttgggagtggattacattgaagcaggatggcccggggctaacccaaccgacacagaattttttcaaaagaaatacgattttaaaaattcaaaattgacatcttttggaatgacaaaaaggtctggacgaagtgcagaaaatgatactggtttatctgcactcatgaactctaatacctctgcagtatgcttggttggtaagtcttgggactttcatgtcgatgttgccttaggaataacgaatgaagaaaatttagataatatttctgagagtacaaaacattttgttaaagcaaaaaaagaattcatgtttgatgcagaacatttttttgatggttataaagcaaatccaaaatatgcactctcatgtatcaaagctgcttatgatcaaggtgcaaggtgggtgatattatgtgatacaaatggaggtacacttccacatgaagttacacagatagttagtgatgttacaaaagtagtaccaggaaaaaacttgggaattcacgcacataatgatactggtaatgcggttgctaattcattagcagcagtattgtctggtgttcgacaaattcagggcacaataaatgggattgggtga

SEQ ID NO: 230279 - DNA, 1090 bp, Unknown
  Bacterial polypeptide expressing nucleotide sequence isolated from the Sargasso Sea
aatcctcaagattgcagaggggttgaagtcactttacgaaagaaactgctctacaaaagttttccaatcaggtctggcggtttccctgtttcgggatcattcgacacggactcggttttcttatgcctcggcggccaacctgctgggtttgaccgtacaggatctggatgagggaaaatcccagattgcccatggggaaacggttcgtgaaaccgcaaacatgatctccttcctcacggaagcaatcggcattcgggatgacatgtaccttggagcgggtaatgcctatatgcaggaaatagctgaatcccttgatcttgggagagcagatggtgtgctccaccaacgcccggtggtggtcaatctccagtgcgatatggaccatcccacccaatcaatggctgaccttcagcacctcgtccagacctatggatctctggaaaatctgaaaggtaagaaaatcgccatgacctgggcctattcgcccagttacggaaagcctttgtcggttccccagggcatcatcagcttgatgacacggttcgggatggaggtgacattggcccatccggaaggctatgacctggttccagaatgcatgaaaaacgctgcggaattcgcatccacatcaggcggtagtttttcagtcagtaactccatggaggaggcatttgcggacgcagatatcgtctaccccaaaagctgggcaccctataaggtgatggaaacccgaacggagctgctccgaaacaaggatcacaagggtttggaagacttggaacaaaaatgccttgcgcagaacgcgaaattcaccggatgggaatgtactgaatcattgatgaagactacccgggatggcaaagccctttatatgcattgcctgcctgctgacatcagcagtgtttcctgtgaaaagggagaagtagaagcgtcggtttttgatcgctatcggactccgacttacattcaggcaggttacaagccttacatcattgccgccatgatctttgcggcaaaatttgataatcccgcagcactgtttcaggacttgattcaacgtgatttgaagcgtgtgcataccatttcctga

SEQ ID NO: 230280 - DNA, 931 bp, Unknown
  Bacterial polypeptide expressing nucleotide sequence isolated from the Sargasso Sea
atgaaacattttataaatctaaaagatatacctgcaaaagatctgagaaagattattactgacgcaaagaatagaaaaagtttaagaaaaaaactaagcacattagaagttgacaagggtgcgcccttaaaaggtaaattattaattcaaatgtttgaaaaatctagtttgcgtactagattaagcttttatctagccatcaaacaacttggtggaggtactatgaccttgagatcaaatgagcttcatttgggtcaaggtggagaaagtattgctgatacggctaaaattctttcaacttatggtgatggatttatgcttagaaccgatagtaataaaaagattgaaaaatttgaaaagcatttatcaatacctgtaattaatggtttaagcccatcatctcatccaacccaagttttatcagatgtttttacagttgaggaaataaagaagaaacctatttcaaatttaaatatttgttggataggtgattccaataatgttttaaatagtttaatagctgcctcagtaaaattttccttcaagttacatattggttgtcctaaaaaatttgaaccaggaaaagaagttagatcttgggttaaaaaaaataataaaaaaatttatatttttaatgaagtaaaaaaagcagtctctggagcagatgtaattttttctgataaagtaatttctttaaatgacaaagttaataaaaagaaaaaaatacgagcatttaaaaattttaaaattgataaaaagttaatgagttatgcaaaaaaaaattgtatttttttacattgtttgcccagaggtgatgaagtaagtgatgatgtttttttaggtaaaaaatctcacgtttggcaacaagcactcaatagagttcatgttcaaaaaagtattttgttatattgttttggaaaattaaggtagt

SEQ ID NO: 230281 - DNA, 526 bp, Unknown
  Bacterial polypeptide expressing nucleotide sequence isolated from the Sargasso Sea
aatgagcaaagagcaattatatatttttgacacaacactaagagatggtgctcaaacacaaggagtagatttttctattgaggataaagaaaaaattgcatccgctttagacaatctcggtgtagattatattgaagctggttggccaggagccaatccaactgatactgaattttttcaaaaaaaacataattttaaaaattctaaacttacatgttttggaatgacaaaaagatctggtcgaagtgcagaaaatgatactggattatcagcgttaatgaattcaaatactccagcagtatgtttagttggaaaatcatgggattttcatgttgatgtcgctttaggtattaccaatgaagaaaatttagaaaacattagtgaaagtgcaaaacattttgttaaagcaaaaaaagaatttatgtttgatgcagaacatttttttgatggttataaagcgaatccaaaatatgcaatttcatgtgttaaagcagcatacgaccaaggggcaagatggatagtatta

SEQ ID NO: 230282 - DNA, 631 bp, Unknown
  Bacterial polypeptide expressing nucleotide sequence isolated from the Sargasso Sea
tatgatgatggatttatgcttagaactgatagcgataaaaagatcgaaaattttgaaaaatatttatcaatacctgtcattaatggtttaagtccttcatctcatccaacgcaagttttatcagatgtatttactgttgaggaaataatgaaaaaacctatttcaaaattaaatatttgttggattggtgattcaaataatgttttggatagtttaatagctgcatcggttaaattttcttttaaactatatattggttgtccaaaaaaatttgaaccaggaaaagaagttagagcttgggtcaaaaaaaataataagcaaatttatatttataatgatgcgaaaaaagcagtttctaatgcagacgtaattttttctgataaagttatttctttaaatgacaaagttaataagaagaaaaaaataaaagcgtttaaaaattttaaaattgataaaaaattaataagttatgcaaaaaaaagttgtatttttttacattgtttacccagaggtgatgaggtaagtgatgatgtttttttaggtaaaaaatctcatgtgtggcaacaagcactcaatagagttcatgttcaaaaaagtattttgttatattgttttggaaaattaaggtagt

SEQ ID NO: 230283 - DNA, 631 bp, Unknown
  Bacterial polypeptide expressing nucleotide sequence isolated from the Sargasso Sea
aattttaaaaaatggaaaaataaaaaagtattagaaatagggtttggtataggaactgatgcaatagaatttttgaaaaatggggcaaaatataatggaattgaattatcagataagtcgcatgaaattacaaagaaaagaattaaaatatttaattttaaagctgagacattgatatttgatgaagcagaaaatttatcaaaacattttagtaaaaaaaataatcttgatcttatttattcttttggagttttacatcactcctcaagtttacaaaaatgcttaagagaaatttataaaataatgtcacctaaaacagaattaaaagtaatgctctacgccaaaaatagttacaaatatatgatgatgaagaaaaaattattaagatacgaagctcaaaaaaatgtaccagttattgatttttacgatcacgaagatataaaaaaattattcagtaaatttaaacttaaagaagttagacaggattttatatttccttacaaaatcacaccatataaaaagaataaatatgtaaaggttgaacattttaagtatatgagtaaaaatatttttaatacatttagagaaaatttaggcgaacatcttcttataacagcaagaattaaataaa

SEQ ID NO: 230284 - DNA, 634 bp, Unknown
  Bacterial polypeptide expressing nucleotide sequence isolated from the Sargasso Sea
atgaaaaaatcatttagacatttcttgaaccttcatgaaattagtaaaaaagatattgacttaattttaaagtatagtcatagactaaaaaaaaataataaaacaaaacaattaaaagaaaaaaaaattttagcgattatttttgaaaaaccatccacaagaacaaaaatatcgtttgatgtaggtatgaaactcttaaatggagatgttgttactttggatcactctgactcacagcttggtagaggtgaatctttagaggatacaatgaaagttttgtcaagctatgttgatataatagcatatagaggttcagacgagtcaaaactttataagctttcagaaatttctactgtaccaataataaacggattaactgatataagccatccatgtcaaataatcgctgatataatgacattacaagaaaaatttagatctctcaataacttaaatttaagttggattggggacggaaataatgtttgtaactcttggatacatgcttctaaacacttcggtttcaatttaaaaatttcttgtccacctggaaattttccagaaaataaaattttaaaaacccttaattcgggaaaagttgaacttttcaaaacccggttgaagctgcactaga

SEQ ID NO: 230285 - DNA, 748 bp, Unknown
  Bacterial polypeptide expressing nucleotide sequence isolated from the Sargasso Sea
taagcttttatttagctatcaaacattaggcggtggtactttgactttaagatctaatgagcttcatttgggtcaaggtggagagagcattgctgatacggctaaaattctttcgacctatggtgatggatttatgcttagaactgatagcgataaaaaagtcgaaaattttgaaaaatatttaactatacccgtcatcaatggcttaagtccttcgtctcatccaactcaggttttatcagatgtttttactgttgaggaaataatgaagaaacctatttctaatttaaatatttgctggattggtgactccaacaatgttttagatagtttaatagctgcatcagtaaaattttctttcaagctaagtattggctgtccaaaaaaatttgaaccaggaaaagaagttagagcttgggtcaaaaaaaataataaacaaatttacatttataatgatgcaaaaaaagcagtttctggtgcagacgtaattttttccgataaagttatttctttaaatgacaaagttaataagaagaaaaaaataaaagcattcaaaaattttaaaattgataaaaaattaatgagttacacaaaaaaaagttgtatttttttacattgtttacctagaggagacgaagtgagtgatgatgtttttctgggaaaaaaatctcacgtatggcaacaagcactcaatagagttcacgtacaaaaaagtattttattatattgttttggaaaattaaggtag

SEQ ID NO: 230286 - DNA, 547 bp, Unknown
  Bacterial polypeptide expressing nucleotide sequence isolated from the Sargasso Sea
tatgaaacattttataaatttaaaagatatatcttcaaaagatcttagaaaaattatcgctgacgccaaaaacagaaaaagattaagaaaaaaacttagcactcttgaagttgacaaaggatctccgcttaaaggaaaaatattgatacaaatgtttgaaaaaccaagttcaagaacaagaataagtttttatttggcaatcaagcagttaggaggaggaactttaacgttaagatctaatgagcttcatttaggccaaggaggagaaagtattaccgatactgccaaagttctctctacttatggagatggttttatgttgagaacagatagtgaaaaaaaaatggaagattttaaaaaatatttatcaatacctataataaatggtttaagccctttatcacatccaacacaagtattgtctgatattttcactgttgaagaaattaaaagaaaacccatttcaaaattaaatatttgttggattggtgactctaataatgttttgaatagtttaattgctgcctcagtggaaattttcttttaa

SEQ ID NO: 230287 - DNA, 754 bp, Unknown
  Bacterial polypeptide expressing nucleotide sequence isolated from the Sargasso Sea
atgaagcactttatagatatagcagattttaactcaacacaattagacgcaataattaaaaaaggtaaagcactaaaaaaaaatccaaaacaattttctaaaaattgtaacaataaaactcttggcatgatatttcaaaaggagtcaactagaacaagagtaagttttaatgttgggttcaaaaaattgggtggccattgtcttgagctagacgctgactcaattggattcggaaaaagagaaaattacgaagatattattagagcattatctcaatatattgatattttaatgatcagaaatgataatcataaaataattagaaacttaagctcgctgaatgttttgccaataataaatggactctcagattatagccatccatgtcaaatattatcagacttattaacaataactgaaaaattaggagatattaaaaaacaaaaaatttgctgggttggtgattacaacaatgttttgagatctttgatagaattgcaagcaatatacaaattcaatctaaatgttgttatgccaaaagaaattttaagaaaaaatgcttctctacttgtgcaaaacaaaaaattaatgataactaatattattaatgaaggggtaaggtatgcagattgtgttatgacagacacatggatatcaatgggagaaaaatcaacaaaaaaaaaatactttaagaattatcaagtaaataatgaagtaatgaaaaattctagcaaaaatgcaatatttatgcact

SEQ ID NO: 230288 - DNA, 214 bp, Unknown
  Bacterial polypeptide expressing nucleotide sequence isolated from the Sargasso Sea
atgataaaacctaacaagcttgctaataataactttttatcaagcttggatatatcaactgatgaagttgttcatattttagaggttgcaaaaagtttaaaaaataaaaatctaaatattgaattaaaagataaagttttggggttgatttttgataagtcatctactcgaacaagagtcagttttcaagttgcgatgtcaagacttggaggaa

SEQ ID NO: 230289 - DNA, 651 bp, Unknown
  Bacterial polypeptide expressing nucleotide sequence isolated from the Sargasso Sea
aaaaactgaaaggaaagaaaatcgccatgacctgggcctattctcccagttacggaaagcctttgtcggtaccccaaggcatcatcagcttgatgacacggttcgggatggaggtgacactggcccatccggaaggctatgacctggttccagaatgtatgaaaaatgcttcggaattcgcctccacatccggcggtagtttttcggtcagtaactccatggaggaggcttttgcggacgcagatatcgtctaccccaaaagctgggcaccttataaggtgatggaaacccgaacggcactgctccgaaacaaggatcacaagggtttggaagacttggaacaaaaatgccttgcgcaaaacgcgaagttcacgggatgggaatgtaccgaagcattgatgaagactacccgggatggcaaagccctctatatgcattgcctgcctgctgacatcagcagtgtttcctgcgaaaagggagaagtagaagcgtcggtttttgatcgctatcgtaccccgacttacattcaggcaggttacaagccttacatcattgccgccatgatctttgcggctaaattcgataatcctgcagcattgtttcaggacttggttcaacgtgatttaaagcgtgtgcataacatttcctgaa

SEQ ID NO: 230290 - DNA, 496 bp, Unknown
  Bacterial polypeptide expressing nucleotide sequence isolated from the Sargasso Sea
ggagagcgcattgtgagatcaaacaagtgggaagggtggcatccaacccagatgcttgggtttcatatttcgaataaaaaagtcggcatagttgggatgggtaatataggccaagctattgcgcgacgctgtcatttcggttttggaatgcaggtgggatacttttctaggtctcccaaaaatttagattacccggtagatcgatatggctctttgaccgaattagcgtcgaatagtgatattcttgttatttctgtgccaggtggttcagcaactcaccacttaattaataaggatatattttccgcgatgcagccgcattcttattttgtgaatattgctcgaggcgatgttgtaaaagagatagatcttatcgaggcgctaagacttaatcaaatcgctggagctggattagacgtttatgaaaatgaacctaaggtgccaaaggatctaatctcaatggagaatgtagttttgctacctcatcttggcacgg

SEQ ID NO: 230291 - DNA, 533 bp, Unknown
  Bacterial polypeptide expressing nucleotide sequence isolated from the Sargasso Sea
acatccaacacaaattttaagtgatgtttttacaatagaggaaattaaaaaaaaacctatttcaaaattacaaatttgttggattggagatggtaacaataatgttattaatagtttaattgaggcttcgattaaattttcgtttaaattaaatattggctgtccaaaaaaatatgagccaaaaaaaactttattaatttgggctaaaaaaaataaaggtaaaattaaaatatttaattttagtaaaaaagcagcaattggtagtgatgtaatttttacagataaagttatctcaatgaatgagaaagttaataaattaaaaaaattaaaggattttaaaaactttaaagtaaattctaaattaatgaaatgtgcaaagaaagatgcaatttttcttcactgtttgccaagaggtaatgaagtttcaaatgaggttttcttaggaaaacaatcaagagtttggcaacaagctcttaatagagtttatgttcaaaaaagcataatactttattgtttaaataaattaaggtaat

SEQ ID NO: 230292 - DNA, 649 bp, Unknown
  Bacterial polypeptide expressing nucleotide sequence isolated from the Sargasso Sea
atgataaatcaagcctacatttatgattctatacgaacaccccgaggtaaaagaaaaaatggagcgctaaatgagattaccccaacagatttattatctaagcttatgattggtttatctgaaaaacataatctcgatacctctcaaatagacgatgtaatcattggttgcgttatgccggttggagatcaaggagcgaacttaggtaaaacagcagcccaatatgctggatgggatattgatgttccaggtatgcaaattagtagatgctgcggttctggtcttgaggctgtaaatattgcagctatgaaagtgaggtctggatgggaagagctcatcgtagctggtggtattgaatcaatgtccagagtccctatgggttcagatttaggttcaatggcttttgagcctaaagttagcctaaataacaattatgttccacagggcataggggcagatctaattgcatcaatagatggttacgcgagaaatgatctagatgaattggcgcttcaatctcataaaagagcatttgatgctcaaaagaaaaaaaaattcaagtcaatgattccaatctttgatcaaaatggcattcttttgattgataaagatgaacatattaggcaagactgcagtcttcaggatttat

SEQ ID NO: 230293 - DNA, 193 bp, Unknown
  Bacterial polypeptide expressing nucleotide sequence isolated from the Sargasso Sea
catgcactgggtttgccagcgtttcacaagtcgaaacaccaagatcggtgaagaagtgtttcagaaatttggtcttgatgggctcgaagtaactgaagatgtgttcgaatccgacaagtctgttgtctttgatcaggctgagaaccgcttgcacacaatcaaggcgatcttggtggccacactaggttcatga

SEQ ID NO: 230294 - DNA, 469 bp, Unknown
  Bacterial polypeptide expressing nucleotide sequence isolated from the Sargasso Sea
tatgaataattttataaatatttctgatttgtcaaagaatgaattaagagccattattgatggtgctaaaaagagaaagtctgaaagaggaaaaaaacctaactctcaacctgattcagaccaaccaatccaaggaaagaccatgatcatgttttttgccaaaccctcaacaagaacaagaatttcttttgatctagcagttaaacaattgggtggatcatccattatactaaatcaagacgaaattcattatggcaagggagacgaaacaataaaagacacagcgaaagttctttcccagtacggagacattcttatgataagaacagattcacataaagatattaatgaatttaaaaaatatttagaaataccaatcattaatggacttactaacttgagtcatccatgtcagattatggctgatattttaacctttgaagaatcaaagggagacatagagggaaaa

SEQ ID NO: 230295 - DNA, 850 bp, Unknown
  Bacterial polypeptide expressing nucleotide sequence isolated from the Sargasso Sea
ttaagaaaaaaactaagcacattagaagttgataagggtgcacccttaaaaggtaaattattaatccaaatgtttgaaaaatccagtttgcgaactagattaagcttttatttagcaatcaaacaactcggtggaggaacaatgaccttgagatctgatgaactacatttgggtcaaggtggggaaagtattgctgatacagctaaaattctttcaacttatggcgatggatttatgctaagaaccgatagcaataaaaagattgaaaagtttcaaaagcatttatcaatacctgtaattaatggtttaagcccatcatctcatccaacccaagttttatcagatgtttttacagttgaggaaataaagaagaaacctatttcaagtttaaatatttgttggataggtgactccaataatgttttagatagtttagtagctgcatcagtaaaattttctttcaagttgaatattggttgtcctaaaaaatttgaaccaggaaaagaagttagatcttgggtcaaaaaaaataataaaaaaatttatatttataatgatgcaaaaaaagcagtgtctggagcagatgtaattttttctgataaagttatttctttaaatgataaagttaataagaagaaaaaaatactagcatttaaaaattttaaaattgataaaaaattaatgagttatgcaaaaaaaaattgtatttttttacactgtttgcccagaggtgaagaggtaagtgatgatgtttttttaggtaaaaaatctcacgtgtggcaacaagcacttaatagagttcatgttcaaaaaagtattttgttatattgttttggaaaattaaggtagt

SEQ ID NO: 230296 - DNA, 535 bp, Unknown
  Bacterial polypeptide expressing nucleotide sequence isolated from the Sargasso Sea
ggatcaaagtcacccatgtcaggttatgtcagatattttaacctttgaggaaaataacggaaatatagaaggaaaaactatctcatggataggtgatggcaataataatatgtccaactcgtttatagaggctgctgtaaaatttaagtttaatttaaaaattggatgcccaaaaaaatatagtcctagcgacaagatattaaaatgggcttcaaagaataaatctaaaatttttgttactaaagacccaagagaagctgcaaaagatgcagactgtattatgactgacaaatgggtttctatgaatgataaagtaaacaaaaaagcaaaaaagaaatctttaaaagactatcaagtaaataaaaaactttttaaacttgctaaaactgattgtatatttatgcactgtctacctgttggtagaggtgaagaagtagctgacgatattatagatggaaataaatcagtcgtttggcaacaagcctataatagagttcacgcgcaaaaaagtattattaattggtgcttaaattaa

SEQ ID NO: 230297 - DNA, 830 bp, Unknown
  Bacterial polypeptide expressing nucleotide sequence isolated from the Sargasso Sea
tatgaagcgagatttcatatcaattttggattggacaagtgaggaaatacggaacaatcttaattatgcgttcgaattaaagcaacaaacaaaaaaagggagctgccctaagttgcttagcgggaaaacatatggaatgttttttcacaaaccttctcttcgtactcggctatcattcgaagtgggaattgttcaactgggcggcactgccataaatttatcagaacaggattttaaaattggtaaaagggagtccgttagtgatattgctcgagtaatgtctcgatatgtagacggaatactgattcgcactttttctcatcaactggttatggacttgtcaaaatactcaacagtacctgtaataaacatgttgaccgattttaatcatccatgccaagtaatgtcagacatgctcactattaaagaaaaattaggacgcattgacaatgtccgcatagcatatgtcggcgacagcaacaacgttacaaattcatggctgaacatggcttccagagttcacttggaccttcgaatagcaactgctcctgagaccgaacctgatgttaaacttgtttctaaaataagagaatcaggaatttctaatattctagttactcaatctgctaaagaagctgtgcaagatgtagatataatttatacagacgtctgggcaagtatgggtgaaaaaaacaaaattgatgaaagggaaagaatattaaaagattttcaagtaaactcaagactgttagaatatgcaaggaatgatgtacttgtatttcattgtctacctgcagaaaggggcaaagaaattaccaatgaagtcattg

SEQ ID NO: 230298 - DNA, 538 bp, Unknown
  Bacterial polypeptide expressing nucleotide sequence isolated from the Sargasso Sea
atgaataaaaatatccgtcatttccttcgtgtaagcgatctctcgtactacgaaattcaaaagttatttgaaagatctaccgtattaaaaaaacaggtcgaagagcaagtgtttgaacaaaaattacacaaccgtactttgatattactgtttgaaaagcactcaactagaacaaggttgtcctttgaagttggtatgcagcagcttggaggaaattctattgtcttgcaaatgagagacacgcaaattgatcgaggagaaactatagaagatgctgcacgagtaatatctcgaatgtgtgacattatcatgttgcgcacttttgaacactcaaaaatcgaagcgttcgcaaaaaactcaacggccccaataatcaacgggttaactaatgaacatcatccatgtcaagtcctttccgatattttcacctttcaagaacaaagaggtaatattctaggaaaaacaatttcctggattggagatataaataatatgtgtgcgtcttggattgaggcctacaaatatctttggatttaaa

SEQ ID NO: 230299 - DNA, 726 bp, Unknown
  Bacterial polypeptide expressing nucleotide sequence isolated from the Sargasso Sea
aacttggaggaggaacaattactttaagatctaatgaattacatttaggtcaaggcggtgaatctttagaggatacagctaaaatattatcgacatatggtgatgggtttatgttgagaaccgacagcgatcataaagttgataattttaaaaaatatctttctattccagtaattaatggtctttctccttcatctcatccaacacaagtattatctgatatttttacagttgaggaaattaagaataaatcaatatcgaaacttaatattgcctggattggtgactgcaataatgtattaaatagcttaatagcagcttctgttaaattttcatttaaattatcaatcggctgtccaaaaaaatatgaaccaaaaaagtttattttagactgggtaaaaactaataagaaaaaaatacatatttttaataatgtaaaaaaagctgctactaatgctgatgtcatattttctgataaagtaatatcacttaatgataaggtcaataaaaccaagaaacttcaacagtttaaaaaatttagaatagatcagaaagtgatgagtttcgcaaaaaaagattgcatttttttacattgcctaccaagaggtagtgaggttgatgaaaaagtatttagtagcagtaaatctaaagtatggttacaggctctaaatcgagtgcatgttcaaaaaagtattttattgtattgttttggaaaattaaggtagc

SEQ ID NO: 230300 - DNA, 310 bp, Unknown
  Bacterial polypeptide expressing nucleotide sequence isolated from the Sargasso Sea
aaagttaacaattacttcgcaacctctagaagcggttacaggtgctgattgtgtaatgactgataaatggatctcaatgaatgataaagtaaataaaacttctaaaaagaaaattttaaaaccttatcaagttaataagaaattaatgagcaaggcaaattcagatgctatttttatgcactgccttccagtaggaagaggagaagaggttacaaatgaagtaatagatggaaagcaatcagttgtttggagacaagcgctaaatagagtacatgctcaaaaaagtattattaagtggtgtctggactaa

SEQ ID NO: 230301 - DNA, 448 bp, Unknown
  Bacterial polypeptide expressing nucleotide sequence isolated from the Sargasso Sea
agctccgtcaccgttttatctgcgccaggccagcatggacgatttcgagttcgctgaggcgctgacccgcaacaacatgggtggctactatcgccggcaccatctggtctggcgtggcgatctctttctcggcagttggcgcgagtcggaaaatttcattctcgaagtggatggcgagccgatcggcgtgctgcgcatcacgcaagaaggggattcgctgcacatccgcgacgtgcagattgccgaagggcatcggcggctcggcgccggcacgtatctgctcgacatctcgcatcagtgggcacgcgagcgcgggctacgcgagttgcagttgcgcgtgttcgtcgacaatcccgccgcgcgcttgtatcagcgcaaggggtataagctgaccgggccgcgtctggcgcaactcggcgcgatccgtcatctggcgcggcgcgtctga

SEQ ID NO: 230302 - DNA, 658 bp, Unknown
  Bacterial polypeptide expressing nucleotide sequence isolated from the Sargasso Sea
atgagcaaagaaagattatacatatttgatacaactctaagagatggagctcaaacgcaaggagttgatttttctttagaagataaagaaaagattgctttagctttagacaatcttggtgtggattatatagaggcaggatggcctggggctaacccaacagatacagaattctttcaaaaaaaacatgattttaaaaattcaaggctaacgtcttttggcatgacaaaaagatctggaagaagtgcggaaaatgatattggtttatctgcacttatgaactctaatacctctgcagtatgcttggtaggtaagtcctgggactttcatgttgaagttgctttaggaataacaaatgatgaaaatttagataatatttctgagagtgccaaacattttgttaaagcaaaaaaagaatttatgtttgatgcagagcatttttttgatggttataaagcaaatcgaaaatatgcactttcatgtatcaaagctgcttatgatcaaggtgcaaggtgggtgatactatgtgatacgaatggaggtacacttccacatgaagttgcacagatagtaggcgaagttacgaaagtagtaccaggaaaaaatttaggaattcatgcacataatgacactggtaacgcggttgcaaattcattag

SEQ ID NO: 230303 - DNA, 772 bp, Unknown
  Bacterial polypeptide expressing nucleotide sequence isolated from the Sargasso Sea
aatgaaacattttataaatttaaaagatatccccagtaaagatcttagaaaaataattgttgatgcgaaacaaagaaaaaaacaaagaaaaaaattaaatactctagagccagacaggggatcacctcttagaggtaaaatgctagtacaaatgtttgaaaaagctagttcaagaacaagaataagcttctatttggcgattaaacagcttggtggaggaacattgacacttagatctaacgaacttcatcttggacaaggtggtgagacgattgctgataccgctaaaattttatctaaatatggtgatggtttcatgttgagaactgatgatgatagaaaaattgaagattttcagaagcatctaactatcccaataataaacggtttaagtccatcatctcatccaactcaagtattatcagatatttttactattgaggaaataaaaaaaaaaccaatatcaaaattaaaaatttgttggattggagattccaataatgttttggacagcttaatagctgcatctgttaagttttcatttagattaagtattgggtgtccaaaaaaatttgcaccaggcaaaatagttaaaaattgggtaagaaaaaacaagaaaagaatctttatttatcatgatccaaaaaaagcagccatggatgcagatgtaattttctctgacaaagtaatatctctaaatgataaagtgaacaaaaaaagaaaaatacaacagtttcaaaaatttaaaattaaaaaagagatatttaaatat

SEQ ID NO: 230304 - DNA, 134 bp, Unknown
  Bacterial polypeptide expressing nucleotide sequence isolated from the Sargasso Sea
tttggcaattaaacagttgggaggaggaactttaacattaagatctaatgagctgcacttaggccaaggaggagaaagtattactgatacggccaaagttctctctacttatggagacggttttatgctgagaa

SEQ ID NO: 230305 - DNA, 571 bp, Unknown
  Bacterial polypeptide expressing nucleotide sequence isolated from the Sargasso Sea
aatgagcaaagagcgattatatatttttgacacaacactaagagatggtgctcaaactcaaggagtagatttttctattgaggataaagaaaaaattgcctctgccttagacaatcttggtgttgattatattgaagctggatggcctggagctaatcctaccgatactgagttttttcaaaaaaaacataattttatgaattctaaacttacatgttttggaatgacaaaaaggtcaggccgaagtgcagaaaatgatacaggattatctgcgttaatgaattcaaatacttctgcagtttgtttggtaggaaagtcatgggattttcatgttgatgtagctttaggaataaccaatgaagaaaacttagaaaatataactgaaagtacaaagcattttgttaaagcaaaaaaagaatttatgtttgatgctgaacatttttttgatggttataaagcaaatccaaaatatgcgttatcatgtataaaagctgcttatgaccaaggagcaagatgggtagtattatgtgacacaaatggaggaacgctcccacatgaagtttcaaaaata

SEQ ID NO: 230306 - DNA, 737 bp, Unknown
  Bacterial polypeptide expressing nucleotide sequence isolated from the Sargasso Sea
agctatcaaacaattaggtggtggcactttaactcttcgatcaaatgaacttcatttaggtcaaggcagagaaagtattgctgatactgcaaaaatactgtccacttacggtgatggatttatgcttagaactgatagcgataaaaaggtcgaaaattttaaaaaatatttatcaatacctgttatcaatggcttgagtccttcatctcatccaactcaggttttatcagatgtttttactgttgaggaaataatgaagaaatccatttctaatttaaatatttgttggataggtgactccaataatgttttagatagtttaatagctgcatcagtaaaattttctttcagactaagtattggctgcccaaagaaatttgaaccaggaaaagaagtaagagcttgggtaaaaaaaaataataaaaaaattaatatttataatgatgcgaaaaaagctgtttctaacgctgacgtaattttttctgataaagttttttctttaaacgacaaagttaataagaaaaaaaaaatacaagcatttaaaaattttaaaattgataaaaaattaatgagttatgcaaaaaaaagttgcatttttttacattgtttgcctagaggtgatgaggtaagtgatgatgttttcttaggtaaaaaatctcacgtgtggcaacaagcactcaatagagttcatgtacaaaaaagtattttattgtattgtttcagaaaattaaggtagc

SEQ ID NO: 230307 - DNA, 196 bp, Unknown
  Bacterial polypeptide expressing nucleotide sequence isolated from the Sargasso Sea
aatgactgacaaaggggtttcaatgaatgataaagtaaataaagttactaaaaagaaaactttaaaaccttaccaggtaaataagaaattaatgagcaaagcaaattcagaagctgtttttatgcactgccttccagtaggaagaggagaagaagttacaaatgaggtaatagatggaaagcaatcagttgtttgg

SEQ ID NO: 230308 - DNA, 484 bp, Unknown
  Bacterial polypeptide expressing nucleotide sequence isolated from the Sargasso Sea
aaaaaaaaaacccatatcaaaattaaaaatttgttggattggagactccaatcatgttttggatagtttaattgcagcatccgttaagttttcctttagattaagcattggatgtccaaaaaaatttgcgccagacaagaaagttaaggattgggtaattaaaaacaagaaaaaaatttttattcatcatgacccaaaaaaagcagctttggatgcagatgtaatattttctgataaagtaatatctttaaatgacaaagtgaacaaaaaaagaaaaaaacaacattttcagaaatttaaaattaaaaaagagatttttaattatacaaaaaaaaattgtatttttttgcactgcttgccaagaggagatgaagttgacgaagatgtattcctgggaaaaaattcctatgtttggcaacaggcgttgaacagagttcacgttcaaaaaagtattttgttgtattgttttggaaaattaaggtag

SEQ ID NO: 230309 - DNA, 265 bp, Unknown
  Bacterial polypeptide expressing nucleotide sequence isolated from the Sargasso Sea
atgacaaaaagaattagacattttcttaacattaacgagctctcaacaaaagaaatgttgttaattatacaaaagggtcattttctaaaaaaaaactatggtagaaagtttttaaaagaaaagaaaattcttgcaatgatatttgagaaaccttctacacgaacaaggatttcttttgaagtgggaatgaaaaaattaaatggagatgttgttgtattagatcagcattatagtcaattaggacgtggtgagtcttgcaggatac

SEQ ID NO: 230310 - DNA, 827 bp, Unknown
  Bacterial polypeptide expressing nucleotide sequence isolated from the Sargasso Sea
aaaaaaaattttaataacaaccggtggttcaggtggacatactattcccgcaaccatattatttgatcatctaaaaaaaaattttgaggtatttttagaaacagataaaagaggtgcaagttttatagattctaacaaatacaaatataaagttttttcatctgtaaagttagatagtttttttacaattcctataaatttatttaaaatcattatactttttgttaattcaattatttatttaaaaaaaaataattttaatattattattagtacaggtggatatatgtctatacccacatgttttgcagcaaaaattttaggattggatatttttttattagaaccaaatatggcgattggaagatcaaatagattttttttaaattttacaaaaaaaattttttgttactcgacaaatttaaaatattttccaaaaaaatatgaaaaaaaaattacagttataccttcgttattaagaaaagaagtatatgagattaaaaaaaacaaagaaaaagaatataaaaagttcaaaattttaattattggaggaagccaaggagcaatgatttttgaaaaaaaaataattcctctaattattcagttatcaaaaaaactaaatatttctgtataccatcaaattaaatttgatgaaaaaaaatacaaagaaatatcagaaacatatcagaaaaataatataaattttgaattatttaattttaaacacaatatacttaaatatatttctgaaagtgatttagttataacaagagcgggggcatcaactttagcagaattagtatatttaaatattccatttgtagcag

SEQ ID NO: 230311 - DNA, 597 bp, Unknown
  Bacterial polypeptide expressing nucleotide sequence isolated from the Sargasso Sea
aatgagtaaagaacgattatatatatttgatacaacattaagagatggtgctcaaactcaaggagtagatttttctattgaggataaagaaaaaattgcatctgctttagataatcttggtgttgactatatcgaaggtggatggcctggagctaatccgactgatacggagttttttcaaaaaaaacacaattttaaaaattcaaaacttacatcttttggaatgactaaacgatcaggtcgaagtgcagaaaatgatactggattatcagcattaatgaattcgaatacttctgcagtttgtttagttggaaagtcatgggattttcatgttgatgtagctttagggattactaatgaagaaaatttaaataatataagcgagagtactaaacattttgttaaagccaaaaaagaatttatgtttgatgctgaacacttttttgatggttataaagcaaattcaaagtatgcactttcatgcattaaggcagcttacgatcaaggggcaagatgggtggtgctatgcgatactaatggaggaacacttccgcatgaggtatcaaaaatagtatccgaagtatcaaaagttgttcc

SEQ ID NO: 230312 - DNA, 643 bp, Unknown
  Bacterial polypeptide expressing nucleotide sequence isolated from the Sargasso Sea
aattctctcgacctatggtgatggatttatgcttagaactgatagtgataaaaaggttgaaaattttgaaaaatatttatctataccggtcatcaatggtttaagtccttcatctcatccaacacaggttttatcagacgtttttacagttgaagaaataatgaagaaacctatttctaatttaaatatttgctggataggtgacactaacaacgttttagatagtttaattgctgcatcagtaaaattttctttcaaactaaatattggttgtccaaaaaaatttgaaccaggaaaagaagttaaagcttgggtcaaaaaatataataagcaaatttatatttataatgatccaaaaaaagcagttttaaatgcagatgtaattttttccgataaagttatctctttaaatgacaaagttaataagaagaaaaaaattaaagcgtttaaaaattttaaaattgataaaaaattaatgagttatgcaaaaaaaagttgcatttttttacattgcttgcctagaggtgacgaagttagtgatgatgtttttttaggtaaaaaatctcatgtatggcaacaagcactcaatagagttcacgtgcaaaagagtattttattatattgttttggaaaattaaggtag

SEQ ID NO: 230313 - DNA, 598 bp, Unknown
  Bacterial polypeptide expressing nucleotide sequence isolated from the Sargasso Sea
cggaaagcctttgtcggttccccagggcatcatcagcttgatgacacgttttggaatggaggtgacactggcccatccggaaggctatgacctggttccagaatgcattaaaaacgcttcggaattcgcctccacatccggcggtagtttttcggtcagtaactccatggaggaggcatttgaggatgcagatatcgtctaccccaaaagctgggcaccttacaaggtgatggaaacccgaacggaactgctccgaaacaaggatcacaagggcttggaagacttggaacaaaaatgccttgcgcagaacgcgaagttcaccggatgggaatgtaccgaagcattgatgaagactacccgtgatggcaaagccctttatatgcattgcctgcctgctgacatcagcactgtttcctgtgaaaagggagaagtagaagcgtcggtttttgatcgctatcggactccgacttacatccaggcaggttacaagccttacatcattgccgccatgatctttgcggcaaaattcgatgatcccgcagcactgtttcaggacttgattcaacgtgatttgaagcgtgtgcataccatttcctga

SEQ ID NO: 230314 - DNA, 223 bp, Unknown
  Bacterial polypeptide expressing nucleotide sequence isolated from the Sargasso Sea
gtaaataaaacttctaaaaagaaaattttaaaaccttatcaagttaataagaaattaatgagcaaggcaaattcagatgctatttttatgcactgccttccagtaggaagaggagaagaggttacaaatgaagtaatagatggaaagcaatcagttgtttggagacaagcgctaaatagagtacatgctcaaaaaagtattattaagtggtgtctggactaag

SEQ ID NO: 230315 - DNA, 316 bp, Unknown
  Bacterial polypeptide expressing nucleotide sequence isolated from the Sargasso Sea
aaagtaaaattaataattacttctaaacctctagaagcagctacaggtgctgattgtgtaatgacagataaatggatctctatgaacgacaaagtaaataaaatttctaaaaagaaaactcttaaaccttaccaagtaaacaagaaattaatgagcaaagcaaattcagatgctgtttttatgcattgtcttccagtaggaagaggagaagaggttacaaatgaagtgatagatggaaagcaatcagtggtttggagacaagcactaaatagagtgcatgctcaaaaaagtattattaaatggtgtatcgattagg

SEQ ID NO: 230316 - DNA, 838 bp, Unknown
  Bacterial polypeptide expressing nucleotide sequence isolated from the Sargasso Sea
gactgggatgcttacaaaaaagaactacaagctaggcaagatcctaccgtcaacagtcttggtatgatctttgaaaaacttcaaagagatcctaaaagagttattttcgccgaaggtgagcagccagaaataatcagagttgctgccttgtggcgtgacaatggttacggaacccctattcttgtaggcaaagaagaaaaggtcttagcaacaatgaaaggggccaacatcaaccctaatggaatcgagatctataatgcagcaatttgcgatgaaaatagtaagtatgtcgatcacatatatcaaaaattacaaagagaaggtgtcttatactcagattgtaacagaatggtaaaaactgatcgtaatgtatttgcttcagcaatgttagagtgcggcaaggctgacggtatggttactggattaaccagaggctacagaaaatcgctaactgatgttaagcaggtaattcaaaataaagaagatcatgtattgatgggtgtttctatggtcatatctaaaggtagaaccattttcatttcagacagcgcttgctcagaaatatcctcttctgaaagattggcacaaactgcgattcagactgctaataaagtacgagatttaggatatgagccaagagttgctttcatctcattctcaaattttggtagcgctttgaaaactgaatccactagaattaaagaagccgttaaaattcttgatgaaagagaagtaaactttgagtatgatggcgaaatgagtgcagatgttgcacttaatgctgataaattaactaagtacccgttttgcagactttcagagcccgcaaatatttaat

SEQ ID NO: 230317 - DNA, 709 bp, Unknown
  Bacterial polypeptide expressing nucleotide sequence isolated from the Sargasso Sea
aatgaaacattttattaatttaaaagatattcctgcaaaagatctaagaaagattattactgacgctaaaaaaaggaagaaacaaagaaagaaactgaataatcttgaggttgataaaggaagtcctttaagaggaaaattgttagtacaaatgtttgaaaaatctagcttgagaactagactaagtttttatttagcaataaaacaattaggtggtagcactctaacactcagaccagatgaactccatttatcaaagggaggagaaagtattcaagatacagcaaaagttttatcaaattttgggaatgcatttatgctcagaacttctaatgatgaaaaattagaagaattcaaaaaatatttatctataccaataatcaatggtttaagtcctagttctcatccaactcaaattttatcagatatttttactgttgaggagattaagaagaagccaatatcaaagctgaacatcacttggattggtgactctaacaatgtcttgaattctttaatcgcagcatcaattaaattttcttttaaactcaatattggatgtccaactaaatatcaaccaagtaaaataataatgaaatatattaaaagtaataataataaaatacgcatattacacgatccaaaaaaagcagctaaaggagctgatgttattttttcggacaaagtaatttccatgaacgataaagga

SEQ ID NO: 230318 - DNA, 499 bp, Unknown
  Bacterial polypeptide expressing nucleotide sequence isolated from the Sargasso Sea
actggttgaagagataaaaaaaaaaccaatatcaaaattaaaaatttgttggattggagattctaataatgttttggatagtttaattgcagcatccgttaagttttcttttagattaagtattgggtgtccaaaaaaatttgcaccaagcaagaaagttaaagattgggtaactaaaaataaaaaaaaaatctttgtttatcatgatccaaaaaaagcagctttggatgctgatgtaattttttctgataaagtaatatctctaaatgacaaagtgaacaaaaaaagaaaaaaacaacagtttcaaaaatttaaaattaaaaaagagatatttaattactcaaaaaaaaattgtatttttttgcattgcttacctagaggagatgaagttgaggaggacgtatttttaggaaaaaattctcatgtatggcaacaggcattcaacagagttcatgttcaaaaaagcattttattgtattgttttggaaaactaaggtag

SEQ ID NO: 230319 - DNA, 292 bp, Unknown
  Bacterial polypeptide expressing nucleotide sequence isolated from the Sargasso Sea
atggttaaaaattttattgacataaattattttaacaaaaaacaactagatgaaataattattcttgcaaaaaaaataaaaaaaaatccaaaaaaattctcttctttttgcaaagataaaacattaggtatgatttttgaaaagcaatctttaagaaccagattaagtttcaacattggtatgcaaaagcttggaggaagagttttagaacttaatagtaatgatataggatttgataataaaagagaaaaaccagaagatatattaaatgttttgtctcaagtatattgat

SEQ ID NO: 230320 - DNA, 568 bp, Unknown
  Bacterial polypeptide expressing nucleotide sequence isolated from the Sargasso Sea
atgaaacattttataaatttaaaagatataccaagtaaagatcttagaaaaataattgttgatgcaaaacaaagaaaaaaacaaagaaaaaaattaaatactttggagccagacaaaggatcgcctcttaaaggtaaaatgctagtacaaatgtttgaaaaagcaagttcaagaacaagaataagcttttacttagccattaaacagcttggaggcggaacattgacgcttagatctaacgaacttcatcttggacaaggtggtgagacaatagccgatactgctaaaattttatctaaatatgctgatggtttcatgttgaggactgatgatgataaaaaaattgaagattttcaaaagtatttaactatccctataataaacggtttgagcccttcatctcatccaacacaagtgttatcagatatttttactgttgaggaaataaaaaaaaaaccaatatcaaaattaaaaatttgttggattggagactccaataatgttttggacagtttgattgcagcatctgttaagttttcttttagattaagtatggatgtccaaaaaa

SEQ ID NO: 230321 - DNA, 266 bp, Unknown
  Bacterial polypeptide expressing nucleotide sequence isolated from the Sargasso Sea
tatgaacaattttataaacatatctgatttatcaaaaatagaattaagatctattattgatggtgctaaacaaaggaaatcaaaaagaggagataagccgcattcactcccagatactgagcaaccacttcaaggcaagactatgattatgatttttgaaaaaacttctaccagaaccagaatatcttttgatttagccgtgaggcaattaggaggttcatcaataattcttaatcaagatgaaattcattacggcaagggtgatg

SEQ ID NO: 230322 - DNA, 637 bp, Unknown
  Bacterial polypeptide expressing nucleotide sequence isolated from the Sargasso Sea
atctacttattgtgatggttttatgttgaggactgatagtgatcataaagttgatagttttaaaaaatatctttcaataccggttattaatggtctttctccatcgtctcacccaacacaagtattatctgatatttttacagttgaagaaatcaaaaaaaaattaatatcaaaattgaatattacttggattggagattgtaataatgttttaaatagtttaattgctgcgtcagtcaagttttcatttaaactatctattggttgtccaaaaaaatatgaaccaaaaaagttaattttaaattgggtaaaaaaaaataataaaaaaatccatatctttaatgatccaaaaaaagcagccctaaatgctgatgttatattttctgataaagtaatatcaatcaacgataaagttgataaaaaaaaaaaattaaaaaatttttcaaagtttaagattaataaaaaactaatgagttatgcaaaaaaagattgtatatttttacattgtttaccgagagggaccgaggtcgaagataaggtatttagaagcaatcaatcaaaggtttggttgcaggccttaaacagagtacatgttcaaaagagtatattgctttattgttttggaaaattaaggtaa

SEQ ID NO: 230323 - DNA, 592 bp, Unknown
  Bacterial polypeptide expressing nucleotide sequence isolated from the Sargasso Sea
atgaccaaaaatttagatttaaatggccttcaatcaatagctcataattatgatcttttttatatagacttatggggtgttattcataatgggatcaatcttcatgaacaggcaatagctgtcctaaaagaacttttaaaaaacaacaaaatggttgtacttttaactaatgcacccaggccaaacgaaactgttaggaattttttacagaagatgggaatggataaagaattaagggaacatgtttttacatcaggtgaagctgcattaaactatttaaaaaaatcttttaaatcgaaaaaattttttcatataggtccacccagagattttgatttatttaatttgtttgagaaaaataagtctgcggatattattgaaagtgaatatttattgtgtacaggactatttgataatcatgataaggatttgatttattacaaaagtttacttgaaaaacatataaacaaaaaaatgatttgtacaaatccagatttaatcgtagatcgtggcaatgttagagagctgtgtgctggttctgttgcaatgatttttgaaaaaatgggtggtgaagtaatatattttggaaaac

SEQ ID NO: 230324 - DNA, 274 bp, Unknown
  Bacterial polypeptide expressing nucleotide sequence isolated from the Sargasso Sea
aatgctaaaaccgatcaagcttgcaagtaaaaattttttatcaagcttggatacttcctgtgaagaatttcttcatattttagagttagcaaaaaattttaaaaataaagatctaaatataaaactcaaagaaaaagttttagggttaatttttgataagtcatcaactcgcaccagagttagctttcaggtagcaatgtcaagacttggcggtaccacagttgatctaaatcctactacttcacaaatgggaggggagagccgattagagata

SEQ ID NO: 230325 - DNA, 112 bp, Unknown
  Bacterial polypeptide expressing nucleotide sequence isolated from the Sargasso Sea
ggtcaagaagttacatctcaagttatggaagacaatagaagcaagatatggcaacaagcagagaatagacttcatgctcagaaggctcttctttcttaccttttgagctagt

SEQ ID NO: 230326 - DNA, 778 bp, Unknown
  Bacterial polypeptide expressing nucleotide sequence isolated from the Sargasso Sea
tcgtttgaggtagcaatgaaggaactaggcggccatgcaatatatattgattggctcacctcaaattttgtgctgtccggcatcgagtacgagaccgaatatttatctcggaacgtcagttcaatcatggcaaggatgatgcatcacgatgatctattgaagattatttcatcaagcaacgtccccgtgattaacggttgcgacgaaagatttcatccgtgccaggcactaacagatttatttacgataagcgaaatttttcaaaccaaccttaaggacgctcgagtcgtttatgtcggcgtacagaataatgttagtaattcactggtgataatttgcgacaaactcggagtgtctttgacacttgcaacaccagaaatcgaagacgaagatgaaagtctagacgaggacgtccaaaagatactcgccgaatccgcaagtatcaatcacactgcagatgttcggtctgcagttaaggacggggatttcatttataccgatacttggatcgacatgcagtatttcaacaacccgagtctagcatccgaaaaaaacgcaaaaatagaaaaaatgatcccttttcaggtgaacaaatcactgttgcaggatgtcaactgcaaaattatgcacgacatgccaatacacgagggctacgaaattactggtgagatggtacgagatcctcgatcgattatttttcagcaggctgaaaaccgcttacatgcccagaagggattattatggtggctctatgagcaggctgagctcattcaatgac

SEQ ID NO: 230327 - DNA, 821 bp, Unknown
  Bacterial polypeptide expressing nucleotide sequence isolated from the Sargasso Sea
aggtgcaagttttatagattctaagaaatacaaatataaagttttttcatctgtaaaattagatagttttttttcaattcctataaatttatttaaaatcattatactttttgttaattcaattatttatttaaaaaaaaacaattttaatattattattagtacaggtggatacatgtctatacccacatgtttcgcagcaaaaattttaggattggatatttttttattagaaccaaatatgacaattggaagatcaaatagattttttttgaattttacaaaaaaaattttttgttactcagcaaatttaaaatattttccaaaaaaatatgaaaaaaaaattatagttataccttcattattaagaaaagaagtatatgagattaaagacaacaaagaaaaaaaatataaaaagttcaaaattttaattattggaggcagccaaggagcaatgatttttgaaaaaaaattaattcctctaattactcagctatcaaaaaaactaaatatttctgtatatcaccagattaaatttgacgaaaaaaaatacaaagaaatatcagaaatataccagaaaaataatataaattttgaattatttaattttaaacacaacatacttaaatatatttctgaaagtgatttagttataacaagagcgggagcatcaactttagcagagttagtatatttaaatgttccatttgtagcagtaccttttcctcaatcaaaagataatcaccaacttgaaaatgctaattactataaaaataaaaattgttgttgggtttttgaagagaaaaacttttttaaagaaa

SEQ ID NO: 230328 - DNA, 851 bp, Unknown
  Bacterial polypeptide expressing nucleotide sequence isolated from the Sargasso Sea
aaaaagaaaaaaattaaatactttagagccagacaaaggatcacctctaaaaggtaaaatgctaattcaaatgttcgaaaaagctagttcaagaacaagaataagcttttatttagccattaaacagcttggtggaggaacattgacacttagacccaatgaacttcaccttggacaaggtggtgagacgattgctgataccgctaaaatcttatctacatatggtgatggtttcatgttgagaactgatgatgataaaaaaattgaagatttccaaaagtatttaactattccgataataaatggtttaagtccatcatctcatccaactcaagtattatcagatatttttactgttgaggaaataaaaaaaaaaccaatatcaaaattaaaaatttgttggattggagattcaaataatgttttggacagtttaatagctgcgtctgttaagttttcttttagattaagcatcggatgtccaaaaaaatttgcaccaggcaagaaggtaaaagattgggtaagtaaaaataagaaaaaaatttttatttatcatgatccaaaaaaagcagctatggatgcagatgtaattttttctgataaagtaatatctctaaatgataaagtgaacaaaaaaagaaaaaaacaacagtttcaaaaatttaaaataaaaaaagagatatttgaatatacaaaaaaaaattgtatttttttgcattgcttgccaagaggagatgaagttgaggagagtgtatttttaggcaaaaattcccatgtctggctgcaggcattaaacagagttcatgttcaaaaaagtattctattatattgttttggaaaattaaggtaaa

SEQ ID NO: 230329 - DNA, 223 bp, Unknown
  Bacterial polypeptide expressing nucleotide sequence isolated from the Sargasso Sea
aatgaaaaactttataaatatctctgactgttcttcagtagagcttagagcgattattgaagaagcaaagaagagaaaacaaaatagatctggattaaataaatctgcgcctgatgaagataagccgtttgaaggtaagtcgatggctatgatttttgaaaaaccctcaacaagaacaagaatgtcatttgatatcgctgtaaagcaattaggtggatcatca

SEQ ID NO: 230330 - DNA, 817 bp, Unknown
  Bacterial polypeptide expressing nucleotide sequence isolated from the Sargasso Sea
gcttgggggtgaggttagagaaactactgaagtaaaagcctcatctttggcgaaaggtgaatctctctacgataccgcgagagtactatcgggctacagcgacattatcgtgatgcgtcatccggaatctggaagtgtagctgagtttgctgaggccagtcgcgtgcccgtaatcaacggtggcgacggtccaaatgagcacccgagtcaagccctacttgatctctatacgatgcgaacagaaattagcgatcaaggtaaatcgctagacggtatgtcgatcgcactcgtaggtgatttgcgctatggccgagcagttcattctttgtgcaagcttctttcgctatattccaacactgttcttcatttgatttctccttcagagcttgcgctcccagagcagatccgggctttactgattgatcgtggacacacctgcaaagttttcgacgacatcgagattggtataagtggtgtcgatatcgtctatgtaacccgtactcaggaagaacgatttcccacacaagctgatgctgataaatacaaaggcctcttccgtttaaatcaacagatctatacccaaaattgcgcgccaaacacagtcataatgcatcccttacccagggattctcgatctgaggcgcaagagctagaccaagatctaaacgacaatccgaacttggctatttttcgtcagacagacaatgggatcctcattcgaatggctctctttgcactcgttctgggtgtcgagagggaagtcggcaattatgcacaaccggtgacctggtttaatgcaaagagggataacccctag

SEQ ID NO: 230331 - DNA, 683 bp, Unknown
  Bacterial polypeptide expressing nucleotide sequence isolated from the Sargasso Sea
tatgtcagcactaaataatgatgactggatatcaagtacatatagaaatcacggacatgctattgcaaaaaactgtgaactaaaagaaattacttcagaaatatttggaagaagcacaggtatttgtaaaggtaaaggaggaagtatgcatattagtgattttgataaaggcatgcttggttcttttggaatagttgctgctggtccaccagttgttttaggagcggcattacaagaaaaaataaataaaggttcaaaaaattcagttactttttttggagatggcgcgatacataatggtgcttttcatgaagctgctggtttagcaaaactatgggatattcctatgctttttgtatgtgaaaataatggttatgcagaagctacagcaactgattggcatttgaatactaaaaatttatccgatatttctagagcttatgatatgatttcttaccgtggtgatgggaataatgtttttgaagttcatgaaattacaaaaaatgcgctaatagaatcaaaagaaaaaaatacccctatttttatagaatttaaaaattatagattttcaggccaatatgaaggtgacacacaattatatcaacctttagaagaaattaatgaagctaaaaaaaatgatcctattaaagtagcaatagaaaaagctaatgattataattttt

SEQ ID NO: 230332 - DNA, 650 bp, Unknown
  Bacterial polypeptide expressing nucleotide sequence isolated from the Sargasso Sea
tactgctaaagtattaagtgagtatgttgatattgtaatgctcagaaccgcatctcatgataatttagaggagtttggaaagtatttggaaatacctattatcaacggactttcagatcaaagtcatccatgtcaaattatatcagatattcttacttttgaggaaataaagggaaatatcgaaaataaaactatatcttggcttggagatgggaataacaatatgtcgaattcccttattgaagcggcgggaaaatttaaattcaaattaaaaattggatgtcctaaaaaatattcacctggaaaaaaaatcttaaaatgggcaaaaaaaaataatgtaaaacttacgatatcggaaaatcctgtagaagctgtaaaagactcagattgtgttatgactgataaatggatttccatgaacgataaggtaaataaaaaatttaaaaagaaaaatttaaagaaatatcaagtaaataaaaaattaatgaaatatgccaaaagtgatgcaatctttatgcactgtttgcctgttggaagaggagaggaagtaacaaatgaggttatcgatggcaaacagtcagttgtttggaaacaagctctcaacagagtacacgctcaaaaaagtattattaattggtgtttagattaag

SEQ ID NO: 230333 - DNA, 691 bp, Unknown
  Bacterial polypeptide expressing nucleotide sequence isolated from the Sargasso Sea
gatgagcttctttaacaaaggaggtgaaagtttatcagatacggcgaaaattatatcttcttttggaaacgcatttatgctcagaacagatagtgagcaaaaattaaatatattaaaaaaacatatgactattcctgttattaatggattatcacctaagtcgcatccgacacaggttttatctgacgtatttacaattgaggaaattaaaaaaaaatcaatttcaaaattacaaatttgttggattggcgactccaacaatgtactaaacagtctagtagaggcttcagtaaaattttcatttaaactaaatattggatgtccaaaaaattatgagccaaataaagaattacttagttgggtgaaaaaaaataatggcaaagtcaaaatatttcatgatagcaaaaaagcagctaaaggaagtgatgtgattttcacagataaagttatatcaatgaacgataaagttaataaatttagaaaaattaaaaattttaaaaagtttaaagtaacttctgcggttatgaaatgtgcaaaaaaagatgtaatttttcttcactgtttacctaggggaccagaagtatcaaatgatgtttttttaggaaagcagagcaaagtcttccagcaagcccttaacagaatttatgttcaaaaaagtattttattatattgttttgagaaattaaggtag

SEQ ID NO: 230334 - DNA, 580 bp, Unknown
  Bacterial polypeptide expressing nucleotide sequence isolated from the Sargasso Sea
aatgagtaaagagcggttatatatttttgatacaacactaagagatggtgctcaaacacaaggagtagatttttctatcgaggataaagaaaaaattgcatctgccttagacaatcttggtgttgattatattgaagctggttggcctggagctaatccgactgatactgagtttttccaaaaaaaacataattttaaaaattctaaacttacatgttttggaatgacaaaaagatcaggccgaagcgcagaaaatgatacaggattatcagcattaatgaattcaaatactcctgcagtatgcttagttggaaagtcatgggattttcacgttgatgttgctttaggaattaccaatgaagaaaatttagaaaacattagtgaaagtgccaaacattttgttaaagcaaaaaaagaatttatgtttgatgcagaacatttttttgatggttataaagcaaatccaaaatatgcactttcatgtgttaaagcagcttacgaccaaggagcaagatggatagtgctatgtgataccaatggaggaacgctaccgaacgaagtctcaaaaaatagtaactga

SEQ ID NO: 230335 - DNA, 604 bp, Unknown
  Bacterial polypeptide expressing nucleotide sequence isolated from the Sargasso Sea
gatgatgataaaaaaattgatgattttcaaaagcatttaaccataccaataataaatggattaagtccatcatctcatccaactcaagtgttatcagatatttttactgttgaggaaataaaaaaaaaaccaatatcaaaattaaaaatttgttggattggagactccaataatgttttggatagtttaattgcagcatctgttaagttttcttttagattaagcattggatgtccgaaaaacttcgcaccaggtaagaaagttaaagattgggtaagtaaaaataagaaaaaaatctttatctatcacgacccacaaaaagcagctttggatgcagatgtaattttttctgataaagtaatatctcttaatgacaaagtgaacaaaaaaagaaaaaaacaacagtttaaaaaatttaaaattaaaaaagagatatttaattatgctaaaaaaaattgtatttttttacattgcttaccaagaggagatgaagttgaggaggatgtatttttaggaaaaaattcccatgtctggcaacaggcattgaacagagttcatgttcaaaaaagtattctattgtattgttttggaaaattaaggtaga

SEQ ID NO: 230336 - DNA, 715 bp, Unknown
  Bacterial polypeptide expressing nucleotide sequence isolated from the Sargasso Sea
aatgagcaaagaaagattatacatatttgatacaactctaagagatggagctcaaacgcaaggagtcgatttttctttggaagacaaagaaaaaattgctttagctttagacaacttgggtgtggattacattgaagcaggttggcccggggctaacccaaccgacacagaattttttcaaaagaaacacaattttaaaaattctaaactaacatcttttggaatgacgaaaaggtctggacgaagtgcagaaaatgatactggtttatctgcactcatgaactctaatacctctgcagtatgtttagttggtaagtcttgggattttcatgtcgatgttgccttaggtattacaaatgaagaaaatttagataatatttctgagagtgcaaaacattttgttaaagcaaaaaaagaattcatgtttgatgcagaacatttttttgatggttataaagcaaatccaaagtatgcactctcatgtattaaagctgcttatgaccaaggtgctaggtgggtgatactatgtgatacgaatggaggtacacttccacatgaagttacacagatagttagtgaggttacgaaagtagttccaggaaaaaacttgggaatacacgcacataatgataccggtaatgcggttgcaaattcattagcagcagtattctcctggtgttcgacaaattcaaggtacaataaatggattaggtga

SEQ ID NO: 230337 - DNA, 265 bp, Unknown
  Bacterial polypeptide expressing nucleotide sequence isolated from the Sargasso Sea
atgaataattttataaacatttcggatatatcaaaaaaagaattgagatctataattgacaactcaaagaaaagaaaatctgaaagaggagacaagccacattcccaaacagataatgatcaacctcttaaaggaaaaactatgataatgatttttgaaaaaacttctacaagaacgagaatatcatttgatttggcagtcaaacaattaggaggttcctcgataattttaaatcaggatgaaattcattatggaaaaaggtgat

SEQ ID NO: 230338 - DNA, 738 bp, Unknown
  Bacterial polypeptide expressing nucleotide sequence isolated from the Sargasso Sea
tggtggtcaacctccagtgcgatatggatcatcctacccaatcgatggcggatcttcagcacctcgtccagacctatggatctttggaaaacctgaaaggaaagaaaatcgccatgacctgggcctattcgcccagttacggaaagcctttgtcggttccccagggcatcatcagcttgatgacacgtttcgggatggaggtgacattggcccatccggaaggctatgacctggttccagaatgcatgaaaaaagcttcggaattcgcctccacatccggcggtagtttttcagtcagtaactccatggaggaggcatttacggacgcagatatcgtctaccccaaaagctgggcaccttataaggtgatggaaacccgaacggagctgctccgaaacaaagatcacaagggtttggaagacttggaacaaaaatgccttgcgcagaacgcgaaattcaccggatgggaatgtaccgaatcattgatgaagactacccgtgatggcaaagccctctatatgcattgcctgcctgctgacatcagcagtgtttcgtgtgaaaagggagaagtagaagcgtcggtttttgatcgctatcggaccccgacttacattcaggcaggttataagccttacatcattgccgccatgatctttgcggcaaaatttgataatcccgcagcactgtttcaggacttgattctacgtgatttgaagcgtgtgcataccatttcctgac

SEQ ID NO: 230339 - DNA, 643 bp, Unknown
  Bacterial polypeptide expressing nucleotide sequence isolated from the Sargasso Sea
attttatcaacttatggtgatggattcatgcttagaacagatagtgataaaaaaattaatgaatttagcaaatatttaaagatacctgtaattaatggattgagtccatcatctcatccaacacaagtattatcagatgtttttactgcagaggaaattaaaaaaaaaccaatatcaaagttgaatatttgttggataggagattctaataatgtgctaaatagccttatagcagcttcagttaagttttcatttaaattaaacattggttgtccaaaaaattatacaccaaaaaagtttgtattagattgggtaacaaaaagtaagaaaaaaatatatatttttaatgatccaaaaaaagctgtaaaaaatgctgatgtaattttctctgataaagttatttccttaaatgataatgtaaatgttaaaaaaaagataaaagattttaaaaaattttatattaataaaaatcttttaaagtatgcaaaaaaaaatgctatttttttacattgtcttccgagaggaaatgaagtgtccgatgaagtttttttaggaaaacaatcacatgtttggcaacaagcacttaacagagtacatgtccaaaaaagcattttattatattgttttggaaaattacggtaga

SEQ ID NO: 230340 - DNA, 904 bp, Unknown
  Bacterial polypeptide expressing nucleotide sequence isolated from the Sargasso Sea
catgaatcatttcattaatttaaaagatataccagccaaagacctaagaaagatcattattgatgctaagaaaagaaaaagtttaagaaaaaaactaaatactttagaggttgatcagggcgcacctttaaaaggaaaattattaattcaaatgtttgaaaaatctagtttgcgaacaagattaagcttttatttagctattaaacaattaggtggtggtactttgactttgagatctaatgagcttcatttaggtcaaggcggagaaagtattgctgatacggctaaaattctttcgacctatggtgacggatttatgcttagaactgatagtgataaaaaggttgaaaattttgaaaaatatttatcaataccagtcattaatggtttaagtccctcatctcatccgacacaggttctatcagatgtttttactgttgaggaaataattaagaaacctatttcaaaattaaatatttgttggataggtgattccaataatgttttagatagtttaatagccgcatcagtaaaattttcttttaaactaagtattggttgtccaaaaaaatttcaaccaggaaaagaagtaatagcttgggtcaaaaaaaataataaaaaaatatatatttataatgatgtgaaaaaagcagtttctggtgctgatgtaattttttctgataaagttatttctttaaacgacaaagttaataagaagaaaaaaatacaagcatttaaaaaatttaaaattaataaaaaattaatgagttatgcaaaaaaaaattgtatttttttacattgtttacccagaggagacgaagtgagtgacgatgttttcttgggaaaaaaatctcacgtgtggcaacaagcactcaatagagttcacgtgcaaaaaaggtatttt

SEQ ID NO: 230341 - DNA, 570 bp, Unknown
  Bacterial polypeptide expressing nucleotide sequence isolated from the Sargasso Sea
gagcattgatgatacagctaaaattctttctacctatggtgatggatttatgcttagaaccgatagcgataaaaaggtcgaaaattttgaaaaatatttatcaatacccgttatcaatggtttaagtccttcatctcatccgacacaggttttatcagatgtatttactgttgaggaaataatgaggaaacctatctcaaaattaaatatttgctggataggtgactccaacaatgttttagatagtttaatagctgcatcagtaaaattttctttcaagctaagtattggttgtccaaaaaaatttgaaccaggaaaagaagttagatcttgggttaaaaaaaataataaacaaatttatatttataatgatgcgaaaaaagcagtttctggtgcagatgtaattttttctgataaagtaatttctttaaatgacaaagttaataagaagaaaaaaatacaagcatttaaaaattttaaaattgatcaaaaattaatgagctttgcaaaaaaaagttgcattttcttacactgtttgccaagaggtgatgaagtaagtaatgatgtctt

SEQ ID NO: 230342 - DNA, 247 bp, Unknown
  Bacterial polypeptide expressing nucleotide sequence isolated from the Sargasso Sea
catgaataattttcttgatattagccatctgtcaaaaaagtctttgaatgtgattattgacgatgcaagagacattaagaatcgtcgtaaaggttttccaaacggcgcgttggacaaaccagcttttcttcaaaattgtgttgttggattaatttttgaaaaaccatctacaaggactcgggtttcttttgatgttggagttcgccaaatgggtggaacttcaatgatactgtcgagaaacgatttg

SEQ ID NO: 230343 - DNA, 724 bp, Unknown
  Bacterial polypeptide expressing nucleotide sequence isolated from the Sargasso Sea
cttgggaggaggcactttaactcttagatcaaatgagcttcatcttgggcggggtggtgaaagcattgcagacactgcaaaaattctttcaacttatggtgatggatttatgttgagaactgatagtgataaaaaggttgaaaattttagaaaatatctttcaattccagtaataaacggtcttagtccatcatctcatccgacacaggttttatcggatgtatttactgttgaagaaataaagaaaaaacctatctcaaaactgaatatttgctggattggagattcaaacaatgttttagatagtcttattgcagcatcagttaaattttcctttaaactgagtataggttgtccaaaaaaatttgaacctggtacaaaagtaagaaactgggtaaaaaaaaataaaaagaaaatttttatttacaacgatccaaaaaaagcagtttcaaatgcagatgtaatcttttcagataaagttatttctttgaatgataaagttaataaaaaaaaaaaaatagctcaatttaaaaaatttaaaattaataaaaaattaattgggcatgcaaaaaaagattgtatttttttacattgtcttcctagaagtaatgaagtaactgacgaaatatttttaggaaaaagatctcatgtttggcaacaagctctaaatagagttcatgtccaaaaaagtatcttattatactgttttggaaaattaaggtaa

SEQ ID NO: 230344 - DNA, 520 bp, Unknown
  Bacterial polypeptide expressing nucleotide sequence isolated from the Sargasso Sea
cgtaccgcggaaaatgcttggtggagcttggctcctcacgacatttcagtgatcctgcgcttaatgggagggttgccggaatctgtcacatgccacggcggcagttttgtgaccgagggcgtgaatgatctggccaatgctcaacttcaattttctgccggtcgacaggcacggattgcggtgagttggttgcatccggttaaggaacgcaagctgttcgtaattggctcagagcgctcggcaatttttgatgacacggcgaattccctcacgttattcgatcaacaagtcaacgtgaacaagggcgtacctgaattgaacgatcaaggcgccaattcggttgtccttcccgtggatgaaccgctccaacgtgaatgccagcattttttggagtgcgtgcaaacacgagccacgccgttgaccaatggttccagcggagcagctgtggtgcgggtgctggaggccgggcagcgatctctgcagcagggcggtaaggaaattaaaattgatgagcactgat

SEQ ID NO: 230345 - DNA, 523 bp, Unknown
  Bacterial polypeptide expressing nucleotide sequence isolated from the Sargasso Sea
caagtattgtcagatgtttttactattgaggaaattaaagcaagacctatttctaaattacaagtttgttggattggagatgggaataataatgttattaatagtttaattgaagcttctgttaaattttcgtttaaattaaacattggttgtccaaaaaaatatgaaccaaaaaaaagtttattaatttgggcaaagaaaaataaaagtagaataaaaatatttaatgaaagtaaaaaagcagcaaatggcgctgatgtaatttttaccgataaagttatatctattaatgataaagtaaatagagttaaaaaattaaaagattttaaaaattttagagttgattcaaaagttatgaaatctgcaaaaaaagatgcaatttttcttcactgtttaccaagaggaaccgaggtttcaaatgatgtttttttaagtaaaaaatcaaaggtttggcagcaagctctcaatagagtccatgtacagaaaagtatattgctatattgttttaataaattaaggtagt

SEQ ID NO: 230346 - DNA, 461 bp, Unknown
  Bacterial polypeptide expressing nucleotide sequence isolated from the Sargasso Sea
tggcggtagattttcggtcagtaactccatggaggaggcatttgcggacgcagatatcgtctaccccaaaagctgggcaccctacagggtgatggaaacccgaacggaactgctccgaaacaaggatcacaagggcttggaagacttggaacaaaaatgccttgcgcagaacgcgaaattcaccggatgggaatgtaccgaatcattgatgaagactacccgtgatggcaaagccctttatatgcattgcctgcctgctgacatcagcagtgtttcctgtgagaagggagaagtagaagcgtcggtttttgatcgctatcggaccccgacttacatccaggcaggttataagccttacatcattgccgccatgatctttgcggctaaatttgataatcccgcagcactatttcaggacttgattaaacgtgatttgaagcgtgtgcataccatttcctgaa

SEQ ID NO: 230347 - DNA, 159 bp, Unknown
  Bacterial polypeptide expressing nucleotide sequence isolated from the Sargasso Sea
cttgtgcgggatcgtcacgcacaaccgcacgcacaaggacgttggtatcgactgcgaccttcattgcttacctgcccagccttgcgccgccgcctcgttgatttcttcgatggtggcaaccttctgcgtcttgcccgcgagcaggccgacaaagctggc

SEQ ID NO: 230348 - DNA, 292 bp, Unknown
  Bacterial polypeptide expressing nucleotide sequence isolated from the Sargasso Sea
aaaccagaagacgcagttaaagactcagactgtataatgactgataaatgggtttcaatgaatgataaagttaacaaaaaattaaaaaagaaaagtttaaaaaattttcaggtaaataaaaaacttatgaaacatgcaaaatctgatgcaatttttatgcactgcttacctgttggaagaggagaagaagtaacagacgaggtaatagatggaaagcaatctgtagtttggaggcaagctcttaatagaattcatattcaaaaaagtattattatttggtgtttgaattaag

SEQ ID NO: 230349 - DNA, 370 bp, Unknown
  Bacterial polypeptide expressing nucleotide sequence isolated from the Sargasso Sea
tgtccaaaaaaatattctccgaataagagtattttaaagttagctaaaaaagagagaataaaattaacaattacctcaaaaccattagaagcagtagatggtgctgattgtgtaatgactgataaatggatctcaatgaatgataaagtaaataaagcctctaaaaagaaaattttaaaaccttatcaagttaataagaaattaatgagcaaggcaaattcagacgctatttttatgcactgtcttccggtgggaagaggagaagaagttacgaatgaagtgatagatggtaagcaatcagtggtatggagacaagctttgaatagagttcacgctcaaaaaagtattattaaatggtgtcttgattaag

SEQ ID NO: 230350 - DNA, 403 bp, Unknown
  Bacterial polypeptide expressing nucleotide sequence isolated from the Sargasso Sea
tgctgggaatttaattttaaacttaatatttggctgtccaaaaaaatattctccaaataaaagtatattgaagctagcgaaaaaggagaaagtaaaattaacaattacttcaaaacccatagaagcagttaccggtgcagactgcgttatgactgacaaatgggtttcaatgaatgataaagtaaacaaagtttcaaaaaagaaaactttaaaaccttaccaagttaataagaaattaatgagcaaagctaattcagatgccatttttatgcattgtcttccagtaggaagaggggaagaagttacaaatgaagtaatagatggaaaccaatcagtagtttggagacaagcactaaatagagtgcatgctcaaaaaagtattattaaatggtgtatcgattag

SEQ ID NO: 230351 - DNA, 559 bp, Unknown
  Bacterial polypeptide expressing nucleotide sequence isolated from the Sargasso Sea
cgtttggaagatctcaacattaaggtaccaataaataataatggatctttcttggatattcacattactcaagggacttcatttggctcaaatcacaccactactaatttggcaataaaagcaattatgaaaaatattaataatattgatttcaattcatgctctttagatttaggttcaggatcaggaattttatcaattttactttcaaagataggatttaattctgtgcattcgtgtgaaatagatgattttgcaaggaaggaatcattaattaacttaaaaaaaaatctgattcaagataaagttaaatttgtagattttccgtcaaatttaaaaactaaatatagcttaatcgtttcaaatatatctggagaatatttagaaaaaaattttggttatattgtgagcaaactcatggaaagaggaatctttataatttcaggactaaataagagcaaaaaagaatcttttactaatttggcatcaatagaaaatattaagatattagatgttttagtttcaggatcttggatggccatgatttttgaaaaatagg

SEQ ID NO: 230352 - DNA, 832 bp, Unknown
  Bacterial polypeptide expressing nucleotide sequence isolated from the Sargasso Sea
aatgattgagaaagaaaaaattaattggatctataaaaaaatctttacgattagattttttgaagaaagaataaaaaaaattgctaaagagaaaacagtaccaggctatcttcacacttgtataggttctgaggctatttgtgtaggagtaatggcagcattaaatcaagatgattggatatcaagtacgtatagaaaccatggtcatgctatagctaaaggttgtgaattaaacgaaattacttctgaaatttatggaagaaaaactggaatttgcaaggggcgtggtggtagtatgcatataagtgattttagcaaaggtatgcttggttcatttggaattgttgcagctggtccaccagtagttttaggagcagctttacaagaaaaaataaataagagtaataaaacatgtgtatctttttttggtgatggtgcaattcataacggagcttttcatgaggctgcaggtttagcaaagctatgggatataccaatgatttttgtttgtgaaaataatggttatgctgaagctactgcaactgattggcatctcaatacaaaagagttatcagatatcactaaagcttatgacatgctctcatacattggtgatggcaataatgtatttgaagtttacgacatttccaaaaaagctattaatgaagctaaacaaaaaaatactcccatatttttagaatttaaaaactacagattttctggacagtacgaaggcgatactcaactttatcaaccacaagaagaaattgataaagcaaaacaaaatgatccaataaagttagcaaaagaaaattcttcaaatatggtttga

SEQ ID NO: 230353 - DNA, 568 bp, Unknown
  Bacterial polypeptide expressing nucleotide sequence isolated from the Sargasso Sea
catttagatattccaattataaacggcctttctgacaaaagtcatccgtgccaaattatgtcggatattttaacatatgaggaaagcaatggttctataacgggtaaaacagtttcttggttaggtgacggtgataataatatgtctaattctttaatcgaagcagctggtaaatttaaattcaatttaaaaattggttgtcctaaaaaatatactcctggaaagaaaatattaggatgggctaaaaaaaataaagttaatcttttgataactcaaaaacctgatgaagccgtaaaaaactcagactgcgtgatgactgataagtgggtatcgatgaatgataaggttaataaaaaaactaaaaagaaggttttaaaaccatttcaagttaataaaaaattaatgaaaaaagctaattcaaatgcaatttttatgcattgtttgcctgtaggcagaggtgaagaagttaccgatgaaattattgatggaaagcagtctgtggtatggagacaggctcttaacagagtgcatgctcaaaaaagtataattaagtggtgtttagactaag

SEQ ID NO: 230354 - DNA, 881 bp, Unknown
  Bacterial polypeptide expressing nucleotide sequence isolated from the Sargasso Sea
tgctaaaaatattaaattaacaaaaacaaaaaataaaatattaattttaaaagaccaattcccttctaatgtttatccttggatggaacttgtgagaaataatatgggtattatagaaaagattgattcatgcaatgaaaattcaattactgagaaattaatcgatagaataaatgaacaggtaatagcagttgctatacctaatattcgttggactgatggatatgttcttgatttggaaaggataagtattgcttgtaaaaattacgacgtaaaattaattctagatctaacacaatctgctggtgcgatggaaattgatttgggtaaaataaagcctgatttcgcaattattgctaactacaaatggatgttaggcccatactcaactggttttatgtatgtttctgacaattttatagaaggaatacctttagaagaaacatggataggaagaaaaaatagtgaagatttttcaaaattaacagtttatcaaagtgaatataattttgactctataagatttgatatggggcaaagagctaattttacattaatgccaggtgtaatggcctcacttgagcaacttcatgattggggtataaaaaatattgaaaatacactttatgaaaacaataaaataatttgtaagggtctgaatgaattaggttttgatattcttgaagaaaataagagagctccacactttatcagtgctaaacttccttgtttggacggaaatttagtaattaaaaaactcaaaatgaataatatttttatttctgaaaggtctgggtatttaaggattactcctcacttatggaataatgaacaagattttttaaaattattggaatgtttaaaattgataattaattaaa

SEQ ID NO: 230355 - DNA, 931 bp, Unknown
  Bacterial polypeptide expressing nucleotide sequence isolated from the Sargasso Sea
atgaaacactttatcaatttaaaagatattccatctaaagatcttaaaaaaataataatagatgcaaagggaagaaaaaaattgagaaaaaaactaagtactcttgaagttgataaaggagctcctttgaagggaaagttgcttatccaaatgtttgaaaagtcgagtttaagaactagattaagtttttatctagcaattaaacaacttggaggaggcactttaactcttagatcaaacgagcttcatcttgggcagggtggcgaaagtattgcagatactgcaaaaattctttcaacatatggggatggatttatgttgagaaccgatagtgataaaaaggttgaaaattttagaaaatatctttcaattccagttataaacggtcttagtccatcatctcacccgacacaggttttatctgatgtatttacagttgaggaaataaagaaaaaacccatctcaaaactgaatatttgctggattggagactctaacaatgttttagacagtttgattgcagcatcagttaaattttcatttaaattgagtataggctgtccaaaaaaatttgaacctggcacaaaagtaagaaactgggttaaaaaaaataaaaagaaaatttttatttacaatgaaccaaaaaaagcagtttcaaatgcagatgtaattttttcagacaaagttatttctctgaatgataaagttaataagaagaaaaaattagctcaatttaaaaaatttaaaattgataaaaaacttatggggcatgcaaaaaagaattgtattttcctacattgtcttccaagaggaaatgaagtaactgatgatatttttttaggaaaaaaatctcatgtatggcaacaagctctaaatagagttcatgttcaaaagagtattttattatactgttttggaaaattaaggtaag

SEQ ID NO: 230356 - DNA, 1468 bp, Unknown
  Bacterial polypeptide expressing nucleotide sequence isolated from the Sargasso Sea
atgaacatcatcgaacccggcatccgcaacctcgcgctggcgaaggacatcctgctcacgccgtacggcctcgacgaaagcctgctcacgcgcacgatcgccgacatcttcacgcatcgcgtcgactacgcggatctgtacttccaggcgacccgcagcgaagcgtggagcctcgaggaaggcatcgtcaaatcgggcagcttcagcatcgaccagggcgtcggcgtgcgcgcggtcgcgggcgaccgcaccgcgttcgcgtattccgacgacctgtcgccggaagccatcgcgcaagccgctgcggccaccaaggcaatcgcggcggccggcggcggccgccagaagatcaaggcggcatcgtcgctgaagggcatctcgggccgcgacctgtacctgccgtccgatccgctcgcgtcgctcgacgcgacggccaaggtcaagctgctcgagcgcatcgagcagatggcacgcggccgcgacccgcgcatcacgcaggtgatggctggcctcgccggcgaatacgatgtcgtgctggtcgcgcgcagcgacggcgcgctcgcggccgacatccgcccgctcgtgcgcgtgtcggtcacggtgatcgccgagcagaacggccgccgcgagatcggctccggcggcggcggcggccgcttcgactacggctacttcaccgacgacgtgctgtcgcgctacgtcgacgacgccgtgcatgcggcgctcgtgaacctcgacgcccgccctgcgccggccggcgcgatgacggtcgtgctcgggccgggctggccgggcgtgctgctgcacgaagcgatcggccacggcctcgagggcgacttcaaccgcaagggttcgtcggcattcgcgggccggatcggcgagcgcgtcgccgcgaagggcgtgaccgtcgtcgacgacggcacgctgccgaaccgccgcggctcgctgaacatcgacgacgaaggcaacccgacgcagtgcacgacgctgatcgaggacggcatcctgaagggctacatccaggacacgctgaacgcgcgcctgatgaagatgccggtcacgggcaacgcgcgccgcgaatcgtacgcggcgctgccgatgccgcgcatgaccaacacgtacatgctgaacggcgacaaggatccgcaggaaatcatcgcgtcggtgaagaacggcctgtacgcggtgaacttcggcggcggccaggtcgacatcacgaacggcaagttcgtgttctcggcgtccgaggcgtacatgatcgagaacggcaagatcacctacccggtgaagggcgcgacgctgatcggcagcggccccgaatcgctgaaggacgtgagcatgatcggcaacgacatgtcgctcgactcgggcgtcggcgtgtgtggcaaggaaggccagagcgtgccggtcggcgtcggccagccgaccctgcggatcgacaggatgacggtcggcggtacggcataac

SEQ ID NO: 230357 - DNA, 1111 bp, Unknown
  Bacterial polypeptide expressing nucleotide sequence isolated from the Sargasso Sea
tggggaatgggtatgcaagaagctactgtaattaaatggttaaaaaacgaaggtgacaaagttaaaaaaggtgatcctgttgttgaagttgaatcgtctaaggtaaatgcagaagttgaagcaactgcagacggaattattctaaaaataaaagaaaatgaaggtgaagttgtaaaagttggcggagtgcttgcatttattggcaaagagggcgaaacaattgaagatgagcaagaacttaaaccagaaccagctcaaacaaataaattacgagcagaaaaagataataaaaatattaaagtccaaataaccccaattgctagaaagttagcaaaagatttaaaaatgaatttagaagaaataataggtactggcccaaatggaagaattactgaagaagacataaaaaatcataaagcaagcgatgatgggaatgcttcagataaccaaatatcaggaataagaaaaattatttctttaaggatgacccaaagtagccaaattcctgcagttacccttactacaaaggttgatgtaacagaatgtgtaaaatttcaatcaaaccttttaagtgattggagaaaagaaaagatcaggcccacatttcaagatattattgctaaagcagtatcaaagtctttgagtgaatttaatatctttaattcacactttgtagataatcaaataaaaacgttcaatgaaattaatttaggcatagcttatgcacttaaagaagggttagttgtcccagtaattaaaaagtctcaagaaaaatctttgttagaaattgctaaagaaatacgtgagtttaactcaaaagaaaaaagaggtttttctcaagaagatatttctgggagcactttttcaataaccagtcttaattctacaattgtagacagcttcaaccccctaattaaccctcctgaagttgggattttgggaattggaagaatctcagaagaagctcaatctatttcagataatttaacaaccagaaaaatttgttttttaaatctcacttttgatcatagggctgttgatggtttcccagctgcaaaattcttagagtccattgtaaataatatccaaagccctcaatcgcttgtttaaa

SEQ ID NO: 230358 - DNA, 502 bp, Unknown
  Bacterial polypeptide expressing nucleotide sequence isolated from the Sargasso Sea
gacaagcgcttcttactttattcccaaacattcagtcttagtggaagctatggaagctcgtcaaatgatttagaagacttaacgaatgaagatttttcagtatggaataaaggattaaacgtttttatgccagtatttaatgcaggaaaacttattgcaaataaaagattggctaaatctaacagggaaattgcaatgcttgattttgttaatgctctgttaactgcatataaagaaatagaaagtggatttgaatctgacttgacttcaaatcaagctttagaaataattaatgaaaatattattttatctgaaaatatttacaatacaacttttgatggattcatgaaaggatcttcatcatttgaagatgctattaatgccaataatgcactttatgataatcttgatttaaaagctcgattagaaaaagttcgcatagaacagagaataaatttaattttagctcttggcggagggtttaacataacaaatgattaaa

SEQ ID NO: 230359 - DNA, 250 bp, Unknown
  Bacterial polypeptide expressing nucleotide sequence isolated from the Sargasso Sea
tatgataaaacctattaagcttgatacaaataattttttatcaagcttagatctgtctagtaaagaagtaattgatatcatagagcttgcagaaaaatttaaaaataaaaaattaaatatcaaatttcaagaaaaagttttaggtttaatttttgataaatcctcaacacgaacaagagttagttttcaggttgcgatgtctaaactaggaggtacaacaatagatcttttaccaaagtacctcgcaaat

SEQ ID NO: 230360 - DNA, 1189 bp, Unknown
  Bacterial polypeptide expressing nucleotide sequence isolated from the Sargasso Sea
gatggatcgattaattgaagaattgaaacctttgcagtcaggactttacgggaaggattttcttctaacctgggagagaaccgaacctgaattgaaggcaatcctcaagattgcagaggggttgaagtcactttacgaaagcaactgctctactaaagttttccaatcaggtctggcggtttccctgttccgagatcattcgactcggacccggttttcctatgcatctgcggccaacctgctgggtttgacagtacaggatctggacgagggaaaatcgcagattgcccatggggaaacggttcgtgaaaccgcaaacatgatctccttcctcacggaagcaatcggtatccgggatgacatgtatcttggagcaggtaatgcctatatgcaggaagtagctgagtcccttgatcttgggagagcagatggggtgctccaccaacgcccggtggtggtcaacctccagtgcgatatggatcatcctacccaatcgatggcggatcttctgcaccttgtccagacctatggatctttagaaaacctgaaaggaaagaaaatcgccatgacctgggcctattcacccagttacggaaagcctttgtcggttccccagggcatcataggcttgatgacacggttcgggatggaggtgacactggcccatccggaaggctatgacctggttccagaatgcatgaaaaatgctgcggaattcgcctccacatccggcggtagtttttcggtcagtaactccatggaggaggcatttgcggacgcagatattgtctacccaaaaagctgggcaccctataaagtgatggaaacccgaacggagctgctccgaaacaaggatcacaagggtttggaagacttggaacaaaaatgccttgcgcagaacgcgaagttcacgggatgggagtgtaccgaatcattgatgaagactacccgtgatggcaaagccctctatatgcattgcctgcctgctgacatcagcagtgtttcctgtgaaaagggagaagtagaagcgtcggtttttgatcgctatcggactccgacttacatacaggcaggttataagccttacatcattgccgccatgatctttgcggcaaaatttgataatcccgcagcactgtttcaggacttgattcaacgtgatttgaagcgtgtgcataccatttcctga

SEQ ID NO: 230361 - DNA, 783 bp, Unknown
  Bacterial polypeptide expressing nucleotide sequence isolated from the Sargasso Sea
aaatgtttgaaaaatcaagcttaaggactagattaagtttttatttagcaattaaacaattgggtggtggcacaattactttaagatcaaacgaacttcatcttggacaagggggtgaaagtatagcagatactgctaaaattttatcaacctatggcgatggatttatgcttagaactgatgatgataacaaattggaaaattttaaaaaatatctgtcaattccagtgattaatggtttaagcccatcttctcatccaacacaagtactgtcagatatttttacagttgaagaaattaaaaaaaaatctatttcaaacttaaatatctgctggattggagactctaataatgttttaaatagtttaattgcagcatccgtaaaactttcatttgatttacgtataggttgtcccaaaaagtttcaaccaaacttagacattatcaattgggtaaaaaaaaataggagaaaaatttatatttataatgatcctattaaagcagctcacaatgctgacgtaatattttctgataaggttatatctttaaatgacaaagttaataaaaataaaaaattaaaggaatttaaaaattttaaaattaataagaaattatttagccatgcaaaaaaagattgtatttttttacattgtttacctcgagggaatgaagttacggatgaaatttttttaggtaaaagatcgtatgtttggcagcaagctttgaacagagttcacattcaaaaaagcatattattatattgttttggaaaattaaggtaga

SEQ ID NO: 230362 - DNA, 979 bp, Unknown
  Bacterial polypeptide expressing nucleotide sequence isolated from the Sargasso Sea
aatgattgagaaagaaaaaattaattggatctataaaaaaatcttcacgattagattttttgaagaaagaataaaaaaaattgctaaagagaaaactgtaccaggctatcttcacacatgtataggctctgaagctatttgtgtaggagtaatggcagcattaaatcaagatgattggatatcaagtacgtatagaaatcatggtcatgctatagctaaaggttgtgaattaaacgaaattacttctgaaatttatggaagaaaaactggtatttgtaagggacgtggtggaagtatgcatataagtgattttagcaaaggtatgctaggttcatttggaattgttgcagctggtccagcagtagttttaggagcagctttacaagaaaaaataaataagagtaataaaacttgtgtatctttttttggtgatggagcaattcataatggagcctttcatgaggctgctggtttagcaaagctatggaatataccaatgatttttgtttgtgaaaacaatggttatgcggaagctactgcaactgattggcatttaaatacaaaagagttatcagatataacaaaagcttatgatatgctctcatacattggtgatggtaataatgtatttgaagtttacgatttaacaaaaaaagctattagtgaagctaaacaaaaaaatactccaatatttttagaatttaaaaactacagattttctggacagtacgaaggtgatactcaactgtatcaaccacaagaagagattgataaagcaaaacaaaatgatccaataaaattagcaaaagaaaattcatcaaaatatggtttaaataaaaatgatttagaaaaaattattaacgaagttaaaaaagaggtcgataaagcatttgattttgctgatacccaaccttggcctcaaccagaggatgcacttgaagaagtatatgtaaattatccagtggaaattaaaacatga

SEQ ID NO: 230363 - DNA, 82 bp, Unknown
  Bacterial polypeptide expressing nucleotide sequence isolated from the Sargasso Sea
attgtattttgatcaagcagagaatagaatgcatgctcagaatgcgataatggtttatctaaatgaagtaaaaaattcttag

SEQ ID NO: 230364 - DNA, 595 bp, Unknown
  Bacterial polypeptide expressing nucleotide sequence isolated from the Sargasso Sea
aatgaaacactttataaatttaaaagatattccaagtaaagatcttagaaaaataattgttgatgcaaaacaaagaaaaaaacaaagaaaaaaattaaatattttagagccagacaaaggatcgcctcttaaaggtaaaatgctagtacaaatgtttgaaaaagctagttcaagaacaagaataagcttttatttagccattaaacagcttggaggtggaacactgacactcagatctaatgaacttcatcttggacaaggtggtgagacgattgctgataccgctaaaattctatctacatatggtgatggtttcatgttgagaactgatgatgataaaaaaattgatgattttcaaaagcatttaactatcccaataataaatggtttaagtccatcatctcatccaactcaagtgttatcagatatttttactgttgaggagataaaaaaaaaaccaatatcaaaattaaaaatttgttggattggagactccaataatgttttggatagtttaattgcagcatctgttaagttttcttttagattaagtattggatgtccaaaaaaatttgcaccaggtaagaaagttaaa

SEQ ID NO: 230365 - DNA, 1069 bp, Unknown
  Bacterial polypeptide expressing nucleotide sequence isolated from the Sargasso Sea
gttgaagtcaatttacgagagcaatcgctctactaaagttttccaatcagggttagcggtttccctgttccgggatcattcgactcggacccggttttcttatgcatcggcggccaacctgctgggtttgacggtacaggatctggatgagggaaaatcccagattgcccatggggaaacggttcgtgaaaccgcaaacatgatctccttcctcacggaagcaatcggtatccgggatgacatgtaccttggagcgggtaatgcctatatgcaggaagtagctgagtccctggatcttgggagagcagatggggtgctccaccaacgcccggtggtggtcaacctccagtgcgatatggatcatcccacccaatcgatggcagaccttcaacaccttgtccagacctatggatctttggaaaacctgaaaggaaagaaaatcgccatgacctgggcctattcgcccagttacggaaagcctttgtcggtaccccaaggcatcatcagcttgatgacacggttcgggatggaggtgacactggcccatccggaaggctatgacctggttccagaatgtatgaaaaacgcttcggaattcgcctccacatccggcggaagtttttcggtcagtaactccatggaggaggcatttgcggacgcagatatcgtctaccccaaaagctgggcaccctataaggtgatggaaacccgaacggaactgctccgaaacaaggatcacaagggtttggaagacttggaacaaaaatgccttgcgcagaacgcgaagttcacgggatgggaatgtaccgaatcattgatgaagactacccgtgatggcaaagccctctatatgcattgcctgcctgctgacatcagcagtgtttcctgcgaaaagggagaagttgaagcgtcggtttttgatcgttatcggaccccgacttacatccaggcaggttacaagcctttcatcattgccgccatgatttttgcggcaaaattcgataatcctgcatcattgtttcaggacttggttcaacgtgatttgaagcgtgtgcataccatttcctga

SEQ ID NO: 230366 - DNA, 892 bp, Unknown
  Bacterial polypeptide expressing nucleotide sequence isolated from the Sargasso Sea
tatgaaacattttattaatttaaaagatattaaaaccaaagatttaaggaacattatcttagatgcaaaaaaaagaaaaaattacagaagaaaattaaataccttagaagttgacaaaggatcacctctaaaaggcaaattattaatacaaatgtttgagaaatcaagcttaagaactcgattgagtttttatttagcaatcaaacagttgggcggtggcacaattactttaagatcaaacgaacttcatcttggacaaggtggtgaaagtatagcagatacagctaaaattttgtcgacctatggtgatggatttatgcttagaactgatgatgataacaaattagaaaatttcaaaaaatatctttcaatcccagtgattaacggtttaagcccatcgtctcatccaacacaagtactttcagatatttttacagttgaagaaattaaaaaaaaatctatttcaaatttaaatatctgctggattggtgattctaataatgttttaaatagtttaattgcagcgtctgtaaaactttcatttaatttacgtataggttgcccaaaaaagttccaaccaaacttagatgtcataaattgggtaaaaaaaaataagggaaaaatttatatttataatgatcctattaaagcagctaacaacgctgatgtaatattttctgacaaggtcatatctcttaatgataaagttaataaaaaaaaaaaattaaaggaatttaaaaattttaaaattaataagaaattatttagctatgcaaaaaaggattgtatttttttacattgtttgcctcgaggcaacgaagtctcagatgaaatttttttaggtaagagatcgtatgtttggcaacaagcttcgaacagagttcacgttcaa

SEQ ID NO: 230367 - DNA, 429 bp, Unknown
  Bacterial polypeptide expressing nucleotide sequence isolated from the Sargasso Sea
tatgaccaatgaagcatatatttttgattcaattcgatctcctcgaggcaaaagaaaaaatggctctctaaatgaaataacaccaacagacttgctttcaaagcttatgcttgccttatcaattaagcatgattttgattcttcacaaattgatgatgtagttattggttgtgtaatgcctgttaatgatcagggagcaaatattggtaaaaatgcagctcagtatgcaggttgggatgtagatgttcctggtatgcaaatcaatcgattttgtggctctggtttagaagcaataaatattgctgccatgaagattaattctggatgggaaaatgtaatagtttcaggaggcgtagaatcaatgtcaagagtgccgattggggcggatggtggttcaatgatatttgagtcaaaggttagcctgaataa

SEQ ID NO: 230368 - DNA, 384 bp, Unknown
  Bacterial polypeptide expressing nucleotide sequence isolated from the Sargasso Sea
aatgaaaaattttattaatatttcagatttatcaaaaaatgatcttagggctattattgatggtgctaaaaaaagaaaatctgaaagaggaaaaatacctaattcccaacccgatgtagatttaccgataaaaggtaaaactatgattatgctctttggaaaaccatctactagaactagaatatcttttgatcttgctgtgaaacaattgggaggatcatcaattattttaaaccaagatgaaattcattatggtaaaggagatgaaacaataaaggatacagcaaaggttctttctcaatacgcagatattttgatgataagaacagactctcataatgatgttgatgaatttcaaaagcatttagatattccgataataaa

SEQ ID NO: 230369 - DNA, 433 bp, Unknown
  Bacterial polypeptide expressing nucleotide sequence isolated from the Sargasso Sea
aatgaaacaggacctactcacctttgcagattggacaccagaagcaatgcaaaaattgctgcaattggcagtagaaattaaacaagccccagccagctacagcaatgtgcttgcgggcaagtcgattgttgccctgtttgaaaaaccgtcgttgcgaactcgcgtaagtttcgatatcggcattaacaagcttggcggtcatatggtgtacttagatgctcagtcgggcaaattagccggacgcgaagatgcagtagataccgctgctaatcttgcatgctgggcagacgctatcgtggctcgcgtgttttctcacgaaacgctagaaaccttttctaaggcggcaaacgtgccggtagttaatgcactgtgcgataaatatcatccctgccagggcttggctgattacctcactatgtttgaacgcttcggt

SEQ ID NO: 230370 - DNA, 477 bp, Unknown
  Bacterial polypeptide expressing nucleotide sequence isolated from the Sargasso Sea
aattcgcctctacatctggtggtagtttttcggtcagtaactccatggaggaggcatttgcggacgcagatatcgtctaccccaaaagctgggcaccctataaagtgatggaaacccgaacggagctgctccgaaacaaggatcacaagggcttggaagacttggaacaaaaatgccttgcgcagaacgcgaagttcacgggatgggagtgtaccgaatcattgatgaagactacccgtgatggcaaagccctctatatgcattgcctgcctgctgacatcagcagtgtttcctgcgaaaaaggagaagtagaagcgtcggtttttgatcgctatcggaccccgacttacattcaggcaggttacaagccttacatcattgccgccatgatttttgcagcaaaatttgataatcctgcagcactgtttcaggacttggttcaacgtgatttgaagcgtgtgcataccatttcctgac

SEQ ID NO: 230371 - DNA, 571 bp, Unknown
  Bacterial polypeptide expressing nucleotide sequence isolated from the Sargasso Sea
atgagtaaagaaaagctatatatatttgatacaacgttaagagacggcgcacaaactcaaggagttgatttttcaattgatgataaggaaaaaatatctgcttctttagatgctctaggagttgattatattgaaggaggttggcctggagctaatccaacagatactgagttttttaataaagatcagggttttaaaaatgctaaactcactgcttttggaatgactaaaaagtctgaacatagtgctgaaaatgatcctatgttggcgtctctaattaattcaaaaagttcttcggtatgtttatttggtaaatcttgggattttcaagttgatgtagcactaggtatcaccaatgaacaaaatttagaaaatattagcgaaagtgcaaaacatatagttagctcaggtaaagagtttatgtttgatgcagaacattgttttgatggttataaagctaacccagaatacacactttcatgtttaaaggcagcttatgatcaaggcgctagatggattgtattatgtgataccaatggaggaactcttccacatgaagtatcaaagatag

SEQ ID NO: 230372 - DNA, 676 bp, Unknown
  Bacterial polypeptide expressing nucleotide sequence isolated from the Sargasso Sea
gctgatctcgcctggttgcaggagcacttcggcagcctcgagaacctcagagggcaagaagattgccatgacctgggcttactcgccgagctacggcaaaccgctctccgtgccgcagggcatcatcggcctgatgacccgctttggcatggacgtgaccctggcccacccggaggggtatgacctgatcccggacgtgatcgaagtggccaaggagaatgccaaggcctccggcggcagtttccgccaggtcacctccatggaagaggcgttcaaggatgccgacatcgtctatccaaagtcctgggcgccctatcaggtgatggagcagcgcaccgagctgctgcgggccaacgatcatgcgggcctcaaggagctggagcagcattgcctggcgcagaacgccaagcacaaggattggcactgcaccgaagagatgatggccctcaccaaggggggcgaggcgctctatatgcactgcctgccggcggatatttccggcgtctcctgcaaggaaggggaagtgagtgaaggggtattcgagaaataccggatcgccacttataaagaggcgagctggaagccctatattatcgccgccatgattgttgcccgtaaattctcggcaccgggcgccgccctcgaaggcttgataaaagaggcgcaaaaacgcgtc

SEQ ID NO: 230373 - DNA, 718 bp, Unknown
  Bacterial polypeptide expressing nucleotide sequence isolated from the Sargasso Sea
atgctttctgacaaaaatcttcatcaaaacaatatatcacttcaactatttgggcatgatgatctatttcataactttgtcaaattatataaaaataaaaatttaccaaaagtgaatttagtttcaggtgaaaagggtataggaaaattcacattatttttccatttgataatttatatattctctaaggaatataaacaaaagtacaatctagattttaaacttatcgatgaaaataatttgattttgaataaaattaaatcacatacttttcaaaattatttttatttttcaaatgaagataaaaataagttatctattgaaaaagttagagaggttaaaagaaaattatatagttcaacattagatgataaaccgagatttattatttttgatgatgttgaatttataaataacaatgttgcaaattctcttttaaaaatgattgaagaacctagtaataataattattttattttaataaataataaaaaagctaaattaattgacacacttaaatctcgttctattgaaactaaaatatttttaaattttgatcagaaagatttaatattaaaaaacttattaaaaaatcaaaatatcagcgatcattttgtttttgattatttgcatttaacgaccccggctatgcttctcaaatattataatattctgactgaaataaatgcaattctaatacctccttttttgatgtaac

SEQ ID NO: 230374 - DNA, 654 bp, Unknown
  Bacterial polypeptide expressing nucleotide sequence isolated from the Sargasso Sea
atacagctaaaattctttcgacctatggtgatggatttatgcttagaactaatagcgataaaaaggttgaaaattttgaaaaatatttatctatacccgtcataaatggtttaagtccttcatctcatccaacacaggttttatctgatgtttttactgttgaggaaataatgaagaaacctatttctaatttaaatatttgctggataggtgactccaacaatgttttagatagtttaatagccgcatcagtaaaattttctttcaagctaagtataggttgtccaaaaaaatttgaaccaggaaaaggagttagagattgggtcaaaaaaaataataaaaaaatttatatttataatgacgcaaaaaaagcagtttcaaatgcagatgtaattttttctgataaagttatttctttaaatgacaaagttaataaaaagaaaaaaataaaagcgtttgaaaattttaaaattggtaaaaaattaatgagttatgcaaaaaaaaattgcatttttttgcattgtttacccagaggagatgaagtgagtgatgatgttttcttaggaaaaaaatctcacgtatggcaacaagcactaaatagagttcatgtacaaaaaagtattttattatattgttttggaaaattaaggtagc

SEQ ID NO: 230375 - DNA, 913 bp, Unknown
  Bacterial polypeptide expressing nucleotide sequence isolated from the Sargasso Sea
ttgactggcctgatcagcctttgtctgacgtttttcgcccaagcggagtactcccgcacttacctagacagccacccactaaaaatggctagcgtgggcgaactcgacatcgcgtatcgcattgtcgagcccgggcctgacaaacccaaagtagtggtcatcatgggcttgggaggttcgaatgtgacgtggggcgacgcactgatatccgggctggccaacggcggctacgaaatcctgttactggataaccgcgacaccggcgactcgacccgctttgatgagtgggggcaacccgttttgtggtgggagttccttaaataccagctggggttttcagtcaacgcgccttacacgttggacgacatgggggccgatattgccggcctcatggacgtggtgggttacgataaggcgcatattatcggcgcgtcgatgggtggcatgattgcccagattgtggcggcccagtaccccgaaaagacccgcggtttggtctcgattatgtcgacaaccaatgcgccgcacctaccgccgccgactgacgaggcggagaatagattacgcaacctggcgacgggtgaagcagaagcggaccgcgagcaagccatccgagatcgggggttttacccagagtccatgcagcgccacctgatggccatcttcaaaaccggagatcgttcagacgaggtggccaccattgccgctcccaccttggtgttgcacggggcagatgacggcttggtgccgcccgagcatgggcggcataccgcatcactgatcccggattcccgctttttgctggtcgagggtatggcgcacgatatgcccgaggacatcatcccgctgctggtcgatgagatgaccgaccacatggacgccgttgatgcaagcgcgctcgccacccgctagc

SEQ ID NO: 230376 - DNA, 175 bp, Unknown
  Bacterial polypeptide expressing nucleotide sequence isolated from the Sargasso Sea
atgaaaaactttataaatatttctgactatagttcagtagagctaagagcaataatcgaagaagcaaagaagagaaaacaaaatagatctgggttaaataaatctgctcctgacaatgataagccctttgagggtaaatcgatggcaatgatttttgagaaaaccttctactaga

SEQ ID NO: 230377 - DNA, 649 bp, Unknown
  Bacterial polypeptide expressing nucleotide sequence isolated from the Sargasso Sea
gttgtcttcctacgtagatggaataattgcgagagtaaactcacatgcatctttaaccgagatggcgaccttttctgctgtacctatcattaatgcattgtctgatgtagagcatccgtgtcaggctgtggctgatttattgactattagtgaatataagtctatttctccagaaactaaacttgcctttgtaggggatgggaataatgtatccagaagtttgtctttgatgtgtgcttctgttgggataagtttttctattgcgaccccaaaaaaatatgaattagatcaagatacggtgaaccttgctgcagatatggcggcaagatcaggtgctacgatgacatattgcaacgacccgatcgaagcggtgtatcaggcagatatagtgtatacagacgcatggaccagtatgggccaagaaaaagaatcagaacaacgtataattgattttcagggattcacggtgaatgaggaattattgactaatgcaaaccccgaagtgatattcatgcacgatatgccagttcattatggtgaagaggttcccaaaaatatgttaagctcctcccaatctgttgcctataagcaagcatttaatcgtttacctgcccagcaggcaatactagaatatatatacaagggctaa

SEQ ID NO: 230378 - DNA, 266 bp, Unknown
  Bacterial polypeptide expressing nucleotide sequence isolated from the Sargasso Sea
aaattccgctgactcagtaatgacagatgtctttaattcaatgaatgatactgaaaacaaagagagcgtgctaaacaaatttcaagttaatgaggaactcatgtcaagcacaaataaaaatacagtgtttatgcactgtttgcctgctaagataggatctgaagtgacaaagggggttataaaaggcccaaaatcaattgtactcaaacaggcagaaaataggctaattgcacaaagaggtattttaaaatggttaaaaacctaac

SEQ ID NO: 230379 - DNA, 274 bp, Unknown
  Bacterial polypeptide expressing nucleotide sequence isolated from the Sargasso Sea
gtaatctatacagacgtaagggcatcaatgggccagaaagaggaagccgagacaagagaaaaaatattttccaactttcaagttaattctaaaatgatgaatatgactaacaaagaaaccctccttatgcattgccttccagctgaaagaggtcgcgaagttaccgatgcagttatagaatcctcaaattcgattgtttttgatcaagcagaaaacagaatgcatgcacaaaatgcgatcatggttaaacttatgaaagaatcaaattcgtaat

SEQ ID NO: 230380 - DNA, 221 bp, Unknown
  Bacterial polypeptide expressing nucleotide sequence isolated from the Sargasso Sea
aaaaaataataaaacgaaatattttaaaaattttactgtgaataaaaaaattataagcaaagctccaaaaaatgtaattttcatgcattgtttgcctgctaaaagagggcaagaagtgacatcagatgttttagatggtaaaaattctgtagtactaatgcaagcaaaaaatagaatgtatattcaacaagctatattaatatatgtacttaaaaaatagt

SEQ ID NO: 230381 - DNA, 187 bp, Unknown
  Bacterial polypeptide expressing nucleotide sequence isolated from the Sargasso Sea
gtgaactctagactgttagaatatacaggaaataatgccctagtatttcattgtctccccgcagaaagagacaaggaaattactgatgaagtcattgaaggtccccagtcagttgtatttgatcaagctgaaaacaggttacatgctcaaaaggctattctcgctcagctagacaaatggcactgag

SEQ ID NO: 230382 - DNA, 253 bp, Unknown
  Bacterial polypeptide expressing nucleotide sequence isolated from the Sargasso Sea
cacctggctttctatgaatgacgatgaaaatgaaagatcaaaaaaaattcaaatcctaaataaatatcaggttaatagtgacttatttgcaaaagcaccgatcgatgcaatatttttacactgtttacctgcacacagagggcaagaggtcactgacgcagtgattgattccgataggtcttatgtctaccaacaagctgaaaatagattacacgtacaaaaagctattcttaaacattgtataccttactaa

SEQ ID NO: 230383 - DNA, 478 bp, Unknown
  Bacterial polypeptide expressing nucleotide sequence isolated from the Sargasso Sea
gatgaaaaattttataaatatatcagatcattcctcgagtgatttaagagccattattgatgaggctaagactagaaaacttagtagaaaaggatttaataaatctgctcctgatgacgacaaaccttttgagggaaagtctatggcaatgatttttgaaaagccctcaacaagaacaagaatgtcttttgatattgctgctaagcaattaggagggtcttctattattttaaacccagatggaattcattatggaaaaggggatgaaactttaaaagatactgcaaaagttttaactgaatatgtagatatagttatgcttagaacatcttcgcacaaaaatttagaagagtttggcaaacatttagatattccaattataaacggtctttctgacaaaagtcatccgtgccaaattatgtcggatattttaacatatgaggaaagcaatggttctataacgggtaaaacagtttct

SEQ ID NO: 230384 - DNA, 676 bp, Unknown
  Bacterial polypeptide expressing nucleotide sequence isolated from the Sargasso Sea
attgggttttgataataaaagagagaaagccgaagatgttcttaatgtattaggtcaatatattgattgtataatgattagaaataataaccataaacaattagtaaaattaagcaaagaaaatattcttcctattataaatggtttaactgaatatagtcatccgtgtcaaatacttggcgactttttaacgttacaagagaattttaaaagtttgaaaaatgtaaatattgtttggataggtgattataataacgttctacgttcacttattcatttgcaaaatatttataatttcaaacttaatgttgttgttccaaatcaaatttttaaaaattatgaaaaagagtttaagcaatacaaaaataaaaatttaaatcattttattgatcctatcttaggtacaaaaaattctaattgtataatgaccgatgtttggatttctatgggtgaaaaaaatcaggataaagtaaaatattttaaaaaatttaccgtaaataatagaattatgagtaatgcatctagtaatgcaatatttatgcattgtttaccagccaaaagagaacaagaagtcacatcagatgttctggatagtaaaaattctgttgttttaaagcaagcaaaaaatagaatgtatattcaacaagcgatattaatttatgtacttaaaaaatag

SEQ ID NO: 230385 - DNA, 484 bp, Unknown
  Bacterial polypeptide expressing nucleotide sequence isolated from the Sargasso Sea
aaacaaaaatgtctctaaactaaagttatgttggattggagatgccagtaataatatgatgaacagtcttatagaagcatgcataaaattttcgatatctttaaatattgccagtccaaaagactatcaaccaaataaagcacttatctcatggattaaaaagaagaaaggaaaagtaaaaatttttaataaaaaagaattagcagttaaaaattgtgatgtagttatgacagataagatcatttcattgaatgatagagtaaataagaaaaagaaattaaagtcatttaaaaattttaaagttgatatcaaaactatgagttttgcaaagaaagatgcaatatttttacattgtcttccaagaggtggtgaggtcacggacgaagtttttttaggaaggcaatcaaaagtgtggcatcaggcacttaatagggttaatgttcaaaaaagtatcttgttgtattgttttgataaattaaggtaa

SEQ ID NO: 230386 - DNA, 281 bp, Unknown
  Bacterial polypeptide expressing nucleotide sequence isolated from the Sargasso Sea
tgctattaaaaataaaaatgttgttataacggatacttggaattccatgggagacggatctgttaacaaggaaaactcattgatgccatatcaagtaaataaaaatcttataaaaaaagctaaaaaagatgctgtttttatgcattgtttgcctgcccatagaggacatgaagtaacatcagaagttattgatagtaaacaatccttaatctttgaaggagctgaaaacagattacatgtgcaaaggtcaattatttggtggtgtctgaataatggatgaa

SEQ ID NO: 230387 - DNA, 823 bp, Unknown
  Bacterial polypeptide expressing nucleotide sequence isolated from the Sargasso Sea
aatgaaaaattttatagatatttctgatttatcttcaaaggctttgagagcaattatagaagaggcaaaatcaagaaaaataaaaagaaaaagtttaaataaatcggcaccagatgaagataaaccttttgaaggaaaatcgatggcaatgatttttgaaaaaccctctacaagaacaagaatgtctttcgatattgcagtcaaacaacttggcggttcatctattatcttaaatcctgacggcattcattatggaaaaggtgatgaaactttaaaagatactgcaagagtattaacggaatatgtagatatagttatgttaagaacgtcctctcataaaaatttagtagagtttggaaaacatttggaaataccaattataaatggactttctgatcaaagtcatccttgtcaaatcatgtcagatataatgacttttgaagaaacaaaaggtttgataactggaaaagttgtttcttggttaggagatggcaataacaatatgtcaaattctttgatagaggctgctggcaagtttggttttcaattaaaaataggttgtcctaaaaaatatatgccaaacaaaaaaatattaaattgggctaagaagaataaagtaaatctattaataacaaaaaaaccagaagaagcagtcaaagattccgattgtgtcatgactgacaaatgggtttcaatgaatgacaaagtaaacaaaaaattaaaaaagaaaaatttaaaagattatcaagttaataaaaaattaatgaagaaagcaaaatcagatgcaattttcatgcattgcttgcctgtaggaagaggagaa

SEQ ID NO: 230388 - DNA, 179 bp, Unknown
  Bacterial polypeptide expressing nucleotide sequence isolated from the Sargasso Sea
ggatagtaatttattagataaagcagataatgatgcaattatccttcactgtttacccgcttacagatctaaagaaataactgatgaagtaattgaaagtaaaaaaagtagaatttttgagcaagcagaaaatagaatgcatattcaacaagctcttctgtcctgccttctttcataaa

SEQ ID NO: 230389 - DNA, 777 bp, Unknown
  Bacterial polypeptide expressing nucleotide sequence isolated from the Sargasso Sea
ttggactcttattcttaaaacaatcaatgagaacaagatcaagttttattgttggaatgcaaaaaatgggagggagcgttatagaattagatccaaaaacaataggatttggtttacgagaaactgaaaatgatattttaaaagttttatctcaatatattgattgtttgatgatcagaaataatgatcataaacaaattttatttttaagttcattaaattatttacctattataaatggattatctgagtatagtcacccatgtcaaattttatcagatcttctaactttagaagaatgtttaggaaatataaaaaagaaattaatatgctgggtgggtgattataacaatgttttacgttcattaattcatctacagcacatctacttatttaaattaaatgttgttttgccaaaagagattattaaaaaaaatcataaaaacttaaataaaaataaaaataataatttaataattactaacaatatcaaagacggtgtttctagaactaattgtataatgacagatgcttgggtttctatgggtgaaaaaaatccacacaaaaaaaaatattttaaaaattaccaaataaataatgatattatgaaattttcaaacaaagattgtatttttatgcattgtttgcctgcacatagagaagaggaagttacctcagaagtaatagatagtaccaagtcagtagtttggaggcaggctaaaaatagaatgtatgttcagcaagcaattttaaaaaatataataaaaagaaaatgaa

SEQ ID NO: 230390 - DNA, 684 bp, Unknown
  Bacterial polypeptide expressing nucleotide sequence isolated from the Sargasso Sea
ttcactatggcaaaggagatgaaacattgaaagatacagcaaaggtattaacagaatatgtagatattgttatgttaagaacttcgcttcataaaaatcttgaagagtttggaaaatatcttgaaatcccaattataaatggcctctcagacaaaagtcatccatgtcaaataatgtccgatgtattcacttttgaagagattaaaggttcaattacaggtaaaacaattgcgtgggttggtgacggcaataataatatgtctaactcattaatcgaagccgcagcaaagttaaactttaatcttaaaattggttgcccgtcaaagtattctccaaatagagaaattcttaattgggctaagaaaaataaagtaaacctgactgtaacaaaaaaacccgaagaagctgttaaagattctgattgtgttatgactgacaaatgggtttctatgaatgataaggtaaataaaaaattaaaaaagaatagtttgaaaaattttcaagtaaataaaaaactaatgaaatttgctaaaccagatgcaatttttatgcattgtttacctgttggcagaggagaggaagttactgatgaagtaatagacggaaaacaatctgtggtttggaggcaagctcttaatagagttcatattcaaaaaagtattattacgtggtgtttaaattaag

SEQ ID NO: 230391 - DNA, 541 bp, Unknown
  Bacterial polypeptide expressing nucleotide sequence isolated from the Sargasso Sea
tggtttaacagatttaagtcatccatgccaaatcatgtcagatattatgacctttgaagaattaaaaggacctataaaaaataaaaaaattgcctggttaggtgacggcaacaatatagttcattcgttaattgaagcatcagttcagttcaattttaaattagcgattgcttgtccagaaaaatataaaccaaacaaaaaaataattaaatgggccaaaaaaaagaaggcgaatattttaattacaaatgatccaactaaagctgctacttctgccgattgtgttatgactgataaatggatttctatgggagataaagtgaataaaaaaaaaaagaaaaaaaagttaaaatcttatcaggtaaattcaaaaattatgaagctagctaaacccgatgcaatttttatgcattgtttgcccgcgaatagaggagaagaagtttcagatgaagttattgatggaaaacagtcggctgtgtggcttgaagcgctaaatagaatccacgttcaaaaaagcattattcaatggtgtttaaaataa

SEQ ID NO: 230392 - DNA, 892 bp, Unknown
  Bacterial polypeptide expressing nucleotide sequence isolated from the Sargasso Sea
ttcatttttaatatgaaaagtttattgaatatatctgacttaaatcaaaatgacttcgataatattttgcagttggctgatgacctaaataataaaactgagcaaattctcactaataaaaatataggtttaatctttgaaaaaaattctactaggaccagactctcatttcaagtcggtattaatcaacttggtggcaattatattgatgtgagatttgaagaattgaacttaaatagattcgagtcctatgaagacacatttgaagtgatgtcttgttaccttgactatctagtttttaggacaaccgatcataaaaaattagatttagcccataaattttttaagaaaccaataattaatgccttatctgatttatcacatccttgccaggccatttcagatctttacacacttaaagaaaattttggatctataaataatttaaacattgtttggatgggggatatgaataatgttttattaagtctgttagaggctataagttttacaaaaaatacaaaagtcgatgtatttacagatgaagcgatatactctcataataaagatagttttaatcttaacaaaaatataaatttccattttaatattaatgaagaaattattgctaaagcaaattgtataatgactgatgtttttacctccatgaatgataaagaagataaagaaaatttattaagtaaatttcaagttaatgaaaatataatgtctttgacagataaaaaatctgtatttatgcactgtcttcctgctaaaattggctctgaagtaagtgaaggtgttataaaaggagaaaaatcaattgttctcgcgcaggccagaaataggttagtagctcaaaaaggtattcttaaatggttaagcacttaac

SEQ ID NO: 230393 - DNA, 640 bp, Unknown
  Bacterial polypeptide expressing nucleotide sequence isolated from the Sargasso Sea
agttttatcggagtatgtcgatatcgttatgttgagaacttcatctcacaaaaatttggaggagttcggaaagcatttagatatcccaattattaatggtctttctgatctaagccatccatgtcaaattatgtctgacattcttacttacgaagaaagcaatggttctatcgagggtaaaactatttcttggattggagatggtaataataatatgtcaaattccttgatagaagctgctgggaaatttaattttaaacttaatattggttgtccaaaaaaatattctccaaataagagtatattgaagctagcgaaaaaggagaaagtaaaattaacaattacttcaaaacctttagaagcggctacaggcgctgattgtgtaatgactgacaaatgggtttcaatgaatgataaagtaaataaaatttctaaaaagaaaactttaaaaccttaccaggttaataagaaattaatgagcaaagctaattcagacgctgtttttatgcactgccttccagtaggaagaggagaagaggttacaaatgaagtaatagatggaaaccaatcagtagtttggagacaagcattaaatagagtgcatgctcaaaaaagtattattaaatggtgtatcgattag

SEQ ID NO: 230394 - DNA, 309 bp, Unknown
  Bacterial polypeptide expressing nucleotide sequence isolated from the Sargasso Sea
atgaaaatattaattttcatttcgatataaatgaagaaatcatttctaaagcaaattgcattatgacagatgtgtttacctcaatgaatgataaggaagataaagaaaaaatattaagtaaatttcaagtaaatgataaaattatgtctatgacagatgaaaaatctgtattcatgcattgtttaccagcaaaaattggctccgaagtgaccgaaaatgtaattaaagggaaaaagtctatagtgcttacccaagcaaaaaataggcttgtagctcaaaaaggtatccttaaatggttaagcacctaac

SEQ ID NO: 230395 - DNA, 793 bp, Unknown
  Bacterial polypeptide expressing nucleotide sequence isolated from the Sargasso Sea
aaaggatccccgcttaaaggaaaaatattgatacaaatgtttgaaaaaccaagctcaagaacaagaataagtttttatttggcaattaaacagttaggaggaggaactttaacattaagatctaatgagcttcatttaggtcaagggggagaaagtattaccgatacagccaaagttctctctacttatggagatggttttatgttgagaactgatagcgaaaaaaaaatggaggactttaaaaaatatttgtcaataccaataataaatggtttaagccctttatctcatcctacacaagtattgtctgatattttcacagttgaagagattaaaaaaaaacctatttcaaaattgaacatttgttggattggtgactcaaacaatgttttaaatagtttgatagccgcctctgtgaaattttcatttaagctaagcattggctgcccaaaaaaatttgaacctggaaaagaagttaaaaactgggttaaaaagaacaataagaaaatttatatttacaatgatccaaaaaaagcagtctctggtgctgatgtaatattttcagataaggtaatttcacttaacgataaagtgaataagaaaaaaaagatctatgcgtttaaaaattttaaaataaataaaaagttagttagattggcaaaaaaggattatatatttttgcattgtctaccaagagaaaatgaagtttcggaagacgtttttttgagtaaaaattcatatgtaaggcaacaagcacttaatagagttcatgttcaaaaaaagtattttatta

SEQ ID NO: 230396 - DNA, 601 bp, Unknown
  Bacterial polypeptide expressing nucleotide sequence isolated from the Sargasso Sea
tcttctcataaaaatctagaagagtttggaaaacacttggatataccaattatcaatggtttgtcagatattggtcatccttgtcaaattatgtcagacattctcacttacgaagagagtaatggaactatcgagggtaaaacagttgcttggttaggagatggaaataataatatgtctaactctctaattgaagctgctggaaaatttaaatttaatttaaaaattgcttgccctaaaaaatactccccaaataaaaagatactaagttgggcaaagaaaaataaggtaaaacttagtgtaactacgaaaccccaagatgctgtaaaaaattcagattgtgtaatgactgataaatgggtttcaatgaatgacaaagttaataaaaaagcaaaaaaaaaaattttaaagccttttcaagtaaataaaaagttgatgagtaaagcaaattcagatgcaatttttatgcactgcctcccagttggaagaggagaagaggtaacggacgatgtaattgatggaaaacaatccgttgtttggagacaagcacttaatagagtgcatgcacaaaaaagtataataaagtggtgcttagattaag

SEQ ID NO: 230397 - DNA, 187 bp, Unknown
  Bacterial polypeptide expressing nucleotide sequence isolated from the Sargasso Sea
tactgtaaataaaaaaattatgagtaatgcatcaagtaatgccatatttatgcattgcttgcctgctaaaagagaaaaagaagttacatcagatgttcttgatggtaaaaattctgttgtattaaatcaagcaaaaaatagaatgtatattcaacaagcaatattaatttatgtacttaaaaaatag

SEQ ID NO: 230398 - DNA, 783 bp, Unknown
  Bacterial polypeptide expressing nucleotide sequence isolated from the Sargasso Sea
aatgaaacaggacctactaacctttgcagactggacacccgacgcaatgaaaaacttgctgcaattggctgtagaaattaaacaagccccagcaagttacagcaacgtgctagcggggaagtcaattgttgccctgtttgaaaagccatctttgcgaacccgcgtaagcttcgatattggtattaacaagcttggcggccacatggtgtatttagatgtgcagtcgggcaaactagcaggccgtgaagacgcagtagacaccgccgctaaccttgcgtgctgggctgacgccattgttgctcgcgtattttctcacagcacgctggaaaccttttctaaggctgcaaatgtgcccgttatcaacgcattgtgtgataaatatcatccatgccaaggtcttgccgactacctcacaatgtttgaacgcttcggcaaaaccgaaggtcttaccatggcctatgtaggcgacggcaacaatgtaactcactcactgttaattgttggtgcgcttttaggatgtaaccaagttgtagtcacgccagaggggcacgaagcggcacctgaaattgtggcgcaagccaaagcgattgccgagaaaacgggtgtatcgattgttgaaagcactgagcttagtgctgctaacggcgcagatgttatctatgcagatacatggctttcaatgggtgacgagacgccacttgaagtgatcaaagaaaagttcatgccttatcaggtgaacgaagcgttgatggaagcaaccggtgctagctacgttatgcactg

SEQ ID NO: 230399 - DNA, 367 bp, Unknown
  Bacterial polypeptide expressing nucleotide sequence isolated from the Sargasso Sea
cctaaaaaatatgaacctgataaaaaaatagtaaaattagctaaaaaaaataattgcaaacttttaattacagaggatccttttaaagcagcaaaagatgcagattgcataatgacagacaaatggatttctatgggtgacaaaggagataaaaataaaaaaaagaaggctctcaaaaaatatcaggtaaacaaaaaactcatgaaagttgcaaaatcagatgcaatttttatgcattgtcttccagcaaatagagaagaagaggttacaagtgaggttatggacggcaagcagtctgtagtttggctacaagccttcaataggatccatgcgcaaaagagtataattgaatggtgtatgaaataat

SEQ ID NO: 230400 - DNA, 373 bp, Unknown
  Bacterial polypeptide expressing nucleotide sequence isolated from the Sargasso Sea
atggctccgagcgtcgccgctgctctcaccgcccttaacaggcgtgactatctctcttcggcggattgttctgcagaggagaccaggggtttgattgatcttgctgttcaactcaagcggggtgaacgtcggattgatctcggcaaccgggtgctcgggctgatcttcacgaaggcatccacaagaaccagggtcagcttccaggtcgccattgcccgtctcggcggccagaccgtggatctcaatccgagcctcacccagcttggtcgtggagaacccctgcaggacacagcgcgggtgctcagtcgctactgcgatgttttggcgatccgcacatttacccagcaggaacttgtggattacgcccactggg

SEQ ID NO: 230401 - DNA, 499 bp, Unknown
  Bacterial polypeptide expressing nucleotide sequence isolated from the Sargasso Sea
tatgttggcgaattttattgatatcgcagatcatgacagcaaagacttgaaaaaagttttgttgctagcacatcaaatgaaatcgaggttaatttcaccaacacctttgttaggaaaaatggtggccatgatatttgaaaaaagttctacgcgaacaagaatctcatttgaagttggtgtaaaacagcttgggggcacgccgatagttttaaactcaagtgatatgcagctatccagaggggaaacaatagctgataccgcgaaagtcatgtcgagatatgtggacgcggttattatacgtgcgctatttcatcaaactatacttgacttcagcaaaaatgccgatattcccgtcatcaacggtctttctaatctttcccatccttgccagataatgtcagatatcatgacaatcgaagaaaactttgactcagtcgaagaattaactatttcctggtttggagattcaaacaattactcaaaagttggattgatgcag

SEQ ID NO: 230402 - DNA, 313 bp, Unknown
  Bacterial polypeptide expressing nucleotide sequence isolated from the Sargasso Sea
atgaaaaattttatcaacatctcagacttgacctctacagaattaagatcgataatagatgaagcaaaatctagaaaattaagtagacaaaactttaaaaaatctgaacccgacaaagacaaacctttcgaaggaaaatctatggcaatgatttttgaaaaaccttcaacaagaactaggatgtcttttgacatagctaccaagcagcttggaggatctacaattactttaaatccagatggaattcattatggaaaaggcgatgagaccttaaaggatactgcaaaagtattatccgaatatgttgatatgt

SEQ ID NO: 230403 - DNA, 134 bp, Unknown
  Bacterial polypeptide expressing nucleotide sequence isolated from the Sargasso Sea
tcattgccttcctgcttatagatcaaaagagataactgatgaagtgattaatagtagtaaaagtagaatttttgatcaagcagaaaatagaatgcatgcccaacaagctcttttggcatgtttactttcctaaa

SEQ ID NO: 230404 - DNA, 325 bp, Unknown
  Bacterial polypeptide expressing nucleotide sequence isolated from the Sargasso Sea
aaaaaaaacaatgggaagtatctcaatcactaaaaatcctttagaagcatcaaataacgctgattgcgtcataaccgataaatggatttcaatgggagataaaataaataaaaataaaaagaaaaatgcgcttaaaccttatcaggtaaataaaaaaataatgaaatctgcaaaaaaagattctatttttatgcattgtcttccggcaaatagaggagaagaggtgactaatgatgttatggacggaaaacaatctgcggtttggttagaagccctaaatagaattcatgctcaaaaaagtattatagaatggtgtcttaaataa

SEQ ID NO: 230405 - DNA, 368 bp, Unknown
  Bacterial polypeptide expressing nucleotide sequence isolated from the Sargasso Sea
gatgataaaaccaatcaagcttgctaataatcactttttatcaagcttggatgtatcttctgaggaatgtattcatattttagaggttgcgaaaaaatttaaaaacgacaactttaatattgaactgaaaaataaagttttgggtttaatttttgataaatcttctacgcgtaccagagttagttttcaagtggctatgtcgagacttgggggcacaactattgacctaaatcccacaacatcacaaataggaagaggcgaaccaattaaagatactgcaagagttctaagtagatattgtgatgttatcgcaattagaacatttgatcattctgatttagaagaatatgcaaagtggtcaacaaagc

SEQ ID NO: 230406 - DNA, 649 bp, Unknown
  Bacterial polypeptide expressing nucleotide sequence isolated from the Sargasso Sea
tatgaataaaagagatttcaaatctttaatagatataaatactcaagaattcttgaagataattcaaagagccattacttttaaagagctagataaattaaataaaacacccaggccgttcttgaataaaacattagcgatgatatttaagaagaattctaccaggacaagagtttcatttgaaactgcaatgtataaattaggtggacatgcaatatttttatcagaagattcctctcagttaaaaagaggtgaggatatctctgatactgctagagtaatttcaggtatggttgatctaattatgatgagaacgaacattcatgatgaaattaagacacttgcaaaattttcctcagttcccgtgattaatggcctttgtaacctttttcatccctgccaattactagctgatatgcagactgtagcagaaataaaaggaaatgatttttccaaaatgacaattgcatggattggagatggcaacaatatgtgtaactcttatattaacgcatctaagttattaaattttaaacttaaaatatcaacaccgaatggttatgaacctgattcgtatacgcttgaaaaatttgggaataatgtggaattatgtgatattccaggaactgctgcccacatgctgacatag

SEQ ID NO: 230407 - DNA, 754 bp, Unknown
  Bacterial polypeptide expressing nucleotide sequence isolated from the Sargasso Sea
aatgaaaaattttattaatatttcagatttatcgaaaaatgatcttagatcaattatcgatggagctaaaaaaagaaaatctgaaagaggaaaaatacctaattcccaacccgatgtagatttaccgataaaaggtaaaaccatgattatgctttttggaaaaccatctacaagaacaagaatatcttttgatcttgcagtgaaacaattaggaggatcatcaattattttaaaccaagatgaaattcattatggcaaaggagatgaaacaataaaggatacagctaaggttctttcacaatatgcagatattttgatgataagaacagactctcataatgatgttgatgaatttcaaaagcatttagatattccgataataaatggactaacagacctcagtcacccgtgccaaataatggctgacattttaacttttgaagaatcaaaaggagatattaatggcaaaactattgcgtggctaggagatggaaataatgtagcaaattcttttattgaagctgcaaccaagtttaaatttgagtttaaaattgcttgtccaaaaaaataccagccaaataaaaaaatagtaagtgaagcaaaaaaaaacaattgtaaacttttaattaccgaagatcctttcgaagctgtcgagggcgcagattgtgtaatgaccgataaatggatatctatgagtgataaaggcgacaaaaagaaaaaaaagaaaattttaaaaaagtttcaggttaataaa

SEQ ID NO: 230408 - DNA, 793 bp, Unknown
  Bacterial polypeptide expressing nucleotide sequence isolated from the Sargasso Sea
aatgcttgtacaaatgtttgaaaaagctagttcaagaacaagaataagtttttatttagccattaaacagcttggcggcggaacattgacactcagatctaacgaacttcatcttggacaaggaggtgaaacgatagccgatactgctaaaattctgtctacatatgctgatggtttcatgttgagaactgatgatgataaaaaaattgacgatttccaaaagcatttaactattccaataattaatggcttaagtccatcatctcatccaactcaagtgttatcagacatatttactgttgaggaaattaaaaaaaaaccgatatcaaaattaaaaatttgttggattggagattcgaataatgttttggacagtttaattgcagcatctgttaagttttcttttagattaagtattggatgtccaaaaaaatttgcgccaggtaagaaggttaaagattgggtaagtaaaaacaaaaaaaaaatatttatttatcatgacccaaaaaaagcagctttggatgcagacgtaattttttctgacaaagtaatatctttaaatgataaagtgaacaaaaaaagaaaaaaacaacattttcaaaaatttaaaattaaaaaagagatatttaattatacaaaaaaaaattgcatttttttgcattgcttgccaagaggcgatgaggttgaagaggaggtattccttggaaaaaattctcatgtgtggcaacaagcattgaaccgagtccatgttcaaaaaagtattctattgtattgttttggaaaactaaggtag

SEQ ID NO: 230409 - DNA, 628 bp, Unknown
  Bacterial polypeptide expressing nucleotide sequence isolated from the Sargasso Sea
ttcacaatatattgattgtctaatgatacgaaataatgatcataagaaaattttagattatgcttctttaaactatattcctattattaatggcttatcagattttagtcacccttgccaagttcttggtgattttttaacattaaaagaaaaaataggtaatattaatgatataaaagtttgttggattggtgattataataatgttttaagatcattaattcagattcagaaactttattcttttaagcttaacattgtcttaccaaaagagataataagaataaataataaatcaataactaaaattgcaaataaaaatttaaaaattacttatattattgatgaaggaataaaagatatcaattgtataatgactgatgcatggttgtccatgggtgaaaaggatattaaaaagaaaaaatattttaaaaaatatcaaattaataaaaagctattaagtaatgcaggcaaaaatacattatttatgcactgcttacctgcgacccgtggtgaagaagttacaagtgaagtattagacggaactcaatcaatagtttgggaacaggctaaaaatagaatttttgctcaacaggctatattaaagtatatgattaaaaaaaaatga

SEQ ID NO: 230410 - DNA, 464 bp, Unknown
  Bacterial polypeptide expressing nucleotide sequence isolated from the Sargasso Sea
aatggaatatttatcaaaaaatttcatcaatctacacgaactgaaaaaagccgaactgattgaaatattatcatcagcagagcagttgaaagctgatcgaaattctcaaagaaatttattagatggaaaatcattaatactcctatttgacaagccatcaacaagaaccagaatttcatttgaacttgcaatatctgagcttggtggttcgtgtatttatctagatatgaaaactacacaacttggaagaggtgaaactattaaagatactgctaaagtattatcaagatacgtggatggaataataatcagaaatgctaatcatcaagacttgattgaattctccaaccactcagcaatatcaatcattaatgctcttaccaatgaaagtcatccttgccaaataatggctgatttaatgactttaaaagagtgctttggaacaattgatggccttaaagttg

SEQ ID NO: 230411 - DNA, 310 bp, Unknown
  Bacterial polypeptide expressing nucleotide sequence isolated from the Sargasso Sea
aacttttaaagtgaccaatgatccatattttgcagtaactggagcaaacgttctttatacagatgtttggtcctctatgggagaagaaaatctccaagataaaaaagataatgattttactggttttacaattaattctgatttagtcagcaaagcagaagataatgcaattatccttcattgtcttccagcttatagatctaaagaaataactgatgaggtaattgatagtgaaagttctaggatttttgaacaagcagaaaatagaatgcatgttcaacaggcacttttatcatgcctcctttcttag

SEQ ID NO: 230412 - DNA, 589 bp, Unknown
  Bacterial polypeptide expressing nucleotide sequence isolated from the Sargasso Sea
tatgccaaatttcatagacataaaagatctgagcaaaagtcaacttaatcaaattattgaaaatgcaaaaaattggaaatcaaaacaagctccaaattttttaaaagataaaaatattattatgatttttgagaaaccttcacttagaacaagggtatcttttgaggtgggcgttaagcaattaggtggagcggttacagtactaaactctagtgaatttgcaatgggggaaagagaaagtatttatgatacagtaaaggtattagagagatatatagatatgattgtaattaggtcttttgaccatagtcttatagaagagttttcaaaaatttcaaatgtgcctgttataaatgctctcactgatcatagtcatccatgtcaggtggtttctgacttgctaactattaaagaaaaactcggaaaaattaaccaaaaaaaaatctcatggtttggagattgtaataatgtcactcaaagttggattgaagcagcagttatatttgatattgaactttttattgcaactccaaaaggaattaaacctaatgcaaaaacaatggattggataaaaaaaaacaatgacaag

SEQ ID NO: 230413 - DNA, 205 bp, Unknown
  Bacterial polypeptide expressing nucleotide sequence isolated from the Sargasso Sea
aaaagaaattattttaaaaattatcaagttaatagtaaggttatggaaatggcgtctagaaaagctatttttatgcattgtcttccagcttataggaatcaagaagtgtcctcagaattacttgatagcaataagtctgttgtttggcagcaagcacaaaataggatgtatgttcaacaagccataattttggaccttttatgaa

SEQ ID NO: 230414 - DNA, 223 bp, Unknown
  Bacterial polypeptide expressing nucleotide sequence isolated from the Sargasso Sea
aaaaataaaaataaaataaaatattttaaaaattttactgtcaattctgaaataattaattcagcttctaaaaaagttatttttatgcattgtttaccagcaaaaagaggttttgaggtaacatccgatgtcttagatgggaaaaactcagtagttcttcagcaagcaaaaaatagaatgtatgtacaacaagcaatattgatttatgttcttaaaaaatagt

SEQ ID NO: 230415 - DNA, 787 bp, Unknown
  Bacterial polypeptide expressing nucleotide sequence isolated from the Sargasso Sea
tatgcctaatttcatagatttgaaagatctaacaaaagatcaacttattcatttaatttcattatcattaaaatggaaaaaaactaattgtgctaaatttatgacagataaaaatgttgttcttattttcgaaaaaccctctctaagaactcgtatatcttttgaagtaggaataaatcaattaggaggcaaaagttatcttttaaatgaaaaagaaatgcaattaggcgaaagagagactgtcgaagatactgcaagggttcttgaaagatatgctgatatggtaattataagatgttttggacatgatcaattaatcaagtatgcaaacatatctaatgttccagtaattaatgctctaactgattttagtcatccatgccaagttgtagcagatttagttacaattaaagaacatctaaatgattttgcaaataaaaaagtttcttggtttggtgactgtaataatgttttgcaaagttggatagaggcttctgttttacttaattttgaattaaaaattgcttgccctgagggtgtaaaaccagatgaaaaaataatatcatgggctcttgaaagaaataataatataattattacacataatcctcaggaagccgcagaaggtgctaattgtatcattactgatacatggagatcaatgggtgataaaaatccatttccagaagaaaaattcttgccatttcaagtcaacaaaaaaatattagaattagctgacaaaaatgctatttttatgcattgtttacctgcttaccgaaataaagag

SEQ ID NO: 230416 - DNA, 574 bp, Unknown
  Bacterial polypeptide expressing nucleotide sequence isolated from the Sargasso Sea
ttaaaattagcttctcaaaatgtaataccagttataaacggcttaactaattatagtcacccatgtcaaatactgggagatttcttaacaattcaagaaaaatttaaaactttaaaaaattataaaattacatggattggtgattacaataatgttctagtttccttattgcatcttcaaaatatatatttttttaacttaaatattgttattccatcaaaaattttgaaattaaatcaaaaaaaaataaatcaatatgccaataaaaatctaaaattatttactgatcctgtcctgggatcaacaaactctaattgtattatgactgatgtttggctttcaatgggtgaaaaagataaaaataaaattaaatactttaaaaattttactgttaacaaaaaaattattaacaatgcggcaaagaatgtaatttttatgcattgtttaccagcaaaaagaggtagtgaggtcacgtctgaaattctagatggaaaacattctgtggttttagaacaagcaaaaaatagaatgtttattcaacaatcaatattaatgtatgttcttaagaaataaa

SEQ ID NO: 230417 - DNA, 339 bp, Unknown
  Bacterial polypeptide expressing nucleotide sequence isolated from the Sargasso Sea
tattaaactgggctaaaaagaataaagtaaatttgactattacaaaaaaaccagaagatgcagttaaagattcagactgtgttatgactgataaatgggtttctatgaatgataaggttaataaaaaagctaagaaaaaaactttaaaaccttaccaagttaataaaaaattaatgaagatagcaaaatctgatgcgatttttatgcattgcttaccggttggaagaggtgaagaagttactgatgaagtaattgacggcaaacagtcagttgtttggagacaagctttaaatagagtacatgctcagaagagcattattaagtggtgtttagattaag

SEQ ID NO: 230418 - DNA, 268 bp, Unknown
  Bacterial polypeptide expressing nucleotide sequence isolated from the Sargasso Sea
tcataatgatgctgccaaagattgtgattgtataattactgatactgggttctctatgggagaagatgataatgatcaaaaaagaaaaattcctgaaccgtataaagtagattctaacaaaatctcgatggcatcttcagatgcaatttttgttcattgtttacctgctcatagaggagaggaagttgacgctgatgttattgatggagtcaattcagtagtttgggatgaagcagaaaatagggttcacgcacaaaaaagtattatt

SEQ ID NO: 230419 - DNA, 847 bp, Unknown
  Bacterial polypeptide expressing nucleotide sequence isolated from the Sargasso Sea
gtgctttacaaataagaagtctaaaacaacattacaaaatcatctgaatggtaaaaacctagtattattttttgaaaaaaaatctaccagaacaaggctatcgtttgatattgcaattaaacaattgggtggctctacaacaattttaaataaggaggatattcacctgggtaatgataaagaaagcgtaagtgatactattaaaacttttggactatatgctgacggacttattcttcgggtcaacgatcataaaactataatgagtgcttccaaactatctcatttacctgtattaaatgcactatcaaatttatcacatccttgtcagtgcctggcaggactaatgacgttattagaggagaggggcagtttagaaaagttgaatattgtttggatgggacctattacaaatgtggcaaattcttggattgaggcctttaaaaaagaattaggcttctcacttaatattttttgtccggaggcatggtttgaaaagtataaagaaaaaatgcagaagtatgatatttcgactgatctcgatgatatcgtacatcatcatataaatgaacaaattcttacccacgctgatgctgtcatgacagatacatggaaatcaatgggtgagaatacaaaaaatcaggattatgatttaattaaagaattcagagttaccgaagaggttatgaaaatggctaaatcggatagtatttttatgcactgtcttccagcaaacagaaatgaggaagttgaagcaagtgtgatagatggaaataattcaagggtttggcaagaagcgagcaatagactgtttgttcaaaaagaaattttaaaagcattattttaa

SEQ ID NO: 230420 - DNA, 238 bp, Unknown
  Bacterial polypeptide expressing nucleotide sequence isolated from the Sargasso Sea
attggacaatattagacattttcttgatatagactgcctagatcataatattttaaaagatattatttcccaagcgacagaactgaaagcctcaaagcccaaaaattttccatcagctctgggtaaaactttagctcttatcttcgagaaaccctccaccagaactcgtgtttcatttgaggttgggatgcttgagttggggggtaatgttgtaatattaaacgataaaaaaacccaa

SEQ ID NO: 230421 - DNA, 605 bp, Unknown
  Bacterial polypeptide expressing nucleotide sequence isolated from the Sargasso Sea
aactacatctcataaaaacttagaggagtttggaaagcatttagatatcccaattatcaatggcctttcagatgtcagccatccatgtcaaattatgtctgatattcttacttacgaagaaagcaatggttccatagagggtaaaattgtttgttggattggtgacggtaataataatatgtcaaattctttaatagaagcagcaggtaaattcaactttcaacttagaattggttgtccaaaaaaatattctccaaataagaatatattgaagctagctaaaaaagacaaagtaaaattgacagttaccgctaaacctctagaggctattacaggagctgattgtgtaatgactgataaatggatctcaatgaatgataaagtaaataaaaatttaaaaaagaaaactttaaaaccttatcaagttaatgagaaactaatgagcaaagcaaattcagacgctatttttatgcactgtcttccagtcggaagaggagaagaagttacaaatgaagtaatagatggaaagcaatcagtggtttggagacaagcattgaatagagtacatgctcaaaaaagtattattaagtggtgtctggactaag

SEQ ID NO: 230422 - DNA, 760 bp, Unknown
  Bacterial polypeptide expressing nucleotide sequence isolated from the Sargasso Sea
ttgataaattccctattaaatatttctgatttaactagagatcaaattattaaaattttagattttaatagcacaaataattctcttagtaataaaaatattggactactttttgaaaaaaattcaacaagaactagagtatcttttaatgtagggattaaccaacttggaggtaattgtatagatattagatatgaggaattaaatattagtcgtgatgagtcttttgaagatacttttagagcactgaattgttatcttgatggtttaatttttagaaccactgatcataatcgtttaattgaggcaaaaaaatattttaaaaaaccaatcattaatgcattaagtgatatatcacatccttgccaaatattaagtgatcttttcacacttaaaagtcattttaaaaaactagatttaaatctactttggatgggtgatatgaataacgtatgttatagtttagttgaggctgcaagtttaattaatgaattaaaattaactatttgttctccaactaatataattaataaaaaaaattggtctttaagctcaaatgtaaatattgtaaaaagtaagagtgaattagacttatcaaaatttaattgtgtaatgaccgatgttttcgtttctatgaatgacgataatattgaaggtaaggtagatcttctcaaaccatttagtgttgactctaatttaatgtcaaaggtagataaacatgctgtattcatgcactgtcttcctgcgaaagtaggattga

SEQ ID NO: 230423 - DNA, 208 bp, Unknown
  Bacterial polypeptide expressing nucleotide sequence isolated from the Sargasso Sea
aaaaagttattttttaaaaaatatcaattaaatagtcaaataatgtcatatgctaataaaaattctgtatttatgcattgcttacctgctcatagaaacgaagaagttacaaatgaattaattgatggtcctcaatcaattgtttggcagcaagcaaagaataggatttacgttcaacaatcgattataaattatattttaaaatgat

SEQ ID NO: 230424 - DNA, 325 bp, Unknown
  Bacterial polypeptide expressing nucleotide sequence isolated from the Sargasso Sea
gatttagcaattaaacaattagggggctcatccacaattctaaatccagatggaatacattatggtaaaggagatgagagtttaaaagatactgcaagagttttatctgaatatgcagacatacttatgataaggacttcctcacacaaaagcttagaagaattttctaaatattcaaaaatacctgtgatcaatggcctgtcagatcaaagtcatccctgtcaggttatgtctgatattctcacgtttgaggaaaataacggaaatatagaagggaaaactatctcctggataggtgatggaaataataatatgtctaactcat

SEQ ID NO: 230425 - DNA, 469 bp, Unknown
  Bacterial polypeptide expressing nucleotide sequence isolated from the Sargasso Sea
tatgagtaaattaacccagcttttatgtttagctgaattagaccagacccaattatccgacctgctggagcttgcgcttcagatcaaacaaaaaccagagcagtacagtactgcactcaaaggcaaaagcattgccttattgtttgaaaaaccttctttgcgaacccgagtcagctttgatgttgggatcaataaattaggtggtcacagtgtgtatctggatcagcaaaacggagctatgggcgtacgcgaatcagtggaagattttggcagtaacctggcctgttggtgtgatgccatagtggcgcgggtctattctcagaaaacattagtgcagctttcgcaaagcagcaaaaaaccagtgattaacgcactgagcgatttgtaccatccttgtcaggcgctggccgatttgctgaccttaaaagagcattatggcgatttaagcaaagtgcatctggcttttgtc

SEQ ID NO: 230426 - DNA, 694 bp, Unknown
  Bacterial polypeptide expressing nucleotide sequence isolated from the Sargasso Sea
taaaaaaagaaagtctgaaagaggaaaaatacctaattctcaacccgatgtagatttaccgataaaaggtaaaactatgattatgctttttggaaaaccatctacaagaacaagaatatcttttgatcttgcagtgaaacaattgggaggatcatcaattattttaaaccaagatgaaattcattatggtaaaggagatgaaactataaaagatacagccaaggttctttcccaatacgcagacattttgatgataagaacagactctcataatgatgttgatgaatttcaaaagcatttagacattcctattataaatggactaacagacttaagtcacccgtgccaaataatggctgacattttaactttcgaagaagccaaaggtgatataaacgggaaaaccattgcgtggcttggagacggaaataatgtatcaaattcttttattgaggcagcaactaagtttaaatttgaacttaaaattgcctgtccaaaaaaatatcagccaaataaaaaaatagtaagtgaagcaaaaaaaaataattgtaaacttttaatcacagaagatcctttcgaggctgctgaaggagcagactgcgtaatgaccgataaatggatatctatgagcgataaaggtgacaaaaagaaaaaaaagaaaattttaaaaaagtttcaggttaataaaaagtta

SEQ ID NO: 230427 - DNA, 394 bp, Unknown
  Bacterial polypeptide expressing nucleotide sequence isolated from the Sargasso Sea
gaaatatttaaatttaaattaaatgtcataactcctagtaaaattttaaaaaaaaacaaaaatatttttagtaataaaaagtttaattatgtagattttaatgcaaatattgaaaagggattaaaaaatgtagattgtattatgactgatgtatggatttcgatgggggaaaagaatattaaaaataaaaaaacaatgcttagaagatttcaagtaaatgaaaagattatgaaaaaagcaaaaaaaaatgcaatatttatgcattgtctacctgctcatcgaaatgaagaagtaactaacaatgtaattgatggtcatcaatcagttgtttggaaacaggcacaaaatagaatgtatgtccagcaaagtatattaaattatttaattaaatgat

SEQ ID NO: 230428 - DNA, 256 bp, Unknown
  Bacterial polypeptide expressing nucleotide sequence isolated from the Sargasso Sea
aatgactgacaaatggatctcaatgaacgataaagtgaataaagtttctaaaaaaaaaattttgaaaccttaccaggttaataacaaattaatgagcaaagctaattcagactctatttttatgcattgtcttccagtgggaagaggagaagaggttacggatgatgtgattgatggcaatcaatcagttgtgtggagacaggcattgaacagagtccacgctcaaaaaagtataattaagtggtgcctggattaa

SEQ ID NO: 230429 - DNA, 682 bp, Unknown
  Bacterial polypeptide expressing nucleotide sequence isolated from the Sargasso Sea
tatgaaaaattttataaacatttcagatttatcaaaaaatgaattgagatccatcattgatggtgcaaaaaagagaaaatctgaaagaggaaagaaagcaaattcccagcctgatgcagatcagccaattcagggaaaaacgatgattatgttttttgcaaaaccttcaacaagaacaagaatttcttttgatcttgcagttaaacaattgggtggatcatctattattctgaacgaagacgaaattcattatggtaaaggggacgaaacaataaaagatacggccaaagttctatctcagtatgcagatattctgatgatcagaacagattcacataaagatattaatgaatttaaaaaatatttagacattccaattatcaacggacttaccaatttgagtcatccatgtcagattatggctgacattttaacttttgaagaatcaaagggagatatagagggaaaaattattgcttggcttggagacggaaataatgttgcaaattcttttattgaggcagctactaaatttaaatttgaattaagaattgcatgccccaaaaaatatcagcctgataaaaaaatagtggcaacagctaaaaaaaataattgtaaacttttaattacagaagatccctacaaagcagcaaaagatgcagactgcgttatgacgggataa

SEQ ID NO: 230430 - DNA, 154 bp, Unknown
  Bacterial polypeptide expressing nucleotide sequence isolated from the Sargasso Sea
aagccagacgccatatttatgcactgtttgccagcaagcagggaagaagaggttacaagtgatgttatggacggaaaacaatcagttgtatggttgcaagcttttaacagaattcatgcacagaaaagtataattgaatggtgtgttaaataaa

SEQ ID NO: 230431 - DNA, 150 bp, Unknown
  Bacterial polypeptide expressing nucleotide sequence isolated from the Sargasso Sea
ctatatttttacattgtctgcctgcacatagagaagaagaggtaacatcagaggttattgatggccctagcagtcgagtctggcaacaagctcacaataggttgtatactagtatggctttaatagagtttttattattaactgattaat

SEQ ID NO: 230432 - DNA, 598 bp, Unknown
  Bacterial polypeptide expressing nucleotide sequence isolated from the Sargasso Sea
tcgacattagagacctatgctgaagcggcgaatgtacctgtgattaacgcattgtgcgataaataccacccctgccaaggcctggccgactacctcaccatgttcgagcgttttggtaaaacgacggggttgaccatgacctatatcggcgatggcaacaacgtaacccattcgctattgattgttggcgccctgttaggttgcaaccaagttgtgattactccgaaaggtcacgaagcagatgccagcattgtcgctcatgcaaaagcgttagctgagaagaccggcgcaacaattgttgaaagcaacgagttagaagccgcaaatggtaccgatgtcatctacaccgacacatggctttctatgggtgatgacactccccttgaaaccattaaagcaacgtttatgccgtatcaagtgaacgaagcgcttatggaggcatcaggtgctagctgcgtaatgcactgccagccggcccatcgtgacttagaaattactggctcactgattgatagtgacaagtcgctattaatgcagcaagcagaaaacagaatgcatggccaaaacgccatccttactcaattactcagtgcctaag

SEQ ID NO: 230433 - DNA, 569 bp, Unknown
  Bacterial polypeptide expressing nucleotide sequence isolated from the Sargasso Sea
atattcaaaaatacctgtcattaacggattatcagataaaagtcatccttgtcaggttatgtctgatattttaacttttgaggaaaattgcgggagtattgaaggaaaaactatctcatggataggtgacggcaataataatatgtctaactcatttatagaggcagccgttaaatttaaatttaatctaaaaattgggtgtccaaaaaaatatagtcctaataataagatattaaaatgggcgtcaaataataaatctaaaatttttgttacaaaagatccaagagaagctgcaaaagacgcagactgtattatgactgacaaatgggtgtcaatgaatgataaagtaaataaaaaagcaaaaaagaaatcccttaaggattatcaggttaataaaaaactttttaaacttgctaaaactaaatgcatattcatgcattgtcttcctgtcggaagaggtgaagaagttactgacgatattatagatggaaaaaaatccgtagtttggcaacaagcctataacagaattcacgcacaaaaaagtattattaattggtgtttaaactaag

SEQ ID NO: 230434 - DNA, 307 bp, Unknown
  Bacterial polypeptide expressing nucleotide sequence isolated from the Sargasso Sea
cgctaaactgaccttaagtcagcatgtgtcagctgctgctggtgcggacgctatttacaccgacacctggttgtcgatgggggctaaggccgaccctaaactggttgagaacctgtttgctccttaccagatcaatactgcagtgatgcagcgtttagccgtcaaacattttatgcactgcctgcctgcacatcgtgggcatgaagtgaccagcgaagtgctggacagtgataattcgttagtgttgcagcaggcggaaaaccgtatgcacgctcagaatgcagtattagtcagtttatttagttga

SEQ ID NO: 230435 - DNA, 710 bp, Unknown
  Bacterial polypeptide expressing nucleotide sequence isolated from the Sargasso Sea
aatgaaaaagcactttatagatcttaataattttaataaaaaacaacttgatgacataattaaaattgcaaaaaaaataaaaaaaaatcctagtaaatattcctcaattcttaaaaataaatctttaggaatgatttttgaaaaacagtctcttagaacaagattaagttttgcagttggaatgcaaaaattggggggctattctcttgaattaaatagtaaaaatataggtttggataatactagagaggatcctaaagatattttaagtgtattgtcacaatatattgattgtcttatgattagaaacaataatcataagcagttagtagaattatcaaaattaaatttaattcctattattaatggtttaactgaatttagtcatccctgccaaattcttggggattatttaacaattcaagaaaaaattaaaaataccaaaaaaattcaagtaacatggattggtgattttaataatgttcttatatcactccttcatattcaaaatatttacttatttaaacttaatgtagtactcccatcaaaaattttaaaatctaatatcaaaaatttatataaatataaaaataagaatttaaatttattatcagatcctttagctggagttaaaaattctaattgtattatgacagacgtatggttatcaatgggagataaaaataaaagtaaaattaaatactttaaga

SEQ ID NO: 230436 - DNA, 214 bp, Unknown
  Bacterial polypeptide expressing nucleotide sequence isolated from the Sargasso Sea
aacaaaataaaatatttcaaaaattttactgttactaaagaaattatagatattgcatcaaaagattctattttcatgcattgtctaccagcaaaaagaggtcaagaagttacatcagagattttagatggaaaaaattcagttgtattaaagcaggcaaagaatagaatgtatatccaacaagcaattttgttatatgtccttaaaaaataaa

SEQ ID NO: 230437 - DNA, 604 bp, Unknown
  Bacterial polypeptide expressing nucleotide sequence isolated from the Sargasso Sea
actttttcacataaaaacttagaagaattttcaaaatattcaaaaatacctgtaattaatggattatcagatcaaagtcatccttgtcaggtcatgtctgatattcttacgtttgaggaaaatcacggaaatatagaagggaaaactatatcttggataggtgatggcaataataatatgtctaactcatttatagaggcagctgtaaaatttaaatttaatttaaaaattgggtgtccaaataaatatagtcctaataataagatattaagatgggcgtcaaaaaataaaactaaaattttcgtaactaaagaccctagagaggctgcaaaggattccgattgtattatgactgataaatgggtttcgatgaatgataaagtaaacaaaaaagcaaaaaagaaatctcttgaggattatcaggttaacaaaaaacttttaaaacttgctaaaactgaatgcatatttatgcattgtcttccagttggaagaggggaagaggttaccgacgaaattatagatggagaaaaatcagtagtttggcaacaagccaacaacagagttcacgcacaaaaaagcattattaattggtgtttaaactaag

SEQ ID NO: 230438 - DNA, 337 bp, Unknown
  Bacterial polypeptide expressing nucleotide sequence isolated from the Sargasso Sea
aatgaaaattaaaacaaaaaacttactaactttagcagaactaactccaaaagaatttttgcgattaattgatcattctataaaattaaaaaaagaattgaaaaaaggtggcaacaaacctttactaaaaaataaaacactaactatgatttttcaaaaaccttccactagaacacgtgtaagttttgaaactggaatgtatcaattaggaggtcatgcaattaatttatcatcaaatgacacgcagttgtctcgaggtgaatctgttgaagatactgcaaaaactctttctcgttacactgattgcataatggcacgtgtttatgatcactcttta

SEQ ID NO: 230439 - DNA, 604 bp, Unknown
  Bacterial polypeptide expressing nucleotide sequence isolated from the Sargasso Sea
aatgattagaaataatgaccacaatgagattaataaactcagtcagctaaatataataccaattataaatggattaactgattatagccacccttgtcaaattttaggtgattttttaactatacaagagaaatttaaaaattataaaaatttacaaattacctggattggtgattttaacaatgttttgatttctttattacatcttcaaaatatatatttattcaatttgaatcttgtaattccaacaaaaattttaaataaaaataaaaaaattttaataaaacttcaaaataaaaaattaaaaatatattctgatccagttaaaggttcaaaaaattctaaatgtattatgacagatgtatggatgtctatgggtgatacaaataaggaaaaagtaaagtattttaaaaattttactataaataaaaaaataattgataatgctgcaaaagatgtaatatttatgcattgtttacctgcaaaaagaggtaaggaagtaacatcggaagtattagacggtagaaattctgttgttttagaacaagctaaaaacagaatgttcatacaacaggcaattttaatatatgtttttaaaaaataa

SEQ ID NO: 230440 - DNA, 796 bp, Unknown
  Bacterial polypeptide expressing nucleotide sequence isolated from the Sargasso Sea
atgaaaaattttataaatatatcagatcattcctcgagtgatctaagagccattattgatgaggctaagactagaaaacttagtagaaaaggatttaataaatctgcacctgatgacgacaaacctttcgagggaaagtctatggcaatgatttttgaaaagccctcaacaagaacaagaatgtcttttgatattgctgctaagcaattaggagggtcttctattattttaaatccagatggaattcattatggcaaaggagatgaaactttaaaagatactgcaaaagttttaaccgaatatgtagatatagttatgcttagaacatcttcgcacaagaatttagaagagtttggtaaacatttagatattccaattataaacggcctttctgacaaaagtcatccgtgccaaattatgtcggatattttaacatatgaggaaagcaatggttctataacgggtaaaacagtttcttggttaggtgacggtgataataatatgtctaattctttaatcgaagcagctggtaaatttaaattcaatttaaaaattggttgtcctaaaaaatattctcctggaaaaaaaatattaggatgggctaaaaaaaataaagttaatcttttgataactcaaaaacctgatgaagctgtaaaaaactcagactgtgtaatgaccgataagtgggtatcgatgaatgataaagttaataaaaaaacaaagaagaaggttttaaaaccatttcaagttaataaaaaattaatgaaaaaagctaattcaaatgcaatttttatgc

SEQ ID NO: 230441 - DNA, 247 bp, Unknown
  Bacterial polypeptide expressing nucleotide sequence isolated from the Sargasso Sea
atgagaggcagtgactcgaaaatcgaccttctagctattgatgatttatcggatagactctcggaaatcatcgattgggcaatcagaataaagaacgatgaagaggcactgtatgacttcaaacctctagatggaatgacaataggctcgatttacgagaagccgtcaacaaggactagggtatcattcgaggttggagttagcaggctaggaggccagcccctcacactgcttgctggagacatcc

SEQ ID NO: 230442 - DNA, 151 bp, Unknown
  Bacterial polypeptide expressing nucleotide sequence isolated from the Sargasso Sea
tttccttcattgtctccccgctcatagaggtgaagaagtgactggtgaagtgatagatggactaaagagtcgcgtgtgggatcaatcggaaaacagaatgcatgctgcccgcgggctacttgcatggcttctatctgaaggtcaaaaatga

SEQ ID NO: 230443 - DNA, 688 bp, Unknown
  Bacterial polypeptide expressing nucleotide sequence isolated from the Sargasso Sea
atgagcaaagttaggcatttcagatctttattagatattaataaaaaagaatttttaaggataattgatagagctatacaattaaagaaagaagctagtgaaggcataattaataactcactgacaaataaaactatggcaatgattttcaaaaaaaattcaacaagaaccagggttgcatttgaaactgctatgaacacgatgggtggtcatgcaatatttttatcatctgattcaactcaaataagcaggggtgaggatttatctgatacagcaaaagttttatctggtatggtcgatataatcatggttaggacccatgcgcatgaggagatcgaagaacttgcaaataattcatctgtaccagtaattaatggattaactgaaaaatttcatccatgtcaacttttagcagacatgcaaacatattttgaagaaaagggctctattgagggcaaaagggtagcttgggttggtgacggatgtaacatgtgcaattcatacatcaatgcagctaaaatattgaacttccaactcaaaatcgctacacctagtggatatgaaccagatcaaaccactctcgatctagctagtgacaatgttgaattatgtgatctacctggcaaagcagtggagaattgtgatctagttactacagatgtttggtctagcatgggtgatgaagctg

SEQ ID NO: 230444 - DNA, 214 bp, Unknown
  Bacterial polypeptide expressing nucleotide sequence isolated from the Sargasso Sea
aaataaaaaaaaatattttaaaaattataccgtagataaaaaaattattagcaatgctcaaaataatgtcatatttatgcattgtttaccagctaaaagaggacaagaggtgacatcagaagtccttgatggaaaaaattccgttgtattaatgcaagcaaaaaatagaatgtatattcaacaagctatcttaatctatgtacttaaaaactag

SEQ ID NO: 230445 - DNA, 218 bp, Unknown
  Bacterial polypeptide expressing nucleotide sequence isolated from the Sargasso Sea
aaataataaaacaaaatattttaaaaactttactgttaataaaaaaattatgagtaatgcatcaaaaaatgcaatttttatgcattgtttaccggcaaaaagaggaaaagaagtaacgtcagatgttcttgatggtaaaaattctgttgttttaaaacaagcaaaaaatagaatgtacattcaacaagcgatattaatctatgtacttaaaaaatagt

SEQ ID NO: 230446 - DNA, 161 bp, Unknown
  Bacterial polypeptide expressing nucleotide sequence isolated from the Sargasso Sea
tatgacagatgaaaaatccgtatttatgcattgtcttccggcgaaaattggctccgaagtgactaaagatgtaattaaagggaaaaagtctatcgtacttactcaagcaaaaaataggctcgtagctcaaaaaggtattcttaaatggttaagtatctaac

SEQ ID NO: 230447 - DNA, 787 bp, Unknown
  Bacterial polypeptide expressing nucleotide sequence isolated from the Sargasso Sea
attcaaatggtttgaaaaatcaagcacaaggacaagacttatcttttatttagcaattaaacaactcggaggaagtgcattaactttaagaccagatgaattacatctagccaaaggtgaaactctagcggatacagctaaaattttatcaacttatggaaatgcttttatgttgcggacagatagtgataaaaaaatggaagaatttaaaaaatatattagaattccaattataaatggcctgagtccttctgcacatcccacacaagttctatcagatatatttactatagaagaaattaaaaaaaaacctatctctaaattaaatatttgttggattggtgatggtaataataatgttattaatagtttaatagctgcttcagtaaaattttcattttcattaaatattggatgtccaaaaaaatataaaccaaatacaagaatattaaggtgggttaaaatgaataaaaaaagggttaatatatttgttgatccaaaagatgcagcaaaaaatgttgatgttatatttactgataaagttatctctatgaatgataaaggtaataaaattaaaaaacttaaagattttaagaattatcaggttaattctagaattatgagtttagctaaaaaaaatgcaatttttttacactgtttaccgagaggtaaagaagtaacagacagtgtttttttaggtagtcaatctaaagtatggcaacaagcaattaacagagtttatgttcaaaaaagtattttattatattgttttaataagttaaggtaa

SEQ ID NO: 230448 - DNA, 148 bp, Unknown
  Bacterial polypeptide expressing nucleotide sequence isolated from the Sargasso Sea
agatgcaatttttatgcattgtcttcctgcaagcagagaagaagaggtgactagtgaagtaatggacggaaaaaaatctgtagtttggctgcaagcttttaacagaattcatgcacaaaaaagtataattgaatggtgtattaaataa

SEQ ID NO: 230449 - DNA, 229 bp, Unknown
  Bacterial polypeptide expressing nucleotide sequence isolated from the Sargasso Sea
agataagggcaataaaaagaaaaaaaagaaaattttaaaaaaatatcaagtaaataaaaaattgatgaaagcagcaaaatcagatgcaatttttatgcactgtcttccggctagtagagaggaagaagtaacaagtgaagttatggatggaaaacaatctgttgtttggttacaagcatttaatagaattcatgctcagaagagtattatagagtggtgtataaaatag

SEQ ID NO: 230450 - DNA, 471 bp, Unknown
  Bacterial polypeptide expressing nucleotide sequence isolated from the Sargasso Sea
gcgacggttttaataatgttactcactctttgatgactggcacgacaaaattaggcttagatatagcagtagcctcaccatatggtgatcaatacatgccaagtgaagaaattacaaatttatgtcgatcatatgcaaatgattcgggtgggtcagtatttgtaacgaattcggccgaagatgcagttaaaggcgccgatgttatttatacagattcatggatgagttatcacattcctgaagatcaaaaaaaagatcgaatagaattatttatgccatatcaagttaacaaagatcttctaagtcttgcaaaaccagatgctatattcatgaattgtttacctgcaacaagaggttgtgagcaaactgcagatgtaattgatggtcctcaatcaattgtttttgatcaggctgagaatcgtcttcatgcacaaaaagctgtaatgctttctcttgttaatacgacataga

SEQ ID NO: 230451 - DNA, 295 bp, Unknown
  Bacterial polypeptide expressing nucleotide sequence isolated from the Sargasso Sea
aatgatcccctagaagcaactaatctagcagactgtattatgacagataaatggatttcaatgggagataaagcaaacaaaaaaaaaaagaaaaaattgttaaaaccttatcgagtagataaaaaaattatgaaatcggctaagcaagatgcaatcttcatgcattgtttaccagctaatagaggagaagaagtgactgatgaggtaatagatagcaagcaatcagctgtgtggctggaaacattaaatagaattcatgtgcaaaaaagtattattcaatggtgtttaaggtaaa

SEQ ID NO: 230452 - DNA, 177 bp, Unknown
  Bacterial polypeptide expressing nucleotide sequence isolated from the Sargasso Sea
aaaaaattatgagtaatgctgcaaataatgtaatctttatgcattgtttaccagccaaaagagaacaagaggtgacgtcagaagttcttgatggaaaaaattctgtagtattaatgcaagcaaaaaatagaatgtatattcaacaagcaatattaatttatgtacttaaaaaatagt

SEQ ID NO: 230453 - DNA, 114 bp, Unknown
  Bacterial polypeptide expressing nucleotide sequence isolated from the Sargasso Sea
atcaggaggtaactgctgatgttatagatgtcccaaagtctgtcgtttgggacgaagctgaaaatcgtttacatgtccaaaaagcatgtttagttcaccttctaggcgtctaag

SEQ ID NO: 230454 - DNA, 177 bp, Unknown
  Bacterial polypeptide expressing nucleotide sequence isolated from the Sargasso Sea
aagataattatatgtttatgcattgtttaccagcagagagaggtagagaagttacagatgaagtaattgattcttctaattcagtagtattcgagcaagcagaaaatagattgcatactcagaatgctattatggttactctttcagataaattatcgccttggaatagattttgaa

SEQ ID NO: 230455 - DNA, 290 bp, Unknown
  Bacterial polypeptide expressing nucleotide sequence isolated from the Sargasso Sea
tccatataaggcagttaaagatgctgattgcattatgactgataaatggatttctatgggagataagggtgacaaaaataaaaaaaagaagtcacttaaaaaatatcaggtaaataaaaaaattatgaaggctgcaaaatcagatgcaatttttatgcattgccttccggcgagcagggaagaagaagtaacaagtgaagttatggacggaaagcagtcagttgtttggctacaggcatttaataggattcatgcacaaaaaagtataattgagtggtgtataaaataaa

SEQ ID NO: 230456 - DNA, 322 bp, Unknown
  Bacterial polypeptide expressing nucleotide sequence isolated from the Sargasso Sea
atgaaacattttataaatatttctgatttgtctaaaagtgatttaaggtcaattatggatggggcaaagaaaagaaaatccgaaagagggaaaaaacctcactcactacctgatatcgatctacctcttcaagggaagactatgattatgattttcgaaaaaacatctacaagaactagaatatcttttgatttagccgtcaaacaattgggaggctcatcaataattttgaatcaagatgagattcattatggcaaaggagatgaaactataaaagatactgcaaaagtcttatctcaatatgctgatatacttatgataa

SEQ ID NO: 230457 - DNA, 676 bp, Unknown
  Bacterial polypeptide expressing nucleotide sequence isolated from the Sargasso Sea
tatgattaaacattttatagatctagataattttaccaaaactgaattaagaaatatcttaagatttgctaataaaattaaaaaaaatcaaaaaaaatattcaaatattttaaataataaatctttaggtttgttatttgaaaaagaatctacaagaacgagggtttcatttaatataggcatgaagaaacttggaggaaatgttatagaattagatagtaaaaaaattggatttggtaaacgagagtctatttcagatgtattgcaagctctttctcaatatatagatgtattaatgataagaaataattctcatacagaattagttaaatgtgcttcttataataaaattagtattattaacggattgtctaattacagtcatccatgtcaggttttgtcagatatttttacaattagtgaaaaattaggaaagattgaaaataaacaaataacttggttgggtgattttaacaatgtactaacttcgttcatacaggctgcagaaatatttaattttaaattaaatattttgatgcctaaaaaaattatgaacatggctaaaaaaaaattagacaataaaaaattagtatattctaatttttactataattttgataaagctctaaaaaattctgattgtgttatgactgatacatggatttccatggggtga

SEQ ID NO: 230458 - DNA, 385 bp, Unknown
  Bacterial polypeptide expressing nucleotide sequence isolated from the Sargasso Sea
atgaagaatttcataaatattgccgatatcaatgagcaagatttaagaaaaattatagaccacgcaaaatcacaaaagaaaaaaagatctaatattaacaaatcggccacagatcctgaaaaaccattaatagataaaacattgatcatgctttttgaaaagacatctactagaacaagattatctttcgagctggctataaagcaattgggtggacatttgttagtgcttgattcaaaagaaagccactacggaagtggagatgaaagtgtttacgataccgcaaaagttttgtctcagtatggtgatattgtgatgatgagaacccacaaacataaacatttattagaattttctaaacatttagatattcccaataattaat

SEQ ID NO: 230459 - DNA, 277 bp, Unknown
  Bacterial polypeptide expressing nucleotide sequence isolated from the Sargasso Sea
ttctgcagatacagatgtgatatatacagatgtatgggcaagcatgggccaagaatcagaggaagatgagagaaagagaaagttcgaaggatatcaagttaatgaaagtcttttagagaactctaatgcaatatttatgcatgatttgccagcacatcatggagaagagataacggaaggtcttgttgatcataaaaaatctatagtatttgatcaggcagaaaatagaatttgggggcaggtaggcttaattaaatatttaatgaatttaaagtga

SEQ ID NO: 230460 - DNA, 433 bp, Unknown
  Bacterial polypeptide expressing nucleotide sequence isolated from the Sargasso Sea
atggattttcgcggcgcacatataattagtgttaaacagttcgaacgtgaagatgtcgaaaaagttttcgaagttgcagattctatggggcctttcgcacaccgtgagctaattacaaaagttttagagggtgcaattctcggcaatatgttttttgagccaagcactcgcaccagggtcagttttggatgcgccttcaatctgctgggcggccatgttcgagaaaccaccgatattgaaacatcttcaatagtcaaaggagaatctttgtacgacacagctcgagtgctatctggttatagtgatgtcattgttatgcggcacccgcaagcgggctctgtagaggaattttcaaaagcgagtcgagttcctgtgatcaatggtggagatggtgctaacgaacatccttcccaagctctcttggatctttata

SEQ ID NO: 230461 - DNA, 315 bp, Unknown
  Bacterial polypeptide expressing nucleotide sequence isolated from the Sargasso Sea
tatgaagcatttactatcgataaaagagttaacccagcagcagttgctggatctgattaccttggccaagacgattaaagcgaatcccgcagaatatcgccatgcactggacggtaagagtgtggtgatgttatttgaaaagccatctctgcgtactcgtgttagcttcgatatcggtattaataagctcggtggccactgtttatacctagaccagcaaaatggtgccttaggtaagcgggaatcggtcgctgactttgcttctaacctgtcctgttgggccgatgccattgtggcgagaacgttctcccacac

SEQ ID NO: 230462 - DNA, 778 bp, Unknown
  Bacterial polypeptide expressing nucleotide sequence isolated from the Sargasso Sea
aagttttattactggtattagcaaaatgggaggtcattgtatagagcttaacgctaattcaatcggatttggaaaaagagaaagtcatgaagatgtgattagagcattatcgcaatatattgatattttaatgattagaaatgatgatcataatattataaaacatttaagctccttaaacgtcctgccaataattaatggattatcagattatagccatccttgccaaattttatcagatcttttgacattatatgaaaaacttggaaacattaaaaaacaaaaaatttgttgggtgggtgattataataatgttttgagatcattaatagagttgcaatgtatatacaattttaaacttgatgttgttcttccaagagaaatattaagaaaatacaattcaaaaataaccaaaaataaaaatttgaatgtaactaatattgttcacgaaggagttaaaaatgctaattgtgttatgactgatgcgtgggtatctatgggagaaagtaactctaagaaaaaatactttaaaaattatcaggtaaataaagatgtaatgaaaaatgcaaataaagaagcaatatttatgcattgccttccagcacatagaaatgaggaagtttcttcagagttacttgatagcaaacaatcagttgtatgggagcaagctcaaaacagaatgtttgttcaacaagctataatattaatttattatgaaaaattatttttactattttctattttatcatattttcatgccaacctgttgaaacattag

SEQ ID NO: 230463 - DNA, 826 bp, Unknown
  Bacterial polypeptide expressing nucleotide sequence isolated from the Sargasso Sea
atacgaaatcctcgatatcctgagacgcgctgaacagataaaagctagccctaaggaatatcactctttgctctcgaaaaaatcgatggcgatgctgttccagaagacaagtaccagaacacgcgtctcatttgaggttgcgatgactgagttaggcggacatgcaatctacatcgattggatgagctcaaattttgtcctttctagcattgattacgaagccgaatatctgtcgcgtaacgtcagttgcatcatggctagactactacgtcacgaagatctgcaggctataatcgcagcgagccatgcacctgtcatcaatggctgcgacgaaaagttccatccttgtcaggcactcactgatttgctaacggtaaaagaaaatattagaggcaaccttaattcaacccatattgtttacgtcggggtacaaaacaacgtcagcaattcacttgctatcatctgcgataaactaggagtttcattgacactggcgacgccagaacccgaagacacatatgaaagcaaggatgcagatgttcagggtctcatatcgtcatccacctacatcaaccatacgacggatgttgagagggcagttgagaacgcaaattttgtctacacggatacatgggtcgatatgcagcacttcaataatccggacttaaacgataaaaaaaccaggattatggaaaaaatgctgccatatcaaattaacgaatcgctactagatggtgtcgactgcaaaatcatgcatgatatgccgattcacgatggttacgaaatcacaaacgcgatggttcgagacccaaggtctattatattt

SEQ ID NO: 230464 - DNA, 520 bp, Unknown
  Bacterial polypeptide expressing nucleotide sequence isolated from the Sargasso Sea
atgaaaaatttcataaatattggcgatatcaataagcaagatttaagaaaaattatagaacatgccaaatcacaaaagaaaaaaagatttaacattaacaaatcggctatagatcctgaaaagtcactaatagacaaaacattgattatgctttttcaaaaagcatccactagaaccaaactttctttcgagttggcaatgaaacaattaggtggacaattattagtgcttgatccaaaagaaagtcattacggaagtggagatgagagtatttatgataccgcaaaagttttatctcagtatggtgatattgtaatgatgagaactcacaagcataaacatttattagaattttctaaacatttagatattcctataattaatggtttaacaaatttgagtcatccttgccagattatgtccgacataatgacctttgaagaattaaaaggctctattacaaaaaaaaaaattgcatggctcggagatggaaacaatgtagtttattctttaatcgaag

SEQ ID NO: 230465 - DNA, 448 bp, Unknown
  Bacterial polypeptide expressing nucleotide sequence isolated from the Sargasso Sea
atggaaagtaaacacttcttaacattgctcgatatccctaaggaagagataaaaaagcttatccatagagcaattgaacttaaaaaaatgacaaaagaaaatattgtttatacacctctacaaaataaaacacttgcacttttatttgataaatcatcaacaagaaccagagtttcttttgaggtggggatgactcattttggcggaaacactttatttttatctccaagagatacacaacttggaagaggagagccaattgaggatactgctaaagttatatcgagtatggttgactgcgttgtaataagaactcatgatcatgaggatgttgtaaaatttagctcaaaatcttcagtacctgtaatcaatggattaactgagcttgttcacccctgtcaactccttgcggatgtaatgacatatgtcgaaattaatggagatataa

SEQ ID NO: 230466 - DNA, 180 bp, Unknown
  Bacterial polypeptide expressing nucleotide sequence isolated from the Sargasso Sea
aaaaactactaggtttcgcgagaaccgatgtgctatttatgcattgtcttcccgctgataaaggtcaagaggtatctcaggacatttttgaagacaagcgatgtgttactttacgagaggcggagaatagaatgcatgtacaaaaatcaattctcagatggtgtttgggtttatattaaa

SEQ ID NO: 230467 - DNA, 703 bp, Unknown
  Bacterial polypeptide expressing nucleotide sequence isolated from the Sargasso Sea
aatgttgttgagcttattagtaaagatattggctttgataataaaagggaagaaaaaaaagacattttaaatatattagcccaattcatagattgtcttatgattagaaacaacaatcataaattattaattgagctatctaatcaaaaagtacttcctataattaatggactcacagaatacagtcacccttgtcaaatattgggtgattttttgactatacatgaaattttcaaaacatataaaaagttacaaataacatggattggggactataataatgttttaatttcacttttacatcttcaaaatatttatttgtttaacctaaatgttgttgtcccagaaaaaattttaaaaaaaaataaaagtaaaataattaaatacaaaaatgataaaattaaattattatctgatccattaataggagcaaaaaattctaattgcattatgacagatgtttggatttcaatgggagataaagataaaaataaaactaatcattttaaaaattttacagttaatcgaaaaattattaatttagctacaaaagatgcaatttttatgcattgcttacctgctaaaagaggtaaagaggttacatcagaagtactagatggtaaaaattcagttattttacaacaagcaaaaaatagaatgtatattcaacaagcaatactactttatgtttttaagaaataat

SEQ ID NO: 230468 - DNA, 835 bp, Unknown
  Bacterial polypeptide expressing nucleotide sequence isolated from the Sargasso Sea
cttgcaaagagctatccttgtgaaaaactttatagacattaaagattttactgcagaagaaattaatgcattgcttaattcggctatagaaaataaaaatcaaaacttaagctcagaagaaatattgtctggaaaaaacctaatcttattttttgagaaaaattctacaagaacaaggctttcatttgatcttgcggttaaacaacttggcggtttatcaattatacttaacggtccagatatacacttgagcagtggcaaggaaagtctctcagatacgatcaaaactttcagtctttattctgatgggattgttatgcgagtaaataaccatcagacaatattggacactatagaagtttcaagtgtgcctattattaatggactttcaaatttatctcatccatgccaatgcatggcgggtcttatgaccataattgaagaaaaaggttctttagaaaatttaaatattacttggtttggtcctataaccaatgtagcgcattcatggattgaagctcattccaaaaatttaggtttcaaattcagtattttttcgcctgacagatcgagagatttatacttatctaaaattactaaatataaagaaaacctaaatttagaaagtattattcataatcaaattgatgatgaaattttatctgcagctgatgtaattatgacagatacatggcagtcaatgggtgaacaaactgatgaacaagtaattagagagttacatgattttagagtaacaaaatcattaatgaatatggcaaaacaagattgtatttttatgcattgtttaccagcaaatagggggtcaagaagttga

SEQ ID NO: 230469 - DNA, 898 bp, Unknown
  Bacterial polypeptide expressing nucleotide sequence isolated from the Sargasso Sea
gatgaagcattttattgatattaatagttttaaaaaaaaagaaattgatgaaataatttctcttgctcaaaaaatcaaaaaaaatcaaaaaaaatattcctcatcttgcaaagataaaactctcggtttaatttttgaaaaacaatcactaagaaccagattaagctttaatgttggaatgcaaaaattaggaggttctgttttagaattgcaaagtaaagatatcggctttgataataaaagagaaaaagccgaagatgttcttaatgtattaagtcaatatattgattgcgtaatgataagaaataataatcacaaacaaatagtaaatttaagcaaagaaaatattttgccgattataaatggtttaactgaatatagtcatccatgccaaatacttggtgattttttaactctacaagaacatcttaaaagtataaaaaatgctaatattgcttggataggtgattataataatgtcttacgctctcttattcatctgcaaaatatttataatttcaaactaaatttaatcattccaaaagaaatttttaaaaattataaaaaagagtttcaacaatctaaaaataaaaatttaaaccatttttttgatcctatattaggtacaaaaaattccaattgtataatgactgatgtttgggtttctatgggtgaaaaaaataataataaaaaaaaatatttcaaaaattataccgtagataaaaaaattattagcaatgctaaaaataatgtaatatttatgcactgcttaccagcaaaaagaggacaagaagtgacatcagaagttcttgatggaaaaaattctgttatcttaatgcaagcaaaaaatagaatgtacgttcaacaagctatattaatttatgtacttaaaaagtag

SEQ ID NO: 230470 - DNA, 936 bp, Unknown
  Bacterial polypeptide expressing nucleotide sequence isolated from the Sargasso Sea
aatgaagaattttatagatataaaagaactctcaaagagtgaattaactagcttattagataatgcgttacaaaataagaattctaataaaacattacaaaatcatcttaatggtaaaaacctagtattattttttgaaaaaaaatctaccagaacaagattatcgtttgatattgcgattaaacaattgggcggctctacaacaattttaaataaggaagatattcacctgggtaatgataaagaaagcgtaagtgatactattaaaacttttggactatatgctgacgggcttattcttagggtcaacgatcataaaactataatgagtgcttccaagttatctcatttacctgtgataaatgcactatcaaatttgtcacatccttgtcagtgcttagcaggactaatgacgttattagaggagaggggcagtttagaaaaattgaatattgtttggatggggcctattacaaatgttgcaaattcttgggttgaggcttttaaaaaagaattaggcttctcacttaatattttttgtcccgaggcatggtttgaaaagtataaagaaaaaatgcaggagtatgacatttcaactgatctcgatgatatcgtacatcatcatataaatgaccaaattcttgctcaagctgatgctgtgatgacagatacatggaaatcaatgggtgagaatacaaaaaatcaggattatgatttaattaaagaattcagagttaccgataaggttatgaaaatggctaaatcggatagtatttttatgcactgtcttccagcaaatagaaatgaggaagttgaagcaagtgtaatagatggaaataattcaagggtttggcaagaagctagcaatagactgtttgttcaaaaaagaaattttaaaagtaatattttaattattcttccaaaaggcaggaggaa

SEQ ID NO: 230471 - DNA, 799 bp, Unknown
  Bacterial polypeptide expressing nucleotide sequence isolated from the Sargasso Sea
aggaaaaatattgatacaaatgttgaaaaaccaagtttaagaacaagaataagtttttatttggcaatcaaacagttaggaggaggaactttaacattaagatctaatgagctgcatttaggccaaggaggagaaagcatttccgatactgccaaagttctctctacttatggagacggttttatgttgagaactgatagtgaaaaaaaaatggaggattttaaaaaatatttgtcgatacctataataaatggtttaagccctttatctcacccaactcaggtattgtctgatattttcacagttgaagaaattaaaaaaaaacctatttcaaaattaaatatttgttggattggtgattcaaataatgttttgaatagtttaattgctgcctcagtgaaattttcttttaagctaagcattggctgcccaaaaaaatttgaacctggaaaagaagttagaaactgggtcaaaaaaaataataaaaaaatttatatttataatgatccaaaaaaagcagtttctggtgctgacgtaatattttcagataaggtaatttcacttaacgataaagtaaataagaaaaaaaagatccacgcgtttaaaaattttaaattagataaaaagctgactagattagcaaaaaagaattttatatttttacattgtttgcctagaggaaacgaagtttcggaagacgtttttttgagtaaaaactcacatgtctggcaacaagcgcttaatagagttcatgttcaaaaaagtattttattatattgttttggaaaattaaggtaac

SEQ ID NO: 230472 - DNA, 1015 bp, Unknown
  Bacterial polypeptide expressing nucleotide sequence isolated from the Sargasso Sea
atggattttagcggtagtcacattctttccatagatcagttcaatcgctcggatgtcgagaaattattcaatattgcggatagcttagaaccttattcttcaaaagataaagtcactcgtgtacttgaaggtgctattttggggaatatgttttttgagccgagtactagaactcggataagctttggagcttcttttaaccttttaggaggaaatgtaagagagataacggaagtaggatcttcgtctctagcaaaaggagagtctttggttgatacggccaaagttttaagtggatacagtgacataattgtcatgagacatccggaagaagggtctgttaaaaaatttgcggaagctagcagagtgccagttataaatggtggagacgggtcaaatgagcatccctctcaagccttacttgatctttacacaatacaaaaagaactttctcaaaataaaaaaacaatagatggcttaagaatagctttagtaggtgatttaaaatttggtcgtgcagtgcattccctttgtaaaattttgtcactatattcagaagttacaataaatctgatttctccgaaagaattaaaactacctgataatctaactaaacaattagctaaatcaaatattaagataattgaaactgagaacttggaagaagggatttctgaagtagatattatttatataactaggatacaagaagaaagatttaaaaataaaaaagatgcaaagagatacaaaggtctactgaagcttaaccaatccatatatacagcaaattgtgaaccaaatacggtaatcatgcatcctctaccaagagactctaggagtgatgcaaatgaactagattcggatctttatgcaaatcctaatctagcaatatttagacaagcagataatggggtagtagtcagaatggctttatttgctttagtcttaggtgtagaagatcaaatagacaaatcttctaaaccagtaaattggaaaattaaacgagacctttaag

SEQ ID NO: 230473 - DNA, 895 bp, Unknown
  Bacterial polypeptide expressing nucleotide sequence isolated from the Sargasso Sea
aatgaaacattttattgatattgagaattttaaaaaaacagaaattgataaaataatttcaattgcaaaaaaaataaaacaaaatccaaaaaaatattctttatcttgtaaaaataaaactctaggtttaatttttgaaaagcagtcactaagaacacgattaagcttcaatgtaggaatgcaaaaattagggggttatgttttagaattgcaaagtaaagatattggttttgataataaaagagaaaaagcagaagatgttctcaatgtattaagtcaatatattgattgtttgatgataagaaataataatcacaaacaaatagtaaatttgagcaaaaaaaatattcttccaataataaatggcctaactgaatatagtcatccgtgtcaaatacttggagattttttaacacttcaagagaagtttaaaaactataaaaatttaagtattgcttggataggtgattataataatgttttgcgttcacttattcatttgcaaaatatttataattttaaactcaatattattatacccaatcaaatttttaaatattataaaaatgaatttctaaaatgtaagaataaaaatatgaaatactttgacgatcctttcgaaggtgtaaaaaaatcaaattgcataatgactgatgtttgggtttcaatgggtgaaaaaaataataaaactaaatattttaaaaattttactgtgaataagaaaattatgagtaatgcatcaaataatgcaatatttatgcattgtttaccggcaaaaagagggaaggaagtaacttctgatgttctggatggtaaaaattctgttgtattacaacaagcaaaaaatagaatgtttattcaacaagcgatattgatttatgtacttaaaaaatag

SEQ ID NO: 230474 - DNA, 523 bp, Unknown
  Bacterial polypeptide expressing nucleotide sequence isolated from the Sargasso Sea
atgaaacattttataaatttaaaagatattcctagtaaagatttgagaaaaataattactgatgcaaaaaaaagaaaaagttctagaaaaaaactaaatactctagaggtagataaaggcgccccattaaaaggtaaaattttgattcaaatgtttgaaaaaccaagctcaagaacaagaattagcttttatttagctataaaacaacttggaggaggtactttaacacttagatctaatgaacttcatttaggacaaggtggtgaaagtatatctgataccgcaaaggttctctcaacatatggggatggatttatgttgagaacagatagtgataaaaaaattgaagattttaaaaaatatttatctattccagtgattaatggtttgagcccatcttctcatccaactcaagtactttcagatgtttatacagtcgaggagattacaaaaaaacccatttctaaattaaatatttgctggattggtgactccaataatgtgttggatagtttaattgctg

SEQ ID NO: 230475 - DNA, 895 bp, Unknown
  Bacterial polypeptide expressing nucleotide sequence isolated from the Sargasso Sea
atgaaacattttattgatattaatagttttaaaaaaaaagaaattgatgaaataatttcacttgctaaaaaaatcaaaaaaaacccaaaaaaatattcttcatcttgcaaggataaaactcttggcttaatttttgaaaagcaatcattaagaacaagactaagctttaatgtaggaatgcaaaaattaggcggttctgttttagaactgcaaagtaaagatattggttttgataataaaagagaaaaggctgaagatgttcttaatgtattaaatcaatatattgattgtttaatgataagaaatgataatcacaaacaaatagtaaatttaagtaaagagaatattctgccaattattaacggtttaactgaatacagtcatccgtgtcaaatacttggtgactttttaaccttgcaagagaactttaaaaactacaaaaatttaattattgtttggataggtgattacaataatgttttacgttcgcttatacatctacaaaatatttataattttaaacttaatattgttgtgccacagcaaatttttaaacatcataaaaatgaatttctaaaatttaaaaataaaaatttaaaacatttagttgatcctattgaaggtgcaaaaaaatcaaattgcataatgactgatgtttgggtttctatgggtgaaaaaaacaataaaataaaatattttaaaaattttactgttaataaaaaaattatgagtaatgcatcaaataacgcaatttttatgcattgtttaccagcaaaaagagggaaagaagtcacttcagatgttcttgatggtaaaaattctgttgtactaacacaagcaaaaaatagaatgtatattcaacaagcgatattaatttatgtacttaaaaaatagt

SEQ ID NO: 230476 - DNA, 583 bp, Unknown
  Bacterial polypeptide expressing nucleotide sequence isolated from the Sargasso Sea
atttaaaaagtattccaaaataccaattataaatggattaagtccatcatcacatcctacgcaagttttgtcagatatttttacaattcaggaaatcaaaaaaaaaagtgtttctaaattaaagttatgttggattggagatgccagtaataatatgatgaacagtcttatcgaagtatgtataaaattttcgatatctttaaatattgcctgcccaaaagactatcaaccaaataaagcacttatctcattgattaaaaacatgaaaggaaaaataaatatctttaataaaaaagaattagcggtcaaaaattgtgacgttgttatgacagataagataatttcattgaatgatagagtaaataagaaaaagaaattaaaatcatttaaaaactttaaagttgatgctaaaactatgagctttgcaaagaaagatgcaatatttttacattgtctccctagaggtagcgaagttacagatgaagtttttttaagtaagaaatctaaagtatgggaacaagctctaaatagagtttatgttcaaaaaagtatcttgttatattgttttgataaattaaggtaa

SEQ ID NO: 230477 - DNA, 313 bp, Unknown
  Bacterial polypeptide expressing nucleotide sequence isolated from the Sargasso Sea
aaacaaaataataaaaatttaatttttactaatattatttttgaaggtgttaaaagtgcagattgtgtaatgacagacacatgggtttcaatgggtgaaaaatcaacaaaaaaaagatactttaaaaattatcaagtgaatattgatattatgaaaaatgcaagcaaagaggcaatatttatgcattgtcttccagcacatcgaaatgaagaagtatcttcagatttgctagatagcaataaatcagtggtatgggatcaagctcaaaatagaatgtttgtacaacaagctattattttagatttattatgaa

SEQ ID NO: 230478 - DNA, 931 bp, Unknown
  Bacterial polypeptide expressing nucleotide sequence isolated from the Sargasso Sea
atgaaacactttataaatttaaaagatattccaagtaaagatcttagaaaaataattgttgacgcaaaacaaagaaaaaaacaaagaaaaaaattaaatattttagagccagacaaaggatcacctcttaaaggtaaaatgctagtacaaatgtttgaaaaagctagttcaagaacaagaataagcttctatttagccattaaacagcttggaggtggaacactgacacttagatctaacgaactccatcttggacaaggtggtgagacgatagctgataccgctaaaattctatctacatatggtgatggtttcatgttgagaaccgatgatgataaaaaaattgatgattttcaaaagcatttaactatcccaataataaatggtttaagtccgtcatctcatccaactcaagtgttatcagatatttttactgttgaggaaataaaaaaaaaaccaatatcaaaattaaaaatttgttggataggagactccaataatgttttggatagtttaattgcagcatctgttaagttttcttttacattaaatattggatgtccaaaaaaattcgcaccaagtaagaaagttaaagattgggtaagcaaaaataagaaaaaaatttttatctatcataacccaaaaaaagcagcattggatgcagatgtaattttttctgataaagtaatatctctcaatgacaaagtgaacaaaaaaagaaaaaaacaacagtttaaaaaatttaaaattaaaaaagagatatttaattacgcaaaaaaaaattgtatttttttgcattgtttgccaagaggagacgaagttgaggatgaagtatttttaggaaaaaattcccatgtttggcaacaggcattgaacagagttcatgttcaaaaaagtattcttttgtattgttttggaaaattaaggtaga

SEQ ID NO: 230479 - DNA, 212 bp, Unknown
  Bacterial polypeptide expressing nucleotide sequence isolated from the Sargasso Sea
aaatcaggattatgatttaattaaagaattcagagttaccgaaaaggttatgaaaaaggctaaatcggatagtatttttatgcactgtcttccagcaaatagaaatgaggaagtagaagcaagtgtgatcgatgcaaataattcaagggtttggcacgaagcgagcaatagactgtttgttcaaaaagagattttaaaaataatattttaat

SEQ ID NO: 230480 - DNA, 97 bp, Unknown
  Bacterial polypeptide expressing nucleotide sequence isolated from the Sargasso Sea
ggcccgcaaagcgtcgtgtgggacgaagcggaaaatcgtctgcacgtgcaaaaggcgttgatggaatatctgctgctcggcaagctcaatcactgag

SEQ ID NO: 230481 - DNA, 436 bp, Unknown
  Bacterial polypeptide expressing nucleotide sequence isolated from the Sargasso Sea
aatgactgaaacaaaaaaagatttcattgatcttacccaattcaataaggatgaacttattttcttaattgaagatggaataaacaaaaagaacatgtcatcgaagaatggtatggcatctgttgatgaagatgcatgcgcaaaaaataaaatactagcaacaatttttgaaaaaccttctacaagaacaagattttcatttgaaacagcaatgtatcaattaggtgggaaaactatttatgcaaatatgtctgatatgcaattaggtagaggagaaacaattgatgatactgcaaaagtcatttcaagatatgttgatattgcaatgttaagaacaaataagcattcgactttagaaaattttgcaaaatatgcatcaatacctgtaattaacgggttaaccgataaatcccatccctgccaagttttagctgat

SEQ ID NO: 230482 - DNA, 754 bp, Unknown
  Bacterial polypeptide expressing nucleotide sequence isolated from the Sargasso Sea
gatgaaaaaagttagacattttaaaacattacttgatatcaataaaaatgagttcctgtctattatagagagagctgtagaactaaaaaaactccaaacaaataatgaatatcctgatacattgagaaagaaaataatggctatgatttttaaaaaaaattctacgcgcacaaggatttctcttgaatcatcaatgagcaaactaggaggtcatgccatatacttgtcatcagattcgtcacagctgagcagaggtgagtccttggcagacactgcaaaagtactttcaggaatggttgacataattgcaatccgtacacatagtcacgaggaagtccttgaattgtccgctaattcaacagttccagtaattaatgcactaaccactaaattccatccatgtcagctactagccgatatgcagacattgtatgaggagaaaggacaaataagcggtaaaaaagttgcctgggtaggtgatggttgtaatatgtgtaattcgtatataaatgcctctaaaattttaggctttcacttaaatatagctacgcctcatggtttcgaacctgatgaggaaactttgaaaaatgcttcagatacagcagaattatgtgatttacctggaaaagccgtagaaggttgtgatttagttacaacggatgtttggtctagtatgggtgatgaacacgattatgataaaagaaaagttttgtttaaaggttatcaaattaatcaaaacttaatggataaggct

SEQ ID NO: 230483 - DNA, 394 bp, Unknown
  Bacterial polypeptide expressing nucleotide sequence isolated from the Sargasso Sea
aaatatttatttatttaaattaaatgttgtaattccagaaaaaattataaaactaaaccaaaaagaattaaaaaaatataataataaaaaattaaaattactatctgatccaattattggttcaaaaaaatcaaaatgtataatgacagacgtatggatatcaatgggggataaaaacaaaaataaagttaaatattttaaaaacttcactgttgataaaaaaataattaacagcgcatcaaaagatgtaatttttatgcattgtcttccagctaaaagaggacaagaagtaacatcagaagttttagatggaaaaaaatctgttgttttgcatcaagcaaaaaacagaatgtttatacagcaagcaattttaatttatgttcttaaaaagtaa

SEQ ID NO: 230484 - DNA, 910 bp, Unknown
  Bacterial polypeptide expressing nucleotide sequence isolated from the Sargasso Sea
atgaataatttcatatcaatctatgatctagatcataatttagttcaatctttcattgagaatgctgtagaaacaaagaactcaaaaagtaatgatgactttaattttgcgaatggtaaaattttagcttcgatatttgagaagccatccacaagaacaagattatcttttgacgttgccatgagaaagcttggtggccaatgtattatcattgaccaaaataaattacatctaggcaataataaggaaagcataactgatacagctaagactttgtcacaatatgtagacattgttatgtatcgcgcgcaatctcatgagtcattacaaaaattagcaagtttttcgactgtgcctattattaatgggctatctgatttttctcatccctgtcaagcaatggcagatttattgactatttatgaaaaaagatctggatttgaaggaataaaagtcaattggatagggccgataacaaatgtagcccgttcatggatcgaaattgcaaatttaaatttaggtataaagcttaaaatatttagtaatgattattctataaacgaatatcataaaaaatgtgaggtttataaattaaaacctgatttagacaatatggaagtacataacaatttaaaaaaacttgatagcgctgatgtggtgattactgatacatgggagtcaatgggtgagacagttaatgaaaaaattattaaagattttagttcctatacggttaatcaggaaatgatgagaatttttggagatgaatgtatttttatgcattgtttgccagcaaatagagggcaagaggtaacaccagaagtaattgatggtcctcaatcagttgtatgggatgaagctcaaaatagacttcatatacaaaaagaaataatcaaatggtgtctttagt

SEQ ID NO: 230485 - DNA, 865 bp, Unknown
  Bacterial polypeptide expressing nucleotide sequence isolated from the Sargasso Sea
aatgaaacactttataaatttaaaagatatccccagtagagatcttagaaaaataattgttgatgcaaaacaaagaaaaaaacaaagaaaaaatttaaatactttagagccagacaaaggatcgcctcttaaaggtaaaatgctagtacaaatgtttgaaaaagctagttcaagaacaagaataagcttttatctagccattaaacagcttggtggaggaacattgacacttagatctaacgaacttcacctcgggcaaggtggtgaaacgattgctgataccgctaaaattttatctacatatggtgatggtttcatgttgagaactgatgatgataaaaaaattgaggattttcaaaagcatttaactatcccaataataaatggcttaagtccatcatctcatcctactcaagtattatcagatatttttactgttgaggaaataaaaaaaaaaccaatatcgaaattaaaaatttgttggattggagattccaataacgttttggacagcttaatagctgcatctgttaagttttcatttacattaagtatcgggtgtccaaaaaaatttgcgccaggtaagaaagttaaaaattgggtaagaaaaaataagaaaaaaatctttatttattatgatccaaaaaaagcagctatggatgcagatgtgattttttctgataaagtaatatctctaaatgataaagtgaacaaaaaaagaaaaaaacaacattttcagaaatttaaaattaaaaaagagatatttaaatatacaaaaaaaaattgtatttttttacattgcttgccaagaggagatgaagttgaggatagtgtatttttaggaaaaaattcccatgtttggcaa

SEQ ID NO: 230486 - DNA, 874 bp, Unknown
  Bacterial polypeptide expressing nucleotide sequence isolated from the Sargasso Sea
taattttaaaaaaaaagaaattgatgaaataattttacttgctaaaaaaataaaaaaaaatccaaaaaaattttcttcattttgtaaagacaaaactcttggtttaatttttgaaaagcagtcactaagaacaagattaagtttcaatgtaggaatgcaaaaactaggaggttctgttttagaactgcaaagtaaagatattggttttgataataaaagagaaaaagctgaagatgttcttaatgtattaaatcaatatattgattgcttaatgataagaaataataatcacaaacaaatagtaaatttaagcaaggaaaatattcttccaataattaatggtctaactgaatatagtcatccgtgtcagatactgggagattttttaaccctacaagagaaatttaaaaactataaaaatataagtattgcttggattggtgattacaataatgtcttacgttctcttatccaactgcaaaatatttataatttcaaactgaatttaatcattccaaaaggaatttttaaaaattataaaaaagagtttcaacaatacaaaaataaaaatttaaatcatttttttgatcctatattaggtacaaaaaattcaaattgtataatgacggatgtttgggtttctatgggtgaaaataataaaaataaaaaaaaatatttcaaaaattataccgtagataaaaaaattattagcaatgcttcaaataatgtaatatttatgcactgcttacctgcaaaaagagggcaagaagtgacatcagaagttcttgatggaaaaaattctgttgtattaatgcaagcaaaaaatagaatgtacattcaacaagctatattaatatatgtacttaaaaagtag

SEQ ID NO: 230487 - DNA, 937 bp, Unknown
  Bacterial polypeptide expressing nucleotide sequence isolated from the Sargasso Sea
aatgaaacattttatcaacttaaaagatattccatataatgatttaagaaaaatcttaaatgactctaaaaaaagaaaaaaaaaaagaaaaaattataattctttagatttagatcgggataaaccgcttacaggcaaacttcttattcaaatgtttgaaaaatcaagtcttagaacaagattgagtttttatcttgcaatgagacagttaggaggtggagtacataatctaagaaaagatgagctacatttaggccaaggaggtgaaactattaaagacacagctaaaatcatttcaattcatggcgatatatttatgctgagaacagattcagaaaagaaacttttagagtttaaaaatagtttggaaataccacttatcaatggtttaagcccagattcgcatcctgctcaagttttgtcagatatttttacgatagaagaaattaaaaagaaaaaaatttcaaatttaaaaatttgttgggttggagatgcgaataatgttttgaatagcctcattgaagcttctatcaaattttcttttaaattaaatattgcatctcctaaaaattaccatccaagtaaaaaatttattcaattaattaatcgtaatagaaaattaattaatatttttgctgatccaaataaagcaattgtaaacgccgatgtagttatgactgataaatttgtaagtctaaatgataaagttgatcaaaaaaagaaaaaaaaaaatttcaaaggatttcaagtaaacaaaggtcttacgaaaagtgcaaaaaaaaattttatttttcttcattgccttccagcaaatagaggtgaagaagtgtctagtgaaattattgatggagctaactcagcagtttggaaacaagcggagaatagatttcatgttcaaaaatcaatattactctattgttttaaaaaattaaggtaa

SEQ ID NO: 230488 - DNA, 424 bp, Unknown
  Bacterial polypeptide expressing nucleotide sequence isolated from the Sargasso Sea
tatgcctcattttttagacattaaggatcttaaaaaaaatcaactcaaacgtattattgaaaatgcatataattggaaattaaagaaccctaaaatgtttttagataaaaaaaatattataatgatttttgaaaaaccttctcttagaactagagtttcttttgaaattggaataaagcaattaggtgggtctgttacagttctaaattctaatgaattgattctagggcaaagagaaagtgtattcgatactataaaagttttggaaagatatgtagatatgattatcatcagatcttttgaccataatgttttaagagaaatatccaaaatttctaatgtgccagttattaatgctcttactgatcatagtcatccatgccaggtagtatcagatttattaactataaaagaaaaattagga

SEQ ID NO: 230489 - DNA, 322 bp, Unknown
  Bacterial polypeptide expressing nucleotide sequence isolated from the Sargasso Sea
atgaaaaattttataaatatttctgatcattcatcaaatgatctaagagcgattattgatgaggctaagagtagaaaattaaaaagaaaaggatttaataaatctgcaccggatgaagacaaaccttttgatggaaaatctttggctatgatttttgaaaaaccatcaacaagaaccagaatgtcatttgatattgccgtaaaacaactaggtgggtcatcgattactttaaacccggatggaattcattatggcaaaggagataaaagtttaaaagatactgccaaagttttaacggagtatgttgatatagtaatgtaag

SEQ ID NO: 230490 - DNA, 913 bp, Unknown
  Bacterial polypeptide expressing nucleotide sequence isolated from the Sargasso Sea
gatgcaacatcttctgaaagacagtgatttgagcaagacccagatcgaggcgctgatcgccctgggcaaagcggtcaaggccgatccgaaaaagtacggccaggcgctggcgggcaagagcgtggtcaccctgttcgagaaaccttccctgcgcacccgggtcaccttcgacatcggcatcgcccggctcggcggtcacagcgtctatctggatcagcagaacggcgcgcttggcaagcgcgagtcggtgaaggatttcgccgccaacctgtcgcgctggtgtgatgccatcgtcgctagggtgttcgatcaccagaccctggtcgagctggcggagcacggcacagtgccggtggtgaacagcctgtgcaacctctaccacccctgccaggggctggcggacttcatgaccatcagcgaacactacgccgatctgtccaaggtgaagctggcctatttgggcgatggcaacaacgtcagccactccctactgctgctgggggctaccctgggtaccgacgtgaccctggtctgcccgaaaggccacggcccggatacccaggtcttcctgcaggcccaggcgctggcggcccagtccggtgcgaccatccacatcagcgatgacgtggcggccatcgaagggtttgacgtggcttatacggatacctgggtctccatgggtgacaacacgccaatggagcaggtaaaagatatctttatgccttatcagatcaaccaggccctgctcgaccgtaccggcatccagcatgtgctgcactgccagccggcgcaccgggagctggagatcacctctcaggtcatggacgggcctggctccctcatcatggacgaggcagaaaaccggatgcatatccagaacgccgtactgctgaccctgcttgggcacaaataa

SEQ ID NO: 230491 - DNA, 554 bp, Unknown
  Bacterial polypeptide expressing nucleotide sequence isolated from the Sargasso Sea
aatgaaaaattttataaatatttctgatttgtcaaagaacgagttgagatccattattgatggtgcaaaaaagagaaaattagaaagaggaaaaaaacctaactctgaacctgatatagatcagccaattaaaggaaaaactatgatcatgttatttgcaaaaccttcaacaagaacaagaatttcttttgaccttgcggtcaagcaactaggcggatcttctattattttaaatcatgatgaaattcattatggcaaaggagacgaaacaataaaagatacagctaaagttttgtcacagtacgcagatatacttatgataagaacagatgcccataaagatattgatgaatttaaaaaatttttagaaattccaataatcaatggactaaccaacttaaaccatccgtgtcagatcatgtcagatattctaaccttcgaagaatcaaagggagatatagaaggaaaaactattgcttggcttggggacggaaataatgttgctaattcttttattgaggcagctactaaatttcaatttgaactgaagattg

SEQ ID NO: 230492 - DNA, 307 bp, Unknown
  Bacterial polypeptide expressing nucleotide sequence isolated from the Sargasso Sea
aaaatcattttttttgaaaatcccttagatgcagcaaatatgtgtgattgtataatgacagatgtttggttttcaatgggagagaaaaagtctaattataaaaaaaacttatttaagaatttccaagtaaatgataaattaatgaattgtgcaaagagtaaagcaatttttatgcattgtcttccagctaacaggaatcaagaagtgacagattcggtaatagatggaaaaaaatcagttgtttggaatcagacattaaatagaatgtttgtacaacaaagcattttatattttttaatgaaataat

SEQ ID NO: 230493 - DNA, 139 bp, Unknown
  Bacterial polypeptide expressing nucleotide sequence isolated from the Sargasso Sea
tatgcattgtctgcccgctcatcggggcgaggaaatcacggcggagctcatggacgctcccgattccgtcatctggcaggaagcggaaaatcgcctgcatgcgcaaaaagcactgatggagttactgctcagcgcctga

SEQ ID NO: 230494 - DNA, 388 bp, Unknown
  Bacterial polypeptide expressing nucleotide sequence isolated from the Sargasso Sea
agcagccgaaatactagattttgagctaagaataggctgtcctaataaatttcttccaagtcatttaaaagaaaataaaaatctaaagatttttgacaaccccaacgaagctgcttctggagcttcattgatttccacagatgtttgggtttcgatgggagatgaagaagaaatagatgaaagaaccaaagcctttagtaagtttcaagttactactgaactattggatgaagcagacgaaaatgtaatctttcttcactgcttaccagcaattagaggacaagaagtaacatctgaagttatggaagatgaaagaagtaaggtatggcaacaagcagaaaacagactccacgctcagaaggcccttcttatatctcttcttggttag

SEQ ID NO: 230495 - DNA, 655 bp, Unknown
  Bacterial polypeptide expressing nucleotide sequence isolated from the Sargasso Sea
agaagtatattagattctgcaaaagtcttagaaagatatgtagatatgattattattcggtcatttgatcataaaattttaaaaaaatttacatctttcattaaaattccagtgataaatgcgcttactaattttagtcatccttgccaagtaattggggatttgttgacaataaaagaacatcttaaagttttaaaaggtaaaaaagtttcttggtttggcgattttaataatgtaacgcaaagttggatagaagcagcagttttgttagggatagatttttatattgcatgtcctagtgatgttggtccaaataaacagactttagaatggataaaaaataatagaggaaatattgtgatcactcaagatgttaatctagttgctcagaatgctgattgtgttatgacagacacatggatatcaatgggcgataaaaaaaataaatccaccgataaatttttaccttttcaagtaaatacaagtattatgaatattgccaaatctaacgcattatttatgcactgtttacctgcttatagaggttatgaggttatagatgaggtaattaatggtaaaaattctataatatacgatcaagctgagaatagattacatgctcagaaatcgataattaatcattgtttaacttaaa

SEQ ID NO: 230496 - DNA, 570 bp, Unknown
  Bacterial polypeptide expressing nucleotide sequence isolated from the Sargasso Sea
aaatggccgaatattcttccgttcctgtcatcaatgttttaacagatagttcccatccatgccaactaatggccgatgtaatgaccttcgaggagcaccgtggcccgatcaaagggaagaccgtagcgtggagcggagacggaaataatatggcctcatcttggatacacgctgcaacaaagtttgatttcaaattaaatatcgcctgcccaatagaatgcagaccaaaccatgagttattggattgggctaataagcagaaaaaacatgtcgatcttttccatgatcctagagccgcagtagaaaatgctgactgtgtagtaacagatacgtgggtctctatgggaactgacactaagaaccaacataatctactggccccttttcaggtaaataaaaaattaatggaagctgcctcaccggaagcagttttcttacattgtttacctgcacacaggggagaggaagtgacagccgaagtaattgacggttcccagtccttagtttgggatgaagcagaaaaccgcctgcatgcgcaaaaggctgttttggtatggtgcatgacgtaaa

SEQ ID NO: 230497 - DNA, 451 bp, Unknown
  Bacterial polypeptide expressing nucleotide sequence isolated from the Sargasso Sea
aaaattacatggatgggtgataaaaataacgtatgtaattcttggattgaagctgcttcactactgaactttgaattaactatctcttgtccccgtgagtattttgttgattgccaactaagtaaaaacttaatctatgttgaagaccccatgactgcatgcactaatgcagatttaataattactgatgtatggacaagtatgggttatgaagacgaaaaaaaagaaagaacagacatctttcaaaactggagggttacacaagaaaaaatgtcattagcatcaccaaatgcacttttcatgcactgcctccctgctcacagaggggaagaagttgatagcgaagttatagatggaccacaatctgttgtttgggatgaagcagaaaaccgtcttcacactcaaaaagctttgatgagttttttattattaggtgaacagaatttatgaa

SEQ ID NO: 230498 - DNA, 420 bp, Unknown
  Bacterial polypeptide expressing nucleotide sequence isolated from the Sargasso Sea
ttttatgcggcgctctatttggggttgaagtaagaatagtatgtcctaaaggatatgagccaagttcttcggtaattaacaaagcatataaaatctataagaataaaaaattactaaaaataactaatgatcttcaatctgcagtattgggagcaaatgttctgtatacagatgtgtggtcttcaatgggtgaagaaaatcaaaaggaagataaagataaaatttttaaaggatttactgtcgatagttatttattaagtaaggcggacaaaaatgcaattattcttcattgcctgcctgcctatagatctaaagaaataactgatgaagtaattgaaagtaaaaatagtagaatttttgatcaagctgaaaacagaatgcatgttcaacaagctcttctttcatgccttctttcatgaa

SEQ ID NO: 230499 - DNA, 538 bp, Unknown
  Bacterial polypeptide expressing nucleotide sequence isolated from the Sargasso Sea
tatgactaaaaaaccgcataatgtcgatatactcacattagatgaattagagtccaaggaaattaataatataattgatttagcaatagacttgaaaaaagaactaaaaaaaggaaaagaaaaaccgcttttacaaaataaaactttagcaatgatatttgaaaaaccttctactcgaacacgtgtaagttttgaaacaggaatgttccaacttggaggtcatgcacttacattatctccaaatgaccttcaattatctcgtggtgaatctatcgctgataccgcaaggacactttctcgttatgtgaatgtagtaatggctcgtgtttatgatcataaatctctagaaacttttgcaaggaattcttctatacctgtaattaatggattatctgattcatatcatccatgtcaaatacttgcagatcttatgacaattaaagaacataaaaaaaatctaaagaaaataaaaattgcttggataggagatggaaataatgtttgtaactctttgatattaggatgtgcaaaactaaag

SEQ ID NO: 230500 - DNA, 739 bp, Unknown
  Bacterial polypeptide expressing nucleotide sequence isolated from the Sargasso Sea
gatgctaaacccaatcaagcttgaaaataaaaattttttatcaagcttggatatttcaagagaggaattctttcatattttagagattgctaaaaattttaaaaataaagatttaaatattgaactcaaagataaagttttaggattgatttttgataagtcgtctactcgtacaagggttagttttcaagtggcaatgtcaagacttgctggtactacagtagatctaaatccaactacttcccaaattggaaggggagaaccaattagagatacagcaagagtgttaagtagatattgtgatgttcttgcaataagaacctttaaacaatctgatttggaagagtatgcaaaatggtcttctaagccagttattaacgcccttacagatgtagaacatccctgccaagctttggctgattacatgacaattaaagatgaatttgatgattttaagaatgtcgttttgacttttatcggtgatggcaataatgtcgcaaattctcttattttatatggtgcattattaggtgttgaggttagaatcgcatgtcctaaaggttatgaacctaattctctaataatcaaaaaagcatatgaaatatataacaataaaaatttgttgaaaatcactaacgatccaaatgaagccgccttaggagcaaatgttctttatacagatgtttggtcatctatgggagaagaaaagcaaaaagaacacaaagataagttttttaat

SEQ ID NO: 230501 - DNA, 799 bp, Unknown
  Bacterial polypeptide expressing nucleotide sequence isolated from the Sargasso Sea
aaaagaaatgttgttaattataaaacagggtcactttcttaaaaaaaattatggtaagaagtttttagaggagaagaaaattcttgcaatgatttttgaaaaaccttcgactagaacaagggttgcttttgaagtgggaatgaaaaaattaaatggagatgtagttattttagaccagcacgaaagtcagttagggcgtggggagtctttacaagataccataaaagttttaggtagatacgtcgatataattctttacagagggtctgatgaaaaaatattatatgagatttcagagttatctgatgttcccataatcaatggacttacaaataatagtcacccttgtcaaattgttgctgatataatgacattagaagaaaaatttaaggatataaataaattaaaaatttcctggataggtgacggaaataatgtttgtaattcctggattgaagcagtaaaccattatgattttaaactaaacatttcatgtcctgaaggttgtttcccgtcaaaaaaaactctcaaagaatctaaatcatcccatatcaacctctttgacaaaccatctgaagctgtaaagaatgctgatgttgtaattactgatacatgggaatcaatgggaattaaaaaagataaacaaaagcttaaaaaatttgaaaaatttagagttgactcagaactgatgttaagaacaaataagaattctttttttttacattgtcttccagctcacagaggttgtgaggtaactgatgaagttattgatggaaaaaactcacttgtatgggagaag

SEQ ID NO: 230502 - DNA, 548 bp, Unknown
  Bacterial polypeptide expressing nucleotide sequence isolated from the Sargasso Sea
tataaatggattaactaatttaagtcatccatgtcaaatcatggctgatattttaacctttgaagagtcaaaaggagatatagaaggaaaaactattgcttggcttggagatggaaataacgttgcaaattcttttattgaggcagctacaaaattcaattttgaaataaaaattgcctgtccaaaaaaatatcaacccgataaaaaaatagtggaaacagctaaaaaaaataattgcaaacttttaattacagaagatccttataaggctgcaaaaaatgcagactgtattatgacagacaaatggatatctatgagtgataaaggagacaagaagaaaaaaaagaaaattcttaaaaaatatcaagtaaataaaaaaattatgaatgttgcaaaaccagactctatttttatgcattgtcttcctgcaagcagagaagaagaagtaacaagtgaagttatggatggaaaaaattcagttgtctggctgcaggcctttaatagaattcatgcacaaaaaagtattattgaatggtgtatgaaataat

SEQ ID NO: 230503 - DNA, 729 bp, Unknown
  Bacterial polypeptide expressing nucleotide sequence isolated from the Sargasso Sea
tgccggtcatgtgctcggcatgatcttcgagaagaactccacccggacccgcgtctttttcgacatcgggatgcggcagctcggtggatcggctctcatcctcgattcgggcaccagccagcttggccggggggaaagcatagccgacaccgcgcgggtgctgagccggatggtggatgccatcatgatccggacggacgatcatgccaaggccgaggaactggcacactatgcgcatgtcccagtgatcaacggcctgaccgaccggtcccacccgtgccagatcgtcgccgatctgctgacggtggtcgaacaggggaaggcgctgccggggctggaactggcctggcttggcgatggcaacaatgttctccattccgttctcgaggcggccggactcttcaagttcaatgtgcgggtgggcgtgcccagcggatatgaaccggaagcagaattcgtggagatggcgcgtcagggcggcgctcgggtcacgcttacgcacgacgctgcagaggccgcgcgcggcgcagacattatcgtgaccgatacctgggtttcgatggggcaggatcatgcccacaacaagatcgcggccatggcgcccttccaagtcaataagcagctcatggaactggccaaatccgatgcgcggttcctccattgcctgccggcccatgtgggtgacgaggtgaccgaggaggtgttcgaaagcgcgcagtcggtcgtttt

SEQ ID NO: 230504 - DNA, 581 bp, Unknown
  Bacterial polypeptide expressing nucleotide sequence isolated from the Sargasso Sea
aaaacatgctactgttccagttgtgaatggtttaactgattataaccatccatgccaaattcttactgatatgtttacaatttgggagcaaaaaaaagataatttaagtgatttaaagattgtatatgttggcgatggaaataatattgttaactcatggataagattagcttcagtattaccttttgaattcacttgcgtctgtcctgaagggtatgaacctgatgcaggaacaatttcctatgccaattctaaaaatatctcttcaataaatattcttcatgacccaattcagggagtaaaagatgctgatgttatttatacagatgtttgggcatcaatgggtcaaaaagaagaagttgatgaaagggtaaaaatattttctcctttgcaggtaaataatgatttgattcaacatgcaaaaaatgattatatgtttatgcattgcttgccagctgaaagaggtagagaagtgaccgatcaagtaattgattctcaaaattccatagtatttgagcaagctgaaaatagactacatacccaaaatgctattatggtaactctagcaaataaagtttagt

SEQ ID NO: 230505 - DNA, 732 bp, Unknown
  Bacterial polypeptide expressing nucleotide sequence isolated from the Sargasso Sea
cccgaactagagtttcctttgaggttgccatgaatcaacttggaggaaaggctagttttctttcaatagcagatttgcaactcggtagaggtgagccgcttgaagataccgccagagttataggttctatggcggatggagttgtcttaagaacgcaaaaacatgaaacacaacaaacctttgcctctttctcttcagctgcaactattaatggattaagtaatttatctcatccctgccaagtattaaccgatctgctaacttacttcgaagaaaacggttctatagagggagaaaaggtctgttggtctggagactttaataatgtctgttatagctatgcagaagctgcagatatttttaactttgaactgcacgtggcctgtccaaaagaattccagcccgacacaaaagcactccccaatgtaacttttacagaatcattaaatgaagcagtagaaggcagtagtttagtgactacagatgtgtgggtctcaatgggagatgaaaacgaaaaagagaagagagagcaattatttagcagctatcaaataaagccttccgttatggataaagcaagtaacaaagcaattttcttgcattgccttcccgctgtaagaggtcaggaaatatctgaagatttattagaagataaaagaagtaaagtatggacccaagcagaaaatagattgcatgctcaaaaagctttgttggtagaacttctgaaataaa

SEQ ID NO: 230506 - DNA, 661 bp, Unknown
  Bacterial polypeptide expressing nucleotide sequence isolated from the Sargasso Sea
ttgctcaacatgaagaattttttaaatataagcgatacgtctatccaagaccttaaaggcatacttgaacaagccaaaacgatgaagaccgccaggattggtcttccaaaaggagcatgtgacgaaggccgaccacttagccaacatattgttgctctggtcttcgaaaaaccatccaccagaacaagaacgagctttgatgtcggtgttcgacaactaggggggaaaccgatactgctttccggcaccgaaatgcaacttggacagggcgagactatatccgacacagcccgcgttttaagtcggtatgtagatttaataatgttgagaacatttgaaagccagacgttatacgagatggctaaatattcaacagtacctgttatcaatggattgactaacgaaagtcacccttgccaaataatggctgatattatgacatttgaggaaaagcgtggatcaataaaaggtaaaaaagttgtttggttcggtgacggcaataacgtatttaatagctttttgcaggctgccaaaaaatttgatttctcactcattttttcgggaccaaaagaattagatccatcaaaaaatttaactgaaaataccaataatctaggaattaattttgaaatagatagggacccaatgttctgcaatcaaa

SEQ ID NO: 230507 - DNA, 466 bp, Unknown
  Bacterial polypeptide expressing nucleotide sequence isolated from the Sargasso Sea
catgataaaaccaaataagcttgctaataataattttctatcaagtttggacatatcagcagaagaagcttttcaaatcttagagcttgcaagaaattttaaaaataaaaaaataaatattaatcttaaaaatagagttttaggtttaatatttgacaaggcttctacacgtactagagttagttttcaagttgccatgtcaaggcttggaggaaccactattgacctaaatcctacaacttcacagatacgcagaggagagccaattaaagatacagctagggttttaagtagatattgcgatgtgattgcaataagaacttttaaacattcagatttgcaagaatatgcaaagtggtctactaggccagtgattaatgctcttacagatttagagcacccatgtcaggcattagcagatttctttacgattaaagaggaatttactgattttaaagatttagtt

SEQ ID NO: 230508 - DNA, 714 bp, Unknown
  Bacterial polypeptide expressing nucleotide sequence isolated from the Sargasso Sea
taacaaatcacaagctgacaacgataaacctttagatggaaaatcaatgattatgatttttgaaaaaccatcaaccagaactagagtatctttcgacatagctgttaaacaactaggcggctattcaactattttaaatccagacggcattcactatgggaaaggtgatgaaagtatagaggacactgcaaaagttttatcagaatatgccgatgtgataatgatcagaacttcgtcacataaaaacctggaagaatttggtgaacatctaagtattcctttaataaatggattgtcagatcaaagccacccatgccaagttatttcagatattttaactttcgaagagttaaaaggtgatatcaaaggtaaaaccttatcttggattggagacggagctaacaatatgtcttattcttttattgaagctgcagtaaaattccaatttaatctaaaaataggttgtccaaaaaaatatagtccaaacaaaaaaattatcaattgggcattgaaaaaaaatacaagaattgaggtatcaaccaatccaaaggatgctgtaaaaggttctgattgcgtaatgacagataaatgggtgtcaatgaatgacaagggagataaaaaaaagaaaaaaaaaattttaaaagactatcaagttaataaaaaactcttatctcaagcaaaatcagacacaatttttatgcactgtttaccggt

SEQ ID NO: 230509 - DNA, 772 bp, Unknown
  Bacterial polypeptide expressing nucleotide sequence isolated from the Sargasso Sea
aatgaaaaactttataaatatctctgactgttcttcagtagagcttagagcgattattgaagaagcaaaaaagagaaaacaaaatagatctggacttaataaatctgcgcctgatgaagacaagccctttgaaggcaagtcgatggctatgatttttgagaaaccctcaacaagaacaagaatgtcatttgacatcgctgttaaacaacttggtggatcgtcaattattttaaatccagatggaatacattacgggaagggagacgagactttaaaagatacagcaaaagttctatcggagtatgtagatatcattatgttgagaacctcatctcacaaaaatttagaggaatttggaaagcatttagatatcccaattatcaacggtctttccgatgtaagtcatccatgtcaaattatgtctgatattcttacttacgaagaaagtaatggttctattgagggtaaaactgtttcttggattggagatggtaataataatatgtcgaattccttaatagaagctgccgggaaatttaattttaaacttaatattggttgtccgaaaaaatattctccaaataagagtatattaaagctagcgaaaaaggagaaagtaaaattaacaattacgtctaaacctcttgaggcagctacaggcgctgattgtgtaatgaccgataaatggatctcaatgaatgataaggtaaataaaatttctaaaaagaaaactttaaaaccttaccaagttaataagaaactaatgagcaaa

SEQ ID NO: 230510 - DNA, 758 bp, Unknown
  Bacterial polypeptide expressing nucleotide sequence isolated from the Sargasso Sea
aaagaaaaacctcttttacaaaataaaactttggcaatgatctttgaaaaaccttcaactcgaacacgtgtaagtttcgaaacaggaatgtttcaacttggaggtcatgcacttactctctctccaaatgatcttcagttatctcgtggtgaatctattgcagatacagcaaaaacactttcacgttatgttaatgtgataatggctcgtgtttatgatcataaactattggaaaatcttgctaggaattcttctataccggtaatcaatggattgtctgattcatatcatccatgtcaaatacttgcagattttatgacgataaaagaacacaaaaaaaatctaaagaaaataaaaattgcttggataggtgatggaaataatgtttgtaactctttgatattgggatgtgcaaaattaaaaatacaactttctgttgcagttcctgatggatatgaacctgaatttgatattgtaaaaatcggtaaagatgcagaagttttagaaatttctgataatcctgaagcagcagtaaaagatgcagatgttgttatgactgatacatttgtttcaattcataataccaattctgatcgcgtcaaaaaatttctgccaaaattccaagtcaaccaatctttaatgaataaagccaaaaaagatgctatcttcatgcattgtctacctgcaaagcgtgatcaagaagtaacttctgatgtaattgatggctcccaatctgttgtttgggatgaagctgaaaa

SEQ ID NO: 230511 - DNA, 763 bp, Unknown
  Bacterial polypeptide expressing nucleotide sequence isolated from the Sargasso Sea
gatgttaaacccgatcaagcttgcaagtaaaaattttttatcaagcttggatatctcatgcgaagaatttcttcatattttagagatagcaaaaaattttaaaaataaagatctagatataaaactcaaagaaaaagtcttaggattaatttttgataagtcatcaactcgtaccagagttagtttccaggttgcaatgtcaagacttggcggcacgacagttgacctaaatcctcatacttcacaaattggcaggggagaaccaattagagatacagcaagagtgctaagtagatactgcgatgttcttgcgataagaacatttaaacaaactgatttggaagagtatgcaaaatggtcctccaagccagttattaatgctctaactgacttagaacatccatgccaggctttggctgattttatgacaattaaagaggaatttcttgattttaaagatttagttttgacatttattggagacggaaataacgtcgcaaattctcttattttatctggcgcgttattaggagtggaagttaggattgcatgcccaaaaggttatgaacctaattcgttgttgatcgataaagcatatgaaatatatgaaaataagaatttgttgaaaatcactaatgatcccaattctgcagttcttggggcaaatgttctttatacagatgtttggtcatctatgggtgaagaaaatcagaaagaagaaaaagataaatcttttaatggatttactcttgatagtaattta

SEQ ID NO: 230512 - DNA, 844 bp, Unknown
  Bacterial polypeptide expressing nucleotide sequence isolated from the Sargasso Sea
aagaaaaaatttaaataaatctgcaccagataaagataagcctttcgaaggaaaatcaatggcaatgatttttgaaaaaccctcaacgagaacaagaatgtcttttgatattgctgttaaacaacttgggggatcttctattatcttaaatcctgatggtattcattatggaaaaggtgacgagagcttaaaagatactgcaaaagtattaactgaatatgtggatattgttatgctaagaacatcttcccataaaaatttagaagagtttggaaagtatttggatataccaataataaatggactttctgacaaaagtcatccttgtcaaattatgtctgatattatgacttttgaagaaacaaaaggtttgataaccggaaaagttgtctcttggttaggagacggtaataataatatgtcaaattcattgatagaagctgctggtaaatttggttttcaattaaaaataggttgtcctaaaaaatatatgccaaataaaaaaatattaaattgggcaaaaaaaaataaagtaaatcttttaataacgactaaacccgaagaagcagtcaaagattcagattgtattatgactgacaaatgggtttcaatgaacgataacgtgaacaaaaaattaaaaaagaaaaaattaaaaaactatcaagttaataaaaaattaatgcaaaaagcaaaatctgatgcaatcttcatgcattgtttgcctgtaggcagaggagaagaggtaacaaatgatgttatcgatggtaagcagtcggtagtttggagacaagcattaaacagagtgcatgctcaaaaaggtattattaactggtgcttaaattaa

SEQ ID NO: 230513 - DNA, 822 bp, Unknown
  Bacterial polypeptide expressing nucleotide sequence isolated from the Sargasso Sea
tatgaagaattttataaatatttccgatttatctaatagtgatttgagatctattattgatggagcgaagcaaagaaaattggaaagaggcaagaaacctaactcacaacctgatgaagatcttccgattaaaggaaagactatgattatgtttttttcaaaaccatcaacaagaacaagaatttctttcgatctagcagttaaacagctaggcgggtcatctattattcttaatcaagatgaaattcattatggaaagggagacgaaacaatcaaagatacagcaaaagttctttctcagtacggagatattcttatgattagaacagactctcataaagatattaatgagtttaaaaaatatttagacattccaattattaatggacttactaatttaagtcatccatgccaaattatgtccgatattttaacctttgaagaactaaaaggaaatgtagaaggaaaaactattgcttggcttggagacggaaataatgttgctaactcttttattgaggcagctaccaaatttaaatttgaactgaaaattgcctgtccaaaaaagtatcagccagataaaaaaatagtcgagtttgctaaaaaaaataattgtaaacttttaattacagaagatcctcataaagcagcaaaaggcgcggactgtattatgactgataaatggatatccatgggtgacaaaggtgataagaagaaaaaaaagaaaattcttaaaaaatatcaggtaaataagaaaattatgaaaattgctaaatcagatgcaatttttatgcattgtcttccccgcagtagagaagaaga

SEQ ID NO: 230514 - DNA, 139 bp, Unknown
  Bacterial polypeptide expressing nucleotide sequence isolated from the Sargasso Sea
ttgtctaccagcagaaaggggacgagaagtaacagattcagttatggaatcgaaaaattcaattgtatttgatgaagcggagaatcgtatgcatgcgcaaaacgctgtgatggtttacttatcaaataaaaagatttaa

SEQ ID NO: 230515 - DNA, 650 bp, Unknown
  Bacterial polypeptide expressing nucleotide sequence isolated from the Sargasso Sea
agactcggcgcgggtgttgtcgcgctatgtcgatgcgatcattatccgctgtttcagtcatcagcagctgctggatttggcatcgcatgccaccgttccggtgatcaacggtctgacggaacggtctcatccctgtcagataatggccgatctgcagaccatgattgactgccatggtccgttggaggggcagagtgtcacttggtttggtgatggcaacaatgttcttgtgagttggatcgaggcagctgcgctgttcaaatttgaactgagaatcgcctgtcctgatggctattcgccaccggctgagctgctggcctgggcccgggcgcagggtggtgaaatcaccatgcatggtgaccctgtcgaggcagcgcgaaacagccagacgctggttacggatgtgtggatttcaatgggtgatgaggaaggtacgcggatgcaggattttgcgccctatcaggtcaatgtcgatctgatgaaagtggctgcgggcgacgcggtcttcatgcattgtcttcccgccatacgcggtcaggaggttgccgcagaggtcattgatgggccgcagtcagtggtctttgacgaagctgaaaacagattgcacgcacaaaaggcggtgctggcatggtgttttgctggcaattgac

SEQ ID NO: 230516 - DNA, 745 bp, Unknown
  Bacterial polypeptide expressing nucleotide sequence isolated from the Sargasso Sea
tttcaagttgcgatgactagacttgggggaaccactattgaccttaatcccacaacatcacaaataggaagaggcgagccaattagagatactgcaagagttttaagcagatattgtgatgttatcgcaatcagaacatttgatcatttagatttggaagaatatgcaaagtggtctacaaagccagttattaatgctcttactgatttagaacatccatgtcaggctttagctgattttttaacgattaaggaggaatttcttgattttaaagatgtagttttgacatttattggagacggtaataacgtcgcaaattcacttattttatgtggtgctttattaggagtagaagttaggatcgcatgtcctaaaggttatgaacctaattctttagtaatcaaaaaggcatatgagatatataaaaataaaaatttattgaaaattactaatgatccttatacttctgctttaggagcaaatgtcctttatacagatgtttggtcttctatgggagaagaaaatcaaaaagaagaaaaagataaagatttttttgggtttactattgaccagaatttagtgagaaatgctgataaggatgcaattattcttcattgtcttcctgcctatagatctaaagaaataactgatgatgtaattgaaagcaaacaaagcagaatctttgaacaagcagaaaatagaatgcatgctcaacaagcacttctgtcatgccttctttcatgaa

SEQ ID NO: 230517 - DNA, 451 bp, Unknown
  Bacterial polypeptide expressing nucleotide sequence isolated from the Sargasso Sea
ggtgatggaaataatattgttcattcctggctacaacttgcgagtctgtttccaatgcaatttgtatgttgctctccattgggatttgagcccgatgataaaactatcagaatggttactgactctggggtttcaacttttgagatttctcatcatcctaaatcagctgttaaggatgcagatgtggtttacactgatgtctgggcgtcaatgggtcaaaaggatgaggaggattcaagagcaagtattttttcaaattatcaagttaactcatcattacttacagaagcaaagaaagatttcttatttatgcactgtcttccagcggagagagggaaagaagtcaccgatgaagttatagaatcatcaaattctatcgtttttgatcaggctgaaaatcggatgcatgttcaaaatgctattatggtatttttgagtaaaaattcatagt

SEQ ID NO: 230518 - DNA, 727 bp, Unknown
  Bacterial polypeptide expressing nucleotide sequence isolated from the Sargasso Sea
atgagtgttagacattgtataaaagttgatgatttcagttctaatgaaattttagacttatttcagcttgcagcagaattaaaatcaaaatatcgcaataaagaaagttatcaaccatttaaagatcattcaatggcaatgatatttgctaaaccatctgcaagaactagagtttcttttgaaacgggctttgcttggatgggtggtcatgcaatctatttagcacctcaagatattggtttaggtactcgcgaaagcgcttcagatttagctcaactttttagtagatataatgatatgattatggcaagagtttttagtcatagtgatatgttagattttgaagagcatgcaagtgttccagtcattaatggattgaccgattataatcatccctgtcaaattcttactgacatgttttcaatctgggaacaaaaaaaggataatttccaaaatttaaaaattgtttatgtcggagacggaaataatattgttaactcttggattcgtttagcatctattattccatttgaatttacttgtgtttgtcctgaaggttatgaacctgatgcacaaacaattgaatatgcaaattctaaaaatatttcaacaattaatatttctcatgatcctattgaaggtgtaaaagatgctgacgtagtttatactgatgtttgggcgtctatggggcaaaaagaagaaattgacgaaagaattaaaatatttt

SEQ ID NO: 230519 - DNA, 233 bp, Unknown
  Bacterial polypeptide expressing nucleotide sequence isolated from the Sargasso Sea
catggcgttcaacatgcacaaccgccacctgctcagcctgatgcaccatagcacccgcgagctgcgttacctgctcgacctgtcgcgcgacctcaaacgcgccaagtacaccggcaccgagcagcagcacctgacccgcaagaacatcgcgctgatcttcgagaagacttcgacccgcacccgctgcgccttcgaagtggccgcctacgaccagggcgccaacgtcacctaca

SEQ ID NO: 230520 - DNA, 433 bp, Unknown
  Bacterial polypeptide expressing nucleotide sequence isolated from the Sargasso Sea
gtcctaacttcattgatgcaggccgcagaaatttttaattttaaattaaatattttgatgcctaaaaaaattatggaaatggctaaaaaaaaattagacaacaaaaaattagtatattctaatttttgctatgattttgatcatgctttaaaagattccgattgtgttatgactgatacttggatttctatgggtgaaaaaaaatctcaaagtaagctaaaattattaaaaaaatttcaagttaatgatgtaattatgaaaaaggctaaaaaagaagcaatatttatgcattgtttacctgctcatagaaatgaagaagtgactgattctgttatagatagtaagaaatctttagtgtgggagcaggctaaaaatagaatgtatgttcaacaaagtattttgtgttatttatttaatgatgttagaaaataaa

SEQ ID NO: 230521 - DNA, 350 bp, Unknown
  Bacterial polypeptide expressing nucleotide sequence isolated from the Sargasso Sea
ggacatgtcaattgatgctggattatcaaaaattactataacaaatgacccttttgattccatacaaaattcagatgttatttatactgacgtttgggcatctatgggtcaaaaagatgaagcagaaattagggagaaggtgtttaaaccttttcaggtaaataagtcaattatgtcagaggctgggaaaaacgcagtttttatgcattgcttaccagcagagagagatagagaagtaacagacgaagtaatggaagctgaatattcaattgtgtttgaacaagcagaaaatcgtttacatatacaaaatgctataatggctacgttacttaatcaaactattgtttgat

SEQ ID NO: 230522 - DNA, 465 bp, Unknown
  Bacterial polypeptide expressing nucleotide sequence isolated from the Sargasso Sea
ttttagcatttataggcgatggtaataatgttgctaattccctgattttgtctggagccttattaggagttgaagtaagaatagcatgtcccaaggggtacgaaccaaatcctttggtggttagaaaagcaaatgaaattaatggagacaaaaatttattaaaaattacaaacgatccttactctgcagtttcaggagcaaatgttctatatacagatgtttggtcatctatgggtgaagaaaatgaaatggagaataaagataaagactttaatggtttttctattaataataatttagtaaggcatgcagataaagaagcaattattctacattgccttcccgcctatagatcaaaagaaataactgatgaagtaatcgaaagtaaacaaagtagaatttttgaacaagcagaaaatcgattgcatgctcaacaagctttattggcatgtcttttttcatgaa

SEQ ID NO: 230523 - DNA, 574 bp, Unknown
  Bacterial polypeptide expressing nucleotide sequence isolated from the Sargasso Sea
tatggcttcagcatcttcaagcttagcttctaaattatctcctttaagtaaaagcaacttcctttcttcctctgatttaaatagcgatcaaattttatctttatttgaattagctaaacagcttaaaacaggtaacagaagaattgatctaggtaatagagttcttggattgatattcaaaaaagcctctactaggacaagagtgagttttcaagtagcaatggcaaggctgggaggtcagactgttgatttgaatcctcaaatcacacaacttggtaggggtgaacctattaaagacacagcgagggttttgagtcgttattgtgacgcactagcaattaggactttttctcaacaagaacttgaagaatatgcagaatggtccactattcctatcattaatgccttaactgacctcgaacatccttgtcagtctcttgctgattatctaacaattcaagaaaagtttggggagcttaaagggataaatctttcttacatcggagatggcaataatgttgccaactcattgatgatatgcggtgcaatgctgggagttaatgtgaaaatttgt

SEQ ID NO: 230524 - DNA, 487 bp, Unknown
  Bacterial polypeptide expressing nucleotide sequence isolated from the Sargasso Sea
atgacttttgaggaaaatataggtataattaacaataaagttgttagttggtgtggagattttaataatgtttgtagaagctgggtacaagcatctagcatcttaaattttgatttgcatatcgcttgcccaaagcaactaataaataaagatgaaatgaacaaaataaataaaatcaaaagtataaaaatatttgattcagcagaaaatgcatgtaagaattctgactgcgtaatgactgacacgtggttttcaatgggtcaaataacttcagaaaaaaaaagaaatttactaaaaccttttcagataaataataaaatattatctattgcaaaaaaaaaatctatttttatgcattgtttaccagcacacagaggagaagaagtagaaaaaaatattttagaacatcccaaatctgttgtttgggacgaagctgaaaacagattacatacccaaaaagccattttaaattggtgtttaaaataat

SEQ ID NO: 230525 - DNA, 253 bp, Unknown
  Bacterial polypeptide expressing nucleotide sequence isolated from the Sargasso Sea
catggggcaagaggaggagcaaaccgagcgagagcaagccttccgtgggttttgcgttgatgaagccctgatggcaaaggcagatcccgccgcaatcgtgttgcactgtctcccggcccatcgcggtgaagaaatcagcgaatcggtcctggaggggaactccagcaggatctttgatcaggctgagaaccgcttgcatgcccaacaggctctgctggctgcactgttgggagccaagggcatcgaagactga

SEQ ID NO: 230526 - DNA, 796 bp, Unknown
  Bacterial polypeptide expressing nucleotide sequence isolated from the Sargasso Sea
aagacttacggaatgtttttccacaaactttctcttcgtactcgcttgtcatttgaagtcgggatagttcaacttggaggatctgctgttaatttatcagaacaggattttaagattggtgaaagagagtccgtgagtgatgttgcaagagtaatgtcacgctatgtagatggaattctgattcgcactttttcacatcagatggttttagacttggcaaaacacgctacagttcctgtaataaacatgttgactgattttaatcatccatgccaggtaatgtcggacatgctgactgttaaagaaaaattaggacgtattgacaatgttcgaatagcatttgttggcgacagcaacaacgttacaaattcatggttaaacatggcagccagaattccgttggaccttcgaatagctactgcacctgaaaccgaacctgatatgaaacttgtttctaaaatcagagaaacaggaatttcaaatattcaagtaactaactctgcgaaaaaagcattagaagatgtagagattatatatacagacgtttgggcaagtatgggtgaaaaaaataaaatagctgaaagggaaaaagctttaaaggattttcaagtaaactcaagactgttacaatactcaggaaatgatgcactggtatttcattgtttgccagcagaaagagacaaggagattaccaatgaagtcattgaagggccccagtcagttgtttttgatcaggcagaaaacagattgcatgctcaaaaagctattctggtccaactagacaaatggaactaac

SEQ ID NO: 230527 - DNA, 642 bp, Unknown
  Bacterial polypeptide expressing nucleotide sequence isolated from the Sargasso Sea
atacagcgcgagtgctatcacgatatgtggatggaattatgataagaacattcggagaagataaaattcgagaaatggccgaatattcttctgttcctgtcatcaatggtttaacagatagttcccacccatgccaactaatggccgatgttatgaccttcgaggagcaccgcggccctatcaaagggaagaccgtagcgtggagcggagacggaaataatatggcctcatcttggatacacgctgcaacaaaatttgatttcaaattaaatatcgcctgcccaatagaatgcagaccaaaccatgagttattggattgggctaataagcagaaaaaacatgtcaatcttttccatgatcctagagccgcagtagaaaatgctgactgtgtagtaacagatacgtgggtctctatgggaactgacgctaagaaccaacataatctactggccccttttcaggtaaataaaaaattaatggaagctgcctcaccggaagcagttttcttacattgtttacctgcacacagaggagaggaagtgacagctgaagtaattgacgggtcccagtccttagtttgggatgaagcagaaaaccgcttgcatgcgcaaaaggctgttttgctgtggtgcatgacgtaaa

SEQ ID NO: 230528 - DNA, 715 bp, Unknown
  Bacterial polypeptide expressing nucleotide sequence isolated from the Sargasso Sea
atggctatgatatttgcaaaaccttctgcgcgaaccagagtttcatttgaaacaggttttgcttggatgggagggcatgcaatttatttagctccccaagatattggattaggaactcgtgagagtgcaggtgatttagctcaacttttcagtaggtataatgatatgattatggcaagagtatatagtcataatgatatgttggaatttgaaaaacatgctactgttccagttgtgaatggtttaactgattataaccatccatgccaaattcttactgatatgtttacaatttgggagcaaaaaaaagataatttaagtgatttaaagattgtatatgttggcgatggaaataatattgttaactcatggataagattagcttcagtattaccttttgaattcacttgcgtctgtcctgaagggtatgaacctgatacaggaacaatttcctatgccaattctaaaaatatctcttcaataaatattcttcatgacccaattcagggagtaaaagatgctgatgttatttatacagatgtttgggcatcaatgggtcaaaaagaagaagttgatgaaagggtaaaaatattttctcctttgcaggtaaataatgatttgattcaacatgcaaaaaatgattatatgtttatgcattgcttgccagctgaaagaggtagagaagtgaccgatcaagtaattgattctcaaaatt

SEQ ID NO: 230529 - DNA, 508 bp, Unknown
  Bacterial polypeptide expressing nucleotide sequence isolated from the Sargasso Sea
aatagcagacataatgacactccaagaaaattttaaatcaatagatgatttaaatatttgttgggttggtgacggaaataatgtttgcaattcttggattcattcttgtcttcattttgattttaattttcatgtttcatgccccgatggtaactttccaaaaaacaaaattttaaagaaagtaaattcgccaaagataaaattattcgaagatccataccaagccgtaaaaggagccgatgttattgtgactgatacatgggtttcaatgggaatgaaaaaagatcctgagagaataaagaaatttaaaaaatttcagataaataaagatttaatgagctatacaaataagaacacatattttcttcattgtttgccagctcatagagggtatgaggtaacggacgagattatagatggaaaaaattctttggtatggtctgaagctgaaaatagattatatgctcatcaagcaatacttttatggtgtctgaataaaatctcctaa

SEQ ID NO: 230530 - DNA, 743 bp, Unknown
  Bacterial polypeptide expressing nucleotide sequence isolated from the Sargasso Sea
catgtcaaaactaaaaagacttggaaaaaactttttatcgagtactgatttaactagagaggaatcattacacattctagatttagccgaaaaatttaaatccaaacagttaactttagaatttaaagataaagttttggggttgatttttgataaatcttctactaggacaagagttagtttccaagtagcaatgtcaagattaggaggctctactattgatttaaatcccaatacatctcaaattggacgtggtgagcccattaaagatactgcaagagtaatgagcagatattgtgatgctttagcaataagaacttttaaacataatgttttagaagattatgcaaaatggtcaacaaagccagttattaatgcacttacagatctagagcatccatgtcaagctttagcagactttctcacgattaaggaggaatttaaggattttaaagatgtagttttgtctttcattggagatggaaataatgtggcaaattctcttattttatgcggcgctttattaggtgtagaagttagagtagcttgtcctaaaggttatgagccaaattctgaggtaattaaaaaagctaatgagataaatgataataatgattttttaaaaataactaatgatcctcaattagctgcaaaaggtgcaaatgttttatatacagacgtatggtcctctatgggagaagaagatgaaaaggatgagaaagaaaaggtatttttaggctttt

SEQ ID NO: 230531 - DNA, 391 bp, Unknown
  Bacterial polypeptide expressing nucleotide sequence isolated from the Sargasso Sea
ttactaaattttgaattaaacatagcttgtccagagggtgtaaaaccagacgcgaaaacaatatcatgggctcttaaaagaaataatagtatttctattacacataatcctcaagaagctgcagaaggtgctaactgtattattactgatacatggagatcaatgggtgaccaaagtccacttccgaaagatcagttcataccatttcaagtaaataaaaaaataatggaattagcagataagaatgcgatttttatgcactgtctacctgcttaccgaaataaagaggtaagttctgaagtgctagaaggaagtcaatctgttgtatttgacgaagctgagaatagattacatgcacaaaaagcaatcatgcaattttgtcttaaataaa

SEQ ID NO: 230532 - DNA, 168 bp, Unknown
  Bacterial polypeptide expressing nucleotide sequence isolated from the Sargasso Sea
ataacgagcacacaaaggttggacgtgaaatgaaaatggcctacggcctgaaagggcttgaagtcacggaagaggtattcgagtcaacgcattccatcgtcttcgacgaagcggaaaaccggatgcacaccattaaagcggtaatggtagcgaccctcggcgactaac

SEQ ID NO: 230533 - DNA, 169 bp, Unknown
  Bacterial polypeptide expressing nucleotide sequence isolated from the Sargasso Sea
cgagaccaaggtcggcaagcagatcgccgagcagtacccgcacctgaagaacggcatcgaggtcaccgaagaggtcttcgagtcgccgtggaacatcgccttcgagcaggcggaaaaccgcatgcacacgatcaaggcgatcctggtcgcgaccctggcggatatctga

SEQ ID NO: 230534 - DNA, 514 bp, Unknown
  Bacterial polypeptide expressing nucleotide sequence isolated from the Sargasso Sea
tatgaatcattttataaatatcgctgatttatcgaagagtgatctaagaactattataaatgtaggaaagaaaagaaaatcagaaagagggcaaaaatcacactcccaacctgacacagatcagccacttcaaggaaaaactatggttatgatttttgaaaaaacttctacaagaacgagaatatcttttgatttagcagtaaaacagttaggaggttcatctataattttaaatagagatgaaattcattatgggaagggagatgaaactataaaagatactgcaaaagttttgtctcagtatgcagatattattatgataagaactgactcacacaaaaacgttgatgaatttaagaaacatttagacattccagttatcaatgggcttacaaatgagggacacccttgccaagttatgtccgacattcttacttttgaggagttaaaaggcaatatcaaagataggactattgcttggattggagatgggaataatgtttcaaattctttt

SEQ ID NO: 230535 - DNA, 812 bp, Unknown
  Bacterial polypeptide expressing nucleotide sequence isolated from the Sargasso Sea
tatgaaaaattttataaatatagccgatataaataaacaagatttaagaaacattattgaccacgcaaagtcacaaaagaaaaaaaggtctaatattaacaaatcagctattgatccagaaaaaccactggcagacaaaatattgattatgatttttgaaaaagcatctacaagaacaagattatcttttgagctagcaatgaagcaattggggggaaaattattagtgcttgattcgaaagaaagtcattatggaagtggcgatgaaagtatttatgatacagcgaaagttttatctcagtatggtgatattgtaatgatgagaacacacaaacatgaacatttattaaatttttctaaacacttagatattccaataattaatggtttaacaaatttaagtcacccatgccagattatgtcagacataatgacttttgaagaattgaaaggctctattacaaataaaaaaattgcttggattggagacggcaataacattgtttattctttaatcgaagcagcggcgaagtttaattttgaactgtccattgcttgcccaaaaaaatttagtcctgacaaaaaaatttttagatgggctaagaaaaataaagcaaaaatttcgatcacaaaagatccatttgaagcaacaaatttagcagactgcgtcatgacagataaatggatttcaatgggagataaaacaaacaaaaagaaaaagaaaaagttattaaaaccttaccaagtaaataaaaaaattatgaaatcagccaaagcagatgcaatttttatgcattgccttccagctagca

SEQ ID NO: 230536 - DNA, 424 bp, Unknown
  Bacterial polypeptide expressing nucleotide sequence isolated from the Sargasso Sea
catggctgtgacttggctgcatgcggcgatgaaatttaattttgaattaagccttgcatgccctgccgaattatccattccgcgcatagaggtgcagaaggcaacggccgcgggaattaagctgactgagacgcaagacccacttgaggcggttgctggcgctgactgtgttgtaaccgacacctgggtctctatgggggataaacccggcgggcggcggcaaaagttattggagccttatcgagtaaacgaaatgatcatgggccaggcatcttctgacgttattttcatgcattgtctcccagctcaccgcggcgaggaggttacttccgaagttcttgagggcatacaatctgttgtatgggacgaggcggaaaatcggctacacgcccagaagggtatcctagtttggtgtctggggtga

SEQ ID NO: 230537 - DNA, 764 bp, Unknown
  Bacterial polypeptide expressing nucleotide sequence isolated from the Sargasso Sea
aatgaaaaactttataaatatctctgactgttcttcagtagagcttagagcgattattgaagaagcaaagaagagaaaacaaaatagatctggattaaataaatctgcacctgacgaagataagccctttgaaggtaagtcgatggctatgatttttgaaaaaccctcaacaagaacaagaatgtcatttgatattgctgttaaacaattaggtggatcatcaattattttaaatccagatggtatacattacggcaagggagaggaaactttaaaagatacagcaaaagttttatcggaatatgtcgatatcgttatgttgagaacttcatctcacaaaaatttagaggaattcggaaagcatttagatatcccaattatcaatggcctttcaaatgcgagccatccatgtcaaatcatgtctgatattcttacttatgaggaaagtaatggttctattgaggggaaaactgtttcctggattggagatggtaataataatatgtcgaattccttaatagaggctgctgggaaattcaattttaaactaaatattggttgtccaaaaaaatactctccaaataagagtattttgaagctagcgaaaaaggagaaagtaaaattaacaattacttcaaaacctttagaagcggctacaggcgctgattgtgtaatgactgacaaatgggtttcaatgaatgataaagtaaataaagtttctaaaaagaaaactttaaaaccttaccaggttaataagaaattaa

SEQ ID NO: 230538 - DNA, 531 bp, Unknown
  Bacterial polypeptide expressing nucleotide sequence isolated from the Sargasso Sea
ccatagtagaaaactcggataaaatgaatggccatgttgcttgggtcggggacgggaacaatgtgcttcatgatttggttctcgggtgtgcaactctaggatatgatatcgttttcgcaacgccacaaggttttgagccggacgaatctgtgatttcaagggctttagaaatagctaagaaaacagggtcgaaaattgaaggagtcaatgatcctaaagaggctgttgagggggcaggagcgatatacacagacgtttttgtttccatgggagaagagcatatggatggaaagatggggtcattcgatggttttcaggtaaacgaagaattagtctcgggtgctgatgatgattacatcttcatgcactgccttccggcacacaggggagaagaggtaacagacggagtgatggactcgcctaatagcgtagtttttgatcaagccgaaaacagaatgtgggcgcaaatgtccatactaactcttctgtgtaacgaagtcgcttggcagacctattgggaattgcgctagc

SEQ ID NO: 230539 - DNA, 815 bp, Unknown
  Bacterial polypeptide expressing nucleotide sequence isolated from the Sargasso Sea
aaattttaaaaataaagatctaaatataaaactcaaagaaaaagttttagggttaattttttataagtcatcaactcgtaccagagttagtttccaggtggcaatgacaagacttggtggcaccaccgttgacctaaatcctactacttcacaaattgggaggggagagccaattagagatacagcaagagtgctaagtagatactgcgatgttcttgcaataagaacatttaaacaaactgatttggaagagtatgcaaaatggtcctctaagccagttatcaatgctcttactgatttagaacatccatgtcaagctttagctgatttcatgacaataaaagaggaatttcttgattttaaagatgtagttttgacatttattggagacggtaataacgtcgcgaattctcttattttatgtggcgcgttattaggggtagaagttaggattgcttgtcctaaaggtttcgagcctaactcgttgttgatcgataaagcatatgaaatatataaaaataagaatttgttgaaaataactaatgatcccaatactgctgttttaggagcaaatgttctttatacagatgtttggtcatctatgggcgaagaaaatcaaaaagatgagaaagaaaaagtttttaatggtttcactattgacagtgatttagttagtaaggcagataaagatgcaattattcttcattgccttcctgcgtatagatccaaagagataactgatgaaatttttgaaagtcacaaaagtaggatttttgatcaagctgaaaatagattacatgctcaacaagctcttt

SEQ ID NO: 230540 - DNA, 574 bp, Unknown
  Bacterial polypeptide expressing nucleotide sequence isolated from the Sargasso Sea
aaagaattaaaaaataaagatcttgatattcaattacaaaataaagttttaggtttaatttttaataagtcatctactcgtacaagagtaagttttcaggtcgccatgtcaagacttggaggaaccactattgacctaaatccaacgacctctcaaatagggagaggtgaactaattaaagatacagcaagagttctaagcagatattgcgatatcgttgcaatcagaaccttcaatcaatgtgatttggaagaatatgctaagtggtctgcgataccagttattaatgctctgacagatctagaacacccatgccaggctctagctgattatttaacaattaaggaggaatttcttgattttaaaaatgtaattttaacttttattggagatggtaataatgttgcaaattctcttattctttgtggtgcgttattaggagtggaagtgagaattgcttgtccaaagggttatgaacctaattcaactgtaattaaaaaggcactcgaaatatacaaagataagaatttattgaaaattactaatgatccacataacgctgttttaggagcaa

SEQ ID NO: 230541 - DNA, 481 bp, Unknown
  Bacterial polypeptide expressing nucleotide sequence isolated from the Sargasso Sea
ttgataacaccacgtaattttttagggctagatgcatttcatgctcaagagctgcgtggaataattgattgcgctaaggatctaaaaaaagatcaaacattttcagcaaatgtattggctggaaaaactctggctatgatatttgaaaagccttcaacccgcacaagaatttcttttgatatagcaatgtctcaacttggcggtagggtagtttctctatctactaaagaactacaactcggtagaggagaaaccttagctgatacagctcgtgttctttctcggtatgttgatgctattgtaatgagaactgacagccatcaatcacttttagagtttgctaatgcatcaagtgtgcctgtaataaacggcttaacgaatcttacgcacccatgccaattattagctgatgtgatgacatttgaagagcatttgggatcaattcgtaataaggtagttgcttggctaggagatggcaata

SEQ ID NO: 230542 - DNA, 822 bp, Unknown
  Bacterial polypeptide expressing nucleotide sequence isolated from the Sargasso Sea
ggtgtaaaagaccttgactctccaatgaacggtaaggttcttgctttgctttttcaaaaaccttcaactagaacaagagtttcctttgatatagctatgagacagttagggggagaaactttagttcttaattcagaagatatgcagattgatagaggtgaatcttttgctgacacagctagagttttatcgaaatatgttgatataattatgataaggtcaacaacacatgaagttttggttgaggtttctaattactcaacagtccctattataaatggacttactgatagaagtcatccatgtcaagtattgtcagatatttttactttcattgaattaagagattcaataaaaggaaaaaattttgtttggtttggggatagcaataatgttgcaaggtcttgggtggaggcttcggttatttttggctttaattttaccttagcaagccctaaagagttttctttgaatcctgagttagttaaatgggctaatcagaatggaggaaatgtaagattagtttatgatccattggaagctattttagacgcagattgtgttatgactgatgtatgggtgtctatgggtgatgaaataaatcaaaacattacaagtgctgaacgtagaaagatattatctccttatagagttactacaaaactaatgaatttagcgagaagtgattctcttttcatgcattgtctgcctgcacatagaggtgaggaggttgattcagaagttatagatggttctaaatcggttgtttggctagaagctgagaatagacttcatattcagaaatctattattttgaattgc

SEQ ID NO: 230543 - DNA, 425 bp, Unknown
  Bacterial polypeptide expressing nucleotide sequence isolated from the Sargasso Sea
tgtcgttttcgcaacgccacaaggttttgagccagatgaatctgtgatttcaagggctttagaaatagctaagaaaacagggtcgaaaattgaaggagtcaatgatcctaaagaggctgttgagggagcaggcgcaatatacacagacgtttttgtttccatgggagaagagcacatgggtggaaagatggggtcattcgatggttttcaggtaaacgaagagttggtctcggatgctgatgatgattacatcttcatgcactgccttccggcgcacaggggagaagaggtaacagacggagtgatggactctcctaatagcgtagtttttgatcaggccgaaaacagaatgtgggcccaaatgtcgatactaactcttctgtgtaacgaagtcgcttggcagacctattgggaattgcgctagc

SEQ ID NO: 230544 - DNA, 650 bp, Unknown
  Bacterial polypeptide expressing nucleotide sequence isolated from the Sargasso Sea
aagagttttaagtagatattgcgatgtactagcgataagaacttttaaccaagatgatttagaagagtatgcaaagtggtcttcaaagccagttattaacgcccttactgatttagaacatccttgccaagctttagctgattttatgacaattaaagaggagttcaaagacttcaaaaatgtggttctgacatttataggtgatggtaataatgtcgcaaattctcttattttatgcggagccctgcttggtgttgaagtcagaattgcttgtcccaaaggatatgagccaaattcttgggttattaaaaaagcaaatgaaataaatatgaataagaatttattaactatcactaatgatcctattactgctgtgcagggagcgaatgttttatatacagatgtttggtcatctatgggagaagagaatcaaaaagaagaaaaagataaagactttcttggatttactattgatcataatttggtaagaaatgctaataaagatgcaattgttcttcactgtcttcctgcctatagagataaagaaataactgatgaagttattgaaagtaaaagaagtagaatctttgaacaagcagaaaatagaatgcatgctcaacaagctatgctgtcatgtcttctttcatgaa

SEQ ID NO: 230545 - DNA, 373 bp, Unknown
  Bacterial polypeptide expressing nucleotide sequence isolated from the Sargasso Sea
atgataaaacctaaaaagttagataaaaaaaattttctttcaagcctagatatttctggagaagagactttaaaccttttagatattgcaaaaaaatttaaaaaaaacgaattaaaaattgagttaaaggataaagtactgggtttaatttttgataaagcttcaactcgaacaagagtaagttttcaagttgcaatggctagacttggaggcacttcaattgacttaaatcctactacttcacaaataggtagaggagaacctattaaagacaccgcaagagttcttagtagatactgtgacgtaatcgcgataagaacttttaagcaatctgttttagaagaatacgctaattggtcttctaaaccagtaa

SEQ ID NO: 230546 - DNA, 883 bp, Unknown
  Bacterial polypeptide expressing nucleotide sequence isolated from the Sargasso Sea
tatgaataaacatttcctagacttaaataatttttctaaagacgatatctatagaatcttaaacaattctctcgaaatgaagtccaaagggaaaaatataaaaattttagagggcaaattcctaagtctcgtttttgaaaaatcttcaactagaactagagtttcgtttgaggttggaatggcacaacttggtggcagagcatcctttctttctgttaatgatctgcaaatgggacgaggtgaacctattgaggacacatcgaaagttttgagttctatggtagacggcatcgtactgagaacactggaacataaaacgcagataaagtttgctgaaaattcatcagttccaattattaatggtttgagtgacagatcccatccatgtcaattactcgcggatttactaacttttcgtgaagaaaaaggatcaatagaaggaaaaaaagttgcgtggtgtggagatttcaataatgtttgctttagttatgctcaagcagcagaattattaaatttcgaacttagtattgcctgtcctaaagaattttatcctgaagatatgaagaactataaaaacgtgtcctttactcaatctatatcgaaggccgtagaaggttgtgacttggtttctacagatgtatgggtatcaatgggagatgaaagagaggcagataaaagacaaaaattattttctgactaccaagttaatcaagagattctcgatcaagccaaatcagatgttgtttttctgcattgccttcctgctgtaagaggtcaagaaatttctcataacttactagaagatcctaggagttatgtctggaagcaagcagaaaatagacttcacgctcaaaagggtctactgggtgagcttctaaattaa

SEQ ID NO: 230547 - DNA, 276 bp, Unknown
  Bacterial polypeptide expressing nucleotide sequence isolated from the Sargasso Sea
atgctgatgttatttatacagatgtttgggcatcaatgggtcaaaaagaagaagttgatgaaagggtgaaaatattttctcctttgcaggtaaatcatgatttgattcaacatgcaaaaaatgattatatgtttatgcattgcttgccagctgaaagaggtagagaagttaccgatcaagtaattgattctcaaaattccatagtatttgagcaagctgagaatagactacatacccaaaatgctattatggcaactctagcaaataaagtttagt

SEQ ID NO: 230548 - DNA, 721 bp, Unknown
  Bacterial polypeptide expressing nucleotide sequence isolated from the Sargasso Sea
catggcttacaatctgaagaaccgcaatttcctgaccctgcgcgatttcacgccgcaggagatcgccttccttctgaagctcgcggccgatctgaagaccgcgaaatatgctggcaccgaggtgccgacgctcaagggcaaggaaatcgcgctgatcttcgagaaggacagcacccgcacccgcgtcggcttcgaggtggcggcccatgatcagggcgcgaccgtcacctatctcggcccgtccggcaaccacatgggccacaaggaaaccgtcaaggacaccgcacgggtgctcggccgcgtctatgacgcgatcgagtatcgcggcttcgggcaggaggtggtgctaacacttgccgaatggtcgggcgtgccggtctataacgggctgacggatgagttccacccgacgcagatccttgccgatttcctgaccatgcaggagcacagcgacaagcctctgcgcgagatcgcctactgcttcctcggggatgcgggcaacaatatgggcgacagcctgctgatcggcggggccaagatgggcatggacgtgcggctctgcgcgccggaaagcctgtggccgacggtcgaaatccgcaaggaggccgaagagatcgcggcggcgaccggcgcgcgcatcatgctgacgcaggacgtggacgaagccgtcaagggagcggatttcctctataccgatgtctgggtctccatgggcgaagcc

SEQ ID NO: 230549 - DNA, 840 bp, Unknown
  Bacterial polypeptide expressing nucleotide sequence isolated from the Sargasso Sea
atgagtaggtcacttatatcaatttcagattttaacaacatagatttagaatctattcttgaatctacatctttgttcaaaaacaataaagtatcttcaaaacatgaaggtaaatgtataggtttgttgtttgaaaaattttcaactagaacaagactgtcatttgaagttgctatatctagacttggcgcttatccaatatatataaataaatcggatactcaaatatctaggggagaatcaattgaagaaactgcaaaaatgttttctctttatcttgacgcattagtttatagaacctcaagacataaagacttagaagactttaacaagttttcagatataccagtaattaatgctctttcagatttagaacatccaactcagattatttcagatattttctctatactagacactcatcctgattgtgagtctataaaggatttaaaagatttaaaaattgtctacattggtgatggcaacaacattgctaattcattaactcttgctgcagacattatgaagctaaatttaactatatgtacacctttagggtatgaacccaaagataaaaaatattggattgataatccaaaaaaagcactagctgatgcagatgttgtatataccgatgtatggactagtatgggaagtgaaggagaagagctgaaaagaattaaagactttgagaattatcaaattaattctgaatcaattagattagcaaataaagactattcctttatgcattgtttacccgcacatattggagaagaagttactaaagatattatagaatcatcaaattcaatagtttaccaacaagctgaaaataag

SEQ ID NO: 230550 - DNA, 469 bp, Unknown
  Bacterial polypeptide expressing nucleotide sequence isolated from the Sargasso Sea
ggggtcaattaaagggaaaaccgtggcgtggagcggagacggaaataatatggcttcatcttggatacatgccgcaaccaaatttgattttaaattaaatattgcatgcccaagagagtgcaggcctgatgaaaaactactagattgggcaaataaagaaaaaaatcatgttaaccttttttacgatccaaaggccgccgtagaaaatgctgactgtgtcgtaacagatacctgggtgtctatgggaaacgatgattcaaatcgacataatttactagccccttttcaggttaataaaaaactaatgggaaatgcttctccggaagcagttttcttgcattgtttacctgcacacagaggtgaagaagtaacgtccgaagtacttgacgggccaaaatctttagtttgggatgaagcagaaaatcgattgcatgcacaaaaagccattttgttgtggtgcatgacctaa

SEQ ID NO: 230551 - DNA, 847 bp, Unknown
  Bacterial polypeptide expressing nucleotide sequence isolated from the Sargasso Sea
attgaagaagcaaagaagagaaaacaaaatagattctggattaaataaatctgcacctgatgaagataagccctttgaaggtaagtcgatggctatgatttttgagaaaccctcaacaagaacaagaatgtcattcgacattgctgttaaacaattaggcggatcatcaattatcttaaatccagatggaatacattacggtaagggagaggaaactttaaaagatactgcgaaagttctatcggagtatgttgatatagttatgttgagaacctcatctcacaaaaatttagaggagtttggaaaacatttaaacatcccaattattaacggcctttcagacgtgagccatccatgtcaaattatgtctgatattcttacttatgaagaaagcaatggttctattgaaggtaaaactgtttcttggattggagatggtaataataatatgtcaaattccttgatagaagctgctgggaaatttaattttaaactgaatattggttgtccaaaaaaatattctccaaataagagtatattgaagtttgcgaaaaaggagaaagtaaaattaacaattacttcaaaacctttagaagcggctacaggcgctgattgtataatgactgacaaatgggtttcaatgaatgataaagtaaataaagtttctaaaaagaaaactttaaaaccttaccaggttaataagaaattaatgagcaaagctaattcagatgctgtgtttatgcactgccttccagtaggaagaggagaagaggttacaaatgaagtaatagatggaaaccaatctgtagtttggagacaagcactaaacagagtgcatgctcaaaaa

SEQ ID NO: 230552 - DNA, 784 bp, Unknown
  Bacterial polypeptide expressing nucleotide sequence isolated from the Sargasso Sea
agattataaaccatttcataacaaatcattggctatgatatttgcaaaaccctcagcacgtactagggtatcttttgaaactggttttgagtggatgggagggcatgcgcttttcttaggccccaatgatataggaataggaaagagagaagcgattaaggatatatcaagattatttagcagatataatgatataattatggcaaggttatttgaccatgagcacattattgaattagctgagtattcaacaattccggttattaatggtcttactgattacaaccatccttgccagattatgactgatatttttacagtgtgggaacacctcggcgagcttgataaacctaaaattgtttatatgggagatgggaataatattgtgcattcatggctgcacttagcaatgaggattcctatggattttgtgtgttgttgtcctgaggattatactccagatcaaactacattaaacaatgcagttgattcaaagatctctgacatagagatatctcatatcccaaataaggctataaaaaatgcagacgtagtttacacagatgtctgggcttcaatgggacaaaaaaaggaagcattacacagagaaaaagtattctcagactttcaggtgaacgaaaggcttatgacgagctccggaaaagaaaccttgttcatgcattgtcttcctgctgaaagaaatcgagaggtaacagatggtgttattgaagcagaatattctatagtttttggacaggcagagaacaggatgcatattcaaaaa

SEQ ID NO: 230553 - DNA, 928 bp, Unknown
  Bacterial polypeptide expressing nucleotide sequence isolated from the Sargasso Sea
atgagcgaggctaacaagagaaatctgatggcaatagacgacctaggagatgaattaggagacattatcgattgggcaatagcgttcaagcatggaggagagttttctcgagacttcaagccattagacgggatgtcaataggttcaatttacgagaaaccatcaacaaggactagagtttcttttgaggttggagttagtcgactcggagggcaaccgctcacattgctctccaatgacatccaattggggaaaagtgagtcaattgctgatactgcagctgtactctctagattcttggatggaattacctaccggtgtttcgaacacggccatgccgaggagttggctcagcacgctacggtccctgtaatcaacgccctatctgatcttcatcatccttgccaagctgctgcagatctgatgaccattattgaacacggagactctgttaatgggcacattgcttgggtaggagatggtaacaatgtgttccatgatttgttacttgcagcagtctgcttgggcatggatgtgaagtacgcaactccagtaggttttgagccggacgagagcatcatgcaaagagctagtgagattgcatctaggactggttccaatatctctgggacaaataatccggttgaggcagtgagcggtgctggcgtcatttacacggatatctttgtctcaatgggggaagagcacatggaaggcaagtttgaggcatttgatgggtttcaagtgaatgaggatttagtcgcacatgcagatcccaattatctattcatgcactgtcttcctgcacatagaggcgaagaggtcacggatggtgtaatcgactctgtgaacagtgttgtactcgaccaagccgagaatcgcatgtgggcacagatgtcccttctcaccttgctgtgcaacgaagatg

SEQ ID NO: 230554 - DNA, 744 bp, Unknown
  Bacterial polypeptide expressing nucleotide sequence isolated from the Sargasso Sea
cattcgacattgcaattaaacaattaggtggttcatcaattatcttaaatccagatggaatacattacggcaagggtgaagaaactttaaaagatacggcaaaagttttgtcagagtacgttgatatcgttatgttgagaacttcatctcacaaaaatttagaggagtttggaaaacatttaaacatcccaattattaatggtctttccaatctaagccatccatgtcaaattatgtctgatattcttacttttgaagagagcaatggctctattgagggtaaaactgtttcttggattggagatggtaataataatatgtcaaattccttgatagaggctgctggtaaatttaattttaaacttaatattggttgtccaaaaaaatattctccaaataagagtatattaaagctagcgaaaaaggagaaagtaaaattaaaaattacttcaaaacctttagaagcggctacaggcgctgattgtgtaatgactgataaatgggtttctatgaatgataaagtaaataaagtttctaaaaagaaaactttaaaaccttaccaggttaataagaaattaatgagcaaagctaattcagatgctgtttttatgcactgccttccagtgggaagaggagaagaggttacaaatgaagtaatagatggaaatcaatcagtagtttggagacaagcactaaatagagtgcatgctcaaaaaagtattattaaatggtgtatagattagg

SEQ ID NO: 230555 - DNA, 727 bp, Unknown
  Bacterial polypeptide expressing nucleotide sequence isolated from the Sargasso Sea
ttgctggagacatccattagggactagtgaaaccatagcggatactgctgctgttctctctaggtatatggactgcattacatacaggtgtttcggccatggagatgttgctgaactagctaaacattcaacggttccagtaatcaatgctctctccgatatgcatcatccttgtcaggctgcagcggatatgatgacgatagtagaaaactcggataaaatgaatggccatgttgcttgggttggagatggaaacaatgtcctgcatgatcttgttctaggttgtgcaactctgggatatgacatagttttcgcaacgccacaagggtttgagccagacgattctgtaatttcaaggggtttagaaattgctaagaaaacagggtcgaaaatagaaggggtgaatgatcctaaagaggctgtagcgggggcaggagcgatctatacagatgtgtttgtttccatgggagaagagcatctagatggaaagatggggtccttcgatggttttcaggtaaacgaagaattggtctcgaatgctgatgaggattacatcttcatgcactgccttcctgcccacaggggagaagaggtaacagacggagtgatggactcgtccaacagcgtggtttttgatcaagccgaaaacagaatgtgggcgcaaatgtcgatactaactcttctatgtaacgaagttgcttggcagacctattgggaattgcgctag

SEQ ID NO: 230556 - DNA, 440 bp, Unknown
  Bacterial polypeptide expressing nucleotide sequence isolated from the Sargasso Sea
aggagatggaaataatgtttgtaactctttgatattaggatgtgcaaaactaaagatacaactctctgttgcaattcctgatggctatgaacctgaatttgatgttattaaaattggtaaagaagcagaaattctagaagtttctgataatcctgaaacagcagtacaagatgcagatgttgtcatgactgatacatttgtttcaattcataacactaattctgatcgcgtcaaaaaattccttccaaaattccaagtcaaccaatctttaatgaataaggccaaaaaggatgccatcttcatgcattgtcttcctgcaaaacgtgatcaagaagtaacctctgatgtcattgatggttctcaatctgttgtttgggatgaagctgaaaatcgtttacatgtccaaaaagcattgttagttcaccttcttggcgtctaag

SEQ ID NO: 230557 - DNA, 766 bp, Unknown
  Bacterial polypeptide expressing nucleotide sequence isolated from the Sargasso Sea
atgctttttgaaaagtcctctactcgtactagagtgtcattcgaatcatccatgatagagggcggaggaggagctatattcctgacgaacagggactcccaaatgggacgaggtgaatcgattgctgatacgtctcgagtgatatcacgcatggtagatattgtcatgatacgcacccattcgcatgaaactgttgaaacgttttcaaaatatagtgaggttccagttattaacggacttactaaagccttccacccctgccaggtccttgccgatcttgttacttatctcgaatttaaggggaatattgagaataaaaaagttacctggattggtgacggcaacaatatgtgcaacagttatatggaagcagctcagatcatggattttcaacttgagatcgcatgcccagaaggttttgagccaactggtatagacgcaaataactgcaaacttgctaagaacccctatgatgcggctgaaggagcagacttggtcgtaaccgatgtttgggcgagtatgggggacgaatcagaaaaaaaggatagggaaaaagcattcatcgagtttcaggttaaccaaagactgatggatcgcgctaaaccagacgccttatttatgcattgtctgccagcatatcgaggtttagaagtcagcgaggaagtcttggagggtgttaacagcgttgtctggcatgaggctgagaacagattgcattcccaaaaagccctaattgaatttttattaaactcatcaaaaagatgat

SEQ ID NO: 230558 - DNA, 772 bp, Unknown
  Bacterial polypeptide expressing nucleotide sequence isolated from the Sargasso Sea
aatgaaaaactttataaatatctctgactgttcttcagtagagcttagagcgattattgaagaagcaaagaagagaaaacaaaatagatctggattaaataaatctgcgcctgatgaagataagccctttgaaggcaagtcgatggctatgatttttgagaaaccatccacaagaactagaatgtcatttgacattgctgttaaacaattaggtggatcatcaattattttaaatccagatggaatacattacgggaagggagatgagactttaaaagatacggcaaaagttttatcggagtatgtcgatatcgttatgttgagaacttcatctcacaaaaatttagaggaattcggaaagcatttagatatcccaattatcaatggcctttccgatgtgagccatccatgtcaaatcatgtctgatattcttacttatgaagaaagcaatggttctattgaggggaaaactatttcttggattggagatggcaacaataatatgtcaaattctttgattgaagctgctggtaaatttaattttaaacttaatattggttgtccaaaaaaatattctccaaataaaaaaatattgaagctagcgaaaaaggagaaagtaaaattaacaattacctcaaaacctttagaagcagttactggtgcagactgcgtaatgactgacaaatgggtttcaatgaatgataaagtaaataaagtttcaaaaaagaaaactttaaaacctttccaagttaataagaaattaatgagcaaa

SEQ ID NO: 230559 - DNA, 265 bp, Unknown
  Bacterial polypeptide expressing nucleotide sequence isolated from the Sargasso Sea
agatgttgtcatgactgatacatttgtttcaattcataacactagttctgatcgcgtcaaaaaattccttccaaaattccaagtcaaccaagctttaatgaataaggccaaaaaggatgccatcttcatgcattgtctccctgcaaaacgtgatcaagaagtaacttctgatgttattgatggttctcaatctgtagtttgggatgaagctgaaaatcgtttacatgtccaaaaagcattgttagttcaccttcttggcgtctaa

SEQ ID NO: 230560 - DNA, 760 bp, Unknown
  Bacterial polypeptide expressing nucleotide sequence isolated from the Sargasso Sea
aatgatttttcaaaaagattcaactagaacaagagtaagttttactgttgggtttcaaaaactaggtggtcattctattgagcttaaccctgaatctattggctttgggaaaagagaaaattataaagatatcattagaacattatcacaatttattgatatacttatgattagaaatgatgaccataaaattattagagatttaagctatttaaatgcattaccaataataaatggtctttctgattttagtcatccttgtcaaattttatctgatcttctgacaataaatgaaaagttaggtaatataaaaaatcaaagaatttgctgggtaggagactataataatgttttaagatctttaatagaattacaaagtttatatagatttaagctaaatttagttatgccaagagaaattctaaataaaaataagtcaaaaatattaaaaaaaaataataaaaatttaatgattactaatattataaacgaaggtgttaaaaatgcagattgtgtgatgacagatgcatgggtttcaatgggtgaaaaatcaacaaaaaaaaaatacttcaaaaattatcaagttaatagtgatataatgaaaaatacaagtaaagagtcaatatttatgcattgtcttccagcacatagaaatgaagaagtatcttcagatttgcttgatagtgataaatcagttgtatgggagcaggctcaaaatagaatgtttgtgcaacaagcaataattttagatttattatga

SEQ ID NO: 230561 - DNA, 818 bp, Unknown
  Bacterial polypeptide expressing nucleotide sequence isolated from the Sargasso Sea
tatgaaaaattttataaatatagctgatatagaaaaaaaagatttaagaaagattatagatcacgctaaatcacaaaaggaaaaaagatctaatttaaacaaatcagctatagatccagaagcctatttaacggataaaatattaataatgatttttgaaaaatcctcaacaagaacaagaatatcttttgagctggcaatgaagcaattaggtggacaacttgtagtattaaatccaaaagaaagtcattatggcagtggaaatgaaagcgtacatgatactgcaaaagttttatctcaatatggtgatatcgttatgatgagaactactagacatgaacattttttagaattttctaaacacttagatattcctattattaatggtttaacgaatttaagtcatccatgtcagattatgtctgatattatgactttcgaagaactaaaaggacctatcacaaataaaaaaattgcttggttgggggatggtaacaatgttgtttattctttgatagaagcatcggctcagtttaattttgaattagctatagcctgcccaaaacagttaacacctaataaaaaaattcttaattgggcaaaaaataagaaagcaaaaattttaattacaaacgatcctaaaaaagctgtaagtttggccgattgtgttatgaccgataaatggatttcaatgggagataaagtaaataagaaaaaaaagaagatattattaaaaccttatcgggtcaataataaaataatgaagttagcaaaaaatgatgcaatttttatgcattgtcttcctgcaagtagaggag

SEQ ID NO: 230562 - DNA, 505 bp, Unknown
  Bacterial polypeptide expressing nucleotide sequence isolated from the Sargasso Sea
gtctgatattttaacctttgaagagttaaagggagatattgagggaaaaactattgcctggcttggagacggaaataatgttgcaaattcctttattgaggcagctactaaatttgaatttgaattaaaaattgcatgtcctaaaaaatatcaacctgataaaaaaatagtagaaattgctaaaaaaaataattgtaaactcttaatcacagaggatcctcacaaggcagcaagagatgcagactgcgttatgaccgataaatggatttctatgggagacaagggtgataaaaagaaaaaaaagaaagttcttaaaaaatatcaggtaaatagaaaaattatgaagtctgcaaaatcagatgcaatttttatgcattgtcttcccgcaagtagggaggaagaagtaaccagcgaagttatggatgggaaacaatctgttgtttggttacaggcctttaatagaattcacgcacaaaaaagtattattgaatggtgcataaaataa

SEQ ID NO: 230563 - DNA, 859 bp, Unknown
  Bacterial polypeptide expressing nucleotide sequence isolated from the Sargasso Sea
aaaatcacaaaagaaaaaaagatctaatattaacaaatcagctgcagatcctgaaaaatcgctagtagacaaaacattgattatgttttttgaaaaagcatctacgagaacaagattatcttttgagctagcaatgaaacaattaggtggacaattgttagtgcttgattcaaaggaaagtcattacggaagtggaaatgaaagtatatacgatacggcgaaagttttatctcagtatggcgatattgtaatgatgagaaccaataagcataagcatttattagaattttctaaacatttagatattcccataattaatggcttaacaaatttgagtcacccctgtcagattatgtcggatataatgacctttgaagaattaaaaggctctatcacaaataaaaaaattgcttggcttggggacggcaataacattgtttattctttaattgaagcagcaacaaaatttaattttgaattatcaatagcgtgcccaaaaaaatttgaacctgacaaaaaaattgttaaatgggctaagaaaaataatgcaaaaattttgattacaaaagatcctttggaagcaacggatttagcagattgtgttatgacagacaaatggatttcaatgggagacatgggaaacaaaaaaaaaaagaaaaaattattaaaaccctaccaagtaaataaaaaaattatgaaatcggccaaaaaaaatgcaatttttatgcattgtttaccagctaacagaggagaagaagtgaccgatgaggtaatggatggaaaacagtcagctgtttggttggagacgctaaacagaattcatgtacaaaaaagtattattcggtggtgtcttaaataa

SEQ ID NO: 230564 - DNA, 877 bp, Unknown
  Bacterial polypeptide expressing nucleotide sequence isolated from the Sargasso Sea
ttggacattaaaaatcttactgctgatcaaattattaaaattattgatatagctcataagtggaaaactgataaagttccattatttttaaatgataaaaatgttatgatgatattcgaaaaaccatcactaagaactagagtgtcttttgaagtatgtatcaagcaattaggtggaaatgttagtgttttaaatgcttctgagtttgctttaggtgaaagagagagcgtttttgatactgcaaaggttttggaaaggtatgttgatatgataattgttagatcttttgatcactcaattttgactgaattttcttccttaataaatgttccggtaataaatgcacttacagattttagtcatccttgccaggttgttgcagacttgttaacaataaaagaacattttaaaagttttaaaaataaaaaaatctcatggtttggtgattataataatgttactcaaagttggatagaagcatctgttttgttaggaattgatttttatatagcctgtcctaaaggagcttccccaaataaaaaaactcttgaatggattaaaaataacaatggcaatattgtaatttctgaagatactaatttagtagctaaaggagccgattgtatattaacagatacctggatctcaatgggagataataaaaataaatccgttaaagaattttttccttttcaagttaacaaagaaataatggagatggcaaaagataatgctatgtttttacattgtttgcctgcccataggggaaaagaagttacaaaagaagtaatagatggagctagttcatttatttatgaccaggctgaaaataggttacatgcccaaaaatccattattaattattgtttatgttaaa

SEQ ID NO: 230565 - DNA, 412 bp, Unknown
  Bacterial polypeptide expressing nucleotide sequence isolated from the Sargasso Sea
ttgattttgggctgtgcaaagttgaaaatcaaacttgctattgcagtaccaaatggatatgaacctgattttgatgtaatgaagattggaaaagaagctgaaatcttagaagtttcagatgaacctgaaactgcggttcaagatgctgatgtcattatgactgatacttttgtttccattcataataaaaactctgatcgcatcaaaaaatttctgccaaagttccaagtaaaccaatcattgatgaacaaggcaaaaaaagatgtaatcttcatgcattgtcttcctgcaaaacgtgatcaggaagtaaccgctgatgttatagatggtccaaagtctgtagtttgggatgaagctgaaaatcgtttacatgtccaaaaagcattgttagttcaccttctaggcgtctaag

SEQ ID NO: 230566 - DNA, 481 bp, Unknown
  Bacterial polypeptide expressing nucleotide sequence isolated from the Sargasso Sea
aatgttaaatccaagcaaacttgctaagaaaaactttttatcaagcttggatatgacggctgaagaagttattcatgttatagaacttgcaaactattttaagagtaaaaatttaaaaattaaattcgaggataaagttttaggtttaatttttgataagtcttcgacacgtacacgagtgagttttcaagttgcgatgtcaaggcttggtggaactacaattgatttaaatcctagtacttcacaaataggtaggggtgagccaataaaggataccgcaagagttttaagtagatattgcgatgtgcttgcaataagaactttcaatcaatctgacttagaagagtatgcaaagtggtcttctaaaccagtaattaatgccctcacagatttagaacacccttgccaagctttggcagactttatgacaattaaaaaggagtttattgactttaaaaatattgttttaacatttatggag

SEQ ID NO: 230567 - DNA, 634 bp, Unknown
  Bacterial polypeptide expressing nucleotide sequence isolated from the Sargasso Sea
tttgtctcagtatggagatattgttatgatgagaacacataagcataagcattttttagaattttcaaacaacctagaaattccaataataaatggattaacaaacttaagtcatccgtgccagataatgtcagatattatgacttttgaagaattaaaaggatcaataacaaataagaagattgcctggttaggagatggaaataatgttgtctattcattaatagaagcttctgtccaatttaattttgaactaagcatcgcctgtccaaaaaaattggaaccaaatcaaaaaattgttaaatgggctaaaaataaaaaagctaaacttttaattactaaagatccatttgaagctgtaaattcagcagattgtgtaatgaccgataaatggatttccatgggagaagaagtaaatgaaaaaaaaaagaaaaaaattttaaaaacttaccaagtaaataaaaaaattatgaaattagctaaaaatgatgcgatttttttgcactgcctgccagctagtagaggagaagaggtgacagatgaggttatggatggaaaacaatcagctgtttggctagaagctttaaatagaattcacgtgcaaaaaagtatcattgaatggtgtctgaagtaa

SEQ ID NO: 230568 - DNA, 415 bp, Unknown
  Bacterial polypeptide expressing nucleotide sequence isolated from the Sargasso Sea
atgaataaaaaaccccacaatgtcgatatactcacattagatgaattagagtccaaggaaattaataatataattgatttagcaatagacttgaaaaaagaactaaaaaaaggaaaagaaaaaccgcttttacaaaataaaactttagcaatgatatttgaaaaaccttctactcgaacacgtgtaagttttgaaacaggaatgttccaacttggaggtcatgcacttacattatctccgaatgatcttcaattatctcgtggtgaatctattgctgatactgcaaggacactttctcgttatgtgaatgtagtaatggctcgtgtttatgatcataaatctctagaaacttttgcaaggaattcttctatacctgtaattaatggattatctgattcatatcatccatgtcaaa

SEQ ID NO: 230569 - DNA, 424 bp, Unknown
  Bacterial polypeptide expressing nucleotide sequence isolated from the Sargasso Sea
gatgaaaaaaattaaacattttctagacttagatcaaattgatgctaaagatttaagaagcattatagatttatcaaaatcttataaacaaggcattacatcagctcaagatactttcaaagaaaaaaccctgggcttaatttttgaaaaaccttctaccagaacaagggtttcttttgaaatagcaatgtaccaacttggaggtaatgttacaattcttgaacacgagaaaactcatttaggaagaggagaagcaatttcagatacagctaaagttttagcaagatatttagatattattgtttatagaacttcatctgctgaaaaattatatgaattatctaaacattcttctattcctgtaataaatgggcttaatgacgaaacgcatccttgccaattaattgcagatattatgactttt

SEQ ID NO: 230570 - DNA, 427 bp, Unknown
  Bacterial polypeptide expressing nucleotide sequence isolated from the Sargasso Sea
atgcttaaacctaataagctcgttaaaaaaaactttttatcaagcttggatatatcaactgaagaattaatacatattttagatgttgcaaaaaattttaaaaacaaagatcttaaagttgaactcaataacaaagttttaggattgatttttgataaatcatctacaagaacaagagtaagttttcaagttgcaatgtcaagactaggtgggaccacaattgacttaaatccggcaaccgcacaaataggaagaggagagccaattaaagatactgctagagttcttagtagatattgcgatgctatcgcaattagaacttttaatcattcagatttggaggaatatgctgagtggtccacgaaaccagttattaatgctcttacagatttagaacaaccttgtcaggcgatagcagatttttgac

SEQ ID NO: 230571 - DNA, 283 bp, Unknown
  Bacterial polypeptide expressing nucleotide sequence isolated from the Sargasso Sea
gttattgatgctgatgtaatatatacagatgtttgggcttccatgggccagaaagatgaggcccaatctagggaaaaagtatttgaagattttcaagtaaattcttctatgcttaatgctacagggaaaaatacattgttcatgcattgtttaccagcagaacgcggtagagaagtcaccgatgaagtaatggagtcatctaactctattgtatttgatcaagcagagaatagaatgcatgcacaaaatgcaattatgttaatgcttgcaaataaaagttaat

SEQ ID NO: 230572 - DNA, 749 bp, Unknown
  Bacterial polypeptide expressing nucleotide sequence isolated from the Sargasso Sea
gatggccgccgagctttcggccctcaaagggctcgatttcctctcctcagctgacttcaatggcgcccaaaccaaggcgctactgaccttggcggctgatatcaaatcgggccggtgcaaccctcgcctagacggcaaggtgctgggtttgatcttctcgaaggcttcgacccgcacccgggtcagcttcacggtggcgatggcccgcctcggcggtcaaaccattgatttgaacccctcagtgagccaggtgggtcgaggtgagccgatcaaggacaccgcccgcgttctgagccgctacttgaacgctgtagcgattcggacctttgcccagagcgatttgcaggcctatgccgatgcggcctcaattccgatcattaatgccctgaccgacctggagcatccctgccaggccttagccgattacctgacgatgcaggaagccttcggctccctcaaagggctcaccatgacctatgtgggcgatggtaataacgtggcccactcgctattgattgccggcgcgttgctgggggtgaatgtgcgtatcggctgcccagctggcttctaccccttagaagaagtggtcgaccaagccagggagctggccggcggacgctgcgaaatcagcattagcgaagatccaaccgaagccgttcgcggagcccatgcggtctacaccgatgtctgggcttcgatgggacaagaagaggagcagagcacccgggtgcaagctttccgcggcttct

SEQ ID NO: 230573 - DNA, 912 bp, Unknown
  Bacterial polypeptide expressing nucleotide sequence isolated from the Sargasso Sea
aacattttttacacatatctgactatagtgagtctgaactctgggaaattcttaatcttgctaaatatttaaaacaaaagtttcataatagagaagattataaaccatttcacaacaaatccttggctatgatttttgcaaaaccctcagcacgtactagggtatcttttgaaactggttttgagtggatgggggggcatgcactcttcttaggccctgatgatataggaatagggaagagagaagcaatcaaggatatatcaagattatttagcagatataatgatgtaatcatggcaaggttatttgaccatgagcacataattgaactagctgagtactcatcaatacctgttattaatgggctcactgattacaaccatccttgtcagattatggcagatatttttacagtttgggaacaccttggggaaattgacaaacctaaaatagtttacatgggagacgggaataatattgttcattcgtggctacacttagcgatgaggatccctatgaattttgtgtgttgttgtcctgaggattatactccagatcaaactacattaaacaacgcagttgattcaaaaatctctaatatagagatatctcatgacccaaatgagtctataaaaaatgcagacgtagtctacacagatgtctgggcctcaatggggcagaaagaggaagcattacacagagaaaaagtattttcaaactttcaggtgaacgaagagctcatggcgagttcaggcaaagaaaccttgtttatgcattgtcttcctgctgaaagagatcgagaggtaacggatggtgttatggaagcagaatattctatagtttttgaccaggcggagaacaggatgcatattcaaaacgcaataatggtgtacttatcagaaaacaattaaa

SEQ ID NO: 230574 - DNA, 415 bp, Unknown
  Bacterial polypeptide expressing nucleotide sequence isolated from the Sargasso Sea
ctgtggtgctttattaggtgtagaagttagagttgcttgtcctaaaggttatgaaccaaattctgaggttattaaaaaagctaaggagataaataataatgatgacttattaaaaatcaccaataatcctcaattagctgcaaaagatgcaaatattttatacacagacgtttggtcttctatgggagaagaaaaagaacaggctgaaaaagaaaaggcatttttaagcttttcagttgatgaaaacttattaagtctagcaagcgacaatgcaattgttttacattgtcttccagcatatagatcaaaagaaattactgaggaagtcattgaaagtaaaagaagtagaatctttgaccaagctgaaaatagacttcatgttcaacaagcattattagcaaaaatgtttacttaa

SEQ ID NO: 230575 - DNA, 787 bp, Unknown
  Bacterial polypeptide expressing nucleotide sequence isolated from the Sargasso Sea
gatgcttaaaccatataatctctctaaaactaatttcttatcaagttctgatatttctactgaagaaattatccatattttagaaattgcaaaaaattttaaaaataatgaattaaatattgagtttaaaaataaggttttaggtttagtttttgataagtcttcaactcgtacaagagttagttttcaagtagcgatgtcaaggcttggtggaaccactattgacctaaaccctatgacatcgcaaataggaagaggagaaccaattaaagatactgcaagagttctaagtagatattgtgatgtaattgcaataagaacatttgatcattcagatttggaagaatacgcaaagtggtgtacgaagccagttatcaatgctcttactgatttagaacacccatgtcaggcattagcagattttttaacaattcaagaggaatttcttgatttcaaagatgtagttttgacatttgtaggtgatggtaataatgtcgcaaattcccttattttatgtggggctttattaggagtagaggttagaatagcttgtcctaaagggtatgaacctaactctttggtaattaaaaaagcatatgaaatatataaaaagaaggatttgttgactatcactaatgatcctaatactgctgttttaggagctaatgttctttatacagatgtttggtcatcaatgggggaagaaaataaaaaggcagagaaagataaattttttaatggattcactattgatagtgatttagtaagtaaggctgaaaaagatgca

SEQ ID NO: 230576 - DNA, 391 bp, Unknown
  Bacterial polypeptide expressing nucleotide sequence isolated from the Sargasso Sea
tgccgcacaaattattggttttgaattaagaatatgttcaccaaaagattattcagtagataataatttggtaagtggttttccaaatataactactgatctagatcctaatgatgctgccaaagattgtgattgtataattactgatacttggttctctatgggagaagatgataatgatcaaaaaagaaaaattcttgaaccgtataaagtagattctaacaaaatctcgatggcatcttcagatgcaatttttcttcattgtttacctgctcatagaggagaggaagttgacgctgatgttattgatggagtcaattcagtagtttgggatgaagcagaaaatagggttcacgcacaaaaaagcattattaggtggtgcttgagttaa

SEQ ID NO: 230577 - DNA, 763 bp, Unknown
  Bacterial polypeptide expressing nucleotide sequence isolated from the Sargasso Sea
tcagcaagaacaagagtatcttttgaaaccggctattatcgacttggtggacatgcactgtatctaggaccaaatgatattggtattgggaaaagagagtctgtggctgatgttgcgcgagtattaagtcgatttaatgacatgattatggcaagactttttgatcataatcatattttagaattagctgagcatgcaacggttcctgttgtaaatggtctcacggaccataatcatccatgccagataatggctgatgcatttacaattattgagcaccttggctctattgaaaataaatctattgcttatgttggtgatgggaataacattgtgcactcatggctttatttatcaatgatgataccaattcaatttacggttgtttgtcctgaagaatataagcctgatatggaattagttgagaaggcaagaaaagttaatttatctcaaattaatatttctcacgatcctcataatggtgttaagggagctgatgtaatctatacagatgtttgggcatcaatggggcaaaaagaagaagctgataaaagaagaagaatatttgaacctttccaagttaacgatagcatgattaaagcaactggtcagaaaacattgtttatgcattgtttaccagcagaaagaggagtagaagtaactgatagtgtgtgtgaggcagaatattctattatttttgatcaagctgaaaatagaatgcatgcccagaatgccattatgttatatttgacaggtaattagt

SEQ ID NO: 230578 - DNA, 739 bp, Unknown
  Bacterial polypeptide expressing nucleotide sequence isolated from the Sargasso Sea
aatgctaaaacccaataagcttgctaataataattttctatcaagcttggatttatctaccgatgaggtttttcatattttaaagcttgcaagtaattttaaaaataaagaaataaatattaaccttaacaataaagttttaggattaatttttgataagtcatcaacacgcacaagagttagctttcaagttgcgatgactaggcttggtggaaccactattgacttaaatccaacaacatcacaaataggaagaggtgagccaattaaagacactgcaagagttctgagtagatattgtgatgttattgcaattagaacatttgatcattcagatttggaagaatatgcaaagtggtctacgaagccagttattaatgctcttacagacttagaacatccatgtcaggccttagccgattttttaacaatttatgaggaatttcttgattttaaagatgtagttttgacatttataggtgatggtaataatgtcgcaaattctcttatcttatgtggggcactattaggaatagaagttagaattgcatgccctaaagggtatgaacctaactcattagtgatcaataaagcatatgaaatttataaaaataagaatttattgaaaatctctaacgatccaaatactgcagttttaggagcaaatgttctttatacagatgtttggtcatctatgggggaagaaaatcaaaaggaagagaaagataaagcctttaat

SEQ ID NO: 230579 - DNA, 806 bp, Unknown
  Bacterial polypeptide expressing nucleotide sequence isolated from the Sargasso Sea
tattgaaaggaaaagtcagaaacaaaaagaaaaaactttagttggctcaaagctaggtctaatttttgaaaagccgtcaacgagaacaagaatttctttcgaatctggaattttaaacttaggtggaaatgcaatattcatgtcctcatctgatttacagttatctagaggagaaccggtgtcagatactgcaaaagtagcatcttctatgttagatgttattgctttaagagttgataagcatgagacattggatatgtttgcagctaattcttctgttcctgtaattaatgctctttcagatttatctcatccttgccaaatattggccgacttgatgactttcaaggaaaattcagtaaatgaacttgaaaaagtttgctggattggagatggaaataacgtttgtaactcatacattgaagcatcgaagatattagattttgagttctctatttattgtcctaaggaatattcacctaatcattcatttcttgattatgcaaaagaaaattctagttttgctaattctagagaagaagcagcaaagggcgctgacataataacaactgatgtttgggtctctatgggagatgaaaaaacaaaagaaagggcttttgaaggatatttcgttgacactgagctaatcgaaaatactggcaagaaaagcatcttccttcactgtcttcctgctcatcgaggtcaagaaattacctttgaattaatggagcatccttcaagtaaagttttacaacaggcagaaaatagaatgcacgtccaagaagcattgattggaaatttgctaa

SEQ ID NO: 230580 - DNA, 514 bp, Unknown
  Bacterial polypeptide expressing nucleotide sequence isolated from the Sargasso Sea
ctgtcaatacttgcagatttaatgacaatcaaagaacataaaaaaaatctaaagaaggtaaaaattgcttggataggtgatggaaacaatgtttgtaactctttgattattggttgtgcaaaattgaaaatcaaacttgctattgcagtaccaaatggatatgaacctgattttgatgtaatgaagattggaaaagaagctggaatcttagaagtttcagatgaacctgaaactgcggttcaagatgctgatgtcatcatgactgatacttttgtttccattcataataccaactctgatcgcatcaaaaaatttctgcccaagttccaagtaaatcactcattgatgaacaaggcaaaaaaagatgtaatattcatgcattgtcttcctgcaaaacgtgatcaggaagtaaccgctgatgttatcgatggtccaaagtctgtagtttgggatgaagctgaaaatcgtttacatgtccaaaaagcattgttagttcaccttctaggcgtctaag

SEQ ID NO: 230581 - DNA, 833 bp, Unknown
  Bacterial polypeptide expressing nucleotide sequence isolated from the Sargasso Sea
ttttaaaaacaaacatttaagttttgaacttaaagataaagttttaggactaatctttgataaatcctctactcgtacaagggttagttttcaggtggcaatgtcaagacttggcgggattacagttgatcttaatcctaatacttcccaaattggaaggggcgagcctattagagatacagcaagagttttaagtagatattgcgatgttcttgctataagaacctttaaacaatctgatttggaagagtatgcaaaatggtcttctaagccagttattaatgccctcacagatatagaacatccctgccaagctttggctgattacatgacaattaaagaggaatttgatgattttaaaaacgtggttttgacgtttataggcgatggtaataatgtcgcaaattctcttattttatgtggtgcattattaggggtagaagttagaattgcatgtcctaaaggttatgaacctaattctgtggttataaaaaaagcatatgaaatatataaaaataaggatttattgaaaattactaatgatcctaattccgctgttataggagcaaatgttctttacacagatgtttggtcatctatgggcgaagaaaatcaaaaagaaaagaaagataaattatttaatggtttcaccatcgataatgatttagtaagtaaggctgaaaaagatgcaattgttcttcattgccttcctgcgtatagatctaaagagataacagaggaggtatttgaaagtaaaaaaaatagaatttttgatcaagcagaaaatagattgcatgctcaacaagcactcttatcctgccttgtccagtaga

SEQ ID NO: 230582 - DNA, 217 bp, Unknown
  Bacterial polypeptide expressing nucleotide sequence isolated from the Sargasso Sea
ggaacgggaacaggcttttgccggtttctgcgtcgacgaagcgttaatggaggcagctgatacggaggcgatcgttctgcattgcttgccggcccatcgcggtgaggagatcagcccaggagtgatggaaagctccgccagccgcatctttgatcaggctgaaaatcggctacacgctcagcaggcactgctggcggcattgatgggtggtttgtaa

SEQ ID NO: 230583 - DNA, 524 bp, Unknown
  Bacterial polypeptide expressing nucleotide sequence isolated from the Sargasso Sea
gatgagacattttctggatattcgtgatcatagcgccgacaccctgcaagccatgctcgatcatgcggcagagttgaaatcggcgctgaaagccggccgggacggtccgaagccgcttgccggaaagtcggtggcgatgatcttcgagaaaccgtcgacgcgcacccgtgtgtccttcgaggtcgggatcaaccagcttggcggcgcgccgctgatgatgttggcacaggacatgcagatcggccgtggcgagactatcgaggatacagctcgcgtgttgtcgcgttatgtcgatgccatcacaatccgctgtttctcgcacgacatgctgctgacccttgccaagaatgccaccgtgcctgtggtcaacgcgctgaccgaacgttcacatccctgtcagatcatggccgacctgcagactatgatcgaacgacatggtccgctcgacgggcagatcgttacctggatcggcgacggtaacaatgtcgccgccagctggatcgaggcagccgcgcggttcaatt

SEQ ID NO: 230584 - DNA, 718 bp, Unknown
  Bacterial polypeptide expressing nucleotide sequence isolated from the Sargasso Sea
tggcaccacagttgacctaaatcctactacttcacaaattgggcggggagagctaattagagatacagcaagagttctaggtagatactgcgatgttcttgcgataagaacctttaagcaatcagacctagaagagtatgcgaaatggtcttctaagccagtaattaacgccctcacggatctagaacatccctgtcaagctttatcagattatatgacaattaaagaggaatttacggattttaaaaatgtggttttgacatttataggtgatggtaataatgttgctaactctctcattttgtgtggagctttattaggagtcgaagtaagaatcgcatgccctaaaggttatgaaccgaataatttagtaatcaataaagctaaaaaaatatataagaataaaaatttattaaaaatcactaatgatcccattactgcagttaggggggcaaatgttttgtatacagatgtttggtcttctatgggcgaagaaaatcaaaaagatgagaaagataaagattttaatggatatactatcaataaaaatttagttagtaatgcagataaagaagccataatccttcattgcctacctgcctatagaggtaaagaaataactgatgaggtaattgaaagcgagaaaagtagaatatttgaacaagcagaaaatagaatgcatgctcaacaagcacttttatcttgcattctccaataa

SEQ ID NO: 230585 - DNA, 742 bp, Unknown
  Bacterial polypeptide expressing nucleotide sequence isolated from the Sargasso Sea
atgagcataaaacattgtataaaagtagatgattttaagggaaatgagattttagacttgtttcaattagcttctgaattaaaatttaaatacagaaataaagaaagttatcagccattcaaagatcactctatggccatgatatttgcgaagccatctgcaagaacaagagtttcatttgagacaggttatgcttggatgggcggacatgcaatttatttagctccacaagatattggtttaggaactcgtgaaagtgcaggtgacttagctcaactttttagtagatataatgatatgattatggcaagagtttatagtcataatgatatgttagaatttgaaaagcatgcttctgttcctgttattaatggtttaacagattataaccatccatgtcaaattcttactgacatgtttacaatttgggaacaaaaaaaagataatttaagtgatttaaaaattgtatacgttggggatggaaataatattgttaattcatggataaggttagcatcagttttaccttttgaatttacttgtgtttgtccagaaggatatgagcctgatgctgatacaatttcatttgctaattctaagaatctttctacaataaatatctctcatgatccagtaaatggtgtaaaagatgcagatgtaatttatacagatgtttgggcatcaatgggtcaaaaagaggaagttgatgaaagagtaaaaatattttcacccatgcaggtaa

SEQ ID NO: 230586 - DNA, 367 bp, Unknown
  Bacterial polypeptide expressing nucleotide sequence isolated from the Sargasso Sea
gcgtgtcccgaggggtacgacccggaccccgcgctattggcggcgtgcggacagtacgcgcgtgtcgaccgtgatcccgcctccgccgcagagggagcgcaccttttggtgactgatgtctgggcatcgatgggtcaggagagtgagcaggcggcacgcgaggccgtcttggcaccttaccaactgaatcggacgctgctcgatcgcgcgtcttccggcgcactatatatgcactgtctgcccgcccatcggggtgaggaaatcacagcggagcttatggacgcacccgattccgttatctggcaggaagcggaaaatcgcctgcatgcgcaaaaagcactgatggagttactgctcaacgcctgat

SEQ ID NO: 230587 - DNA, 723 bp, Unknown
  Bacterial polypeptide expressing nucleotide sequence isolated from the Sargasso Sea
tatgaataagagagatttcaagtcactaattgatataaatacccaagagtttaaaagaatcatacaaaaggctattgagtataaagaattagataaaaaacattctataccaaggacatatgttaataggactttggctatgatttttaaaaagaattcaactagaacaagagtctcgtttgagactgcgatgtataagttaggaggccatgcaatttttttatcagagaattcaactcaactaaacagaggtgaagatatatctgatacagccaaagtactatcaggcatggttgatttgataatgatgagaaccaatgcgcatgaagagataaagactatagcagagaactcatctgttccagtaataaatggtttatgcaatctgtttcacccatgtcaattattagcagatatgcaaaccatcgcagagacaaagggtaatgatttcagcaagttaacaattgcttggattggtgatggtaacaacatgtgtaactcatacataaatgcatcaaaattgcttaatttcagactaaaaatatctgttccaaatgggtatgaacctgataaatatacactggataaatttggtgaaaatgttgaattgtgtgagataccaggttctgccgtggatggagccgatgttgtaacaacagatgtttgggctagtatgggcgatgaacatgaaaatgaagagagaaaaaaagtatttaagagctt

SEQ ID NO: 230588 - DNA, 400 bp, Unknown
  Bacterial polypeptide expressing nucleotide sequence isolated from the Sargasso Sea
gatgagtgtggaccttcgtgggcgtcacttcctcaagctgcttgacttcacccctgaagaagtagcttacctcttagacctatctgcggaactcaaaaggtcgaagcaaagcggcacagaagaacggaccctcacaggtaaaaacattgccctgatttttgagaaaggttctacacgtactcgatgtgcgtttgaggttgccgctctggatcagggtgctcattcggtttatctcgggccgacaggaacccagattggcattaaagaaaccatgaaagacacagctcgcgtgctcggacgcatgttcgacgggatcgagtatcgtgggttcggacaggtgcaggtagaggaacttgctgaatttgcgggcgttccggtttggaatggcctaacaaacgag

SEQ ID NO: 230589 - DNA, 487 bp, Unknown
  Bacterial polypeptide expressing nucleotide sequence isolated from the Sargasso Sea
gggtagtcttgataacttgaaaatctgctacatgggagatggaaataatattgttcactcttggttacagctcgcttcaaggctccctatggaccttgtctgttgtggtccagaaggatttgagcctgatttggatactgtaaaaatggtagaagattcaggcttatcgtcttttcaattatctcatgatccgatttcagcagtaagagatgctgatgttatttacacagatgtttgggcatcaatgggacaaaaagaagaagcaactgaaagagaaaaagtttttgctccctatcaggtcaataaggatttaattaaaaatactgggaaagacacgttgttcatgcattgtctaccagccgaaaggggtagagaagttacagatgaggtaatggaatcaaagaattctattgtatttgaccaagctgaaaatagaatgcacgctcaaaatgcaatcatggtatatctaaccaacaatctctcttag

SEQ ID NO: 230590 - DNA, 543 bp, Unknown
  Bacterial polypeptide expressing nucleotide sequence isolated from the Sargasso Sea
catgaagaatttcataaatattgccgatatcaataagcaagatttaagaaaaattatagaacacgccaaatcacaaaagaagaaaagatctaatattaacaaatcggccatagatcctgaaaaaccattaatagataaaacattgattatgctttttgaaaaggcatctacgagaacaagattgtcctttgagctggcaataaagcaattaggcggacatttgttagtgcttgattcaaaagaaagccattatggaagtggagatgaaagtgtttacgatactgcaaaagtcttatctcagtatggagatattgtaatgatgagaactcacaagcataaacatttattagaattttctaaacatttagacattcccataattaatggcttaacaaatttaagtcatccttgtcagattatgtctgacataatgacttttgaagaattaaaaggctctatcacaaacaaaaaaattgcatggttaggagatggaaataacattgtttattcattgattgaagcagctgtaaagtttaattttga

SEQ ID NO: 230591 - DNA, 904 bp, Unknown
  Bacterial polypeptide expressing nucleotide sequence isolated from the Sargasso Sea
aatatttcagacttatcatcagaagaattaaggtcgattatcgatgaggctaagaaaagaaaattgaatagaaaagactttaacaagtcagcctgtgatcttgacaaaccttttgaagggaagtctatgattatgatttttgaaaaaccatcaacaagaacgagaatttcatttgatattgctattaaacaattaggtgggtcttcaataatattaaatcctgaagggatacattatggtaaggggaatgaaagtattaaagatacctcaaaagtcttatcagaatatgcagatataataatgataagaacctcgaatcataaaaatttagaagaattcgctttgcattcaggagtgccaattattaatggcttatcagagcaaagtcacccatgtcaaattatgtctgatattttaacatttgaggagttaaaaggagatataaaaggtaaaactattgcatggttaggcgatggtaataataatatgtccaactcacttattgaagctgcgagcaaatttagttttaaattaaatattggttgtcctaaaaaatatagtccaaataaaaaaattcttaaatgggctcatgaaaatcatacaaacttagagatatctaaagatccaaaagatgccatcaaggatgcggattgcgtaatgacggataaatggatatctatgaatgataaagttaacaaaaaagcaaagaaaaaaattttagagaaatatcaagttaataaaaaattgatgaaatatgcaaaaaacaattcaatatttatgcattgtttaccagtaggtagaggtgaggaagttacggatgaaattattgatggaaatcaatctgttgtttggacacaagccctaaatagagtgcacgctcaaaaaagcataattacttggtgtt

SEQ ID NO: 230592 - DNA, 214 bp, Unknown
  Bacterial polypeptide expressing nucleotide sequence isolated from the Sargasso Sea
tcgcgtcaaaaaattccttccaaaattccaagtcaaccaagctttaatgaataaggccaaaaaggatgccatcttcatgcattgtcttcctgcaaaacgtgatcaagaagtaacttctgatgtcattgatggttctcaatctgtagtttgggatgaagctgaaaatcgtttacatgtccaaaaagcattgttagttcaccttcttggcgtctaa

SEQ ID NO: 230593 - DNA, 652 bp, Unknown
  Bacterial polypeptide expressing nucleotide sequence isolated from the Sargasso Sea
aatgtctcgctatgtagatggaattctgattcgcactttttcacatcagatggttttagacttggcaaaacacgcgacagtaccagtaataaacatgttaactgactttaatcatccatgccaagtcatgtctgacatgttgaccgttaaagaaaaattgggacgtattgacaatgttcgaatagcatttgttggcgacagcaacaacgttacaaattcttggttaaacatggcagccagactgcccttggatcttcgaatagcaactgcgcctgagactgagcctgatatgaaacttgtttctaaaatcagagaaacaggcatttcaactattcaagttactaattctgcgaaaaaagcattaaaagatgcagagattatatacacagacgtttgggcaagtatgggcgaaaaaaataaaataactgaaagggaaaaagctttaaaaaattttcaagtaaactcaaaactgttacaatatacaggaaacgatgcactggtatttcattgtctaccagcagaaagagacaaggagattaccgatgaagtcatagaagggcctcagtcagtagtatttgatcaggcagaaaacaggttgcatgctcaaaaagctattctggttcaactagataaatggaacttacttaaatga

SEQ ID NO: 230594 - DNA, 544 bp, Unknown
  Bacterial polypeptide expressing nucleotide sequence isolated from the Sargasso Sea
tactgacttagagcatccttgtcaggcattagctgattttatgacaattaaggaggaatttcttgattttaaagatgtagttctaacatttattggagacgggaataacgtagcaaattctcttattctatgcggcgctttattaggagtagaagttaggattgcatgtcctaaaggttatgaacctaactcgttgttaatcgataaagcttatggaatatatgaaaataagaatttgttgaaaatcactaatgatcccaacaccgctgtattaggagcaaatgttctttatacagatgtatggtcatctatgggtgaagaaaatcaaaaagatgagaaagaaaaagtttttaatggtttcactattgacagtgatttagttagtaaggctgatgaagatgcaattattcttcattgtcttcctgcatatagatccaaagagataactgatgaaatttttgaaagtcagaaaagtagaatttttgatcaagcggaaaatagattacatgctcaacaagctcttttatcttgcattcttcagtag

SEQ ID NO: 230595 - DNA, 592 bp, Unknown
  Bacterial polypeptide expressing nucleotide sequence isolated from the Sargasso Sea
atagtcttaagaaccaaaaaacatgaaacccaagaaacttttgcctctttttcttcttgtccaaccattaatggactgagtgaactttctcacccctgccaagtattagctgatcttttaacttattacgaagaaaatggctctattgaaggagaaaaagtttgttggtcgggagactttaataatgtgtgttatagctatgcagaagctgctaatatttttaactttgaacttcacgtggcttgtcctaaagaatttcaacctaaaaataaagactttataaatgtaacttttactgagtcattggatcaggccattgatggaagcagtttagttacgacagatgtatgggtatcgatgggagatgaaaaagaaaaagagttaagagaaaaggtgtttcaagactatcaaataagtcccgtagtaatggataaagctaaggataatgcaatatttctgcactgccttcctgcaataagaggacaggaaatatccgcagacttgtttgaagacgaaagaagtaaagtttggatccaagcagaaaatcgattacatacacaaaaggccttattggtagagcttttaagttaac

SEQ ID NO: 230596 - DNA, 649 bp, Unknown
  Bacterial polypeptide expressing nucleotide sequence isolated from the Sargasso Sea
tactgcaagagttctaagtagatattgtgatgtgattgcaattagaacctttaatcattcagatttggaagaatacgcaaaatggtctactaaaccaataattaatgcacttacagatcaggagcatccttgtcaggctttagcagatttcttgaccattaaggaggaatttgctgattttaaaaatgtagtacttacatttataggcgatggaaataatgtcgctaattctcttattatttgtggagcattgttaggaattgaagtaaggattgcttgcccaaagggttatgaacctaattctgtgattattaaaaaagctaaaaatatttataaacaaaataaattacaaattactaatgacccaattagtgcagttaatggatcaaatgtactttatactgatgtttggtcttcaatgggagaagaaagtaaaaaggcagataaagataaaaattttgaaggatttacaattaataaacaattattatctaaagctaataaggatgcgattgttctacattgcctccctgcctatagaggtaaagaaatttccgatgagataatagaaagtaaaaaaagtagaatctttgagcaggcagaaaatagaatgcatgctcaacaagcacttttagcttgcttaatctaa

SEQ ID NO: 230597 - DNA, 718 bp, Unknown
  Bacterial polypeptide expressing nucleotide sequence isolated from the Sargasso Sea
aatgaaaaattttataaatatctctgactgctcttcagaagaattaagagaaataattgaagaagctaaaaagagaaaacaaaatagaactggtttaaacaaatctgctccagacgaagataaaccctttgaaggtaaatcaatggcaatgatttttgaaaagccatctaccagaacaagaatgtcttttgatattgctattaaacagttgggtggatcatcgattatattaaatcctgatgggatacattatggtaaaggtaatgaaactttaaaagatactgcaaaagttttaacagagtacgtagatattgtgatgttaagaacttcatcccataagaatttagaagaatttggaaaacacttagatattccagttattaatggtctctctgatttaggtcatccatgtcaaattatgtcagatattttaacttttgaagaaagtaatggacaaattactggtaaaaatatttcatggataggagacggtaataacaatatgtccaattcgttaattgaagctgctggaaaatttaaatttaatttgaagattggttgcccaaaaaaatactctccaaataaaacaatattgaattgggctaaaaagaacagtgtaaatttgactattacttctaaacctatagatgctgtaaaaggcgctgattgtgttatgactgacaaatgggtttcaatgaatgataaggtaaatgctaag

SEQ ID NO: 230598 - DNA, 847 bp, Unknown
  Bacterial polypeptide expressing nucleotide sequence isolated from the Sargasso Sea
aaaagagagggtcagaataaatcttctatagacatagataaacctttatatggaaaatcaatgataatgatttttgaaaaaccatcgacaagaacaagaatatcttttgatttagcaataaaacaattagggggctcttctatgattttaaatcctgatggaatacattatggaaaaggagatgaaagtttaaaagatactgccagagttttatctgaatatgcagatatcctcatgataagaacttcttctcacaaaaatcttgaagaattttcaaagtactcaaagatacctgtgataaatggattatcggatcaaagtcacccatgtcaggttatgtcagatattttaacctttgaggaaaataacggaaatatagaaggaaaaactatatcatggataggtgatggcaataataacatgtctaactcatttatagaggctgctgtgaaatttaagtttaatttaaaaattggatgcccaaaaaaatacagtcctagtggcaagatattaaaatgggcttcaaagaataaatctaaaatttttgttactaaagatccaagagaagctgcaaaagatgcagactgtattatgaccgataaatgggtttctatgaatgataaagtaaacaaaaaagcaaaaaagaaatctctaaaagactatcaagtaaataaaaaactttttaaacttgctaaaactgattgtatatttatgcactgtctacctgttggtagaggcgaagaagttgctgatgatattatagatggaaataaatcagtcgtttggcaacaagcctataatagagttcacgcacaaaaaagtattatcaattggtgcttaaattaag

SEQ ID NO: 230599 - DNA, 889 bp, Unknown
  Bacterial polypeptide expressing nucleotide sequence isolated from the Sargasso Sea
gatctaagagctattattgacgaggcgaaagctagaaaacttaaaagacaaaatttaaataaatctgcgccagatgaagacaaaccatttgaaggaaaatctatggcgatgatttttgaaaaaccatctacaagaactagaatgtcttttgatatagcgattaaacaacttggaggctcttcaataattttaaatccagatggaatacattatggtaagggtgatgaaacattaaaagatactgcaaaagttttaacagagtacgttgatattgtaatgttaagaacatcttcacataaaaatcttgaagagtttggaaaacatttagatattccaattattaatggtttgtcagatataggacatccttgtcaaatcatgtcagatatccttacatacgaagaaagtaacggtactattgagggtaaaacagttgcttggctcggcgatggaaacaataatatgtctaattctctaattgaggctgcagggaaatttaattttaatttaagaattgcttgtcctaaaaaatactctcctaacaaaaaggtattaagttgggcaaagaaaaataaggcaaatcttattgttacgacaaaacctgaagaggctgtaaaaaattcagattgtgtgatgactgacaagtgggtttccatgaacgataaagtaaataaaaaagcaaagaagaaaattttaaaaccttttcaagtaaataaaaaattaatgagtaaagctaatacaggtgcaatttttatgcattgtcttccagtaggaagaggcgaagaggttacggatgaagtgattgacggcaaacaatctgtagtttggagacaagctcttaatagagtgcatgcacaaaaaagtataataaagtggtgcttagattaag

SEQ ID NO: 230600 - DNA, 538 bp, Unknown
  Bacterial polypeptide expressing nucleotide sequence isolated from the Sargasso Sea
tctcatcctactcaaatattgtctgatgtatttaccattgaagaaataaaaaaaaaatcaattaaaaatttaaatatttgctggataggagatggaaacaatgttcttaatagcctaatcgaagcctcaactaagttctcatttaatctaagtattggatctccaaaaaaatatgaaacaaataaaactttattaaattgggcgaaaaaaaatatggctaaaataaaaatctataatgatccaaaaaaagcaatacttaactcggatattgtttttgcagataaatttataagtatgaatgacaaaataaataaaaaaaaaaaaattaaagattttaaaaattttcaagtaaactcgaaactaatgagtttagcgaaaaaaaatgcaatttttcttcattgtcttccagcttctagagggtatgaagtctcttcagatgttatagatggaaaacaatcaaaagtatggcaacaagctctaaatagagttcatgtgcaaaaaagtattattttatattgtttagaaaaattaaggtagt

SEQ ID NO: 230601 - DNA, 336 bp, Unknown
  Bacterial polypeptide expressing nucleotide sequence isolated from the Sargasso Sea
catgatagccaataaacaagcttcaatattacggtttcaagcccaaaatgtgaacaggataacgccaatgcggcattttttagatctgagagatttttcaactgacacgctgcaatctctattggatgaaggcttacggatgaaggttacacaaaaatcgggtgatggtcatgaactgccattagctggtaaaaccgtggcgatgatttttgaaaaaccatcaacccgcacacgcgtttcatttgaggtggggatcactcagcttggtggaacgccactggtcctttcaacaaacgatttacaaagtggccgtggtgagagcattgaggataccgc

SEQ ID NO: 230602 - DNA, 241 bp, Unknown
  Bacterial polypeptide expressing nucleotide sequence isolated from the Sargasso Sea
catgggccaggaggcagaacaggctcagcgagagcaggcctttgctggattctgtgtggatcaagccctgatggagcaggctgcagccgatgcgatcgttctgcactgccttccggcccaccgcggtgaggagatcagcgctgaggtgatggagggcacggcgagccgcatctttgatcaggcggaaaaccgcctgcatgcgcagcaggctctgttggcggtgttgatgggtggtctgtga

SEQ ID NO: 230603 - DNA, 658 bp, Unknown
  Bacterial polypeptide expressing nucleotide sequence isolated from the Sargasso Sea
gatgaaaaattttataaatatatctgatcattcttcgaatgatcttagaactattattgatgaagcaaaagcaagaaagcttaaaagaaaaggtttaaataaatctgcaccagatgaagataaaccttttgagggaaaatctatggcaatgatttttgagaagccctcaacaagaactagaatgtcttttgatattgctgttaaacaattaggaggctcttcaattattttaaatccagatgggatacattacggcaaaggagaagaaacacttaaagatactgcaaaagttttaaccgaatacgttgatatagtaatgttaagaacatcctctcatgaaaatcttgaagagtttggaaaatatttaaatattccaattattaatggcttgtcagatgtaggacatccttgtcaaattatttcagatatttttacttatgaagagagtaacggtagcattgagggcaagacagtagcatggttgggagatggaaataataatatgtctaattctttaatagaagctgcagggaaatttgaatttaatctaaggattgcttgtcctaaaaaattttctccaaataaaaagatattaagttgggcaaaaaaaaataaagtaagtctaactgtaacaatgaaacccgaggaggctataaaa

SEQ ID NO: 230604 - DNA, 553 bp, Unknown
  Bacterial polypeptide expressing nucleotide sequence isolated from the Sargasso Sea
aatgagaaaccttatagatataaatatgttaaatgatggaatagctagaaaattattgcaaactgctaaattttataaatctagtggtagaggattattagagggagctcctttgttgggaagaactttagcaatgatttttgaaaaaccttcaacaagaactcgtatatcttttgaagtagctatgactgaattaggaggctcagctatttacttagatgcaaaatctatgcaaatgggaagaggagaaacaatagctgatacagctaaggttctaggcagatatttagatggaataatgattagagcaagtaaacatgaaaccttattagaaatggctaaacattctaaaataccagtgataaatggattaactgatattagtcacccttgtcagattttagcagatataatgacttttgaagaaaaattaggagatatagaaaataaaacaatttcatgggttggagatggaaataatatggctaattcatggatacatgcatcaaaaatttttaactttaaattaagattagcatgtccttctgttaga

SEQ ID NO: 230605 - DNA, 856 bp, Unknown
  Bacterial polypeptide expressing nucleotide sequence isolated from the Sargasso Sea
tatgaataaacatttcctagacctaaataatttttctaaagacgatattgacagaatattaagcaattctctcgaaatgaagtccaaggagaaaaatttaaaaattttagatggcaaattcctaagtctagtatttgaaaaatcttctactagaactagagtttcgtttgaagttgcaatggcacagcttggtggcagagcatcctttctttctgtgaatgatctgcagatgggacgaggtgaacctatcgaggatacatcgaaagttttaagttctatggtagacggtatcgtacttagaacactcgaacataatacgcaggtaaagtttgctgaaaattcatcagttccaataattaatggtttaagtgatagatcccatccttgtcaattactatcggatttactaacctttcgtgaagagaaaggatcaatagaagggaaaaaagtagcatggtgtggagatttcaataatgtttgctttagttatgcacaggcagcagagttattaaatttcgaacttactattgcttgtcctaaagaattttatcctgaggatatgaagaactacaaaaatgtgtcctttactcaatctatatcgaaggccgtagaagcctgtgacttggtttctacagatgtttgggtatcaatgggagatgaaagagaggctgataagagacaaaaattattttctgactaccaagttaatcaggagattcttgatcaagccaaatcagatgttatttttcttcattgccttcctgctataagaggtcaagagatttctcataacttactagaagatcctaggagttatgtgtggaaacaagcagaaaatagacttcatgctcaaaag

SEQ ID NO: 230606 - DNA, 772 bp, Unknown
  Bacterial polypeptide expressing nucleotide sequence isolated from the Sargasso Sea
aatgatttttgagaaaccttcaaccagaactagggtttcctttgaagtaggaatgaaaaagattaatggagatgtagttgtccttgatcaaaatgatacacaacttgcaagaggggaatcgctaaacgatactattaaagttctaagtaggtacgttgatattattatgtacaggggatctgatcaaaagaagctctacgaaattgctgaattttctgacgtcccaataattaatggattgacaaatcaaagtcacccctgccagattatagctgatctaatgactcttgaagaaaattttaaaagcttaaaagaacttaagctttgctgggttggtgatgggaataatgtatgtaattcatggatacaggcctgtctacattatgattttaatttacatatttcctgtccaaagaacttcttcccacaaaaaaataatataagtaaaatcaataaagataaagttgtattttttgacaatccagataaagctgttttaggggcagatgttctaataacagatacttgggaatcgatgggaatgatgaaaaaaaaaaatgtgattcaaaaatttaaaaagtttcaaattaatcacggtcttttgaaaaaaactaaaaagcaaaccaaggttttgcattgtcttccagcccatagaggacaagaaattacagatgatgttattgatgggaaagattctttggtatgggacgaggcagaaaatcgactttatgcgcatcaagcaattttactttggtgtttaagacaaatctaa

SEQ ID NO: 230607 - DNA, 466 bp, Unknown
  Bacterial polypeptide expressing nucleotide sequence isolated from the Sargasso Sea
tgcatggtgtggtgatggtaataatgttgcatcaacctgggttcaagcttcggcacaatttggtttttcattaaatattgcaagcccatctgagttttctgttgataattcaatagtaaattgggctaattctaatggaggaaatgttttaaaaacaactgatccagttgtggcagttacaggatcagattgtgttttaaccgatgtttgggtttctatgagtgatgagaaaaaaaatctttccttgaataaaaacaaacaagaacttatgggaccatacagagttacacaagagctaatgtctaaagcatctgaagatgcgttgtttatgcactgtcttcctgcgcatagaggtgaagaagttgatgcagaagtgattgagggagagcaatctgttgtatggtctgaggttgaaaacagacttcatgtacaaaaaagtattcttgtttggtgttgtaaagattag

SEQ ID NO: 230608 - DNA, 844 bp, Unknown
  Bacterial polypeptide expressing nucleotide sequence isolated from the Sargasso Sea
atgaaaaactttataaatatctctgattgttcttcgtcagagctaagagcaatcatagaagaagcaaagaagagaaaacaaaatagatttggtctaaataaatctgcacctgataaagataaaccttttgaaggtaaatcaatggctatgatttttgagaaaccatctacaagaactagaatgtcatttgacattgccattaaacaattaggtggatcatcaattattttaaatcctgacggcatacattatggcaaaggagatgaaacattaaaagacacagcaaaagttttgtcagagtatgttgatatcgttatgttgagaacatcatctcacaaaaatttagaagagtttggaaaatatttagatataccaattattaatggtctttctgatgttagtcatccttgccaaattatgtctgatattcttacttacgaggaaagcaacggttccattgagggcaaaacagtttcttggattggagatggaaataataatatgtcaaattctttaattgaggctgcaggcaagttaaattttaaacttaagataggctgtccaaaaaaatattctcctgacaagaatattttaaaattagctaaaaaagagaaagtgaaattgacaattaccactaaacctttagaagcggctactggtgcagattgtgtaatgactgataaatggatctcaatgaatgataaagtaaataaaattttaaaaaagaaaactttaaaaccttatcaagttaatgagaaactaatgagcaaagcaaattcagatgcaatttttatgcactgtcttccagtcggaagaggagaagaagttacaaatgaagtaatag

SEQ ID NO: 230609 - DNA, 306 bp, Unknown
  Bacterial polypeptide expressing nucleotide sequence isolated from the Sargasso Sea
tatccataataaaggatccgatatcagcagtaagaggtgtagatcttgtagtaactgatgtttgggcatctatgggccaggagagcgaacacgaaaggcgagcgaacgcatttaaaggtttccaaataacatcagagctgatgtcttatgcaaataagggtgcggtattcatgcattgtttgcctgctcaccgcggagaggaagtttcgtcagatgtaattgatgctgttgactccatagtttgggacgaagccgaaaatcgtatgcactcgcagaaagcacttctggaattcttgttagcgtaac

SEQ ID NO: 230610 - DNA, 664 bp, Unknown
  Bacterial polypeptide expressing nucleotide sequence isolated from the Sargasso Sea
ggcgagagagagactgtcgaagatactgcaagagttattgaaagatatgccgatatggtaattataagatgttttggacatgatcagttaatgaaatatgcaaatatatctaatgttccagtaattaatgctcttaccgattttagtcatccgtgccaagttgtagcagatttaattaccatcaaagaacatctgaaggattataaaaatataaaagtttcttggtttggtgactgtaataatgtcttacaaagttggatagaagcttctgtgttgctgaattttgaattaaatatagcttgtccagagggtgtaaaaccagatggagaaataatatcatgggctcttgaaagaaataataaaatttctataacacataatcctcataaagctgcggaaggtgcgaattgtattattactgatacatggagatcaatgggtgatcaaaatccatttcctgaagatcaattcatgccatttcaagtaaataaaaaaataatggaattagcagataaaaatgcgatttttatgcactgtttacctgcttatcgaaataaagaagtaagttctgaagtactagaaggaacccaatctgttatatttgacgaagctgagaatagattacatgcacaaaaagcaattatgcatttttgtattacataaa

SEQ ID NO: 230611 - DNA, 358 bp, Unknown
  Bacterial polypeptide expressing nucleotide sequence isolated from the Sargasso Sea
gaccgatgcggtagacgacgctacgcagggcgtcgacttcatttacactgatgtttgggtctcaatgggcgaaccaaaagaaaaatgggctgagcgaatagaactgctcaaaccttaccaggtgacaaagcaggtaatggcgcaaaccggcaatccgcacaccaaattcatgcattgcctaccggcgttccacaatgccgagaccgagcttggtgccgaaatcgccagccaattcgacatcacggcgatggaagtcaccgaggaggtgttcgaaagcccggcctccatcgtcttcgaccaggccgagaaccggctccacaccatcaaggcagtcctcgtcgccacgctgggaaactag

SEQ ID NO: 230612 - DNA, 508 bp, Unknown
  Bacterial polypeptide expressing nucleotide sequence isolated from the Sargasso Sea
atgaatggtcatgttgcttgggtcggagacgggaacaatgtgcttcatgatttggttcttgggtgtgcaactctgggatatgatatcgttttcgcaactccacaaggttttgagccagacgaatctgtgatttcaagggctttagaaatagctaagaaaacagggtcgaaaattgaaggagtcaatgatcctaaagaggctgttgagggagcaggcgcgatatacacagacgtttttgtttccatgggagaagagcatatggatggaaagatggggtcattcgatggttttcaggtaaacgaagaattggtctcggatgctgatgatgattacatcttcatgcactgccttcccgcacacaggggagaagaggtaacagacggagtgatggactcgcctaatagcgtagtttttgatcaggccgaaaacagaatgtgggcgcaaatgtcgatactaactcttctgtgtaacgaagtcgcttggcagacctattgggaattgcgctagc

SEQ ID NO: 230613 - DNA, 541 bp, Unknown
  Bacterial polypeptide expressing nucleotide sequence isolated from the Sargasso Sea
catgagaggcagtgactcgaaaatcgaccttctagctattgatgatttatctgataggctctcggaaatcatcgattgggcaatcagaataaagaacgatgaagaggcactgtatgacttcaaacctctggatggaatgacaataggctcgatttacgagaagccgtcaacaaggactagggtatcattcgaggttggagttagtaggctaggcggccagcccctcacactacttgctggagacatccaactaggaactagtgagaccattgcagatactgctgctgttctctctaggtacatggactgcattacctacaggtgtttcgggcatggcgacgttgctgaactagctaaacattcaactgttccagtaatcaacgccctctctgatatgcatcacccttgtcaggctgcagctgatatgatgaccatagtagaaaactcggataaaatgaatggtcatgttgcttgggtcggagacgggaacaatgtgcttcatgatttggtccttgggtgtgcaactctgggatatgatatc

SEQ ID NO: 230614 - DNA, 722 bp, Unknown
  Bacterial polypeptide expressing nucleotide sequence isolated from the Sargasso Sea
aatgaaaaactttataaatatctctgactgttcttcagtagagcttagagcgattattgaagaagcaaagaagagaaaacaaaatagatctggattaaataaatctgcacctgacgaagataagccctttgaaggtaagtcgatggctatgatttttgaaaaaccctcaacaagaacaagaatgtcatttgatattgctgttaaacaattaggtggatcatcaattattttaaatccagatggtatacattacggcaagggagaggaaactttaaaagatacagcaaaagttttatcggaatatgtcgatatcgttatgttgagaacttcatctcacaaaaatttagaggaattcggaaagcatttagatatcccaattatcaatggcctttcaaatgcgagccatccatgtcaaatcatgtctgatattcttacttatgaggaaagtaatggttctattgaggggaaaactgtttcctggattggagatggtaataataatatgtcgaattccttaatagaggctgctgggaaattcaattttaaactaaatattggttgtccaaaaaaatactctccaaataagagtattttgaagctagcgaaaaaggagaaagtaaaattaacaattacttcaaaacctttagaagcggctacaggcgctgattgtgtaatgactgacaaatgggtttcaatgaatgataaagtaaataaagtttcta

SEQ ID NO: 230615 - DNA, 670 bp, Unknown
  Bacterial polypeptide expressing nucleotide sequence isolated from the Sargasso Sea
atgagaagtttcactgatatcaaagacctttctaaatcagatattgaagctattttatttcgaacaaggcaagaaaagaaaattattgctgaaaaaggtattttgaatattgaaaaaattttattaggtaaaacagttgctcttatttttgaaaaaccatcaactcgaactagagtctcttttgaagttgggattagtcaattaggaggccactcatcaattttacaagcttctgatattcagttgagtagaggtgagtcaatttcagatactgcaagagttttatctaagtatgtagatttaattattgttaggtgctttgaccatcaaatgatgattgattttgcaaaaaactcttctgttcctgtaataaacggactgacagatcagtcccatccctgccaggtaatggctgacttacttacaattgaggaaaaaaaaggatctttacaaaatcagaatattttatggattggtgatggtaataatgtttctaggagttgggtagaggcatctactctaactaatttacaaatcacattatgtactcccagagaattatctcttccaatcaaatttatcgaaaactctattgctaagggagctaacattacaattgattatgaacctgcgagtgcaatccataataaagatgttattgttactgaca

SEQ ID NO: 230616 - DNA, 853 bp, Unknown
  Bacterial polypeptide expressing nucleotide sequence isolated from the Sargasso Sea
aatgaaaaactttttaaatatcgctgatcacccttcttccctattaagaaatataattgaagaggcaaaagaaagaaagctcaaaagagaaggtcagaataaatcttctatagataaagacaaagctttagatggaaaatcaatgataatgatttttgagaaaccttcgacaagaacaagaatatctttcgatttagctattaagcaattagggggctcttctatgattttaaatcctgatggaatacattatggtaaaggagatgaaagtttaaaagacactgccagagttttatctgagtatgcagatatacttatgataagaacatcttctcataaaaatctggatgaattttcaaaatattcaacaatacctgtaataaatggattatcagatcaaagtcatccatgccaggttatgtctgacattttaacctttgaagaaaacaacggaaatatagaagggaaaactatttcgtggataggtgatggcaataataatatgtctaattcatttatagaggcagctgttaaatttagatttaatttaaaaattggatgtccgaaaaaatacagtcctaacaataagattttaagatgggcgtcgaaaaataacaccaagattttcgtaacaaaagatcctagagaagctgctaaggatgctgattgtataatgactgataaatgggtttcgatgaatgataaagtgaataaaaaagcaaaaaagaaatctctcaaagattatcaagttaataaaaaactgtttaaacttgctaaaactgaatgcatatttatgcattgtcttcctgtcggaagaggagaagaggttactgacgatattattgatggaaaa

SEQ ID NO: 230617 - DNA, 527 bp, Unknown
  Bacterial polypeptide expressing nucleotide sequence isolated from the Sargasso Sea
ggcaattcgagaacttgctaattcagagggacatatcgcttgggttggagatggtaacaacgtattccatgaccttgcattagcagccctcgctctaggttatgatgtcaaatacgcaactcccgttggtatggagcctgattcaaatgtactttcacgatgtgaaattatagcctccaagactggatccaaaataattggaacaaacgacccagtcgaggcagttagaaatgcttcagtcatctatactgatattttcgtttcaatgggtgaagaacatatggcaaacaagttttccgcattcgaaggatttcaagttaatgaggaactagtagcacacgctcaacctgattatgtattcatgcattgtttacccgcccatagaggagaggaagtgaccgatgcggttattgactcccgcaatagcatagttttggaccaggcagaaaatagaatgtgggctcaaatgtcacttcttacctatctgtgcaataatgatgcttggcacgcatataacgaaatgtaat

SEQ ID NO: 230618 - DNA, 451 bp, Unknown
  Bacterial polypeptide expressing nucleotide sequence isolated from the Sargasso Sea
tctatagaaggagaaaaagtctgttggtctggagacttcaataatgtctgctatagctatgctgaagcagcaaatatttttaactttgaactgcatgtagcctgtccaaaagattttcaacccgagataaaagaacttccaaatgtaacctttactgaatcattatatgaagcagtagaaggaagtagtttagtgactactgatgtgtgggtctcaatgggagatgaaaatgaaaaagagaagagagagcgattattcagtgactaccaaataaacccttccgttatggataaagcaagtaacaaagcaattttcttgcattgtctacccgccataagagggcaggaaatttctgaagatttattagaagataaaagaagtaaagtttggacccaagcagaaaatagattacatgctcaaaaagctttattggttgaacttctgaaataaa

SEQ ID NO: 230619 - DNA, 634 bp, Unknown
  Bacterial polypeptide expressing nucleotide sequence isolated from the Sargasso Sea
ttgtcgcgctatgttgatgccatcatgattagatgttttgaccacaacacgttattgctgctggcaaaacatgccacaataccggtgatcaacgcgctgacaaatcggtcccatccctgtcagttgatggctgatttgcaaaccatgattgaaaatcatgggccactgagtgggcaaagagtggcatggcttggtgatggaaataatgtggcaaccagctgggttgaagcggcgtcattgtttggctttcaacttcgtatggcctgtccaaatggctatgagccgccagctgagttaatggcttgggcgcgagccaatggcggcgatatcattctcaccgaagatgtgttcgaggctgttgatcaagtgcaaactgtggttaccgacgtctgggtgtcgatggggcagcaaggcggcaatcaacaacgggatcttgccgcctatcaggttaatgaagaggtgatgaagcaagcggcgggtgatgcaatttttatgcattgtctgccagccaagcgcggcctagaagtgtctgcggcggtgattgacggcccgcaatctgcggtattcgatgaagctgaaaatcggttgcatgtgcaaaaggccatattggcttggtgttttgctggcagctagg

SEQ ID NO: 230620 - DNA, 652 bp, Unknown
  Bacterial polypeptide expressing nucleotide sequence isolated from the Sargasso Sea
atgaagaattttttaaatataagcgatacgtctatccaagaccttaaaggcatacttgaacaagccaaaacgatgaagaccgccaggattggtcttccaaaaggagcatgtgacgaaggccgaccacttagccaacatattgttgctctggtcttcgaaaaaccatccaccagaacaagaacgagctttgatgtcggtgttcgacaactaggggggaaaccgatactgctttccggcaccgaaatgcaacttggacagggcgagactatatccgacacagcccgcgttttaagtcggtatgtagatttaataatgttgagaacatttgaaagccagacgttatacgagatggctaaatattcaacagtacctgttatcaatggattgactaacgaaagtcacccttgccaaataatggctgatattatgacatttgaggaaaagcgtggatcaataaaaggtaaaaaagttgtttggttcggtgacggcaataacgtatttaatagctttttgcaggctgccaaaaaatttgatttctcactcattttttcgggaccaaaagaattagatccatcaaaaaatttaactgaaaataccaataatctaggaattaattttgaaatagatagggacccaatgttctgcaatcaaa

SEQ ID NO: 230621 - DNA, 928 bp, Unknown
  Bacterial polypeptide expressing nucleotide sequence isolated from the Sargasso Sea
atgaaaaactttttaaatattgctgatcattcttcttctttactaagaaatatagtcgaagaggcaaaagaaagaaaacttaaaagagaaggtctgaataaatcttctatagacgcagataaacctttagatggaaaatcaatgataatgatatttgaaaaaccatcgacaagaacaagaatatcttttgatttggcaataaaacaattaggcggatcttccatgattttaaatcctgatggaatacattatggaaaaggagatgaaagtttaaaagatactgccagagttttatccgaatatgcagatattctaatgataagaacttcttctcacaaaaatcttgaagagttttcaaagtactcaaagatacctgtgataaatggattatcggatcaaagccacccatgtcaggttatgtcagatattttaacctttgaggaaaataacggaaatatagaaggaaaaactatatcatggataggtgatggcaataataacatgtctaactcatttatagaggctgctgtgaaatttaagtttaatttaaaaattggatgtccaaaaaaatacagcccaagtgttaagatattaaaatgggcttcaaagaataaatctaaaatttttgttactaaagatccaagagaagctgcaaaagatgcagactgtattatgactgacaaatgggtttctatgaacgataaagtaaataaaaaagcaaaaaaaaaatcgctaaaagactatcaagtaaataaaaaactttttaaacttgctaaaaatgattgtatatttatgcactgtctacctgttggtagaggtgaagaagttgccgacgatattatagatggaaaaaaatcagttgtttggcaacaagcctataatagagttcatgcgcaaaaaagtattattaattggtgtttaggttaag

SEQ ID NO: 230622 - DNA, 619 bp, Unknown
  Bacterial polypeptide expressing nucleotide sequence isolated from the Sargasso Sea
atgttaaacccgatcaagcttgcaagtaaaaattttttatcaagcttggatatttcatctgaagaatttcttcatattttagagatagcaaaaaatttaaaaaataaagatttaaatataaaactcaaagaaaaagttttagggttaatttttgataagtcatcaactcgtaccaggtttagtttccaggtagcaatgtcaagacttggcggcaccacagttgacctaaatcctgctacttcacaaattgggaggggagagccaattagggatacagcaagagtgctaagtagatactgcgatgttcttgcgataagaacatttaaacaaactgatttggaagagtatgcaaaatggtcctctaagccagttattaatgctcttactgatttagaacatccatgtcaagcattagctgatttcatgacaattaaagaggaatttcttgattttaaagatgtagttttgacatttattggagacggtaataacgtcgcaaattctcttattttatgtggcgcgttattaggagtagaagttaggattgcatgtcctaaaggttatgaacctaactcgttgctgatcgataaagcatataaaatatatgaaaataagaatt

SEQ ID NO: 230623 - DNA, 916 bp, Unknown
  Bacterial polypeptide expressing nucleotide sequence isolated from the Sargasso Sea
aatgcgtcattttttagttgtagaggatttaactccacaagagattgagggagtctttgcgatttcccaagatcttgaaacaaagttcacagcaggtgttcgtgatgcactattcccaggtcgtgttcttgcacttgtttttgaaaaacagagcctgcgtacgcgtgtcagttttcaaactgcgatggtacatctcgggggatcagggctctttctcggagaggacactgggttcgcaagttctcgagaacgtattgatgatttcagtcgagtgcttagtgaatatgtcgattgtattgcgtgccgctctaaatcccacgcgacgattgagcaactagctgcttcatcaagtgtccctgttatcaacgccctcagcgattttagccatccgtgccaagcacttgcagatctttacactcttcgcaggcatattggtcggctggaagggctcacattcacttttgttggtgatggaaataatgttgccaggtcactagcagtagcttgtgctctgcttggaatgcgtttcattcttgctgcccctaagcagtatcaatttgatgaatctttcaagaaccgagtgacatcgctggctcccgatgcacaagtcgagcaaaccgaggatccaaccgctgcagtccaagacgcggttgttgtctatacggacgtatgggcgagcatgggacaggaaaaagaacgagaggcacgtcaaaccgcttttcgaccgtaccagataaatagtaaattaatggcaaactgccctaatgccatctttatgcactgccttccagctcgtcgtggggaagaggtcaccaacgatgtcattgacggaaagcaaagtgttgtggtcacacaggcggcaaaccgaatgcacgtccaaaaaggccttctggcatggcttcttggccatcgctaa

SEQ ID NO: 230624 - DNA, 883 bp, Unknown
  Bacterial polypeptide expressing nucleotide sequence isolated from the Sargasso Sea
tatgacgacaaaacatttcttaaatcttagagatttatctaatcaagatattttgaatgtcttagatagagctattgaaaggaaaagtcagaaacaaaaagaaaagaccctagttggctcaaagttaggtctaatttttgaaaagccttctacgagaacaagaatttctttcgaatcaggaattttacacttgggaggaaatgcaatttttatgtcctcatctgatttacagttatctagaggagaaccagtgtctgatacagcaaaagtagcatcttctatgttggatgtaattgccttaagagttgataagcatgagacattagaaatgtttgcagctaattcttctgttcctgtaattaatgctctctcagatttatctcatccttgccaaatattagcagacttgatgactttcaaggaaaattcagcaaatgaacttgaaaaagtttgctggattggagatggtaataacgtatgtaactcatacgtcgaagcatcaaagatattagattttgagctctctatttattgtcctaaagaatattcacctgacccttctttcctcaattatgcaaagaaaaattccagttttgctaattccagagaagaagcagcaaaaggagctgacataattactacagatgtttgggtctctatgggggatgaaaaaactaaagaaagagcttttcaaggatattttgttgatactggtcttattgaaaatacaggtaaagaaagcatcttccttcactgtcttcctgcccatagaggtcaagaaattacatttgaactaatggaacatccttcgagtaaagttttacaacaagcagagaacagaatgcacgttcaagaggcattgattgagaatttactaagctaa

SEQ ID NO: 230625 - DNA, 901 bp, Unknown
  Bacterial polypeptide expressing nucleotide sequence isolated from the Sargasso Sea
atgattaataattttattgatattaatgactataataagtcgcaaattgatgaaataattttaatagcaaaaaatataaaaaaaaatcccaagaaattctcttcagttttaaaagataaaacattaggtatgatttttgagaaacaatctttaagaacaagactaagctttaatgtaggaatgaaaaaaataggaggaaatgttttagagctttcaagtaaggatattgggtttgataatattagagaaaaatcagaagatgttttgagagttttgtcacaatttatagattgtttaatgataagaaataatgatcacaaaaaacttgtagatttaagtaatcaaaaaattattcctataattaatggtttaactaattatagtcatccttgtcaaattcttggtgattttttgacaattcaagaaaaaattaaaaattttcaaaattgtactattacctggattggagactttaacaatgtcttgatttctcttttacaactacaaaatatttatttatttgaactgaaggttgttattccatccaaaattttaaaatctaatcaaaaacaaatcaaaaagttcaaaaacaaaaagaacgaatttatatcagatcctaagctaggggcattaaaaacagattgtattatgacagacgtatggttatcaatgggtgaaaaaaataaaaataaaataaaatattttaaaaattttacagtcaatgataaaatcttaaatattgcttctaaaaaagtaatttttatgcattgtttaccagctaagcgagggcaggaagtaacatctaaagtattagatggtaagcattcagttgtattagaacaggcaaaaaatagaatgtatattcaacaagctatattaatttatgttcttaaaaaatagt

SEQ ID NO: 230626 - DNA, 919 bp, Unknown
  Bacterial polypeptide expressing nucleotide sequence isolated from the Sargasso Sea
tatgagtaaaattagacattttaaatcattattagatattaataaaaatgaattcttgagaataattgatagagcatcagaattaaaaaaagaagctatgaatggcatatctaataattcactggccaataaaacaatggcgatgatttttaaaaaaaattctactagaactagagttgcttttgaaacagccatgacctcaatgggtgggcatgctatttttctatcatcagattcaactcaaataagtagaggtgaagaattatctgatacagcaaaagtcctttctggaatggttgatataattatgattagaactcatgatcatgacgaagtggaagagcttgcaaaaaattcaagtgtccctgttataaatgggttaactgaaaaatttcatccatgtcaacttcttgcagacatgcaaacgtactttgaggaaaaaggttctatagagggaaaaaaagtggcctgggtaggtgatggttgtaatatgtgtaattcatacatcaatgctgcaaaaattcttaattttcatcttaagattgcaacaccatcgggttttgagccagaccaatcaactcttgatcttgcaaagaacaatgttgaactatgtgatatgcctggtaaagctgttgaagattgtgacttagttactacagatgtttggtctagcatgggggatgaaacagaagccgataaaagaagagttatgttcaaaggttatcagattaataagcatctttttgataaaagtaagtcagactctatatttttacactgcttgccagctcatagaggagaagaagtagattcagatgtaatagatggttcaaggagcaaggtctggtctcaagcgcacaatagactatataccagcaaagctttagttgagtttttattactcgagtctaaatcttaa

SEQ ID NO: 230627 - DNA, 862 bp, Unknown
  Bacterial polypeptide expressing nucleotide sequence isolated from the Sargasso Sea
gctggatctgattaccttagccaagacgattaaagcgaatcccgctgagtatcgtcatgcgctggacggtaagagtgtggtgatgttatttgaaaagccatccctgcgtactcgtgttagcttcgatatcggtattaacaagctcggcggccactgtttatacctagaccaacaaaatggtgccttaggtaagcgggaatcggtcgctgactttgcttctaacctgtcctgttgggccgatgccattgtggcgagaactttctcccacaagaccatcgaacaattggccgagtttggcactgtgcctgtgataaatgcgctttcggatttatatcatccctgccaagcgctggccgatttcttaaccttggccgagcattttgaaaatatcagtgatgttaagttagcgtacgtaggtgacggtaataacgtgacgaattcattgatgtattgcgcggccattctcggtgccaccatgacagtgatctgccctgcgggtcactttcctgatggctacgtcgtggccgaagtgcaagaacttgccagtcgatatggcggcaaggttgtactgacttcagatattggtgctatcgaaggtcacgatgctatctatactgatacttggatttccatgggcgatccaacaccgttagcggaaattaaggataagtttgcaccttatcaggtcaataagggcttgatggcgaaagcgggtgctcacttctttatgcactgcttacccgctcaccgcggtgttgaagtgaccgatgaggtgatggatggcgaaggctccttgatcctgcaacaagcagagaatcggatgcacgcccaaaatgcagtactggtaaccctatttagttaa

SEQ ID NO: 230628 - DNA, 822 bp, Unknown
  Bacterial polypeptide expressing nucleotide sequence isolated from the Sargasso Sea
catgcccaaccatcttcttgaaattgatgacctatccgccagcgaaatagcagaaataattcgactttcaaacgttgaaaacccgccacaagtacttcggaataaaggagcggcacttttattcgaaaagccatcaaaccgtacacggaactctatggaaatggcgattatccaattaggtgggcacccaattactatccgcccagatgaagttggtataggagaacgtgaaagtgcggaagatgtggctagaaccctctcctgttaccacgcattaattggagcacgagttttcgcacatgcgaccgtggacgaactttccaccgcgtctacctcgccagtagtgaatatgctttccgacaagtcacaccctcttcaagctcttgcagacttattaacaatctgggaggaatttggaacttttgagggacgaatcgtctcatatgtcggtgacgccaataatgtggcacgatcactggcaatcgcttgcggtttgatgggtattgaattccggatcgctcatccgaacgggtacggcttttcagaatctgatgaagaagcgattcgaggagtgggaacacaattttccgctacgcaaaaccctagggaagctgttggaggggcaaacgttgtctacaccgatgtttgggcgtcgatggggcaagaagaggaaagagaaaagagattagcagatttcgaaggatacacggttggcgataagttgtttgagctatcaagcgaagacagcatattcatgcactgtctgcctgcccatccaggcgaagaagtatcacggtccgttcttgatagcggtaagagcag

SEQ ID NO: 230629 - DNA, 577 bp, Unknown
  Bacterial polypeptide expressing nucleotide sequence isolated from the Sargasso Sea
catgaataacaactttttaaacttaagtgatctttctaaaaaagatatagaaataattattgaaagatcattatctctgaagggatctaccaaaaagtcagatatgcttgctgggaaatatattgccttaatttttgaaaaatcatcaactaggactagagtctcttttgaggttgccatgaatcaacttggaggaaaggctagttttctagccataacagatttacagcttggcagaggagagcctcttgaagacactgccaaggtactagggtcaatggcagatggagttgtattaaggacccaaaaacatgaaacacaagagacatttgcatcattttcagcaagttcaaccatcaatggattaagcgaccaatctcacccttgccaagtattaaccgatctttttacttattacgaagaaaatggttctattgaaggcaaaaaggtctgttggtctggagactttaataatgtttgttttagttatgcagaagctgccaaaatctttaattttcaactgcatgttgcatgcccaaaggaattccagccgaaaataaaggtcttcctaatgtga

SEQ ID NO: 230630 - DNA, 925 bp, Unknown
  Bacterial polypeptide expressing nucleotide sequence isolated from the Sargasso Sea
tatgaaaaataatttccttaatctaaaagacatacatttaaatgatttaagggcaatacttagtgaggctttaagaataaaggacctgcgagtgaattgtcttaatggcaaaaaggatgaagataaagtccttagcgatttcatagcagctttgatatttgaaaagccctcaacgagaacaagattttcttttgacgttggcataaggcagctgggaggccaaacaataacaagttctagcgcagacatgcatttgggaaaaaatgaaaatgtttcagataccgcaaaagttttgagtagatatgtcgacttggtgatgcttagaactttcgatgaaaagattctatttgaattttgtgaacattcagctgtgccggttattaatggtttgacagaccaaagtcacccctgtcaagtattggcagatatttttacttatgaagaaaaaagaggttctatctcggggaaaaaagtaacttgggctggtgatggtaataatgtatgcaacagctatttggaggcagcaggtaaatttggctttaacttttgcttttatggccctcaagattgccttcccaataggagtttgattgcaggtgtagaaaaatgtggaggtaaagtattagctactgaggatccagaggaggcattttataatgcggacttagttgtaacagacacatgggtttcaatgcatgaaattgaaaaaaaagaaaagagagaattgttttctgcttttcaggtaacatcaaaaaaaatgtctctagcaaaaaaagatagcatattcttacattgtttacctgcccatagaggagaagaagttactgatgaagtcatagatggtcctaattcgcaagtgttcgaagcagcagagaatcgacttcatgtccaaaaggcaataattaaatgggtattagaaatatga

SEQ ID NO: 230631 - DNA, 922 bp, Unknown
  Bacterial polypeptide expressing nucleotide sequence isolated from the Sargasso Sea
tatgcctaaacattttttacatcttgcggattataatagtgaagacctctgggagatactgcaccttgctaaagaaataaagactaagttctataataaagaaaattacaaaccttttgaagggaggtctctggcaatgatctttgcaaagccttctgctcgtactcgagtatcctttgaaaccggttttgaatggatgggagggcatgctctcttcttaggaccaaatgatatagggataggtaagcgcgaggcaataaaagatatttcacgtgtttttagtcgatataatgatatgataatggcaagactttttgaccataagcatataattgagcttgcagagcattcagaaatacctgttattaatggcttaactgattataaccacccttgccaaatattagctgatatactaactatttgggagcatagggggaatctcgaaggtttgaaggtcacttatctaggagatggaaataatattgtgaattcttggttacagctagggattagactccctttacattttgtgtgctgtagtcctgaagggtatgagccagatgctaaaactataaaaaggttagaagattcaggggtatcatcttttgaattatctcaagaaccttattcagcagttaaaaactcagatgttatttatacagatgtctgggcttctatggggcaaaaggaagaggcagaagaaagagaaaaggtatttgcaaattatcaggtaaatcaaaaactggtcaaacaaacagggaaagaaacactttttatgcattgcctgccagcagaaagaggtagagaagtcacagatcgtgtaatggaagcaaattattcaatagtctttgatcaagcagaaaatagaatgcatgcacagaatgcaattatggtttaccttagcaacctaactgattaa

SEQ ID NO: 230632 - DNA, 775 bp, Unknown
  Bacterial polypeptide expressing nucleotide sequence isolated from the Sargasso Sea
ttgagaaaaccttctactagaacaagaatgtcatttgacattgctgtaaagcaattaggcggatcatcaattattttaaatccagatggaatacattacggtaagggagatgagactttaaaagatacagcaaaagttttatctgaatatgttgatatcgttatgttgagaacctcatctcataaaaacttagaggagtttgggaaacatttggatatcccagttatcaatggcctttcagatgtaagtcatccttgtcaaattatgtctgacattcttacttatgaagaaagcaatggttctattgagggtaaaattgtttcttggattggagatggcaataataatatgtcaaattccttaatagaagccgcaggtaaattcaattttcaactcaaaattggttgtccaaaaaaatatgctccaaataaaacgatacttaattggtcaaaaaaaaataaagttaatctaatcgtaacaaacaagccctatgaagccattaaagactcggactgtgttatgacagataagtggatatctatgaatgataaagtaaataaaaaagttaagaagaagattttaaagccttatcaggtaaacaaaaaattaatgagtgcagctaaatctgatgctatcttcatgcattgtttacccgtaggtagaggtgaagaagttacagatgatgtaatagacggtaaacaatcagttgtatggagacaagctttaaatagagttcacgctcaaaaaagtattatcaaatggtgcctcgattaag

SEQ ID NO: 230633 - DNA, 880 bp, Unknown
  Bacterial polypeptide expressing nucleotide sequence isolated from the Sargasso Sea
catgaatagaaactttttaaacctagaagacctatcaaaagaagaattagaaaagattatagaaaatgctatatctttgaaaagttcacgtaaaagcaatgatttgcttgtaggtaaatacattgcgttaatttttgaaaagtcttctactcgtacaagagtttcctttgaggtggcaatgaatcaattaggaggcaaagctagctttctatcaatatcggacctccagctaggaagaggtgaacccctagaagacaccgctagagtaataggatccatggcagatggagtagtattaagaacactaaaacacaaaactcaagagacttttaaatctttttcttctagttccaccattaacggattaagtgatttatctcacccctgccaagtcctaacagaccttcttacatattatgaggagaatggatcaattgaaggagaaaaggtttgttggtctggagactttaataatgtttgttatagctatgcagaggcagctaatttatttggctttaagctccatgttgcttgcccaaaagagtttcaacctaaagatcagacattacccaatgtaacattcactgaatctttggatgaagctatagaagatagctctttggtaactacggatgtctgggtttcaatgggtgatgaaaaggaaaaagaaaaaagagagcaattatttaaagaatatcaaataaacccattagtgatggacaaagctagtgaaaaagcaatatttttgcactgccttcctgcgataagaggacaagaaatatccgaagaacttcttgaagataagagaagtaaagtctggactcaagcagagaatagactgcattcccaaaaagctttgctggttgaactattaaagtag

SEQ ID NO: 230634 - DNA, 928 bp, Unknown
  Bacterial polypeptide expressing nucleotide sequence isolated from the Sargasso Sea
gatgccacaaaaacgcgatttcatctcaatcatggactggagttcagaagaacttatcaacaacctcgaactggccctagaactcaagaaaaaaacacgcgagggacaatgccccaaagaactcgagggacgttcctatgggatgatcttccacaaagactcactccgcacccgggtctcctgtgaggttgccatcttccagctcggaggtcatgtcctgaccatgtccgaaaaggattttcagatgggcaaacgggagtcagtgcaggatgtcgccaaggtgctctcacgttacctggatggaatcctgatccggaccttttctcatcaggtggtgttggaactggcggaacatgccgaagttccggtctgtaacctgcttaccgacttcaaccatccctgccaactgatggcggatgcgcttaccatcctcgagaaattcggacgacttgaaaacatcaaggtttgctaccttggagactgtaacaacgtcaccaactcatggctcaaccttgccagccggattcccctcgatctgaggattgccacttcaaaggagaccctgcctccagaacatctggtgaaacaggtccaggatgccggactttccaaactcagtatttaccacgaggctgcggaagcggttcaggatgcccaggtgctctacaccgacgtctgggccagcatgggagaaaaagaaaaaatcaaggaacgcgaacagttgctatttggctttcaaatcaatcgggatttgttaaacttatcaaatcccgactccctcgttatgcattgtcttccggcgaaccgggaacgtgaaatcacggccgaggtgatggatggtccgcgttccatcgtctacgaccaggcggaaaaccgtcttcatgcccaaaaggcgatcctggcgcagttggaacgctggcgtaactaa

SEQ ID NO: 230635 - DNA, 928 bp, Unknown
  Bacterial polypeptide expressing nucleotide sequence isolated from the Sargasso Sea
atgccacaaaaacgcgatttcatctcaatcatggactggagttcagaagaacttatcaacaacctcgaactggccctagaactcaagaaaaaaacacgcgagggacaatgcccgaaagaactcgaaggacgttcctacgggatgatcttccacaaggactcactccgcacccgggtctcctgcgaggttgccatcttccagcttgggggtcatgtcctgaccatgtccgagaaggattttcaaatgggcaaacgggagtcggtgaaggacgtcgccaaggtgctctcacgttacctggatggaatcctgatccggaccttttcgcatcaggtggtgctggatcttgcggaacatgccgaagttccggtctgtaacctgcttaccgacttcaaccatccatgccagttgatggcggatgcgctcaccatccttgagaaattcggacgacttgaaaacatcaaggtatgctaccttggagactgtaacaacgtcaccaactcatggctcaaccttgccagccggattcccctcgacctgaggattgccacttcgaaggagaccctgcctccggagcatcttgtgaagcaggtccaggatgccgggctttccaaactcagcatttaccacgaggctgcggaagcggttcaggatgcccaggttctttacaccgacgtctgggccagcatgggagaaaaagaaaaaaccaaggaacgtgaaaaattgctatttggctttcaaatcaatcgggatttgttaaatttttctaaactcgactccctcgttatgcattgtcttccagcgaaccgggaacgtgaaattacggccgaggtgatggatggcccacgttctatcgtctacgaccaggcggaaaaccgtctgcatgcccaaaaggcgatcctggcgcagttggaacgatggcgtaactaac

SEQ ID NO: 230636 - DNA, 928 bp, Unknown
  Bacterial polypeptide expressing nucleotide sequence isolated from the Sargasso Sea
aatgaaaaactttataaatatctctgactgttcttcagtagagcttaaagcgattattgaagaagccaaaaagagaaaacaaaatagatctggattaaataaatctgctcctgataaagataagccttttgaaggtagatcgatggctatgatttttgaaaaaccatctactagaacaagaatgtcattcgacattgctgttaaacaattaggcggatcatcaattatcttaaatccagatggaatacattacggcaagggagatgagactttaaaagatactgcgaaagttttgtcagagtatgttgatatcgttatgttgagaacctcatctcacaaaaatttagaggagtttggaaaacatttaaacatcccaattatcaatggcctttccgatctaagccatccatgtcaaatcatgtctgatattcttacctatgaggaaagcaatggttctattgaagataaaactgtttcttggattggtgatggtaataataatatgtcaaattctctaattgaggctgcgggtaaatttaattttaaactcaaaattggttgtccaaaaaaatattctcctaataagagtattttaaagttagctaaaaaagagagaataaaattaacaattacctcaaaaccattagaagcagtagagggcgctgattgtgtaatgactgataaatggatctcaatgaatgataaagtaaataaagcctctaaaaagaaaattttaaaaccttatcaagttaataagaaattaatgagcaaggcaaattcagatgctatttttatgcactgtcttccggtgggaagaggcgaagaagttacgaatgaagtgatagatggtaagcaatcagtggtttggagacaagctttgaatagagttcacgctcaaaaaagtattattaaatggtgtcttgattaa

SEQ ID NO: 230637 - DNA, 928 bp, Unknown
  Bacterial polypeptide expressing nucleotide sequence isolated from the Sargasso Sea
aatgaaaaactttataaatatctctgactgttcttcagtagagcttagagcgattattgaagaagcaaagaagagaaaacaaaatagatctggattaaataaatctgcgcctgatgaagataagccctttgaaggtaagtcgatggctatgatttttgagaaaccctcaacaagaacaagaatgtcatttgacattgctgttaaacaattaggcggatcttcaattattttgaatccagatggcatacattacggcaagggagaggaaactttaaaagatacagctaaagttctatcggagtatgtcgatattgttatgttgagaacttcatctcacaaaaatttagaggagttcggaaagcatttagatgtccctattattaatggcctttcagatttgagccatccatgccagattatgtctgacattcttacttatgaggaaagcaacggttctatcgagggtaaaactgtttcttggattggagatggtaataataacatgtcaaattccttaatagaagctgcagggaaatttaattttaaacttaatattggctgtccaaaaaaatattctccaaataagagtatattgaagctagcgaaaaaggagaaagtaaaattaacaattacttcaaaacctttagaagcagctacaggcgctgattgtgtaatgactgacaaatgggtttcaatgaatgataaagtaaataaagtttctaaaaagaaaactttaaaaccttaccaggttaataagaaattaatgagcaaagctaattcagatgctgtttttatgcactgtcttccagtcggaagaggggaagaggttacaaatgaagtaatagatggaaagcaatcagttgtttggagacaggcgctaaacagagtgcatgctcaaaaaagtattatcaaatggtgtctcgattag

SEQ ID NO: 230638 - DNA, 919 bp, Unknown
  Bacterial polypeptide expressing nucleotide sequence isolated from the Sargasso Sea
atgaaaaaagatttcatccatgtgacggattttgataaaaaagaaatttatgattttttagattttgccgttgaattaaaaaaacgcgttaaacaaagtaacgactataaacctttttcaggtaaatctcttgcgatgatttttgctaaaccatctgcaaggactcgcgtatcttttgaaactggtttttttcgattaggtgggcacgcgctttatttaggtcctaatgatattggtattggaaaaagagaagctgttaaagatattgcaagagttttaagtaggtacaatgatatgatcatggcacgactctttgatcataaacatatgcttgagcttgcccaaaattcatctgtacctgtgataaatggattgactgattataaccacccatgccaaataatggcggatattttaacagtctatgagcatctaaacaatcttgataatattaaaattgtttatgttggagatggaaataatatagtgcactcttggttaaggcttgcatcagtgatacctatacattttacatgtttatgccctgaaggttatgagcctgatcaagaaactattaatcttgccaaggaatcatcatcttcaactattgaaataactaatgatacaatcaatggtgctcatggagccgacataatttatacagatgtatgggcgtcaatggggcaaaaagatcaagctgagtctagaactaagatcttcaaaaattttcaagttaattcaaagatgatggattcaacaaaaaaagatacactatttatgcattgtttgcccgcagagagaggaaatgaagtaacagatgaagttatggagtcttcaaactctatcgtttttgatcaagctgagaatagaatgcatgctcaaaatgcaataatggtaaaaattttagataaatcttaga

SEQ ID NO: 230639 - DNA, 652 bp, Unknown
  Bacterial polypeptide expressing nucleotide sequence isolated from the Sargasso Sea
catggcttttaatctgcgtaaccgtaacttcctgaaactgctggacttcaccccgcgcgaaatccaatacatgatcgatctggccatcgacctgaagaaagccaaatacggtggctatgagcgtaaacacctgaccggcaaaaacattgccctgatcttcgagaagacctccacccgtacccgttgtgcgtttgaagtggcagccttcgaccagggtgcgcaagtctcctacctcggcccaagcggttcccagatcggtcacaaggagtccatgaaggacaccgcccgggtactgggtcgcatgtatgacggcatcgaataccgtggctacggtcaggagatcgtggaagagctgggtgcctacgccggtgtaccggtctggaacggcctgactaacgaattccacccgacccagatcctggccgacttcatgaccatgctggagcacggcaagggcaaacgtctggatcaaatcaagttcgcctacctgggtgatgcccgcaacaacatgggcaactccctgatggtcggtgccgccaagatgggcatggacatccgcctggttgcgccgaaagccttctggccggaagaagagctggttgccaagtgccgcctgatcgccgaagagaccggcgcacgcatcaccctgacc

SEQ ID NO: 230640 - DNA, 931 bp, Unknown
  Bacterial polypeptide expressing nucleotide sequence isolated from the Sargasso Sea
atgaccaccaaaaccattcgtcactacctgcagttcaaggatttctcgctggaagactacgagtacgtgctcgaacgcacgggtatcctgaagcgcaagttcaagaactacgagacctaccacccgctgcacgaccgcacgctcgcgatgatcttcgagaagagctcgacgcgaacgcgcctgtcgttcgaggccgggatcttccagctcggcggccacgccgtcttcatgagcacgcgcgacacgcaactcggccgcggcgaacccgtcgaggattccgcgcaggtcatctcgcgcatggtcgacatcatcatgatccgcacgttcgagcaggacgtgatcacgcgcttcgcgcagaattcccgcgtgccggtgatcaacggcctgacgaacgagtaccacccgtgccaggtgctcgccgacatcttcacgtactacgagcaccgcggcccgatcgccggcaagaccgttgcctgggtcggcgatgcgaacaacatgctctacacgtggatcgaagccgcacagatcctcggcttcaagctgcgcctgtccacgccgccgggctacgcgctcgacatgaagctcgtgtcgcccgacagcgcgccgttctacgaagtgttcgacgatccgaacgaagcctgcaagggcgccgacctcgtcaccaccgacgtgtggacgagcatgggcttcgaggccgagaacgaggcccgcatgcaggcattcgccgactggtgcgtcgacgaggaaatgatgggccatgcgaacccggacgccctcttcatgcattgcctgcccgcgcatcgcggcgaggaagtgacggccggcgtgatcgacggcccgcagagcgtcgtgtgggacgaagcggaaaaccgcctgcacgtgcagaaggcgctgatggagttcctgctgctcggccgcctcaagcactgac

SEQ ID NO: 230641 - DNA, 922 bp, Unknown
  Bacterial polypeptide expressing nucleotide sequence isolated from the Sargasso Sea
tatgaataaaaaaccccacaatgtcgatatactcacattagatgaattagagtccaaggaaattaataatataattgatttagcaatagacttgaaaaaagaactaaaaaaaggaaaagaaaaaccgcttttacaaaataaaactttagcaatgatatttgaaaaaccttctactcgaacacgtgtaagttttgaaacaggaatgttccaacttggaggtcatgcacttacattatctccaaatgatcttcaattatctcgtggtgaatctattgctgataccgcaaggacactttctcgttatgtgaatgtagtaatggctcgtgtttatgatcataaatctctagaaacttttgcaaggaattcttctatacctgtaattaatggattatctgattcatatcatccatgtcaaatacttgcagatcttatgacaattaaagaacataaaaaaaatctaaagaaaataaaaattgcttggataggagatggaaataatgtttgtaactctttgatattaggatgtgcaaaactaaagatacaactctctgttgcaattcctgatggctatgaacctgaatttgatgttattaaaattggtaaagaagcagaaattctagaagtttctgataatcctgaaacagcagtacaagatgcagatgttgtcatgactgatacatttgtttcaattcataacactagttctgatcgcgtcaaaaaattccttccaaaattccaagtcaaccaagctttaatgaataaggccaaaaaggatgccatcttcatgcattgtctccctgcaaaacgtgatcaagaagtaacttctgatgttattgatggttctcaatctgtagtttgggatgaagctgaaaatcgtttacatgtccaaaaagcattgttagttcaccttcttggcgtctaa

SEQ ID NO: 230642 - DNA, 523 bp, Unknown
  Bacterial polypeptide expressing nucleotide sequence isolated from the Sargasso Sea
cacccgtgccaaataatggctgacattttaacttttgaggaatctaaaggtgatataaacggaaaaacgattgcatggcttggagatggaaataatgtagcgaattcttttattgaagctgcaaccaagtttaaatttgagtttaaaattgcttgtccaaaaaaataccagccaaataaaaaaatagtaagtgaagcaaaaaaaaataattgtaaacttttagttactgaagatcctttcgaagctgccgaaggcgcagattgtgtaatgactgacaaatggatatctatgagtgataaaggcgacaaaaagaaaaaaaagaaaattttaaaaaagtttcaggttaataaaaagctaatgaactcagcaaaaacagatgcaatatttatgcactgtcttccggcaagtaggggtgaagaggttactaacgatgttatggatggaaaacaatcagtagtttggttacaagcttttaatagaattcatgcccagaagagtataattgaatggtgtttaaaataat

SEQ ID NO: 230643 - DNA, 922 bp, Unknown
  Bacterial polypeptide expressing nucleotide sequence isolated from the Sargasso Sea
tatgcctaaacactttttacatctttctgattatactagcgatgagctttgggacttattgaagcttgctaaagaattgaaaaccaagtttaaaaataaagagacttataagccttttgatggcaagtctttagcaatgatcttcgctaaaccttcagctcgaacacgtgtttcctttgaaactggttttgaatggatgggcggtcatgctttatttttaggaccaaatgatattggcataggtaagcgagaggccataaaggatatttcacgagtttttagtcgatataatgacatgatcatggcaagactttttgatcataaacatattgttgaacttgcaaaatattcaaatattcctgtaattaatgggctaactgattataatcatccatgtcaaatattagctgatatattgaccgtttgggaacacagaggtagtcttgataatttaaagatcacttacgttggagatggtaataatattgtgcattcctggttacaattagcaactagattgcctatgcattttgtttgttgtagtcctgatggatatgaaccagatgctaaaacggtaaatatgttagaaaactcaggaatatcatcttttgaattatctcaagagcctcgttcagcggttaaggatactgatgttatatacactgatgtttgggcatcaatggggcaaaaagaagaagctgaagcaagagagaaggcatttgctgccttccaggttaatgaagaactaaccaagcaaactgggaaagaaacgctttttatgcattgtttgccggcggaaagaggtagagaggtaacagacgaggttatggaagctaattattctattgtatttgatcaagcagagaatagaatgcatgctcagaatgcaataatggtttatcttcagagtctaattaattag

SEQ ID NO: 230644 - DNA, 910 bp, Unknown
  Bacterial polypeptide expressing nucleotide sequence isolated from the Sargasso Sea
aatgaaacattttattgaaattaacgatttctccaaagaggagattttaaaatgcatcgatgatgccataagactaaagaaaaaaagtagtcatcttagttctattgcttcaggtaaagttcttgctatgatttttgagaagaaatcaacacgaactaggctttcatttgatgttgctataaggcaattaggggggtcatcaattgtattagacattggtgatatccatttaggtgctggcaatgagagcttatctgatacatcaaaaactattgcattgtatgttgatgcattagttgtcagagtaaacaatcataaaaatattgttgaaatggctagaaactcatcaattcctataattaatggtctatcaaatatatctcacccttgtcaagttatggcagatttaatgactattaaagaagaaaagaagagtttagatcatttggatttagtttggataggtcctataacaaatgtagctcattcatggatagaggcatacaataaaaaattgggattttctcttacaatctgttgtccagagtctttacagcggaagtatgaagaaaaatgcaaacttcataatattaattttaataacgatatatttgtttctgatacatctaaagatattttaggtaaagcagatgtaattattactgacacatgggagtcaatgggagagaaggttgataaagaagagctgcaagagcttaagaagtttacagtttcacaatctataatggagatggctccatcagaatgtttattcatgcactgcttgcctgctaatcgtaatcaagaggttgaggcaaaagtaattgatggtccatcatcaagggtttggcaagaggctgaaaacagacttcatattcaaaagcagattttaattgagtgttttaattaa

SEQ ID NO: 230645 - DNA, 289 bp, Unknown
  Bacterial polypeptide expressing nucleotide sequence isolated from the Sargasso Sea
gatgtattttttcatgggtgaagaacatttagaagataaaatgaaggctttttcaggatttcaagtaaatgaagaactagtctcaaatgcaaaagaagattatattttcatgcattgtttaccagcccatcgaggtgaagaagttacggattcagttatagattctaataatagtgtagtttttcaacaagcagaaaataggatgtggtcgcaaatgtcaatgttaacttacttagtaaatcgccctgcatgggatacttattctgaattacttgaaattaattattag

SEQ ID NO: 230646 - DNA, 883 bp, Unknown
  Bacterial polypeptide expressing nucleotide sequence isolated from the Sargasso Sea
atgaaacactttattgatatttctgattttaatagtaaacaacttaatgcaataataaaaaaagcaaaacatctaaaaaaaaatccaaataaagtctcaaataagtgtcaccacaaaactcttggcatgattttccagaaagaatctacaagaacaagggtaagttttaatgttggaattaataaaatgggcggtaattgcattgagcttaatgctaattcaatcgggtttggaaaaagggaaagtcatgaagatgttcttagaacattatcgcaatatattgatattttaatgattagaaatgatgatcataatatcataaaaaatctaagcgccttgaaattaattccaataattaatggtctttctgattatagtcatccttgtcaaatcttatcagatcttttgacaataactgaaaaacttggagatataaaaaatcaaaaaatttgctgggttggagattataataatgttctgagatctcttatagagcttcaatatatctataattttaaacttaatattgttttgccaaaagagattataaaaaaaaataaaatgaaaataattaaaaataataatttaaatataacaaatgtgatccaagatggagttaaaagtgctaattgtgtaatgacagacgcctgggtatcaatgggagaaagtttatcaaaaaaaaaatactttaaaaattatcaagttaacagtgatataatgaaaaatgccaatagagatgctatatttatgcattgtcttcccgcacatagaagcgaagaagtttcttccgaattacttgatagtaaacagtcagttgtgtgggagcaggcacaaaatagaatgtttgttcaacaagcaattatattagaattattatcatgaa

SEQ ID NO: 230647 - DNA, 919 bp, Unknown
  Bacterial polypeptide expressing nucleotide sequence isolated from the Sargasso Sea
atgactgaaacaaaaaaagatttcattgatcttacccaattcaataaggatgaacttattttcttaattgaagatggaataaacaaaaagaacatgtcatcgaagaatggtatggcatctgttgatgaagatgcatgcgcaaaaaataaaatactagcaacaatttttgaaaaaccttctacaagaacaagattttcatttgaaacagcaatgtatcaattaggtgggaaaactatttatgcaaatatgtctgatatgcaattaggtagaggagaaacaattgatgatactgcaaaagtcatttcaagatatgttgatattgcaatgttaagaacaaataagcattcgactttagaaaattttgcaaaaaatgcatcaatacctgtaattaacgggttaaccgataaatcccatccctgccaagttttagctgatttaattacagttaaagagaagattggtgatatcgaaaataagagttatgtatggtttggtcctgcaaataatatgttaacaagttggatacatgccgcacaaattattggttttgaattaagaatatgttcaccaaaagattattcagtagataataatttggtaagtggttttccaaatataactactgatctagatcctaatgatgctgccaaagattgtgattgtataattactgatacttggttctctatgggagaagatgataatgatcaaaaaagaaaaattcttgaaccgtataaagtagattctaacaaaatctcgatggcatcttcagatgcaatttttcttcattgtttacctgctcatagaggagaggaagttgacgctgatgttattgatggagtcaattcagtagtttgggatgaagcagaaaatagggttcacgcacaaaaaagtattattaggtggtgcttgagttaag

SEQ ID NO: 230648 - DNA, 775 bp, Unknown
  Bacterial polypeptide expressing nucleotide sequence isolated from the Sargasso Sea
catgaccgccaagaaaattcgccactacctgcagttcaaggatttctcgctggacgactacgagtacgtactggaacgcgcgcgcattctcaaacgcaagttcaagaactacgagacgtaccatccgctgcacgaccgcacgctggcgatgatcttcgagaaaaattcgacgcgcacgcgcctgtcgttcgaagccggcatcttccagctaggcggccacgccgtcttcatgagtacgcgcgacacgcagcttggccgcggcgaaccgattgaagacgcggcgcaggtgatctcgcgcatggtcgacatcatcatgatccgcacgttcggccaggacattcttcagcgcttcgccgagaattcccgcgtgccggtgatcaatgggctgaccaacgaatatcacccgtgccaggtgctggcggacatcttcacgtatttcgagcatcgcggtccgattcgcggcaagacggtcgcatgggtcggcgacgccaacaacatgctgtacacgtggatcgaagccgcgcagattctcggtttcaagctgcgcctgtccacgccgccgggctacaaactcgaccacgcgatggtcgcgccggaaagcgccccgttctatcaggaattcgacgatccgaacgaggcttgcaccggtgccgatctggtcaccaccgacgtgtggaccagcatgggcttcgaggccgaaaacgaagcccgcaagaaagccttcgcggactggtgcgtagacgccgacatgatggcgcgcgccaattccgacgca

SEQ ID NO: 230649 - DNA, 268 bp, Unknown
  Bacterial polypeptide expressing nucleotide sequence isolated from the Sargasso Sea
tatgaacaaaaaaccacataatgtgaatatcttaactcttgatgagcttgattctaaagagattaatcatattattgatcttgcaattgatttgaaaaaacaacaaaaaaaagacaaagaaaaaccgcttttacaaaataaaacacttgcaatgatatttgaaaaaccttctacacgaacacgtgtaagctttgaaaccggaatgtttcagttaggcggtcacgcacttaccttgtctccaaacgatctacaattatctcgtggggaa

SEQ ID NO: 230650 - DNA, 640 bp, Unknown
  Bacterial polypeptide expressing nucleotide sequence isolated from the Sargasso Sea
catgctaaaaccaaataagcttgctaataataacttcctatcaagcttggatttatcaactgatgaggttttgcatattctagatcttgcaaataattttaaaaataaaaaattaaatattgatcttggcaataaagttttaggattaatatttgataaatcatcaactcggacaagagttagttttcaagtggccatgtcaaggcttggtggaaccactattgacctgaatcctaagacttcacaaataggaagaggagagccaattaaagatactgcaagagttcttagcagatattgcgatgttattgcaattagaacttttgatcatttagatttgcaagaatactcaaaatggtctacgaaaccagttattaatgctctcacagatttagaacatccatgtcaggcgctagctgattttttaactattcatgaggaatttcttgattttaaagatttagttttgacttttataggggatggcaataatgttgcaaattctcttattttatgtggtgcattattaggagtagaagttagaattgcaacccctagaggttatgagcctaactctttggtgattaataaagcatatgaaatatataaaaataagaatttattgaaaatcactaatgat

SEQ ID NO: 230651 - DNA, 907 bp, Unknown
  Bacterial polypeptide expressing nucleotide sequence isolated from the Sargasso Sea
atgccaaaacgggattttctctctttatcagatttttccagagaagagctagacgctctattactcagagctatcgagctaaaagaggaacggtcttcaaatgctattcataattccctcgcaggaaagactggcattttaattcttgcccaaaatagcaccagaaccagaattgcatttgaagctggaatgaatcaactcggcgggcattcgatttttctgagcgacagagacagtcaagcaagtcgaggagaacccctagaggattttgctagggtggtttccgaaatggccgacgtggttatgaccaggcatccggaacaaagccgcatcgagttgctcgcgaagcatgcatcaataccggtaatcaatggaatgagctcagacctgcatccctgccaattactggctgacatgcagacctttatagaactgaaaggctccattgaaggccgttctgtggccttcatcggtgacgggttcaatatgtgtaattcatatatcgaagcttcggagatattccagttcaaattgaatattgcgtcaccgaaagggtttgagcccgctccatcctttcttagaaggggtaacaacgtcgagctatacggttctgccgaggacgctgtgaatggcgttgatctggttgtaactgacgtatggtcgtccatgggccaaaccaacaaagacaacgataaagctgaccttttccaaccctatcaggttaacgaacaattactagaactctcggatgaagaagcgatttttatgcactgcctacctgcccaccgaggagaagaaatcagcgctggcttactagatcataaaaagtcagtagtatggcaggaagcagggaaccggcttcacactcaaaaggcattgctagagtttttgctgaaacccgtgtgag

SEQ ID NO: 230652 - DNA, 937 bp, Unknown
  Bacterial polypeptide expressing nucleotide sequence isolated from the Sargasso Sea
ttgttaagcatgaagaattttttaaacataaacgatatgtctatccaagaccttacaggcatactcgagcaagccaaattgatgaagaacgccaggattggtctgccaaaaggagcatacgacgaaggccaaccattaagtcagcatattgttgctctagtctttgaaaaaccttccaccagaacaagaacgagctttgatgttggtgttcgacaactaggaggtcaaccgatgctactttccggggcagaaatgcatcttggacacggcgagactatatccgatacggcccgcgttttaagtcgttacgtggatttaattatgttgagaacatttgaaagccaaacgttatacgagatggctaactattcaacagtacctgttgttaatggtttgactaacgaaagtcacccttgccaaataatggctgatataatgacatttgaggaaaaacgtggatcaataacaggtaaaaaagtagtttggtttggtgatggcaataacgtttttaatagctttttgcaggctgctgaaaaatttaatttttcactcgttttttcagggccaaaagaattagacccatcaaaaaatttaatccaaaacgcaaaacgtcttggagcttattttaaaattgatagagatccaacatcagcaataaaagacgcagaccttatagctactgatacttgggtaagtatgcatgataatccagaggtgaaacaagaaagacataatctacttaaaccatttcaggtaaatgaggaactaatgtctaaagcaagtgaggatgctctatttatgcattgtttgccagctcacagaaacgaggaggcaacttctggtgttatggacggaaaaaactccgttatatttgacgaagcggaaaatcgtctgcatgtgcaaaaggccataatgcgttggtgcctatcaaaatagt

SEQ ID NO: 230653 - DNA, 556 bp, Unknown
  Bacterial polypeptide expressing nucleotide sequence isolated from the Sargasso Sea
catggcaagactttttgatcataaacatattgttgaacttgcaaaatattcaaatattcctgtaattaatgggctaactgattataatcatccatgtcaaatattggctgatatattgaccgtttgggaacacaggggtagccttgataatttaaagatcacttacgttggagatggtaataatattgttcattcctggttgcaattagcaaccagattgcctcttcattttgtttgttgtagtcctgatggatatgaaccagatgctaaaacggtaaatatgttagaaaactcaggaatatcatcttttgaattatctcaagaacctcgttcagcggttaaggatactgatgttatatacactgatgtttgggcatcaatggggcaaaaagaagaagctgaagcaagagagaaggcatttgctggcttccaggttaatcaagaactaaccaagcaaactgggaaagaaacgctttttatgcattgtttgccggcggaaagaggtagagaggtaacagatgaggttatggaagcaaattattctattgtattttga

SEQ ID NO: 230654 - DNA, 647 bp, Unknown
  Bacterial polypeptide expressing nucleotide sequence isolated from the Sargasso Sea
gatgaataaaaacttcttatcaatagacgattgggataacaaaacacataaagaattcttatatttaactaatgaaattaaagaagggaaatataataaagttttatctgaaaaaaacattagcttagtatttgaaaaagcatctctaaggacacgtgtgtcatttgaagtaggtattaaaaaattaggaggaaatacaatttatcttaacaacgatgacatcggattaggcaaaagagaaagtattactcatatagcaaaaaatctaaatagatgggttgatggaattgtagcaagagtatatttacactcaacattaattaatttcacacaaaatacagatgtacctgtaattaacgctctttcagatcttgagcatccatgccaagcactagcagatatgtatacaatttataaccaattttcaaagtttcaagatttaaattttgtttatgttggcgatggaaataatattgcagcaagtttatcattaattgcagctaaattaggattaaattttacatactcttctcccaaaaaatatcaaattcctacagcaatttttaataaagcaaaagatatagcaagcataagtgagtctcaaatgaattggattgaaaacccaagaaaatgcagtcaaaaatgca

SEQ ID NO: 230655 - DNA, 916 bp, Unknown
  Bacterial polypeptide expressing nucleotide sequence isolated from the Sargasso Sea
atgagaagttttactgatatcaaagatctttctaaatcggatattgaagctatcttatttcgaacaaagcaagaaaaaaaagttattgccgaaaaaggtagtttagatattgaaaaaattttattaggtaaaactgttgctcttattttcgaaaaaccttcaactcgaacaagagtatcttttgaggttggaattagccaattaggcggctactcatcagttttacaagcttctgatattcagttaagtaggggtgagtcaatttcagatactgcaagagttttatctaggtacgtagatttaattattataaggtgctttgaacatcaaatgatgattgatttagcaaaaaattcttctgttcctgtgattaatggtttgacagatcagtcccacccctgtcaggtgatggctgatatacttacaatagaagagaataaaggatctttgttaaatcaaaatattttatggattggtgatggtaataatgtttctaggagttgggtagaggcatcttctctttataatttccaaattacattatgtactcccaaagagttatcgctcccaatcaaacttattgaaaactctattgctaagggagctaatattacaattgattacgaacctgagagcgcaatcaataataaagatgtcattattactgatacttggtcttcaatgggagataactctatagataaagaaaactccttgaaaccttatcaggtaaatagagaattgataaaaaaagcaagaaaagatgcagtttttatgcattgtcttccagcacacaggggtaaggaagttaccaatgaagttatagatagtaatcaatcacttgtgtttgcaggtgctgaaaataggatgcacgttcagagatctattatttggtggtgtctaaaaaatgattgaa

SEQ ID NO: 230656 - DNA, 907 bp, Unknown
  Bacterial polypeptide expressing nucleotide sequence isolated from the Sargasso Sea
tatgaagcatttactatcgataaaagagttaacccagcagcagttgctggatctgattaccttggccaagacgattaaagcgaatcccgcagaatatcgccatgcactggacggtaagagtgtggtgatgttatttgaaaagccatctctgcgtactcgtgttagcttcgatatcggtattaataagctcggtggccactgtttatacctagaccagcaaaatggtgccttaggtaagcgggaatcggtcgctgactttgcttctaacctgtcctgttgggccgatgccattgtggcgagaacgttctcccacacgactatcgaacaattagctaagtttggtagtgtgcccgtgattaatgcactttcggatttataccatccttgccaagctttagccgattttttaaccttggccgagcattttgaaaatatcagtgatgctaagttagcgtatgtgggtgatggtaataacgttactaactcattgatgtattgcgcggccattctcggtgccaccatgacagtgatctgccctgcgggtcactttcctgatggctacgttgtggccgaagtgcaagagctcgcgagccgatatggcggcaaggttgtactgacttcagatattgatgcgattgaaggtcacgatgctatctatactgatacttggatttccatgggagatccaacaccgttagcggaaattaaggataagtttacaccttatcaggtcaataaggccttgatggcgaaagcgggtgctcacttctttatgcactgtttacccgctcaccgcggtgttgaagtgaccgatgaggtcatggatggcgaaggctccttgatcctgcaacaagctgagaatcggatgcacgcccaaaatgcagtactggtaaccctatttagttaa

SEQ ID NO: 230657 - DNA, 928 bp, Unknown
  Bacterial polypeptide expressing nucleotide sequence isolated from the Sargasso Sea
atgttaaaacctatcaagcttgcaagtaaaaattttttatcaagcttggatacctcatgtgaagaatttattcatatattagagttagcaaaaaatttaaaaaatagagatctaaatataaaactcaaagaaaaagttttagggttaatttttgataagtcatcaactcgtaccagagtaagtttccaggtggcaatgtcaagacttgggggcaccacagtcgacctaaatcctagtacttcacaaattgggaggggagaaccaattagagatacagcgagagttctaagtagatactgtgatgttcttgcgataagaacatttaaacaatctgatttggaagagtatgcaaaatggtcctctaagccagttattaatgctcttactgatttagaacatccatgtcaggctttagctgattttatgacaatcaaagaggaatttcttgactttaaagatgtagttttgacatttattggagacggtaataacgttgcaaattctcttattttatgtggcgccttattaggagtagaggttagaattgcatgtcctaaaggctatgagcctaactcgttgttaatcgataaagcatatgaaatatatagaaataagaatttgttgaaaattacaaatgatcccaatactgctgttttaggagcaaatgttctttatacagatgtttggtcatcaatgggtgaagaaaatcaaaaagatgagaaagaaaaagtttttaatggtttcactattaataatgatttagttagtaaggctgataaagatgcaattattcttcattgccttcctgcttatagatccaaagaaataactgatgaaatatttgaaagtcacaaaagtagaatttttgatcaagcggaaaatagattacatgctcaacaagcccttttatcttgcattcttcaataag

SEQ ID NO: 230658 - DNA, 928 bp, Unknown
  Bacterial polypeptide expressing nucleotide sequence isolated from the Sargasso Sea
atgaagaattttttaaatataagcgacacgcctatccaagaccttacaggcatactcgaacaagccaaaatgatgaagaacgccaggattggtctgccaaaaggagcacgtgacgaaggccaaccattaagtaagcatattgttgctctagtctttgaaaaaccctccaccagaacaagaacaagctttgacgtcggtgttcgacaactaggagggcaaccgatactactttcagggactgaaatgcaacttgggcaaggcgagactatatctgatacggcccgcgtattaagtcgttatgtggatttaattatgttgagaacatttgaaagccagacgttatatgagatggctaaatattcaacagtaccggttatcaatggattgactaacgaaagccatccttgccaaataatggctgatattatgacatttgaggaaaagcgtggatcgataaaaggtaaaaaggttgtttggttcggtgatggcaataacgtttttaatagctttttacaggctgctgaaaaatttaatttctcactcgttttttcgggaccaaaagaattagatccatcaaaaaatttaactgaaaataccaataatctaggaattaattttgaaatagatagggacccaatgtccgcaatcaaagacgcagacctaatagctactgatacctgggtaagcatgcatgataatccagagataaaacgagaaagacataatctactaaaaccatttcaagtaaacgaggaactaatgtctagagcaagtaaagatgctctatttatgcattgtttgccggctcacaggaatgaagaagcaacttcaagtgttatggacgggaaaaactcggttatatttgacgaagcggaaaatcgtctgcatgtgcaaaaagccataatgcgctggtgcctatcaaaatagt

SEQ ID NO: 230659 - DNA, 907 bp, Unknown
  Bacterial polypeptide expressing nucleotide sequence isolated from the Sargasso Sea
atgaagcacctgttgtcgataaaagagttatctcaaactcagttactggatattttagcattagctaaaaaaataaaagcgaacccagctgagtaccgtcgcgccttagatggaaaaagcgttgtgatgctttttgaaaaaccgtcactgcgcactcgagttagctttgatatcggcatcaataaattaggcggtcattgtttataccttgatcaacaaaatggtgctttaggtaagcgtgagtcggtagaagattttgccactaatatttcatgctgggcagacgctattgtggccagaacatattcgcacaccacaattgaaaagttagcaaaacatggcagtgtacctgttattaatgcattatctgacttgtatcatccatgccaagcgttagcggattttttatcattatcagagcagttcgatgatgtacgcaacgcaaagttggcctatgtgggcgacggtaataatgtgacacattcattgatttacggtgcggcgattttaggcttaactatgactgtgatttgtcctgaaggttatttccctgatgctctcgtggtaacagaagcacaatctatcgcagcaaaaaatggcggtaaattgattttatctgccgacatagatcagatagaaggtcacgatgctatttatactgatacttggatttcgatgggcgatgacacctcattaacagaaattaaagaacgttttagcccataccaagtcaatgcagagttaatggccaaagcgggtgctaaatactttatgcactgtttgcctgcacatcgtggcgtagaagtcaccgatgaagtgatggacggtgaaggttcattgattttacaccaggcagaaaaccgcatgcatgcgcaaaatgcagtgttggtaaccttattaagttagt

SEQ ID NO: 230660 - DNA, 592 bp, Unknown
  Bacterial polypeptide expressing nucleotide sequence isolated from the Sargasso Sea
tattattgaattagcagagttttcaaatgtacccgtaataaatggtttaactgattataatcatccttgtcaaataatggctgatatttttactattttcgaaaacagagataatttggatgacttgaagattgtttatgttggtgatgggaacaatattgttcactcatggattcatttagctacaagaataccattacattttacatgtatttgtcccgaaggttttgagcctgacaaagaagccatagactttattagtgaaagtgatagatcaacttttgaattaagtcacgatccaataaatgatgttgttggtgctgatattatttatactgatgtatgggcatcaatgggccaaaaagatgaattaaatgatcgcaaaaagatttttgcaccttttcaggtaaactcaaacatgcttaaatcaactggtaaaaaaactttatttatgcattgccttcctgctgaaagaggacgagaagtcacagataatgtaattgagtcaactaattcaattgtttttaatcaagctgaaaatagaatgcatatgcaaaatgcaattatggtaatgcttgctggtaagatgtaa

SEQ ID NO: 230661 - DNA, 247 bp, Unknown
  Bacterial polypeptide expressing nucleotide sequence isolated from the Sargasso Sea
tgccaacgaaaagaagccttgatgccttatcaagtaacatcagaccttgtggctaaaggaaagccggaagcacttttcatgcattgcctgccggcccatcgcggagaggaagtaaccggcaccgtcattgatggaccgcagtcagccgtttgggaccaggcggaaaacaggcttcatgcccaaaaggctattttgctctggtgccttcttggcgaaaagggtcttgagaaatattgccaggcctaga

SEQ ID NO: 230662 - DNA, 925 bp, Unknown
  Bacterial polypeptide expressing nucleotide sequence isolated from the Sargasso Sea
tatgaaaaattttataaatatatcggacttatcaagagatgaacttagatcaatcatagataaagcaaaaaaaagaaaatctgaaagaggaaaaaaacctcactcgcagccagatgaagatcaacctcttaatggaaaaactatgattatgatttttgaaaaaacatcgacaagaaccagaatatcatttgacttagcagttaaacaattaggaggttcatcaataattctaaatcaggacgaatttcattatggaaaaggtgatgaaaccataaaagatacagcaaaagttttatctcaatatgcagacattctaatgataagaacagatttacataaaaatgttgatgaatttaaaaaatatttagagattcctattatcaatggacttacagacaaaggtcatccctgccaagtgatgtctgacattcttactttcgaagagctgaaaggtgaaataaaaggaaaaactatagcttggattggtgatggaaacaatgtcgctaactcatttattgaggcagccacaagctttgaatttaaactaaatattgcttgtcccaaaaaatatcaaccagataaaaaaataattaattttgcgaaaaaaaataaatgtaaacttttaataactgataatcctcttaaagctgtcgagggagctgactgcataatgactgataaatggatttcaatgagcgataaaggtaacaaaaatactaagaaaaaagccttaagaaaatttcaagtaaataaaaaacttatgagttacgctaaaccagactctattttcatgcattgtttacccgcgagtagagatgaggaagttacgagtgatattatggatggaaaacaatcggttgtttggttacaggcatttaatagaattcacgctcagaaaagtataattgaatggtgttttaaataa

SEQ ID NO: 230663 - DNA, 817 bp, Unknown
  Bacterial polypeptide expressing nucleotide sequence isolated from the Sargasso Sea
catgacccgtcatttcctgaccctgaccgatctaactccagatgaactcggctacctgattcagcgcgccattgagctgaaaaccatgctgcgcaacggccagaaccatgagccattgaaaggcaaaacgctgggcatgattttcgaaaaatcatccacccgcacccgggtatcctttgaagtagcgatgacccattttggtggctccagcatctttctctcgccccgagacactcagctgggccggggtgaaccgattgaagattcagcacgggtactgtcacgcatggtcgatgcggtaatgatccgcacctttgaccacgccaccctgcaaacctttgccgaccactcggcggtacccgtgataaacgccctcacggatgacttccacccctgccagctactcgccgacatgcagacgtttgtagagcatcgcggcagcatccaaggcaagaaagtggtgtgggtcggtgatggcaacaacatgtgtgccagttacattaacgctgccaaccagtttgatttcgaattggtcatcagctgcccagacggcttcaccccagataacgacctgctgggccgctatccggagcgggtcagcttagaagcggacgtggccaccgccgtgcaaggcgctcatctggtagtgaccgatgtatgggcttccatgggccaggaagatgaacagcaaacccgccttaacgcgtttgagggttatcaagtcacccctgaactaatggacaaagccgatccggatgcgctgttcatgcactgcctgcccgcccaccgtggcgaagaagtcagccacgaaatgatg

SEQ ID NO: 230664 - DNA, 523 bp, Unknown
  Bacterial polypeptide expressing nucleotide sequence isolated from the Sargasso Sea
aatggaatatctgtcaaaaaatttcatcaatctacacgaactgaaaaaagccgatctgactcaaatactattatcagccgagcagttgaaagctgatcgaaattctgaaagagatttattagatggcaaatcatttatactcctatttgacaagccatcaacaagaactagaatttcatttgaacttgcgatatctgagcttggtgcttcatgtatttatctagatatgaaaactacacaacttggaagaggtgagactattagagatactgctaaagtattatcaagatacgtggatggaataataatccgaaatgctaatcatcaagacttgattgaattctccaaccactcaacaatatcaatcattaatgctcttaccaatgaaagtcatccttgccaaataatggctgatttaatgactttaaaagagtgctttgggacaattgatggccttaaagttgcatggattggagatggtaataacgttgcaaatacgtggatacaggctagtactttattt

SEQ ID NO: 230665 - DNA, 732 bp, Unknown
  Bacterial polypeptide expressing nucleotide sequence isolated from the Sargasso Sea
tttgccggatgacggcttcgccttatccggcctacataaggacattttcatgactgttaacctgaaaaatcgcaattttctcaaactgctggactacaccccgacggaaatccagtacctgatcgatctggctatcgagttaaaaacggcaaaaaaggccgggcgcgaaagacagacgctggtcggtaaaaatatcgcgctgatcttcgaaaaaacctcaacccgtacccgctgtgcctttgaagtcggcgctttcgatcaaggcgcacaggtgacctatctcggcccaagtggatcgcagatcggccataaagaatcaatgaaagatactgcccgcgtgctaggccgcatgtacgacggcattgaatatcgcggatacggccaggacattgtggaggaactggggcaatttgccggagttcctgtttggaatggactgacaaatgaatttcaccccacccaaatcctcgcggatctgatgaccatgctggaacacgcgccgggtaaaaccttgccggaactgagtttcgcttatctcggtgacgcccgcaataacatgggtaattcgctgatggttggcgcagcgaaaatggggatggatatccgtctggtcgcacctaaatccttctggcctgacgaggcactggttgccgaatgccgtgaaattgccagcgtgactggcgcacgcattacgctcacagaggatgttgaggaaggcgtatacgacgtcga

SEQ ID NO: 230666 - DNA, 183 bp, Unknown
  Bacterial polypeptide expressing nucleotide sequence isolated from the Sargasso Sea
ctgcccgcgttccacaaacgatgagaccaccatgggcaaggaaagtggctgacaaatatggcatgaaaggcctggaagtgaccgaggacgtgttcgaatccgagcacagcatcgtgttcgacgaggccgaaaaccggatgcacaccatcaaggcagtgatggttgctacgctgggcgactaag

SEQ ID NO: 230667 - DNA, 898 bp, Unknown
  Bacterial polypeptide expressing nucleotide sequence isolated from the Sargasso Sea
tatgagtaaaagaatacaacatttcctatctttaaaagatttatcatcagatgatcttattaaaataatatctagagcaattgagctgaaaaaagataaatttaaagaaggttatgagcctttgaaaaataagacacttgctttagtttttgataaatcatcaacaaggacaagagtgtcctttgaggtagctatgactcattttggaggcaatactttatttttgtcaccaagagatacgcaattaggcagaggcgaacctatcgaggatacagctaaagtaatttcaagtatggtggatttaattgcaattagaacacatgagcatagtgaaattgaattatttgcaaaaaattcttctgttccagtaattaacgggcttactgaaaaatttcatccgtgtcagttattggctgatatgatgacctatatcgaaaataaaggaagtatttctggaaaaaaagtttgttggattggcgatattaataatatgtgtaattcatacattaatgcctctaaaaagtttggttttgaactttcagtttcttgcccaaaagatattattgaaaagaaaaagccagttgacgaaattgattattatgaaaatccaattgatgctgcaaaaaaagctgatcttattgttacagatgtgtggacaagtatgggagatgaaaattcctcttctcatgataagaaattttccaattaccaagttaataattttataacaatgcatgccaataaagattatgtttttatgcattgcttgccagcacatattggtgaggaagtttcacaggaagtttttgaaagtaatcatagtgttgtgtggcaagaagcagaaaatagattgcatgcgcaaaaagcattaattgaatttttaatgaaaaaggaataa

SEQ ID NO: 230668 - DNA, 829 bp, Unknown
  Bacterial polypeptide expressing nucleotide sequence isolated from the Sargasso Sea
gctgaaaaaggacccgaccgggccgcaaaccgctgaactgatgcggttgcagaccatggtactgatttttgaaaaaacctccacgcgaacgcgcacatcgttcgaggttgcgtgtgcacaccttggaggctcttccatattcctgtcccctaccgacagccagatgagtcgaggcgaatcagtcagcgacacggcgcggatcgtttccagtatggctgatctgattgtgatgcgaacaagcgagcacagccgggtctgcaccatggccgaatattcttcggtgccggtgatcaatgcactctccgaggactttcatccgtgtcagctgctggctgatctccagacctttgtcgagcaccggggcgatatccagaacgcccgcaccgcattcattggggacggcagcagcaacgtgtgccaatcatggatcaatgccgcggccatgatggactttgaacttcgcgtcggcgcacccgagggttatcacccccagcgcgcgctcgtagaagcagcgggcgatcgctgccaggtcaccacctctgcacaagaggctgtttcagacgtggacctcgtgatcaccgatacctggacagggatgggccaggaaaatgaaaagacccagaggctcgatgcattgagtgactttcaggtcaatcagcagttgatggcgctcgcttccaaagatgctttgtttatgcattgccttcccgcctaccgaggacaggaagtcagcgctgacgtactggagggccctcaaagtgtggtctgggatgaggccgagaaccgcttgcacgcccagaaggcgttgatcgaactgctgatgacctga

SEQ ID NO: 230669 - DNA, 280 bp, Unknown
  Bacterial polypeptide expressing nucleotide sequence isolated from the Sargasso Sea
gatgctgcccaaagattgtgattgtataattactgatacttggttctctatgggagaagatgacaatgataagaaaagaaaaattcttgaaccgtatagagtagatgctaacaaaatctcgatggcatcttcagatgcaatttttcttcattgcttgcctgctcatagaggagaggaagttgacgccgatgttattgatggggtcaattcagtagtttgggatgaagcagaaaacagggttcacgctcaaaaaagtattattaggtggtgtttgagttaa

SEQ ID NO: 230670 - DNA, 913 bp, Unknown
  Bacterial polypeptide expressing nucleotide sequence isolated from the Sargasso Sea
aatgaataatcattttttacatattaatgatttttcatctgatgagttattagatataatgaatctagcaaaagatttaaaggaaaaatttcgcaatcgtgaaaattataaagttttttctaacagatctctagctatgatttttgctaagccttcagctagaactagaatatcattcgaaacagggtttgaatggctaggtggacatgcattatttcttggaccaaatgatattggtattggtaaaagagaagcaataaaagatattggaagattattaagtcgatataatgatttagttatggccagattatttgatcataaacatatgcttgatcttgcaagtagttcaagtattccagttattaatggtttaactgattataatcatccatgtcaaataatgagtgatttatttactatctgggaacacagggggtctttagatgatttaaaaatttcttacctgggtgatggaaataatattgtccattcttggctagaattaacacaaaaatttccaattgattttgtttgcgcatgtccagcaggatatgaaccagataaaaacactttggataaatcaactgaaatcgctttatcaaaaattactgtaacaaatgaccctcttgattcaattaataattctgatgttatttatactgatgtttgggcatctatgggtcagaaagaggaagtagcaattagagaagaaattttccaaccctttcaaataaatcatactataatgtcacaggcaggagaaaatgcaaagtttatgcattgtttacctgctgagagaggaagagaagtaactgatgaggtaatggaagctgattactcaattgtttttgatcaagctgagaaccgcttacatatacaaaatgcaattatggttaccctgttaaaataa

SEQ ID NO: 230671 - DNA, 934 bp, Unknown
  Bacterial polypeptide expressing nucleotide sequence isolated from the Sargasso Sea
atgttagagaattttttaacgggtctagaattagaccaacaaggcgcacttaatttattaaagctggcgcgtgatttaaaggcaaagccagaaaaatacagtcaagtactagcgggcaagtcagttgttacgctatttgaaaaacaaagcttacgtacgcgtttgtcgtttgatattggtattaatcgtttaggtggtcatgcggtttatttagatcagcaaaatggcgctatgggtgcacgtgaatctgtaaaagattttgcccttaacatttcaacatgggccgacggtattgttgcccgggtaaaccagcacagcacgttaaccacattaggtgagtactcttctgttcctgtggttaatagcttgtgtgacttgtatcacccgtgccaagcattggcagactttttaacgcttcaagaagtacatggcgatgtgagcgagcttaaagtagcttacctaggcgagggcaataatgtaactcattcacttatgttattagcggcaacgcttggtactgattttgtggcagtaacgccaaaaggcagctcgcctgattcgcaaattcttaaaaaagcagagcaaatagcagctatgaatggcgcatcagtaatggtgagtgaccgtgtagaagcggcggttggcgcaaacgttgtttacgccgatacatgggtgtctatgggcgatgatacgcctcttgagcaagttaaagaaaaatatatgccttatcagttaaaccaagcattgctagatcaaacaggggcgactacggtattacattgccaaccggcacaccgtgagtttgaaattacctctgaggtaatggatggcccagcatcaaaaattattcaacaagcagaaaatcgcatgcatgcgcaaaatgctctgctagttacattactaaatccaaattttgttaaggaacacctatgag

SEQ ID NO: 230672 - DNA, 426 bp, Unknown
  Bacterial polypeptide expressing nucleotide sequence isolated from the Sargasso Sea
gtcctgcaaataatatgttaacaagttggatacatgccgcacaaattattggttttgaattaagaatatgttcaccaaaagattattcagtagataataatttggtaagtggttttccaaatataactactgatctagatcctaatgatgctgccaaagattgtgattgtataattactgatacttggttctctatgggagaagatgataatgatcaaaaaagaaaaattcttgaaccgtataaagtagattctaacaaaatctcgatggcatcttcagatgcaatttttcttcattgtttacctgctcatagaggagaggaagttgacgctgatgttattgatggagtcaattcagtagtttgggatgaagcagaaaatagggttcacgcacaaaaaagtattattaggtggtgcttgagttaag

SEQ ID NO: 230673 - DNA, 559 bp, Unknown
  Bacterial polypeptide expressing nucleotide sequence isolated from the Sargasso Sea
atgaatcattttataaatatttcagaccttaataaagatgaattaagatcgatcatcgatagtgcaaagaaaaaaaaatctgaaagaggaaaaaaatctgcatcacaacctgataatgatcaaccacttcagggaaagaacatgattatgatttttgaaaaaacctctactagaacaagaatatcttttgatcttgctgtaaaacaattaggaggttcttcaattattcttaatcaagatgagattcattatgggaagggagatgaaacaattaaagacacagcaaaagttttatctcaatatgctgatattttaatgatcagaacagactcacacaaaaatgtgaatgagtttaaaaaatatttggatatcccaattataaatggactaactaacgagggccatccttgccaagttatgtcagatatactcacatttgaagaattaaaaggtgatattaaaaataaaactatagcttggataggtgatggaaataacgtctctgtttcttttatggaggcggcctcaaaatttgactttaatttaaatattgcttgcc

SEQ ID NO: 230674 - DNA, 466 bp, Unknown
  Bacterial polypeptide expressing nucleotide sequence isolated from the Sargasso Sea
gatggctaccgcttgtgcgggcgttgctgctgtcctgtctccgctgtgcggacgtgacttcctttcctcagcggattgttcggctgaggaaacagcagcgttgctggatctggctgcacaactgaagagcagtgatcgtcggatcgatctcgggaaccgtgtgctgggtctgatcttcagcaaggcctccacccgaacacgtgtgagctttcaggtggccatggcacgcctcggcggccagacggtggatctcaatccttctgtcacccagctcggccgcggcgagccgctggaagacacggctcgggttctgagccgttactgcgatgtgctggcgattcgcaccttcgcccagcaggaactggtggactacgcccactgggcctcggttccggtgatcaatgccctcactgatctggagcatccctgtcaggccctggccgacttcctcaccatgcaggaagcc

SEQ ID NO: 230675 - DNA, 883 bp, Unknown
  Bacterial polypeptide expressing nucleotide sequence isolated from the Sargasso Sea
tatgaataaacattttctagacctaaataatttttctaaagacgatattgatagaatcttaagcaattctctcgaaatgaagtccaaagagaaaaacttaaaaattttagagggcaaattcctaagtcttgtatttgaaaaatcttcaactagaactagagtttcgtttgaagttgcaatggcacaacttggtggcagagcatcctttctttcggtgaatgatctgcaaatgggacgaggtgaacctattgaggacacatcgaaagttttaagttctatggtagacggcatcgtactcagaacactggaacatgaaactcaaataaagtttgctgaaaattcatcagttccaataattaacggtttgagtgacagatctcatccatgtcaattactggcggatttacttacttattgtgaagaaaaaggatcaatagaaggaaaaaaagtagcttggtgtggagatttcaataatgtttgctttagttatgctcaggctgcggagttactaaatttcgaacttagtgttgcctgccctaaagaattttatccaaaggatatgaaaagctataaaaatgtgtcctttactcaatccatatctaaggccgtagaagccagtgacttggtctctacagatgtctgggtatcaatgggagatgaaagagaggcagaagaaagacaaaaattattttctgattaccaagttaatgaagaaattctcgaccatgccaaatcagatgttgtttttctgcactgccttcctgctataagaggtcaagaaatttcttataacttacttcaagatcctaggagttatgtatggaagcaagcagaaaatagactccatgctcaaaagggtctactggttgagcttttaaattaa

SEQ ID NO: 230676 - DNA, 943 bp, Unknown
  Bacterial polypeptide expressing nucleotide sequence isolated from the Sargasso Sea
atgagaggcagtgactcgaaaatcgaccttctagctattgatgatttatccgatagactctcggaaatcatcgattgggcaatcagaataaagaacgatgaagaggcactgtatgacttcaaacctctggatggaatgacaataggctcgatttacgagaagccgtcaacaaggactagggtatcattcgaggttggagttagtaggctaggaggccagcccctcacactacttgccggagacatccaactaggaactagtgagaccatagcagatactgctgctgttctctctaggtacatggactgcattacctacaggtgtttcgggcatggcgacgttgctgaactagccaaacattcaactgttccagtaatcaatgccctctctgatatgcatcacccttgtcaggctgcagctgatatgatgaccatagtagaaaactcggataaaatgaatggccatgttgcttgggtcggagacgggaacaatgtccttcatgatttggttcttgggtgtgcaactctgggatatgatgtcgttttcgcaacgccacaaggttttgagccagacgaatctgtgatttcaagggctttagaaatatctaagaaaacagggtcgaaaattgaaggagtcaatgatcctaaagaggctgttgagggagcaggcgcaatatacacagacgtttttgtttccatgggagaagagcacatgggtggaaagatggggtcattcgatggttttcaggtaaacgaagagttggtctcggatgctgatgatgattacatcttcatgcactgccttccggcgcacaggggagaagaggtaacagacggagtgatggactctcctaatagcgtagtttttgatcaggccgaaaacagaatgtgggcccaaatgtcgatactaactcttctgtgtaacgaagtcgcttggcagacct

SEQ ID NO: 230677 - DNA, 658 bp, Unknown
  Bacterial polypeptide expressing nucleotide sequence isolated from the Sargasso Sea
aaccataaaagatacagccaaggttctttctcaatacgcagatattttgatgataagaacagactcgcataatgatgttgatgaatttcaaaagcatttagatattcctattataaatggactaacagatctaagtcacccatgccaaataatggctgacattttaacttttgaagaagccaaaggcgatataaacgggaaaactattgcgtggctaggagacggaaataatgtatctaattcttttattgaggcagcaactaagtttaaatttgaacttaaaattgcttgtccaaaaaaatatcagccaaataaaaaaatagtaaatgaagcaaaaaaaaataattgtaaacttttaattacagaagatcctttcgaggctgctaaaggagctgactgcgtaatgaccgataaatggatatctatgagcgataaaggtgacaaaaagaaaaaaaagaaaattttaaaaaagtttcaggttaataaaaagttaatgaactcagcaaaaacagatgcaatatttatgcactgtcttccagcaagtagagacgaagaggttactagtgaagtaatggacggaaaacaatctgtagtttggttacaagcctttaacagaatacatgctcaaaaaagcataattgagtggtgtttaaaataa

SEQ ID NO: 230678 - DNA, 850 bp, Unknown
  Bacterial polypeptide expressing nucleotide sequence isolated from the Sargasso Sea
attaaatagaaaaaatttaaacaaatctgcacctgacgaagataaaccttttgaaggaaaatcgatggcgatgatttttgaaaaaccttctacaagaacaagaatgtcttttgatattgccgttaaacaacttggaggatcttctattatattaaatccagatggtattcattatggaaaaggcgatgaaactttaaaggatactgcaaaagtattaacagagtacgtagatattgttatgctaagaacatcttctcataaaaatttggaagaatttggaaagcatttagatattccaattattaatggactttcagatcaaagccatccttgccagattatgtctgatattcttacttttgaggaaactaaaggatcaattgaaggcaaaactatttcttggttgggagatggcaataataacatgtcgaattctttaatagaggccgcaggtaaatttggttttcaattaaaaattggatgtcctggaaaatatacgccaaataaaaaaatattaaattgggcgaaaaaaaataaagtgaatcttttagtaacaaaaaaacctgaagaagcggtcaaaggctctgattgtgtcatgactgacaaatgggtttcaatgaatgataaagttaataaaaaaataaaaaagaaaaatttaaaaagttatcaagttaataaaaagttaatgcaaaaagcaaagtcagatgcaatcttcatgcattgtttgcctgtaggaagaggagaagaagttaccaatgatgttattgatggaaaacagtctgtagtttggagacaagctttaaatagagtccacgctcaaaaaagtataattaactggtgtctagattaa

SEQ ID NO: 230679 - DNA, 346 bp, Unknown
  Bacterial polypeptide expressing nucleotide sequence isolated from the Sargasso Sea
tccaaaacaatttcaacccgaaataaaagaacttcccaatgtaacttttactgaatcattagatgaagcaatagaagaaagtagtttagtgaccacagatgtatgggtctcaatgggagatgaaaaagaaaaagagaagagagaacaattatttagtgactatcaaataaatccttccataatggataaagcaagcaacaaagcaattttcttgcattgtcttccagccgtaagaggacaagaaatatctgaagatttattagaagataaaagaagtaaagtttgggtccaagcagaaaatagattgcatgctcaaaaagctttgttggttgaacttctaaagtaa

SEQ ID NO: 230680 - DNA, 958 bp, Unknown
  Bacterial polypeptide expressing nucleotide sequence isolated from the Sargasso Sea
gatggctaccgctgctgcaggtgttgctgctgctctttcccccctcagcggccgtgactacctttcctccgctgattgttcagcggaggaaacctcagctctgctcgatctggccgctcagctgaagagcggcgaccgtcgcatcgacctcggcaaccgggtcctggggttgatttttaccaaggcctccacccggacccgcgtcagcttccaggtggcgatggcccgcctgggtgggcaaacggtggacctcaatccccaggtgacgcagttgggtcgtggtgagtccctggaagacaccgcgcgggtgctcagtcgctattgcgatgtgctggccgtgcgcaccttcgcccagcaggagttggtggattacgcccactgggccactgtgccggtgatcaatgccctcaccgatctcgagcacccctgccagtccttggccgacttcctcacgatgcgcgaggcccatggtgatctgcccggacagacgttggcgtacatcggtgatggcaacaacgtggcccattccctgatgctctgcggtgcgttgttgggggtgaatgtgcgcatcggctgtccgcagggtttcgaacccctgcccggggtgctcgagcaggcccgttctctggctgttcagggagcttcgatcgaggtcatccacgatccgcgtgaagcggtccgtggtgcccaggcggtgtacaccgatgtgtgggcctccatgggtcaggaggacgagcaatcggaacgggaacagacttttgccggtttctgcgtcgacgaagcgttaatggaggcagctgacacggaggccatcgttctgcattgcttgccggcccatcgcggtgaggagatcagcccaggagtgatggaaagctccgccagccgtatcttcgatcaggctgaaaatcggcttcatgctcagcaggcactgctggcggcattgatgggtggtttgtag

SEQ ID NO: 230681 - DNA, 907 bp, Unknown
  Bacterial polypeptide expressing nucleotide sequence isolated from the Sargasso Sea
catgccaaaacgggattttctctctttatcggatttttccagagaagagctagacgctctgttactcagagccatcgagctaaagaaggaacggtcatcaaatgttattcataattccctagcgggaaagactggcattttaattcttgcccaaaatagtactaggaccagaattgcatttgaagctggaatgaatcaactcggcgggcattcgatttttctgagcgatagagatagtcaagcaagtcgaggagaacccctagaggattttgctagggtcgtttcccaaatggccgacgtagttatgaccaggcagccggagcaaaaacgcatcgagttgctcgcgaaacatgcgtcaataccggtaatcaacggaatgagctctgacctgcatccctgccaattactggctgacatgcagaccttcttagaactgaagggctccattgaaggtcgttctgtggccttcatcggcgacgggttcaatatgtgcaattcatatatcgaagcctcggaaatattccagttcaaattaaatattgcatcaccggaaggattcgagcccgctccatcctttcttgaaaggagtagcaacgtcgaactatatagttctgccgaggacgccgtgaatggcgttgatctggttgtaactgacgtttggtcgtctatgggccaaaccaacaaagattccgacaaagctgacgtgttccaaccctaccagattaacgagcaattattagaactctcggataaagaagcgatttttatgcactgtctgccagcccatcgcggagaagaaatcagcgctcgcttactagatcataagaagtcagtcgtatggcaggaagcaggcaaccggcttcatactcaaaaggcactgctagagtttttgctgaagcccgtgtga

SEQ ID NO: 230682 - DNA, 925 bp, Unknown
  Bacterial polypeptide expressing nucleotide sequence isolated from the Sargasso Sea
atgagtgtaagacactgtataaaagttgatgactttagttcgaatgaaattttagacttatttcaacttgcatcagaattaaaatcaaaatatcgcagtaaagaaagttatcaaccttttaaagatagatccatggcaatgatttttgctaaaccatctgcaagaactagagtttcttttgaaacaggttttgcttggatgggtggacatgcaatttatttggcaccacaagatattggtttaggtactagagaaagcgcttcggacttagcacaactttttagtagatataatgatatgattatggcaagagtttttagccatagcgatatgctcgaatttgaaaagcatgcaactgttcctgttatcaatggattaactgattataatcatccttgtcagattcttacggatatgtttacaatttgggaacagaagaaagatagttttcaagatttaaagattgtttatgttggcgatggtaataatattgttaattcatggatcaggcttgcttcaattttaccttttgagtttacatgtgtttgtcctgaaggatatgagccagataaagacacaatatcttatgctaaatctaaaaacttatctacaatcaatatttcacataatcctgaagatggcgtgaaagatgcagatgtaatttatacagatgtatgggcatcaatgggtcaaaaagaagagattgatgaaagaatcaaaatattttctcctttacaggttaataaagaattggtgaagcatgctaaagataattatatgtttatgcattgtttaccagctgagagaggtagagaagttacagatgaagtaattgattcttctaattcagtagtatttgagcaagctgaaaatagattgcacactcaaaatgctattatggttactcttgcagataaaggatagc

SEQ ID NO: 230683 - DNA, 805 bp, Unknown
  Bacterial polypeptide expressing nucleotide sequence isolated from the Sargasso Sea
gctagcggggaagtcaattgttgccctgtttgaaaagccgtctttgcgaacccgcgttagcttcgatattggtatcaacaagcttggcggccacatggtgtatttagatgtgcagtcgggcaaattagcaggccgtgaagacgcagtagacaccgccgctaaccttgcgtgctgggctgacgccattgttgctcgcgtattttctcacgatacgctagaaaccttttctaaggcggctaacgtgccggttatcaacgcattgtgtgataaatatcatccatgccaaggccttgccgactacctcacaatgtttgaacgcttcggcaaaaccgaaggtcttaccatggcctatgtaggcgacggcaacaatgtaacccattctctgttaattgttggggcgcttctaggttgcaaccaagttgtagtcacgccagaggggcacgaagcggcacctgaaattgtggcgcaagccaaagcgattgccgagaaaacgggtgtatcgattgttgaaagcactgagcttagtgctgctaacggcgcagacgttatctatgcagatacatggctttcaatgggtgacgagacgccacttgaagtgatcaaagaaaagttcatgccttatcaggtgaacgaagcgttgatggatgcaaccggtgctagctacgttatgcactgccaacctgcccatcgcgatttagaaattacgggctcgttgattgatagcgataaatcgctattaatgcagcaagccgaaaatagaatgcatggccaaaacgccattcttactcaattacttaacgcttaa

SEQ ID NO: 230684 - DNA, 697 bp, Unknown
  Bacterial polypeptide expressing nucleotide sequence isolated from the Sargasso Sea
tgacgtggctattcaacatttacctgtaatattttgtatggatagatctggtattgcaggtgaagatggacctacccaccacggatcattagatatagcatatctacgatgtattcaggatatgattgttactgcccctagaaatggaaatgagtttcgtcatcttctttattcagcacttaatcagacaaaatcccctttttcaattcgttatccgaaatcaagttcagttgtgtttgatattgatggtcaagcagagcttttacccattggtagttgggaggttttacgttctggttcagatattgcagtattatgtgttggttcactttcttacgatgttgaaagagctgcagtggtattacaaaaagaagatatatcgctagaaatagttaactgccgtttcattaaaccaatggatgaggattatcttagatcaataattgaacgttttaaaattgtaattactattgaagaaggtgtgattactggagggtttggtgatggtgtatcttcttggttattagaaaatgattttcaaggtcaaataaagagattaggtttacctgatagttttattcaacatggcaagcgagacgaattattagatgaaattggtttggatgaaaattcaataattaatactataaaatcattatttgtaaacacttcaaatgatacacttatagaatcataa

SEQ ID NO: 230685 - DNA, 997 bp, Unknown
  Bacterial polypeptide expressing nucleotide sequence isolated from the Sargasso Sea
gtttttgcagaagaaaaaagaactgaaacttcaacatcaacaatgggaagaaaaacttgctggttggaaacagactgatccagaacaggcaaaattatgggatagtcactgggaaaaaaagcttcctgatgacttgctcaatcaattgattgatacgatttccggagaggaagatgcgacccgaaatctttccggaaaggtcattcagaaaatggccgacctgattccttctctggtaggaggttccgcagatcttgaaccgagcaacaaaaccctgatcaaaaatgctgaaagtattcagccctcttctgtggattcggactctgctccggattcttcctttagcgggagaaatattcatttcggaatcagggaacacgccatgggaggaatcaccaatggcctggccctttttggctcatggcgtcccttttgcggaacgtttgcggttttttcggacttcatgcgcccaagtatccggcttgcagcaatttcaaaactttcctccatttttgtctttacccatgattcctatggagtcggtgaagatggtccaacccatcagcccgtagagcagctttgggctttgaggctgattccggaactggaagtgtggcgacccgcggatgcggttgaaaccgcggctgcctggaattattgtctgcaaaatacttcagaactttcagcaaaacctggggcgctgttcctgacccggcaaaaaactgaaaccctcgaaagggaggcgaattttgatcctacggtcattgccaaagggggctacacggtatccggaggagatgaggattatcctgatttggttttgatttcaactggttccgagggaggtgctgtccaatcggcaaaaaaagttattgagcagcatgacgtctctgtcaggcatgtttccattccctgtctggaacgttttctggaaacatctgaagagtatcactgggaccgtcctgcctccttctttcatcgtagtcgttgtcgaagc

SEQ ID NO: 230686 - DNA, 490 bp, Unknown
  Bacterial polypeptide expressing nucleotide sequence isolated from the Sargasso Sea
tctggattcggactctgctccggatccttcctttagcgggagaaacattcatttcggaatcagggaacacgccatgggtggaattaccaatggcctggccctttttggctcatggcgtcccttttgcggaacgtttgcggttttttcggatttcatgcgcccaagtattcggcttgcagcaatttcgaaactttcctccatttttgtctttacccatgattcttacggagttggtgaagatggtccgactcatcagcccgtcgagcagctttgggctttgaggctgattccggaactggaagtgtggcgtcccgcggatgcggttgaaaccgcggctgcctggaattattgtctgcaaaataccacagaactttcagcaaaacccggggcgctgttcctgacccggcaaaaaactgaaaccctcgaaagggaggcgaattttgatcctacggtcattgccaaagggggctacacggttccggaggagatg

SEQ ID NO: 230687 - DNA, 667 bp, Unknown
  Bacterial polypeptide expressing nucleotide sequence isolated from the Sargasso Sea
atgaaaaccggtgaagacgggcctacgcacgcagacccacaagccttacaactacacttagagaactacgtgcccggaacggcaatcacgctcaccccctgggaaccgcaagagatctggcctttggtggctgcatcctttcaagccgaggccgcagtcattgtgcccttcgtgacacgacccggcgaacccgtgcttgaccgcgaagctctgggtctggctccagcctccgaggctgccaaaggtgtatacaagcttcgatcagcagccagccccgcagttggaacgatcgtgctgcagggatctggtgtggcactcgcattcgttcaacaagcccttcccctgcttacccaatacgggatcgaccttgatgttatctacgtcgcgagtcctgaactctttgatcagcttccccaagaggagcgagaaaccctattcaacgaccaaatcgcagcgacgacaatgggtatcaccggcttcacgctaccaaccatgtaccgctggatccgttctgacatagggcttaagcactcgctccacccattcgtcaaagggcactaccttggctctggagcgggagacatggtgatccatgaggcaggtctcgatggagaggctcaggccagagcgatccgcgcatggctagacgacggtggcggcaactgac

SEQ ID NO: 230688 - DNA, 718 bp, Unknown
  Bacterial polypeptide expressing nucleotide sequence isolated from the Sargasso Sea
agagtatatgatcatatcattcatgattgtgctatacagcatcttccagttatcttttgtatggatcgttctggtattgcgggtgaagatggccctacacatcatggtgcattggatattgcgtatttacgttgtgtgcaagatatgatcgttacagcaccaaaaaatggaaatgagtttcggcacttactttatacagcattaaatataaacgacaaacctttttcaattcgttatcctaaagcaagttctgttatatttgatgaagctggacaaatggaacttttacctattggttcttgggagacatgccggcaaggaaaagatatcgcgattttagccgttggacctatggtttattatgcaattgaagcagcgaataaattggaagatagaggcattagtgctgaggttgtgaactgcagattcattaagccaatggatacttcatgtcttgataatattagattaagattctctaagattatcacgattgaagaaggaattattaatggaggctttggtgatggagtatctgcttggttattagagaatagtttttcaggtcggttaaggcgtctcggcttaccagatgaatttgttgagcatggttcaagagatcaaattttgagtatgctgggcctagatgttaatggattattaaatacaataaatgatatggttgatgagaaaaaagaatcccacaattacaaatagt

SEQ ID NO: 230689 - DNA, 889 bp, Unknown
  Bacterial polypeptide expressing nucleotide sequence isolated from the Sargasso Sea
ttaggtgaggaagagataaaaaacacaagagctaatttaggatggaagcatgaagcgtttaatatacctaaagaaatttattctgaatgggatgcttctgaccatggacaagcaatagaaggtgaatggaatgaaatatttaaagattacaagtctaagtatccttctttagctgaggaattcttgcgcagaatggcgtcggatttacctgaaggtattgaagaagctatttataaatatatcgatgcagtgcagaaagatgagcctaatattgcaacaagaacttcttctcagcgagtcattaatgttctaggtccacttattccagaattagttggagggtctgcagatttaacaggttcaaataacacaaattgggaaggtacgcatgagattgcgaatggggatttttctgggaactatataaattatggggttagagaatttgccatgacaggaataatgaatggtctagttctgcatggtggtattaaaccctatagcggcactttcttgacctttctagattatgcaagaaatgctgtcaggatggctgctttgatggaaatatctacaatattagtatattcacatgattcaataggagttggtgaagatggaccgactcatcaaccagttgaacatcttacaagcttaaggactactccaaatttagaaacttggaggccttgcgatacctctgaaacagccatttcttggttgtcagcgataacaaatatatcaaagcctacagcattgattctctcaagacagagcctaccaacatttgcaagaaacgaatcgcaaatacaagcaatttcgaaaggtgcttatgtcatccatgaacataagtcagaagtagagttagttttaattgctactggctcag

SEQ ID NO: 230690 - DNA, 872 bp, Unknown
  Bacterial polypeptide expressing nucleotide sequence isolated from the Sargasso Sea
tatcgaccagcccagtttgattgttgcaaaaactgtcatcggaaaaggagcacccaccaaagaagctactgccggatctcatggagccccactcggttcagaagaaatcgaggcggccaaattggcttcgggatggaatgataagccagattttcatgtgcctgatgaagtaagagaagtttttgcagaaagaaaaaaagaattgaaacttcaacatcagcaatgggaagaaaaacttgctggttggaaacagtctgatccaggacaggcaaaattatgggatagtcactgggaaaaaaagcttcctgatgacttgctcaatcagttgattgattcgatttccggagaggaagatgcaacccgaaatctatccggaaaggtcattcagaaaatggcagagctgattccttctctggtaggaggttccgcagatcttgagccgagcaacaaaaccctgatcaaaaatgctgaaagcattcgggcctcttctctggattcggactctgctccggacccatcctttagcgggaggaacattcatttcggtatcagggagcacgccatgggaggaatcaccaatggcttggccctttttggctcatggcgtcccttttgcggaacgtttgcggttttttcagatttcatgcgtccaagtatccggcttgcagcaatttcgaaactttcctccatttttgtctttacccatgattcctacggagttggtgaagatggtccgactcatcagcccgtcgagcaactttgggctttgaggctgattccggaattggaagtgtggcgtcccgcggatgcggttgaaacggcggctgcctggaattattgtctgcaaaataccacagaactttcagcaaaat

SEQ ID NO: 230691 - DNA, 854 bp, Unknown
  Bacterial polypeptide expressing nucleotide sequence isolated from the Sargasso Sea
acaaaagaagcgctttcaatccctttaacgcctttttatgtaccggattctgtaaaagctacattcaaacatcgccaaaaagaactagaaaatgaagaagaacgctggaataacaagtatacacaatggaaacaggataaccctgaaaaagcagaggagtgggatatacatataaaccaatcgcttccagagaattttgaaaaaaaactacaatcacttgaaatcaaaccaaacattgcaacgagagcttcatcaaatgccgttttacaagcactacatgatgacgttccttatttaataggcgggtcagcagatctatcttgttcagattcaacactgatgaaagcaagtggtattatggactcaaatgactttaatcaacgcaatatcaaatatggtgttagagagtttgccatggccgcaattgccaacggcattgttttacaaggaatgagtaaaacgtattgtggaacatttttaaccttttcagattacatgaaaaatgcaatccgattagcagcgttaatgaatatcaatgtgatttatcaattcacacacgatagtatttttctgggagaagacggtcctacccaccaaccagtcgaacatttagctggactacgcgctatgccaaacttaacggttattcgacctgcagatcaaaacgaagtaaaagccgcgtgggctatggccttacaagaaaaagggcctgtggcactaattttatcacgtcaaggcgcacctaatttagaaaactcaagttttgagggcacaaaaaaaggtgcttatatcattaaaagagaatcatctgaacaaatcgacttggctatattatcaacagggactgaagtaaa

SEQ ID NO: 230692 - DNA, 627 bp, Unknown
  Bacterial polypeptide expressing nucleotide sequence isolated from the Sargasso Sea
tttatgtaatgtcacacgactcgatcggtttaggtgaagatggaccaactcatcaaccagtagagcaactttcaaatttaagatctataccaaacttggttgttttcaggccagctgatactgttgagacatttgaatgttgggaggtggcattaagtctgaaaaattctccaagtgttatagctttatcaagacaaaaaattaatcctgtaagaaaaaaatatcagccacaaaataagtgtgcttcaggtgcttacgaaattttgagaactggccaaaacatccaattaactatacttgcaactggttctgaagttgatttagcagtagaagtaagtcataaattagccatacaaaatatctattcaaaagtaatatcagtgccttcattagaaatatttaatcttcaatcagagaattataaaaataagataatgaaggaaacaaaatataaaatttcaattgaggctggttcaactgatgtttggaagcaatttataggagaaaatggaatttgttttggtgttgatgaatttggaaagagcgcaccaggtaaagatgtttttagatctttcaatctttataaagattatatctttgagcgaacagtaaaaatgttaaaataat

SEQ ID NO: 230693 - DNA, 805 bp, Unknown
  Bacterial polypeptide expressing nucleotide sequence isolated from the Sargasso Sea
ttaggaaaagatgaagtggcattgataaggaaaaaactaaaatgggaatatgaaccttttgtaattccaaaaaatattatgaaagaatggagaaaaattggagaaaaagcatctcaaaaatcgaaaaataaaaaaattaaatctaaaaatatttctaaagtggtttcaaaaataattaaaaaagaaaaacaaatttatataaattctatggaaacaatggcaacaagaaaatcttcacaaaaaataataaattcattaacaaaaaaaattcctgaacttattggaggctctgctgatctttcaggttcaaacaatactaagtctgaaaatcataaaataattaaacctgggaatttcaaaggtaattatcttcattatggagtgagagaacatgcaatgtgtggaataatgaatggcctagcattacatagtaatttaattccatacggtggtacttttcttatttttagtgattattgcaaaccttcaataagattgtcggctcttatgaaacaaagagtaatttatgttatgtctcatgactctattggtttaggagaagatggtccaactcatcaaccagtcgaacaactttgcaacttaagatctataccaaacctaaatgtttatagacctgctgacactatagaaacttttgaatgttgggagcttgctttaaaaaattataatacaccaagtgttattgccctaactagacaaaaaattagtccagtgagaaaaaaatatgaccctaaaaataaatgtgctttaggggcatatgaaatattaagaactaataaaaaaa

SEQ ID NO: 230694 - DNA, 740 bp, Unknown
  Bacterial polypeptide expressing nucleotide sequence isolated from the Sargasso Sea
aataagagaacacgcgatgggaggaattgttaacggccttgcattacatagtaagttaataccgtatggatcaacttttttagttttctctgattacatgaggccaagtatgcgattagcatctttgatgaaagttaattctttatttatatttactcatgactcaatatatcttggagaggatggacctacacatcagcccgttgaacatttaatgtcgctaagactaatacctaacctagatgttattaggccatcaaatagtaaagaactaattcattcttacagatattcattggaaaaaagagataatcctatagcgataattttatcaagacagaacatgaaattttttgatcaggatttaagctataaagattttcaaacaggtgcttatgaatttaggccaggtacagacattactttggttgcaacaggttcagaagttgaacttgctcttgaaataagtacaaaattatcagatttttctgtccaaataattagtgctccgattctaaatagattaagcgaagaaaggcttgaatcattgggcctcagtcaaaatatttttacaattgagctgggcagaacaattggttgggatacatatataaagaatattaagaaatctttttcaatagattcttttggtgaatcagccccaattgatcagttagctgaaaaatttaactttagtgctgaaaaaatttccaatgaaattagaagtttacttacttaac

SEQ ID NO: 230695 - DNA, 943 bp, Unknown
  Bacterial polypeptide expressing nucleotide sequence isolated from the Sargasso Sea
aaattgaattggaaatacagcaacttcgtaattccaaattctattatcaaggagtggagaaaaattggaaaaaaatattctaaaatttcaatcaaagaaggaaataatactagaaaaatttttaaagaaaataatttagtaaagaaaaatttttcttcaattaagaaatttaagaatgaatatttgaaaactttaaaacctttagcaacaaggaaatgttctgagatgtttatagacattatttctaactcaaaatttttaataggtggttctgcggacttatctggatctaacaacactaaaacaaaaagtcataaaactattaaaccaggtaaatttaagggaaattatattcattatggtgtgagagagcacgctatgtgtgggataatgaatggaatttctctgcatagctatttaattccttacggtggaacttttttaatttttagcgattactgtaaaccatcaattagactggcagccatgatgaaaaaaagagtaatttacattttatctcatgactcaattggtctaggagaagatggaccaacacatcaaccagtagagcaattaacgagtcttagatcaattccaaatttaaatgtatttaggccagcagatttaattgaaacatttgagtgttgggaattagccttaagaagtaaaaatacacctagcgtgattgctcttacaagacaaagcataagtccagtaaggacaaaattagaaaagaaaaataaatgttctatgggtgcttatgaaatttttagatcatcaaatcacattaaacttactattttgtcttctggatcggagacaaatttagcctttgatattagtcataaattagccacagaaaatatttactcaaaagtcatatcaatgccttgccaagaaatatttgatcaacagagtagaaaatataaagagagattgttaa

SEQ ID NO: 230696 - DNA, 625 bp, Unknown
  Bacterial polypeptide expressing nucleotide sequence isolated from the Sargasso Sea
tattttttcacatgactctattggtttaggtgaagacggtcccactcaccaacctgtagaacagcttgctggacttagagctattccaaatttaaatgtttttagacctgcagatataaatgaaactctagagtgttgggaaattgctttaaaaaatccaaacactcctagtgctatagccttatcaagacaaaaagttccatacattaatccgaaaaatacgaaagaaaataaatgtgaaaaaggagcgtatgtcgtaaatattacctcccatgagagcaatgttaccattattgcttcaggaactgaggtagatctagcccttaaggttcaagaaaaattaaaacaaagtaatattcactcaaaagtagtttcaatgccatgtatggagctttttgataaacagccacaggagtttcgtaaagacattatagaagaaaattcatttgtttttacaatagaggctggaagtattatgtcatggcaaaaatatattggaaataatggaatgaattttggtatagaccgatttggtgaaagtgctccttacaaagatgtttataatcattttgaattatcagaagaaaagataagtggtttcattcaaaaaaaattaagagaataa

SEQ ID NO: 230697 - DNA, 603 bp, Unknown
  Bacterial polypeptide expressing nucleotide sequence isolated from the Sargasso Sea
ttggagaagatgggcctactcaccagccagttgagcaacttgcaagcttgagagccattccaaatttaaatgtatatagaccctgtgacattgttgaaacattagaatgttgggccaccgcgcttgcaacaaaatcaacaccgtcggttatttcactttcgcgtcaagggcttccgtgtcttagaaaggatcacactgaaaaaaacttgagtgctaaaggaggatatgttttgtttgattctgattcacagcgagatattacattgcttgctacaggttctgaggtggctatagctcttgaagcaggaattcagctgattcaagaaggggttaatttagctgttgtttccataccttgtatggaaatctttgaacaacaaaatcttgattataggaataaggtattaaagcctgaggttcctgtagtagttgttgaagcagctgttgaacaaagttggggtaaatatttaggaattaacggaaagtttttaggaatgagtacttttggggcatctgctccgggaaatgatcttttccagcattttgggatcactgtcgaaaatgtaaaagttgcggtaaaggaagttctctcaatgaattaag

SEQ ID NO: 230698 - DNA, 960 bp, Unknown
  Bacterial polypeptide expressing nucleotide sequence isolated from the Sargasso Sea
aaaatggaaatatgagccttttaaaattccaagtgatttattaaatgagtggaggaaaatcggagaaatggcttcacaaaaagcaaaaaaacatgaaagtaaatacaaaaaaatattttctaaaaattcgcttcaaaattcattgaataattcaatcaaaaaaataaaaaatgattatttaaaaaattcaaaaccacttgcaacaagaaaatcatctgaaatgtttttagacatcatgtataaattgccaaatctaatcggtggctcagcagacctaactggttctaacaatacaaaaactaaaaatcacagaataataaaaccaggtaacttttctggaaattatattcactacggagttagagagcatgcaatgtgtgggataatgaatggaatagctcttcatagtgacctaattccctatggtggtacttttttaatatttagtgattattgcaaaccatcgatcagactagctgctatgatgaaacagagagtgatatatgtttttagtcacgactctattggtcttggagaagatggtccaacacatcagccagttgaacaactaacaagtctaagagcaattccaaacttaaatgtttttagaccagcagatttaatagaaacttttgaatgctggcaattagcaattgaaaataaaaactcccccagtgtaattgctttaacaagacaggcaattaatcctgtgagaactaaaaattcctccaaaaatgagtcatcttctggggcttatgaagttttaagaactgctgatgaaattaagctaacaataatatcaactggctctgaaactagtttggcatgtgatattagtcataaattggccacagaaagtatttactccaaagtaatatcgatgccttgccaggaattatttgatcaacaatatgaaaggtataaaaacaaaattttaagtgaaactgatttgattgtatc

SEQ ID NO: 230699 - DNA, 886 bp, Unknown
  Bacterial polypeptide expressing nucleotide sequence isolated from the Sargasso Sea
aaagtaatggacaagccaagcataataataggcaataccataatggctaaaggctctgctagcatggaaaaagaccacaacacacatggcgcgcctctgcctcaagatgaaatagatcttacaaaagagaaattaggtttgcctgacaaaaaattttacgtacccactgaggttatcgagcattttcgaacaaggtacgctgatctaactaatgaagctgaaaaatggagcgtacgttttgataaactatctaaggatttaaattttaagaatattatcgaaaatactattggtgaaaaaatggtttcaggtcttgagatgccagattttgattcaggtgaaacacttgctacaagaaaagcctttggagccgttctagattcaatagctgattctctacctcaattagttggtggttctgcagatttagagccatcaaattatactggaaactttgcgaagaagtttggtgatttcacgaaagataaccattcaggtagaaatatcccttttggggtaagagaattccctatggctgctatgatgaatggaatggcattacatggaggcgttattccgtttggcggtacttttttagtttttgctgattatgaaaggccagccttaagactggcagcaattcagaatattaggttgattcatgagtttacacatgattcattttatgttggagaggatggacccacgcaccagccagttgaacaagcgatgagtcttcgagccataccaaactttaatgtttacaggccagctgatgcaaaggaaacggcttcgtgtattaagcttgcattaaaagataaaaatacaccatcagcattgcttcttactaggcaaggtgtcccagtattagaaaagaatcagaaac

SEQ ID NO: 230700 - DNA, 847 bp, Unknown
  Bacterial polypeptide expressing nucleotide sequence isolated from the Sargasso Sea
taatttaatatttcaagaaaaagaaagaaacttcaatgagaaacctgagcttgcaacaagacaatgctctatgaaagtcatcgaaatattgaaaaaaaactttactcaacttattggaggatcagctgatttaagtggttctaacaatactaaaacatcaaattctgaagtaattaattcaaaaagttttaaaggtaattatattcattatggagtgagagagcatggaatggcctcaataatgaatgggttggccttatatcataatgttataccatatggaggtactttcttaattttctcagattattgtaaaccctccataagactttctgcattaatgggtttaagagtaatctatattttttcacacgattcaattggccttggagaagatggaccaactcaccaacctgttgaacaattaagcggtttaagagctattccgaatttaaaagtatttagacctgctgacattaatgagaccttagagagttggcagttggctttaaaaaattttagtggtccaagtgcaataattctttctagacaaaaattaccatatatcacgagaaaaatttctaaagaaaacaattgtgccttcggtgcttatgaagtcaatataacatcgcatgacaataaagttacactgcttgcttctggatctgaagtatctatagccctagaggttcaaaataatctaaaaaatgctggaatcgagtcaaaagttgtttcaatgccatgtcatgaattatttgatgaacaaaatgataagtataaagaaaaaattatagaacaaaacaatttaatagtttcaattgaagctggaagtatttcttgttggggg

SEQ ID NO: 230701 - DNA, 349 bp, Unknown
  Bacterial polypeptide expressing nucleotide sequence isolated from the Sargasso Sea
atggcgacagaacagagcagatgtgctgaattggaggcccttgcaaatcgttgtcgaggacacattctgaggatgacacatcgagccgctgctggccacccaggtggttcattatctgaaattgacatccttgcagccctttattcagggcatttacgcgtacgccctgaagaaccaaactggccagatagggaccggtttgttctatcaaagggtcatgctagtcctggtatgtatgcaatattggctgaatcgggattcatttctcatgaagatatggaatcttatcgcgttcttggaggagtatgtcagggccatgttgacatgaagtggactcccgggtgttgac

SEQ ID NO: 230702 - DNA, 497 bp, Unknown
  Bacterial polypeptide expressing nucleotide sequence isolated from the Sargasso Sea
gctggataagcttcgccgggaggccctcaaagtccgccgtaactcgtggcgagccctacatgctgcaggaattggtcacgtcgggggtgctctctccgccgctgacctgctggcaggtttgtactttcacttcctgcgcctgcgacccgacgagccggagtgggaggaccgggaccgcttcgtgctctccaaaggacatggaaatgctgctttgtcagcggtgttggcacaggcgggattcttcgaggagagccggttggacgagttttatgcttacgggtcgctgcttggtatgcaccccgacatcaaatgtgagggtgttgagatgagtacaggcgggctcggccacggccttccgatcggtatcggtatggctctgggagcacgcttgaggaacaaggatttccgaacggttgtcatgattggtgacggtgagttacaggagggttcaaattgggaggcggcgatggctgctgtgcatctctctctctctagcc

SEQ ID NO: 230703 - DNA, 613 bp, Unknown
  Bacterial polypeptide expressing nucleotide sequence isolated from the Sargasso Sea
tttacacatgattcaatatttgttggtgaagatggaccaacgcatcaacctgttgagcatattatgtcattaaggctcattccaggtttaatggtatttcgacctgcggatgctgtagaaacgcaattttgttttgaaaccattatggaaaacaatacaaagcctagtgctatcttactgaccagacaaaaacttcctttaaccaatcttgatagtgaacgcattaaagctggagtaaaaaaaggtgcatatacgattatcaatcatgcaaatccagatgccattatatttactactggctctgaattaagtttaacattatcaattgtcgaatctttagaagaaaaaataaaagttgttaatatgccgtgctgggaattgtttgaaaaacaacctaatgcttacaaagaagagattctttctcataattgtaaaaaaagaatttcaatagaggcaggaactacaataggttgggaaaaatttgtaggaaaaaatggattaacaattgggattaacgaatttgggcactccgccccaggaaaagatgtagcacataagttaaattttacaaaagaggttattttagagaaaattaaggagcatttaaaatgat

SEQ ID NO: 230704 - DNA, 850 bp, Unknown
  Bacterial polypeptide expressing nucleotide sequence isolated from the Sargasso Sea
gggtccgcttcttcgcatggatcagctttgggagaagaggaaattaggaacacaagagaaaacttgggttgggagcatgaggcattcagtattccaaaagaaatttattctgaatgggatgcatctaaacaaggtcaattagctgaggatgcatggaatgaagtttttcaagattatgagtccaaaaaccctgatttagctaaggaatttttgcgcagaatgaccttagatctacctgacggtattgaagaggctatttacgaatatattaaagaggtgcaaaaagaagcacctaatatagcaacaagaacttcttcacagaggatactaaacgttttaggcccacttatccctgaattggttggcggttcagctgatctgagaggttctaataataccgactgggatggaactcatgagattcagcgagacgacttttctggaaattacataaattatggggttagagaatttgctatgacaggcataatgaatggtctgatactacatggcggcgttaaaccttatagtggcactttcttaacttttctagattatgctagaaatgctgtaaggatggctgcattaatggaaatacctacaatcttagtatattcacacgattcaataggggttggggaagatgggccaacccaccagccggtggaacacctaacaagtttaaggactacccctaacttagaaacctggaggccttgcgacacttctgaaacggctatctcgtggttatcggcacttacgaatacttctaagcctacggcattaatactttctagacagggaaagcctacctttcctagaaacgattcacagataaaatctattcaaa

SEQ ID NO: 230705 - DNA, 733 bp, Unknown
  Bacterial polypeptide expressing nucleotide sequence isolated from the Sargasso Sea
agctctttacggaggataataccttttggagggacatttttaattttttctgattattgtaagccctctattagattatctgctttaatggggcttagagtaatttacgtcttctctcacgactcgattggattaggagaagatggtccaactcaccaacctgttgagcagctgactgggcttaggtctattccaaaccttaacgtttttagacctgcagatataaatgagacattagagtgttgggagatagctttaaaaaattacaacacacctagcgctattgctttatcgagacaaaaagttccttatatcaatcctaaaaatacaaaagaaaataagtctgcaaaaggtgcttatgtggtaaatatcacttcttatgaaagcaatgtaacaatagttgcatcaggcactgaagttgagttagctttgagagttcaagaaagattaaaagagagtaatattcattcaaaagttgtttcgatgccatgtatggaactttttgatagacagccggaggattttcgtagagatattatcgaagaaagctcattagttgttacattagaagctggaagtgtcgttccttggcagaaatatgttaaaaataaaggaataaatataggtattgatcagtttggagaaagtgctccctttaaagatgtgtatactcatcttggtttctcagaagataaaattgctgatttaatacaaaaaaaattaagagattaat

SEQ ID NO: 230706 - DNA, 877 bp, Unknown
  Bacterial polypeptide expressing nucleotide sequence isolated from the Sargasso Sea
gaaaaattttattgtcctgatattgtaaagaaatattttaggaaaggattttctaacttagttgataaatctaattcttgggaagaaaataaaagagaactcaatgataataaagaagttgcacgattaatttctaattgtattgaagggacattaccagtaacaaaatatccaaattttgaatcgggagccttgcttgctacaagaaaagcgtttggcgctacgttggatgcttacgcaaaagatataccaaatttaattggtggttctgctgacctcgaaccttcaaattatactggaaactttgcaaaagattatgatgattttacattacaaaaccaatctggcagaaatattcccttcggtgttcgtgaatttccaatggcaagtatgatgaatggaatggccttacatggtggagttattccttttggtggaacatttcttgtcttcgctgactatgaaagacctgcgctgagattggggtctattcaaggtgtgagattaattcatgaactaactcatgattcattttttgttggagaagatggacctactcatcagcccgttgagcatgctatggcacttcgaatgatcccaaattttaatgtttttaggccagctgacgcaaaagaaacagcggtatgttttagacttgcgatggaaaatgaaagaacaccgagtgctttacttttaactaggcagggtgttcctgtccttgaaaatgattatgaatcgttagagaaaaatgttaggagaggtgcttacataatcaaggattgtgacagtaaaccagaattaatatttattgctacaggatcagaggtgtctctcgcaatagacaccgcaaaattaatgaaggacaagcaaattagaa

SEQ ID NO: 230707 - DNA, 931 bp, Unknown
  Bacterial polypeptide expressing nucleotide sequence isolated from the Sargasso Sea
gatggatctcaagcaattgcgtgcgttcgtcaccgtggccgaaacgggcaacgtcacccgggcatcgagcctgttgaatctcgtgcagccggcggtgtcgcggcagctgcgcctgctcgaggaggacatggggacggaactgttcgaccgtagccgccacggcatgcagctcacgccgtcgggcaagacgatgctcgaatacgcgcgccgcatcctcaacgaggtggcgcgggccaaggccgagatccagccgaccgaggggccggtggcgggcatcgtgagcatcgggctgctggccagcacgtcggacctgctggccacgcggctggtgggcgaggtggcacggcgctacccgcacatccgcctgcggctcacgatcggctacgcgggccacctgcaggactggctcgaagcaggggatgtcgatgcggcgctgctgtacgggcagaaggggacgcccgcgctgcacgtcaaggcgttgatcgacgaaagtctgtgggccgtcgcggcgccgtcggccaagctgtcgcgcaagcggccggtgtcgctcgagcgggtcgcgcgcgagccgttcatcctgcctgccgcgccgcagggcctgcgggcggcgatcgagcacgcggcggccgaggcaggcgtgacgttgcaggtgttcgccgaaaccaatgcgctgagcgtgcagaaggaactggtcgcgcaaggccacggctggacgatcctgccggccgtcggcgtgacacaggaggtcgagcgcggcaccctgagcgcggcgccgctcgcgtcgccgggcgtccggcgcacgatcgtgctcgcggcgcccagcagccggcaggccacggcgccggtgcgctgcgtggtcggtgtgctgctcgattgcgtgaaggcgacgttcgaccagggcgactggcccgatgcgcgctggctaggctaa

SEQ ID NO: 230708 - DNA, 429 bp, Unknown
  Bacterial polypeptide expressing nucleotide sequence isolated from the Sargasso Sea
atacggaggaacttttttagttttttctgattactgtaggccttcaatcaggttatctgctttgatgaaactaccagtgatttatgttatgacacatgattctattggtcttggggaagacgggcctacacatcaacctgtggaacatttagcagctctaagagcaattcctaacttaaatgttatcagaccgtgtgatatagtagaaacaattgaagcctgggaaattgcacttgaaactaaaggaccaacaattctagctttaacaagacaaggactacctactaataaaagaagttcctataaagaaaacttagttaagaaaggtgcttatataattaaaaatcatttagagcatgatgcttcaatttttgcatcaggttcagaagttgaaattgcacttttggcatcagataaattaaaagaaga

SEQ ID NO: 230709 - DNA, 769 bp, Unknown
  Bacterial polypeptide expressing nucleotide sequence isolated from the Sargasso Sea
ggagtaagggaacatgcaatgtgtggaattatgaatggaatctctttgcatagtaatcttattccgtatggtggaacctttttaatatttagtgattattgtaaaccttctatcagattggcggcaatgatgggtcaaagagtaatttatgttttaactcacgactcaatcggtttaggagaagacggaccaactcaccaacctgttgaacagctcgcaatgttgaggtctataccaaacttaaatgtgtttagaccttctgataccattgaaacttttgaatgttggcagttagctttggaaagtaaaaacaaaccaagtgttattgctctaacaaggcaaaaaatagaacctgtgagaaaagagattattgctaacaatctttgctctaaaggtgcttatgaaattttaagaaatggagacaatctgaaagtaactcttttagcgacaggctctgaaactgaccttgcaataaaagttagtcataaattagccacagaaaatatctattcaaaggttatatcaatgccatgccacgaaatatttgatagtcaaagcagtgactataaaaaagatattttacaagaagatacacttaaagtttctatagaagcatcagaatctagttattggaaaaaatatacaggtaccaatggattgaatttgggaataaattattttggtaagagtgctccttataaagatatttataaacactttgaattagatgttgagaacatcacacaaaatataaagaaaaatttatgaa

SEQ ID NO: 230710 - DNA, 214 bp, Unknown
  Bacterial polypeptide expressing nucleotide sequence isolated from the Sargasso Sea
aatggtcgctgcatctgtttcattagaatcactttgtgtaaatagtataagaatgcttgctgtagatgcagtaaataaatctaatagtggtcatcctggattgccgatgggatgtgcacctatgggttatgcattatggcaaaacatacttaatcacaaccctaacaacccaaaatggttcaatagagaccgttttgtattatcagctggtcat

SEQ ID NO: 230711 - DNA, 796 bp, Unknown
  Bacterial polypeptide expressing nucleotide sequence isolated from the Sargasso Sea
ttatgctgtaaattataaaggaagctatgtttattacggtataagagagcatgctatggccggtgtaatgaatggtttagcattacatggagggattaaaccgtacggaggaacatttctagttttttctgattactgtagaccatcaataagattatctgctttaatgaaacttcctgttatatatgtaatgacacatgactccataggtcttggagaggatggtccgacacatcagcctgtagaacatttagctgctttaagagctattccaaatttaaatgtgataagacctagtgatattttagaaacaattgaagcatgggaaatagctctagaaactaaggggccaactattttagcattaactagacaaggtttgccaactaataaaagagattcttatgaagataacttagcaagaaaaggggcttatataataaaaaatcattccaaatatgatgcttcaatttttgcttcaggttctgaggttgaaattgcacttcaagcatcaattaaattacaaaaaataaatattaatctaagagtaatatcttttccatctatggaactttttgaaatgcaaaatgcaaaatataaaaaagaaataattggtaataaaccaaaatttgctgttgaggctggagtaattaatgggtgggaaaaatatgtagactatgaaaacttcattggtatgagatcctttggtgcgagtggttcatacaatgatgtttacaaacattttaatattacagctgataatatatgtaaaaaaattcaagaaaaattaatataa

SEQ ID NO: 230712 - DNA, 931 bp, Unknown
  Bacterial polypeptide expressing nucleotide sequence isolated from the Sargasso Sea
gaaattccccaagcagtttctaacgcttggcaaagaatcggagtaatgcataatgaaaaagttgaagcctggaataaacgtttaaaagattcaggacaaaaagatgaatttgagcgtgttcttgagggtacattaccgaataagtggaaagatcctattcttgatttcaaaagaaagcatacgaaagggaagacaaaaatggcatctcgtaaagcgagtcaagaaactttaaatatactaactgaaatgattcctgaattgataggaggttcggcagacttgactggatcaaatcttacaaaaacaaaatcacaaaaatcaattgctccaggcgaatttggaggaagttatatacattatggtgtgagggaacatggaatggcggctgcaatgaatggacttgcacttcatggtggactcattccttatggaggtacttttttgatttttactgattactgcagaccttcaataagactatcggcacttatgggacagcgagttatttatgttatgacccatgattcaattggattaggagaagacgggcctacacatcagcctgtggagcatttagcaagcttgagagctattccaaatttgaacgtatacaggccctgtgatattattgaaacagcagaatgctgggcggtcgcattagaaacaaaatcaactccatccattatttcactttctcgtcagggtttaccttgtctgagaaaggatcatactgatcagaatctaagtgctaagggtggatatgttttgtctgatacagatttaaagcgtgacattacattgcttgcaaccggttctgaggtttcaatagcacttgaagcaggaaatatgcttttgcaggaaggaataaatgtcgctgttgcttccatgccttgtttggaaatctttgaggcacaaaatcatgaatacagaa

SEQ ID NO: 230713 - DNA, 588 bp, Unknown
  Bacterial polypeptide expressing nucleotide sequence isolated from the Sargasso Sea
ggataagtcgatagcgacaagaaaatgttcacagatggtgttagaacgtataggagaacatgtacctgaacttattggaggctcggcagatttgaaagattcaaatcttgcatactggtctaaatctctaccatttatggctaaatcatatagtggaaaatatctgcattatggagttagagaatttgctatgtcggctatcagtaatggaatatctctgtatggaggtttcagaccttatgcaagtacatttttaattttctcggagtacgctaaaaatgggattagaatgtcatctataatgcatcaaccagtaatttatattttcactcatgattctattggtttaggcgaagatggcccaactcatcaagcagttgagcagatgaattctctgcggttaattcctaaaatgtcactgtggagacccgcagatctcacagagacggcggtatcatggaacatgatgttacataaacaggatggtccgtcatcaatcgtcttatcacgacaatcacttcctcagattcatagaaccgagcagcagaaaaaaaatataactagaggaggttatattatttttgaacc

SEQ ID NO: 230714 - DNA, 798 bp, Unknown
  Bacterial polypeptide expressing nucleotide sequence isolated from the Sargasso Sea
aatgacattgagaaagcaatccaagaagccattaaatcagataaaccatcattgattgcctgcaaaacaaaaataggatttggctcgccttccaaagaaggaaaatcatcatcacatggcgctccattaggctcagaagatatcgcacaaatgaaaaaaaatcttaattgggattatgaagaatttgaaattccatctgatattaaggatgcttggagacttgttggtttaaaaaattcttctaaaagacaagagtgggaagaaagattatcaagtaataaagataaagaaatagacttcttaaaggatattgatggtcaagtttctgaagaacttgataaagaaataaatgaaatcaaaaaagttttctctgaggaaaaacctggctgggcaacaagaaaatcttctcaggaagttttagaaacaattaacaaggttttaccaaatacaattggcggttcagcagaccttacaggatcgaataataccaaaacaaaaaatattaacattattgatagcaataattttgcaggaagatttattcattatggaattagagagcatggtatggcagcagcaatgaacggaattgctcttcataaaggtttaattccgtattcaggaacctttttagtattttctgattattgtcgtccctctattcgattagcggccttaatggatattaaggttatacatgtcatgacacatgattcgattggtcttggagaagacggcccaacacatcaacctgttgagcatttgcctagcctaagagctataccaaatctaaatgta

SEQ ID NO: 230715 - DNA, 879 bp, Unknown
  Bacterial polypeptide expressing nucleotide sequence isolated from the Sargasso Sea
gaaaaaaaggaacaaaaaaaaggactatttttgggaaaaaaaatataaagataaacaaatctttagaaattttatgtctcaatttaagtcaatacaattcaaaagagatagtgaaacttatgaattcttaaaaaatctttctaaagataaaaattctgaagctacaagaaaatcatcacaaaagtgtttggaatttctttccaacaaagtaccgaattttttaggaggttctgcagacttaacatcgtcgaacttaacaaaaacatcaaactctcaaacaaatggtaagagtatgaattacatacactatggtgttagagaacaccttatggccgcagctatgaatggaatagctgttcatggcggatttttgccatatggtggaacttttttagttttttcagattactgtaaaaatgctattaggttatctgcaatgatgaagcaacaagtaatctatgtttttacacatgactcaataggccttggagaagatggaccaacacaccaaccagtggagcatttagcaagcctaagatcaattcccaaccttgttgttattcgtccttgtgatgcaatagaaacttttgaggcatgggagtttgcaattaaaaatatcaattctccaacagcattaatactatcaaggcaaaatctaccattaataagaaatgattttaaagaaaataaattaaataaaggcgcttattttcttagtcaagttgatggtggaaagttttcaataatatcaacaggatcagaaatatcacttgcaatagaagttcataagttttttatgagtaaaaaaataaaaagtaatgtaatatctatgccatcaatggaattatttaataaacaaagttctaactaccaagagaa

SEQ ID NO: 230716 - DNA, 852 bp, Unknown
  Bacterial polypeptide expressing nucleotide sequence isolated from the Sargasso Sea
gctgatcttacttggctcaaataatacaaaaactagtgagatgggtatttttaatgctgataactataacggaagttatgtttattatggaataagagaacacgccatggctggcgtaatgaatggattagctcttcatggaggaattagagcatatggaggaacttttcttgttttttctgattactgcagaccttctatcagacttgccgcacttatgaatattcctgttatttatgtaatgacacacgactcaattggtctcggtgaagatggtcctactcatcaacccgtagagcatttagccgccttaagagctatacctaacttaaaagttataagaccatgtgatatgatagaaacaattgaatcatgggaaattgccttagagacaaagagtccaactgttcttgctctaactagacaaggtctgccaacttttaaaagagagtcttatgacaaaaacatggtcaacaaaggcgcttatgtcatcaaaaattactctgattatcatgcttcaatttttgcttctggttctgaagtagaaatagctgttgaagcatcacataaattaaaagaaaaaaatataaatttaagagttgtatcatttccttcaatggagttatttgaaaaccaaaatgagaattataaaaaagaaattttaggagaaaaaccactttttgcagttgaagctggagtcataaatggatgggaaaaatacattaattttaaaaattttattgggatgggttcttttggagcaagtggtccatacaaagatgtctataaacattttggtataacatctgataacatttgcgagaaaattcaattacaattaaaatttgtaaa

SEQ ID NO: 230717 - DNA, 787 bp, Unknown
  Bacterial polypeptide expressing nucleotide sequence isolated from the Sargasso Sea
tgatgggagaaatattgcgtttggtgtaagagaatttccaatgggtgctattttaaatggaatttctcttcatggtggacttattccttttggtggaacattcttagtgtttagcgactatgttaagtcagcaattagattgtcagcaatacaaaaattgcatgtcttatatgagtttacacatgattcaatatttgttggtgaagatggaccaacacatcaacctgttgaacatattatgtcattaagactcattccgggtttaatggtatttcgacctgcagatgctgtagaaacgcaattttgctttgaagccattatgaaaaataatacaaaccctagcgctatcttactaaccagacaaaagctccctttaagcaatcttgacaatgaaagtatcaaaaatggagtaaaaaaaggtgcatatacaattatcaatcatgaaaatccagatgcaattatatttactactggttctgaattaagtctaacattatcaatagtcgcctctttagaagaaaaaataaaagttgttaatatgccttgctgggaattatttgaaaaacaatctaaagactataaaaaagagattctttctcataattgtaaaaaaagaatttcaatagaagcaggaactacaacaggttgggaaaaatttgtagggaaagatggattaacagttggaattaacgaatttgggcattctgcaccaggaaaagacgtggcacataagttagattttacaaaagaggctattgcatataaaattaaggagtatttaaaatga

SEQ ID NO: 230718 - DNA, 691 bp, Unknown
  Bacterial polypeptide expressing nucleotide sequence isolated from the Sargasso Sea
acctttttagtgtttgctgattatatgaggccagctattcgtctgtcagcactaatgaagcaacgagtaatttatattttgactcacgattcaattggtcttggagaggacggccccacccatcagcctgtagagacccttgcctctttgagggcaatacctaatttaaatgtttttcgaccagccgatcctgttgaggttgctgagtgctgggctctagctctagcttcccagtttgcgccatctgtaatagcccttactcgacaaggggtacctactttaagaaaaaaatatacggaaagtaacctatgtgaaagtggtggttacattattagtaaaagtgatttaaaacctgcagttaccatcatatcttcgggttctgaggtagctattgctgttgaggtgcaagaagagttagccttagacaatattggtgttaatgttgtttctatgccgagttgggaaatgtttgataatcaaagcgtggattatcaaagattaattttgggaagtggtctgagagtggggctagaggcagctgttgaacaggggtggcacaaatatctgggagacagtggtatttttgttggcatgaagggatttgggagttctgcacccgctgaacaactatatgatcactttaagattaatgttcaatctgtaatcggggcgataaaaagtaagttgtaga

SEQ ID NO: 230719 - DNA, 851 bp, Unknown
  Bacterial polypeptide expressing nucleotide sequence isolated from the Sargasso Sea
gggactgccgcaactcatggggcacctctttggtgaagaagaaattgctgctacacgtgaaagtcttaaatggcctcatcttcctttcgaaatccccgaaaaaattaaaagtgcctggattagaatcggcgcaatgcatactgaaaaagttaaagcatggaaagatcggttgatcgagtcagggcaaaaagatgaatttgaacgtgttatgtccggaacattgccacagaattgggaagataagattcaggaatttaaacgattgcatacgaaagagaagacaaaaatggcatctcgtaaagcgagtcaggaaactttaaacgttctgaccaagtttattccggaattggctggtggttctgcagacctgactggatcaaatcttacaaaatctaaatcacaaaaaacaatagctccaggagaatttggaggaagctatatccattatggggtaagggagcatggaatggctgcagccatgaatggcatagtacttcatggagggttcattccttatgggggtacttttttgatatttactgattattgcagaccttcaataagactatcggctttgatggagcagcgtgttatttatgttatgactcatgattcaatcggactgggagaagacggtcccactcaccagcctgtggagcatctggcaagcttgagagccattcccaacttaaatgtttacagaccatgtgatattattgaaacagcagaatgctgggccacagcgcttgcaacaaaatcaacaccgtcggttatttcactttcacgtcagggtctaccctgtctgagaaaggatcataccgaacagaatttaagtgctaatgggggatatg

SEQ ID NO: 230720 - DNA, 730 bp, Unknown
  Bacterial polypeptide expressing nucleotide sequence isolated from the Sargasso Sea
tatgaatggcttggctttacatggaggcataaaagcatacggaggaacttttttagttttttcagattattgcagaccgtcaattagattatctgctctaatgaaactacctgtagtttatgttatgacacatgactcaattggtcttggagaagatggtcctacgcatcaaccagtggaacatttggcagctttaagagcaattccaaatttaaatgttataagaccctgtgatataattgagactattgaggcctgggaaattgcactagaaactgaagggccaacgattttagctttaacaagacaaggactgccgaccaataaaagagattattataaagaaaatttagttctaaaaggcgcatatattattaaaaatcaatctaaacatgatgcttcaatttttgcatctggctcagaggttgaaatagcactgcaagcatcagaaaaattaaaggaattagatattaatttaagagtgatatcttttccttcaatggagctctttgaaatgcaagatattaaatataaaaaagaaattatagatgataaaccaaaatttgcagttgaggcaggagtaattaatggttgggaaaaatatatcgaaagtgacaattttattggaatgaaaacttttggcacaagtgggccatacaaagatgtgtataaacattttagtatcacacctgagcatatttgtgaaaaaatcaaacataagttaacttaa

SEQ ID NO: 230721 - DNA, 629 bp, Unknown
  Bacterial polypeptide expressing nucleotide sequence isolated from the Sargasso Sea
gactcatgattcaatcggccttggagaagacggtcccactcaccagcctgtggagcatctggcaagcttgagagccattcctaacttaaatgtttatagaccctgtgatattgttgaaacagcagaatgctgggccgcagcgcttgcaacaaaatcaacaccgtcggttatttcactttcacgtcagggtctaccctgtctgagaaatgatcataccgaacagaatttaagtgctaatgggggatatgttttgtctgatacagattcaaagcgtgatattacattacttgctaccggttctgaggtagctttagctcttgaatcagcaaatctgttgatgcgggaagggattaatgccgctgtcgtttccatgccttgtatggaaatatttgaatcacaaaatctcgagtacaggaataaggtactgccctctggagttcctgttgtagttgttgaggcagctgttgaacagagttggggcaaatatttaggaattgacggaaagtttgtgggtatgagcacttttggggcatccgctccgggaaatgatctttttcaacattttggaatcacggtggaaaaggtaaaagctgcatcgaaggaagtcctttcaatgaataaagtctaat

SEQ ID NO: 230722 - DNA, 373 bp, Unknown
  Bacterial polypeptide expressing nucleotide sequence isolated from the Sargasso Sea
atgccctcatatgaagatataagttcattttctagttggtctaaggaagataaagatttatttgctgtagctgttattaaaggcctaataatggatactgtacgaaatgcgaattctggtcatacaggtggaccaatgtcatctactgattttgcatatattttgttttcagaatatttgaattttgatccagataatcataattggtttaatcgagatcgttttgttctatcagctggacatgagtctgcattactttatactttgttagctcttattggatggctaaatattgatgatctacgtgattttagacaactacatagtaagaaaccaggccatcctgaggtagacattaaaggagtgaagctac

SEQ ID NO: 230723 - DNA, 679 bp, Unknown
  Bacterial polypeptide expressing nucleotide sequence isolated from the Sargasso Sea
aaaccttcgattagattgtcagcattaatgaaaaaaagagttatatatgtaatgactcatgattctattggtctcggagaagatggtcctactcatcaacctgtagaacagctttcaggcttacgtgctatacctaacttaaatgtgtttaggccggcagatagaattgagacaattgaatgttgggagcatgctttaaaaagttcaaaaacacctagtgtgctatctttaacaaggcaaaatttaaatccagtaagaaaaaaatcctcaaataaaaacttatgctcattaggagcctacgaagttataagaacaagcaaaaaaattaatctgacaatattagccagtggatctgaagttaatctagcaatagatgttagccataaattggccaaagataaaatatactctaaagtgatatcaatgccgtgtatggatcttttcgaattacaatcaaaaacttataaaaataaaatattaaaagaaacaaaatttaaaatatcgattgaagctggatcaagtgattgttggaaaaaatatatatgtgataacggaattgcttttggaattgatgaattcggcaaaagtgcaccctataaagatatttataaatattttggattagagagtacaaacattaaaaatattactaaaaggattattaaaaaaataaaatgac

SEQ ID NO: 230724 - DNA, 676 bp, Unknown
  Bacterial polypeptide expressing nucleotide sequence isolated from the Sargasso Sea
ctattgcaaaccttcaataagactgtctgctataatgaaacagaaggtaatttatataatgacacatgactcaataggactaggagaagatgggcctacgcatcaaccagtagagcaacttgctgctttaagatctattccaaacttaaatgttttaaggccggcagatcaaacagaaacaattgaatgttgggatattgctttaaatagcaacaaaacacctagcatattagctttaacaagacaaaacttgaaacccgtaagaaatagctttagtaaaaaaaatcaatgctctatgggagcatacgaagtttcgaggactgcaaaaaatataaatttaactattttagcctcaggatcagaagtcagtcttgcaattgagactagtcataaattggccaaacaaaaaatttattcaaaagtaatatcaatgccttgccaagaaatttttgataaacaaaacaaaagctataaagataaaatcttaaaagaaagcaaaaacactttttcaattgaggcaggatcaaaaatgtcttgggaaaaatatattgaaaagggcttgtctttttcaatagaagactttggtaaaagcgctccttataaaaaagtctatgatcattttggtttaaatagtgaaaaaattagtaaaaaaattaaattttatttaaaaaaatga

SEQ ID NO: 230725 - DNA, 625 bp, Unknown
  Bacterial polypeptide expressing nucleotide sequence isolated from the Sargasso Sea
acgcacgactcaattggcctaggtgaagatggtccaacacatcaaccagtagagcaattgtctagtttgagagcaattcctaatctaaatgtgatgagaccagctgatagaacagaaactattgaatgttgggaacttgctttaaagagtttaaatacaccaagcgtgctgtctttaacaagacagaatctgagtcctgtgagaaaaaaatattcaaaaataaataaatgtgcttttggtgcttatgaaatattaagaacaaataaaaaaattaaattaactatacttgccactggttcagaggttaatttagctatctctgcgagccacaaattagccaaatataaaatatactctaaagttatatcagtgccatcactagaattatttaaattacaatcaaaatcttataagaataaagttcttaatgaaacaaagtttaaaatttctatagaggccgcttcaacagaaccatggaaacaattaattggaaataacggattttgttttggactagatgactatggaaaaagtgcaccatatatagatatatttagatactttggtttaacaagtgagaatatagtaaacaaaataaaaaaaatgttaaataaacagatatgac

SEQ ID NO: 230726 - DNA, 1354 bp, Unknown
  Bacterial polypeptide expressing nucleotide sequence isolated from the Sargasso Sea
gcagaaaaaattcaaaatgcaaaatatggtgacgaattagttgaccacaaaacatatgtcatagcttctgatggagatctaatggaaggaattagtcaagaggcaataagtcttgcgggtcatctaaagctatctaaattaattgttttatttgacgacaataatatttctattgatggatccatagatttatcagactcaactgatcaacttatgcgatttgaagcctctgggtgggatgtaaatagagttgatggacataatcatgaagatattgaattagtaattgaagaggcgataaattcaaataaaccttccttgattgcatgtaaaactagaataggttttggttcaccctcaaaagaaggaaaatcttcatcacatggagcaccacttggcgcagaagatatttcagagatgaaaaaaaaccttaattggaactataaagaatttgaaacccctactgatgtaaaagatgcttggagacttataggattaaaaaattcttcaaaaagagaggaatgggaaactagggtttctgaaagtaaagacaaaggtacagaattattaaatgatattaatggagaaatttctgatgaacttgataaagcaatcaatgaaatcaagaaaacattctcagaggaaaaacccaattgggcaaccagaaagtcctcacaagaggtactagaaactatcaataaagtattaacaaatactatcggtggttcagctgatcttacaggatctaataatacaaaaacgaataatattgaagtcatctccagtgataatttcgaaggaaggtttattcattacggtattagagagcatggaatggcagctgcaatgaatggtattgccttgcataagggtttgataccatattcgggaacatttttagtattctctgattattgccgtccttctattagattggctgctctgatggatatcaatgttattcatgttatgactcatgactctataggtcttggtgaagatggtccaacacatcaacctgttgaacatcttccaagtttgagggccataccaaaccttaatgtatttagaccggcagataccactgaaactgcagaatgttggtctctggcaattcaaagtaagggtccaagtattattgctcttagtaggcagggatgtcctcacttaagaaatgaatttgatgaaaaaaataaatcctcattaggtgcttatgagattaaaagttcagaaggtgatcctcaagtcaatctaattgctacaggatccgaggtttctttagctcttgatgttcatgaagaattaaaaaatagcggaattaattctcgaagttgtttcagctccttcttttgaa

SEQ ID NO: 230727 - DNA, 244 bp, Unknown
  Bacterial polypeptide expressing nucleotide sequence isolated from the Sargasso Sea
tatggacatggtaagaaaagctaattcaggtcatagcggtggtccaatgtcatctgcagattttactgaaattttatttactaaatatttgaaattcgatccaaataatcccgaatggtttaatagagatcgattcgtcctttcagcgggtcatgaatctgcattgatatatgctatgcttactcagattggttggctaaataaagaggatcttcaaaattttcgtcaacttaatagtcgaact

SEQ ID NO: 230728 - DNA, 844 bp, Unknown
  Bacterial polypeptide expressing nucleotide sequence isolated from the Sargasso Sea
tctaattacacagatataaaaggagaaacaggctcatttcaggcatattctccagaaaagagatacttacattttggtgtaagagagcatgccatggcagcaatattaaatggaattgcttatcacgacagtggattaataccttatggaggaacttttcttgtttttgcagactatatgagaggttcaatgaggctatctgctctcagtgagctgggagttatttatgtacttactcatgattcaattggagttggcgaagatggtccaacacatcaacctgttgaaacgatcccttcactaagagctatgccaaatatgcttgtatttagacctggagatggtaatgaaacaagtggtgcttataagcttgctattaaaaacagaaaaagaccttctgctctttgcttaagtaggcaagccatgccaaatcaagagaatacctctattgaaaaagttgcattaggtggatatatagtttccgattgtgaaggaactcctgatgtaatatttattggtactggtagtgaactaaacctctgcattgaagcaagtaaagaaatttcaaaattaggcaaaaagactagagttatttccatgccttgcgtagaactatttgaagagcaagaagcttcttataaagaaagtgtcttgccaagtagtatcaaaaaaagagttgtagttgaagccgcccattcattcggatggcacaaatacactgggcttgatggaatttgtattactatggacagatttggtgcatcagctcctggtgggaaatgtatgactagttttggatttacagttgaaaatgttgtaaataagactaaagaaattttataaa

SEQ ID NO: 230729 - DNA, 852 bp, Unknown
  Bacterial polypeptide expressing nucleotide sequence isolated from the Sargasso Sea
aatgcatacctatcaagaacttgattcatttgaatattggtccattactgataaggaccagtttagtatctccgttttaaaaggcctcataatggatgcggtgaggaaagcaaatagtgggcatcctggtggagccatgagctctgctgattttatctatcttctttttaaagattacctaaaatttgaccctaaagaccccaattggtttgacagagataggtttattctttcaggtggtcatatgtccatgttgcaatatggtatacttcatcttgttggttggatgaaattatctgaaataaaaaagttcagacagctgggtagtcagactcctgggcaccccgaagttgaaatacccggtgttgagtgcacgactggacccttggggcaaggccttgctatgggtgtggggatggcacttgctgaggcatatttatcaagtttgatatctaatgatgataatgagtcaaaaaagcttattgatcacttcacctatgtattggcaacggatggtgacctgcaagagcctgtagcactaggggcagcagcgatagcaggacatttaggtttaaataaacttgttgtctattatgatgcaaatgatgcacaaatttcaggaaaggtctcacgttcagattcagtcaattatgctgtcctttttgacggattggggtggaatgttcaagagattgatgggcatgatcacagtgcaatgcatttcgccattgaaactgcgaaggttatggataaacctagtatcatcattggcaatactgtgatggcaaaaggttcttctacaatggagggggatcacaatactcatggcgcgccattgccgcaagaagaaat

SEQ ID NO: 230730 - DNA, 353 bp, Unknown
  Bacterial polypeptide expressing nucleotide sequence isolated from the Sargasso Sea
attgaacaaaaaagataaaaaaaaccctaacaatgaagttagtctaaatgacatggctaatgctattagatttcttgctgctgatgcagtagagaaagctaattgtggtcatccaggaatgcctatgggcgctgctgattttacaactgttttatattctaaatttttgaaaattgatcctcaaaaacctgattggcctgatagagacagagtaatattatcagctgggcatggttcaatgctcttatatgctgttaatcatttagtcggtttttcagatatgaccatagaagaaatcaaaaactttagacaacttggttcaaaaacacctggccatcctgaatatggtcata

SEQ ID NO: 230731 - DNA, 986 bp, Unknown
  Bacterial polypeptide expressing nucleotide sequence isolated from the Sargasso Sea
aggacttggtaatgccgttggcatggctatcgctgaggaattcatgcggacaagatggggcagcgatctctgtgaccattacacatatgtgattgctggcgatgggtgtctaatggaaggtataagccaagaagttatatcattagcaggcaaactaaaactaaagaagcttatagtaatttgggacgataatggaattactattgatggaggagttgagctttcttgtaatactgaccagatctccagatttgaatcatctggatggtctactttttcttgtgatgctcatgacccatttgagattgatcaagcgatagataatgcaaaaaaagacagccgcccatccttaattgcggcaaaatcaataattggttacggttcgacagctaaacaagggacttcaggagcacatggagctccattgggaaagaatgaggttgaacaattaagaaaaagttttgattggcagtataaagaatttgaaattccagcgaatataaaggaagcatgggtagaaatagggcaaaaaaatcatacagtttttaaagattggtcagaccacttccgatctctatcggaaaagaaaagaaccgcttttttaaatgagatagataaaatatttccctcaaaactcgctcgaggtattaaaaattttaaaaaagtatattcacaagaaattcaaacggaactagcaacaagaaaagccagtgaattatgcctagacctgataaatgagtgttttaataataccattgggggttctgcagatttgacaggttcaaacaatacaaaaacaaaaacgcttgaggttttttcagaacttaatcgatcaggcagatatattcattatggtataagagagcacggaatggcagctatcatgaatggaatgtgtttacatgggggtataattccctacggaggtacatttctaaccttctctgactattgtcgaggtgcaattcgtttaagtgcactaatgg

SEQ ID NO: 230732 - DNA, 1031 bp, Unknown
  Bacterial polypeptide expressing nucleotide sequence isolated from the Sargasso Sea
tttcctttgagtatggatgaaattaaaaattttagacaacttaactcaaaaactgctggccatcctgaagtcgatacttctataggcattgatacaacaactggcccattaggtcagggttttgctaatggtgtagggtttgcagttgcagaaagatatttagcatccttattaggagaagatattattaaccactttacatttggaattgtatctgatggagacttaatggaaggaatctcatttgaagctgcagaacttgcagcagtctggaagttaggaaaaataatttacttttttgatgataataatatctcaatagacggttccgttgacaaagtttctagcacaaatcaaaaagagaaatttgaatcaataggttggcatgttttagaaattgatggccacagtgagaaagaaataattaaatcagttgaaaaggggagaaaagtagaagataagccgactttaattattgcaaaatctacaattgggaaatttgcacctaataaagagaataccagtggagtccacggctcacccttagggagtgatgagatgaataaatttcttatgaatttagattggagcggagatccatttctacacagtgatgatatttatgattactttaaagaaaagagagaaaaagataatgaagaacttaggaaatgggaagaaaattttaaaaagaaatatcaagaagatacatcatttaaagataattgggatttattaacttctgaagactttcctagtttagatggagtcagcggggaaaagtatgcatcaagaattttaggttcaaaaatacttgaaaatttatcagaatctactaattcgataattggaggttcagcagatttagctgcctctacgaagcaaataattgatgaaagtcacttttcatccactaattataaaggcaggagtatcgagtttggaattagagaacatgcaatgggggcaattacaaatggtataactttacatagtaatttgataggctatgcttcaactttttttgtttt

SEQ ID NO: 230733 - DNA, 697 bp, Unknown
  Bacterial polypeptide expressing nucleotide sequence isolated from the Sargasso Sea
ttggataatttattacaattagcgaattgtatacgttttttatctatagatagcgtggaatctgccaaatctggccatcctggtatgcctatgggaatggcagatattgctactgttttgtttaaggaccatttaaaatttgatccttcagacccaaaatggtttgatcgagatagattagttatttctaatggtcatggatcaatgctgctttatgcatgtttatacttaacaggttatcaagatatagatttagatgatttaaaaaaatttagacaacttcattctagtactgcaggacacccagaatatggtgagctatctggaattgaaacaacaactggtccactctctcaaggcatagctaatgctgttggttttgcaattgctgaaaaaaaattagcatcaaaatttaatacaaatcttattaatcattatacttatgtttttgctggtgatggctgcctcatggaaggattaagtcatgaagcatgtagtttagctggtcatttaaaattacataaattaattgtattttatgatgacaattctatttcaatagatggaccaacatcactttcaatgtctgaaaatactgctaaaagatttgatgcttatggttggaatgtattatcagtagatggccatgattatgatagtatttctaatggtatagttcaagcaaaaaaaagtgaat

SEQ ID NO: 230734 - DNA, 199 bp, Unknown
  Bacterial polypeptide expressing nucleotide sequence isolated from the Sargasso Sea
atgtcaaatcaaattaatcactatgaaatggctaatgctataagagcactatcaattgacgcaattgaaactgcaaatagtggccatccgggcttgcctcttgggatggctgatgttgcaacagtattatttagtgaattcctaaattttgatgcaaaagatcctgattggatcaatcgtgatcgtttcattctatcca

SEQ ID NO: 230735 - DNA, 376 bp, Unknown
  Bacterial polypeptide expressing nucleotide sequence isolated from the Sargasso Sea
cttggacattgctgctctgcgctctgcgaaccccgaccactggatgaaggctgccgcgatccgcgccttgacccttgatgcgattgccgccgccaattccggccattccggcatgccgatgggcatggccgatgtggcaacggttctgtttgaaaagcacctgaagtttgatgcgaaaaacccgctgtggccggatcgcgaccggtttattttgtcggcgggtcatggctcgatgctgatttatgcgctgctccacctgaccggatacgaacaggtgaccttggaagaaatcaaaaacttccgccagatgggcgcaaaaaccgccggtcaccccgagaatttcttgctcgacggcgttgaggtcacaaccggcccg

SEQ ID NO: 230736 - DNA, 265 bp, Unknown
  Bacterial polypeptide expressing nucleotide sequence isolated from the Sargasso Sea
gccggtaaaaaagtcaatgtagtgtctatgccaagcaccaccttgtttgaccagcaatctgagttttaccgtgattcggtgttgcctgatcaggcgaaaattgtcgctattgaagcggcgcaccctgatttctggtacaaatacgtcggtaaaaaaggcctgattatagggatcagcagctttggtgaatcagcgccgggccctgctttgctggattattttggctttaatgctgacgttatagccgctaagattctggcctaac

SEQ ID NO: 230737 - DNA, 285 bp, Unknown
  Bacterial polypeptide expressing nucleotide sequence isolated from the Sargasso Sea
cgccgtgcaagccgcaaattctggccaccctggtatgcctatgggtgccgctgacatggcgacggtcctttttaccaaatatctaaaatatgatccggccgaccctgaatggactgaccgagataggtttatactatccgccggacacggatctatgttgctttattcactgctttacttgaccggttaccaagacataacaattgatgaaataaagcaatttacgcaactcggcagtaaaaccgcgggacacccagaaatgggcgaagcgggtggcatagaaat

SEQ ID NO: 230738 - DNA, 616 bp, Unknown
  Bacterial polypeptide expressing nucleotide sequence isolated from the Sargasso Sea
accattaggtcaaggcatttcaaatgctgttggttttgccattgcagaagaaattttaaaaaaaaaaattggtaaaaatattattaatcacaaaacatatgttttagctggagatgggtgcttgatggaaggaataagtcatgaagccatgagtctagcaggacacttaaaattaaaaaatttaattatgctatttgataataattcaatatcaatcgatggaccaacagatttagcagtttcggataattttaaaaaaagatttgaaagctatggatggaattatattttaataaatggacatgatgaaaagcaaatttttaaagcactaaaaaaagctcagaatgccaatagacctacaattatttcatgtaaaactaaaattggttatggatctccaaataagcaaggaaaatcatcttctcatggtagccctttgggaaatgatgaaattaaattagtaagacaaaaactaaattggaattataaaccctttgaaatacctaaaaaaataataaatgaatggaagaaaataggaaaaaaaggaaatatcttagaaaaaaaatggaataatatttataaagtaaaaaaaattaaagtagataaattttttaaa

SEQ ID NO: 230739 - DNA, 793 bp, Unknown
  Bacterial polypeptide expressing nucleotide sequence isolated from the Sargasso Sea
tcacctcaagctgggcaagctgattgccctctacgacgacaaccacatcaccattgacgggcgcaccaacgtctctttcaccgaagacgtcctcaagcgctacgaggcctatggctggcatgtgcagcacgtggcagacggcaacaccgatgtgaatgccattgctaaagccattgaggcggccaaggccgtgaccgacaagccatcgatcatcaaggtcaccaccaccatcggctacggctcacccaacaagagcgacaccgctggtgtgcacggcgcccccctcggtgaagaggaagccgctctgactcgcaagcagctgggctgggattacggcccctttgaagtgccccaggaggcctacgaccaataccgccaggccatcgagcgaggcgccagccttgaagccgaatggaatcaagccctagccagctaccggagcaagtaccccagtgaatcagctgaattcgagcgcatgctgcgcggcgaactcccccagggttgggacaaggatctgcccacctacagcgccgatgacaaaggtctggcgacccgcaagcactcccagatctgcctgggtgctctcggccccaccctgcctgagctgatcggtggctccgctgacctcacccactccaactacaccgacatcaagggggaagccggctccttccagccggaaacccctgaaaagcgctacctgcacttcggtgtgcgcgagcacgccatggcagctgtgctcaatggcatcgcctatcacaacagcggcttgatcccctacggcggcaccttc

SEQ ID NO: 230740 - DNA, 316 bp, Unknown
  Bacterial polypeptide expressing nucleotide sequence isolated from the Sargasso Sea
aatgtccaatgctataagagcattgtctatggatgcagttgaaaaagcaaattcagggcatcctggtatgcctttaggtatgtcggacgttataacgattctttataaatattttctaaattttaatccaaaaaatcctgagtggataaatagagatagatttattttatcagctggtcatggctcaatgcttctttattcagttttacatttaactggatataaaaatatgacaattaatcaaattaaaaaatttagacaattaaatagtaagacagctgggcatcctgagtatgatgttaaatcaggtatagaa

SEQ ID NO: 230741 - DNA, 783 bp, Unknown
  Bacterial polypeptide expressing nucleotide sequence isolated from the Sargasso Sea
ttactattcgaacctaggagttttccccatagatacctttttacattatgatagcgcttataagatttttaaaaatgaagcacctattaaagattattggattgtttcaggaatagtaattgattacatacagtccattttttttaaagtttttggagtatcgtggacaacatacattttacattcttctctatttaattcttttttagctgcttttacttattatttttttctttcctctaaacttgagacatataaagcttttttttattcattaagcttttctattttggcataccctatttctggcacaccctttgttgatcatcacgcaactttctttgtttttatagctacttttttaataatcaaaggtctccatacacaaaaaaattatttttggtttttagcagtttttttcttttttttaagttttttttctaaacaggtcccagcatcttatttagcgcttttgtatagtttgctgttgctaatttatttattaaaaaaaaaagaatttaaattattaatatttattttcctttcagtatcttttttttcaatattaactttgttttttcttctgataaataatattaatattaaagagttttatattcaatatttaggctatcctcgttatattggacaatctagactagacaattttgatttatcttttcatgatatttttaatagatacaaatttataattttaccaatcatcttaattatatttatgaaatttaaaagattgaaagaaaataaaatgagatttttatc

SEQ ID NO: 230742 - DNA, 394 bp, Unknown
  Bacterial polypeptide expressing nucleotide sequence isolated from the Sargasso Sea
atgccctatagcgaaattgatcaccgctcgattgcagtaattaagggtctagcaatggacgctccacatgctgcaaaatccggacatcagggaaccgcaatggctcttgctccccttgcacatgttctttggagcagaataatgacttacgatcctaaagagcctctttggccaaatagggatcgatttatcctctcagcaggacatgcttctattttgttgtattcgatgcttcacatgaccggatatgacctttcattagaggaccttaaacaatttcgacaactaggttcactcacacccggccaccccgaacgtggccacactgatggagttgaagtaaccactggccccctcggacaaggttttgctaacggagtggaatggcaatagc

SEQ ID NO: 230743 - DNA, 93 bp, Unknown
  Bacterial polypeptide expressing nucleotide sequence isolated from the Sargasso Sea
aagaagataaaaaaattatagatcactatacctatgcttttcttggtgatggttgcttaatggaaggcatctctcatgaagttgttcattagc

SEQ ID NO: 230744 - DNA, 130 bp, Unknown
  Bacterial polypeptide expressing nucleotide sequence isolated from the Sargasso Sea
ttgagcaaacaacatagagaattagctaatagtatcagatttttatcaatggatgctgtacaaaaagcaaattctggacatccgggaatgccaatggggatggctgatgttacaaccagttttgtttaga

SEQ ID NO: 230745 - DNA, 247 bp, Unknown
  Bacterial polypeptide expressing nucleotide sequence isolated from the Sargasso Sea
attgaaagtagaacataaacaattagctaacgcaattagatttttatcaattgatgcggtggaggcggcaaattctggccatccagggatgcctatggggatggctgatgtcgcaacagttttatttaagaattttttaaaatttaatccaaaaaatccaaattggattaatagagacaggtttattctatcggcaggacatggatctatgcttttgtattctttgctttatctaactggatacaaa

SEQ ID NO: 230746 - DNA, 247 bp, Unknown
  Bacterial polypeptide expressing nucleotide sequence isolated from the Sargasso Sea
tatgccatgtactgatgcatttgaagatcaatcgcctgagtacaaagaaagcgtattaccagcaagcgtttctcgtcgcgtagcggtagaggcaggtattgctgattactggtacaagtatgtaggcctaaatggcgccgtagtcggtatgaccacctttggtgagtctgcaccagctaacgagttgtttgagcactttggctttacggttgaaaacattgtaagtaaagcaaacgcacttttttaa

SEQ ID NO: 230747 - DNA, 979 bp, Unknown
  Bacterial polypeptide expressing nucleotide sequence isolated from the Sargasso Sea
gaaactacaactggaccattatctcaaggtttagcgaatgcagttggttttgcgattgctgaaaaaattttacaatccaaatttggtaaaaatatttttaatcattatacctatgtatttgctggagatggttgtttaatggaaggtttaagtcatgagtcgtgcagcttagcaggacatcttaacttatcaaaattaatagtcttttttgatgataattcgatttcaattgatggatcgacaaatttaactgtatccgatgatataattgcaagatttaaatcttacaattgggaaacaatatcaatagatggtcatgatcatagttcaatttctaaagccatcaattctgcaaaaaaaaataaaaaacctactttaattgcatgtaaaacaaaaattggtttcggttcgcctaataaagaatctactgcttcgtctcatggatcgcctcttggagaagaagaggttgaaataactagaaaaaatttaaattggaatgcaaagtcatttgaaattccttctgatttattaaagatctggagaaatttttatataagaaacaatgataatattaaaaattggaagaaagaatataaaaatattaaaaataaaaatttttttaatgaatgcttttctaataatatatcaaaagaattaaaggataaaattgtaaattttaagaaaattcatgtgaaggaaaatactaactgtgcaactagaaaagcaagtgaaaaatctttagaaattttttctgaatctattaataatttaataggtggctctgctgatttaacaggttcaaataatacaaaaacaaaaaatatgaagacaatagaaaaaaatgattttgatggtaattatatttactacggtgttcgtgaacatggcatggctgctattatgaatggcctatctcttcatggtggacttaaagtttatggaggaactttcttggtttttactgattatgcaggcctca

SEQ ID NO: 230748 - DNA, 354 bp, Unknown
  Bacterial polypeptide expressing nucleotide sequence isolated from the Sargasso Sea
tttgaaaactatcaatataaaatcaaaaaaagtatctcaattagctaattgtatacgttttttatcaatcgatgctgttcaaaaggctaattcagggcatcctggaatgccaatgggtatggcagatattgcgacagttctatttaaaaatcatcttaaatttgatccatctgatccaaaatggatagatagagacaggtttatattatcaaatggccatggatcaatgcttctttattcttgtctattcttaactggatataaagacataagtttagaagatatcaaaaattttaggcaaatcggttctcctactgctggtcacccagaatttggtgagcttgagggtattga

SEQ ID NO: 230749 - DNA, 442 bp, Unknown
  Bacterial polypeptide expressing nucleotide sequence isolated from the Sargasso Sea
atggccaatgcgattcggtttttgtcagcggatgcagttgaacaggctcagtcaggccatcctggaatgccgatgggtatggcagacgtcgctacaattttgttttcagaatttctaaaatttgatgccgaaaaccctctttggcctgatcgtgacaggtttattttatcagctggtcatggctctatgttattgtattcgctactttatttgtcaggttatcgagatatgacaattgacgaaattaagaactttcgacagttgggttcaaaaactgcgggacatccagagtttgggcacgcaagtggaattgagacaaccactggccctttaggtcaagggttggctatggctataggtatggctcttaccgaaaggatcaattgtgcaaaatttgggaaggatctagttgatcactttacatatgtaatcgttggtgacg

SEQ ID NO: 230750 - DNA, 439 bp, Unknown
  Bacterial polypeptide expressing nucleotide sequence isolated from the Sargasso Sea
tatgaaattaactgaaccagaaattaaaaaatatatagcgatggctaacgctattaggtttttgtctgcagatgctgtcgagaatgctaaatcaggccaccctggaatgcctatgggtattgcagaagttgtaactatactgttttctaaacatttaaaatttaacccaaagaatcctgagtgggcaaatagagatcgttttattttgtcagcaggacatggttctatgttaatgtattctttgttatatcttttaggctatcctaaaatttcgatgaaacatattaagaactttaggaaagtaaactcacctaccgcaggacatcctgaatacggtgagctaccagggatagaaactactacaggacctttaggacaaggattaggtaatagtctagggatggctatatctgagaaaattatgcgatcaagatatggt

SEQ ID NO: 230751 - DNA, 609 bp, Unknown
  Bacterial polypeptide expressing nucleotide sequence isolated from the Sargasso Sea
agcttctgctcatggaagtccgctgggtgaagaagaaataaaattaataagaagaaaattaaaatggaaatataaaaagtttgaaataccaaaaaatattttaagtgaatggagaaatataggaaataaaggtttaaaagttgaaaaaaggtggactaaaatttataaacaaagaaaaaataaaatagacaagatattaaataataactttaataaatcaatcaaaactgaaaaaattaagtcaatcaaagaaatgaatgttttggcaaccagaaaatcatcagaattaactttgagcgcctttatgaaaaatagtaatacactaataggtggatcggcagatttagctggttctaataatacaaaaacaaagcatcacaaaataataaaaccaaatgatttttctggaagctatattcattatggagttagagaacatgcgatgtgtgggataatgaatggtctggcacttcatagtaaattcataccttatggtggtacatttttaattttttctgactattgcaaacctgccattagattggcagcaatgatgaaacaaagagttatatacgtcatgactcacgactcgattgggctaagtgaaga

SEQ ID NO: 230752 - DNA, 943 bp, Unknown
  Bacterial polypeptide expressing nucleotide sequence isolated from the Sargasso Sea
ttgtgctggtcacccagaatatattttaattcaggaatagagactactacaggtcctttagggcaaggattagctaattctgtaggtctagcaattgcagaagaaatttataagaaaaaatttggaaaaaaagttattgatcacaaaacatatgtaatagccagtgatggtgatttaatggagggaattagtcatgaaagcatgagtttagccggacatctaaagttaaaaaatttaatagttttttttgataacaataagatttcaatagatggctctacttcattgagtgtctctgataattacaagaaaagatttgagtcctatggttggaattttattgaaattaatggtcatgttgaaaaacaaataaataatgcaattaaaaaagctcataaatcaaagaaaccaacaataatttcttgtaaaacgattataggttatggttctcctaataaatcaggtaaatcctcatcgcatggttcacctcttggtgatgaagaaattaaattggtaagaaaaaaattaaagtggtctcacgctcccttcgaaattccagaaaagatacttggtgcttggagggagattggtattaaaggagaaagtttagagaaagaatggttgaataagctaaatgcagaaaataaatcaataaaagataaatttaatatattcaataataaaattcataaagaggatttaaaaaatttaattttaaaagaaaaaaataaatattttattgaaaaaccctctatggctacgaggcagtgttcgatgaaagtaatagaaagtataaataaagtgctcccaaatttaatcgggggttcagcagatttaagtggatcaaataatacaaagtgttcaaactccatcgttataaactcaaaaaattttagtggaaattatattcattacggcgttagagaacatggtaggcagcaat

SEQ ID NO: 230753 - DNA, 282 bp, Unknown
  Bacterial polypeptide expressing nucleotide sequence isolated from the Sargasso Sea
ccgacaaactgagtgctgccggtaaaaaagtgaatgtggtgtctatgccaagcactactttgtttgaccagcaatttgagttttaccgtgattcggtgctgcctgatcaggcacaaattgttgcgatagaagctgctcacccggatttctggtacaaatatgtcggtaaaaaaggcctgattattggtatcagtagctttggtgaatcagcgcctggccctgccttgctggattattttggctttaatgcagaggtaatagcagctaagattctggcttaac

SEQ ID NO: 230754 - DNA, 165 bp, Unknown
  Bacterial polypeptide expressing nucleotide sequence isolated from the Sargasso Sea
tttgaagaagcaacataaagatctgtcaaatgcaatcaggtttttagcgattgatgccgtcgaaaaagctaattctggacatcctggattacctatgggtatggctgatgttgctacgattctttttaaagattttttaagatttaatccaaacaatccaaattg

SEQ ID NO: 230755 - DNA, 304 bp, Unknown
  Bacterial polypeptide expressing nucleotide sequence isolated from the Sargasso Sea
tttgaacaaacaacataataacctagccaattgtataagatttttgtcaattgatgcagttcaaaaagcaaattctggacatcctggtatgcctatgggtatggcagatgttgtaactgtattgttcaaaaattttttaaaatttaatccaaagaaccctgactggcttaatagagatagatttattttatccgcaggtcacggatcaatgcttttatattctttgctttatcttactggttacaaaagtatttctttaaaaagtataaaagaatttagacaactcaaatctatttgtgcagga

SEQ ID NO: 230756 - DNA, 608 bp, Unknown
  Bacterial polypeptide expressing nucleotide sequence isolated from the Sargasso Sea
attgacttctaatattaaaaatttatcagaaaataaaaaattatcaaattgcattagattccttgcaattgatgcagttcaagcagctaaatcagggcatcctggtatgcctatgggtatggctgatattgctacaattctatttaaagagcatttaaaatttgatccagatgatccgcattggatagatcgagatagatttattatttcaaatggtcacggatcaatgcttctatacgctctattatacctaacaggatataaagacataactttgaatgatataaaaaacttccgacaattaggctctccaacagctggacatccagagtacggggatctcgcaggaattgaaacaactacaggtcctttatctcaaggattagcaaacggtgtaggttttgctctagctgaaaaaattttgcaaaataggtttgggcaagatttatttgatcattatacttatatttttgcaggagatggatgtttaatggaaggccttagccatgaagcgtcaagcttggcggggcatttgggattatcaaaattaattgttttttttgatgacaattctatttctattgatggctcaactcaacttagtaatt

SEQ ID NO: 230757 - DNA, 337 bp, Unknown
  Bacterial polypeptide expressing nucleotide sequence isolated from the Sargasso Sea
ctattgtactctctgctttatttaactggatataaaagtgtttcaattgatgacatcaaaaactttagacaattaaactcaatttgtgctggtcatcctgagtacataaaaaattcaggcatcgaaactactaccggtccacttggtcaaggacttggaaactctgttggaatggctattggtgaggaaattttcagaaaaaaatttggatcaaatttaataaaccataaaacatatgtaattgctagcgacggagatttaatggagggtataagccatgaagcaatgagtttagctggccatctaaaactaaagaatttaatagttttttttgata

SEQ ID NO: 230758 - DNA, 355 bp, Unknown
  Bacterial polypeptide expressing nucleotide sequence isolated from the Sargasso Sea
tatgaaatcctatcaagatatagccaatttttctaattggtcaaaacaagaaaaagatcagtatacaatatccgtgatgaaaggtttggtcatggatgcaacaagacaagcaaatagcgggcaccctggcggtcccatgtcatgtgctgatttcgcttatttattatatcgcgatcatctgatatttgaccccaaagatcctgaatggttcaatagagaccgattcattctttcaggagggcacatgtcaatgctacaatattcactgttattatttataggttggctagaccttgatgacataagggactttaggcagttacatagcaatactcctgggcatcctgaggttgag

SEQ ID NO: 230759 - DNA, 742 bp, Unknown
  Bacterial polypeptide expressing nucleotide sequence isolated from the Sargasso Sea
gattaactctggaattgagacaaccacaggttttttaggtcaaggtttgggcaattctgttggtctggccatagccgaggagatctacaaaaaaaaattcgggtcaaaaattataaaccataaaacctatgtgtttgctagcgatggagacttaatggagggaataagtcatgagtgtatgagtttagcgggacatttaaaattgaaaaacttaattgtattttttgataataataaaatttctattgatggttctactaatctaagtgtatctgataattataaaaaaagatttgagtcgtacggttggaattttattgaaattaatggtcacaatgaaaaacagattaacttagctatcaaaaaatctcaaaaatctaaaaaacccacattaatatcttgtaaaactataataggatttggctcgcctaataaagctggcaaatcttcttcacatggttctccgttaggagaagacgaaataaaacttgttagaaaaaaattaaattggacgcatgaaccttttaaggttccaaaagaaatacttcaagagtggaatgaaataggtgccaagggagaaaagtttgaaaatgaatggttaaaacaattaaatagtttaaatcaagaaagcaaagaaaagtttaataaaatgaataataaaatttataaagaagatttacaaaaatttataattcaacaaaaagaaaaatattatagagaaaaaccagaaatggctactcgt

SEQ ID NO: 230760 - DNA, 541 bp, Unknown
  Bacterial polypeptide expressing nucleotide sequence isolated from the Sargasso Sea
tatgagcctgtcacttctcagtcgctatgccttcttcgccgcctgtgtgctgttcaccctggcgagcctgcccttcacccaccacgaatggctgtggccgttcaccctgaccactggcatcctcagcctgatcggcgtattcgacctgctgcaacaacgccatgcggtgcgccgcaactacccgatcctgggcaacatccgctacctggtcgaagccattcgcccggaaattcgtcagtacctgctggaatcggacagcgacgccttgccgttctcccgcgcccagcgttcgctggtgtatgcccgggcgaagaacgaggcctcggacaagccattcggcaccctgatcgacgtgtacgagtccggcttcgagttcatcggccactccatgcgcccggcgccgctggccgacccgtccagcttccgcgtcattgttggcgggccgcagtgcagccagccgtactcggcgtcgattttcaacatttcggcaatgagcttcggctcgctcagcgccaacgccatccgcgccctcaaccagggt

SEQ ID NO: 230761 - DNA, 826 bp, Unknown
  Bacterial polypeptide expressing nucleotide sequence isolated from the Sargasso Sea
tcgtcatttggtagccgcaccccaggccatcctgaggttgaaattcctggagtagagtgtacaactggacctcttggacagggatttgcaatgggtgctggtatggcgcacgcagaggcttatctccgcaatctatttaccaccaacgagaataatacagataaactgatagaccattatacttatgttcttgctagtgatggtgatcttcaagaaccggttgctcttggatcagcttctttagcggggcaccttgggctttcaaagttgattgttttctatgatgctaattctgctcaaatatctggaaatacagatagatctgattccacacattatgcagaagttttcaacggatttcaatgggatgttcaggagatcgatggtcatgaccatgaccaacttaataatgctatcttccaggcaaaggacagtcaaaagccaagcataattattggaaatacaatcatggcaaaaggcactgctaatatggaaggggaccacaatacgcacggtgctcctctgcctcaagatgaaattagcgcgacgaagcttaagcttggtctttctgatgatgcgttttattttcccccagaggtcaaaactcattttcaatcaaggtttaaggtcctctcagaaatgtcgaaagagtgggaaaagagatgtgattattttcgttcttctgaaaaatcaggacatttaatatctatggtaatggataattatctacctgatacaaaatatccagaattccaacctggtcaatctttagcaacaagaaaggcttttggggccactctagatgaatatgctacttcaataccga

SEQ ID NO: 230762 - DNA, 513 bp, Unknown
  Bacterial polypeptide expressing nucleotide sequence isolated from the Sargasso Sea
attgatttctaatattaaaaatttatcagaaaatgaaaaattatcaaattgtattagatttcttgccattgacgcagttcaagcagccaaatcaggacatcctggtatgccaatgggtatggctgatattgctacagttctatttaaagaacatttaaaatttgatccagaagatcctcattggatagatcgagacagatttattatttcaaatggacacggatcaatgcttctatacgctttattgtatctaacaggatacaaagacataactttgaatgatataaaaaacttccgacaattaggctttccaacagctgggcatccagagtacggagatctagcaggaattgaaacaactacaggtcctttatctcaaggattagcaaatggtgtaggttttgctcttgctgaaaaaattttgcaaaatagatttggtaaagatctatttgatcattatacatatatttttgcaggagatggatgcttaatggaaggccttagtcatgaagc

SEQ ID NO: 230763 - DNA, 890 bp, Unknown
  Bacterial polypeptide expressing nucleotide sequence isolated from the Sargasso Sea
ccatgaagctttaagcttagctggtcacctaaagttaaaaaatttaattttgctatttgataataataagatttcaatagatggacctactaatcttgctgtatctgataactttaaaaaaagatttaatagttatggatggaactatatcgaaatagacggacataatgaaaagcaaatttttagtgcattaaaaaaagctcaaaaatcaaaactccctatggcaatttcatgcaaaacaattattggctatggttctcctaataaatcaggaaaagcttctgctcatggaagtccattaggaaaagatgaagttgctttggtaagaaaaaaacttaattggaattacaaaccttttgaaattccaaaacaaataatgaatgaatggagaaaaataggagagaaagcttctaaaaaatcacaaagcaaaaaaattaaaaataatagaatatttaataatataaacaaacgttcatttgcgaaaaaaattcaaaatattattagagaagaaaagaagaattatattaaatcgatagaaccaatggctacgaggaaatcctcagaaaaaatattaaatgtacttacaaaaagaataccagaacttattggaggatctgcggatcttgctggatcaaataatacaaagacaaaaaatcacaaaataattaaacctggaaattttgaaggtaattatatccactatggagtaagggaacatgcaatgagtggagttatgaatggaattgcattacatagcaatttaattccatatggtggaacttttcttatttttagtgattactgtaaaccttctataagattgtcggccttaatgggtcaaagagtaatttatgttatgacacatgactctattggtttgggcgaagatg

SEQ ID NO: 230764 - DNA, 663 bp, Unknown
  Bacterial polypeptide expressing nucleotide sequence isolated from the Sargasso Sea
attgcttaaaaattcaaataatttaaatcaattagctaattgtataagatttttatcaatcgatgcagtacagaaagctaaatcaggccatccaggaatgcctatgggaatggcagatattgctactgtcttatttaaattttttttaaaatttgatcctaaagagcctagttggattgatagagatagatttatactgtcaaacggtcacggatctatgcttttatacgcttgtctttatctctcaggttataaaaagataagtctgaatgatataaaaaattttagacaattgaattctcctacttctggtcatcctgaattttgggaaattccaggaatagaaactacaactggtcctttgtcacaaggtctttcaaatggggttgggatggctatagctgaaaggatgttaagtcaaaaattttctaaaaaaatatttaatcatcatacttatgtttttgctggtgatggttgtttgatggaaggtttaagtcatgaagcttgcagtttagcaggtcatttaaatctaaataagttaattgttttttttgatgataattctataactattgatggatcaacagatctaacagtttcagataaacaccttgaaagatttagatcatatggttgggatacgatatctatagatggacacaa

SEQ ID NO: 230765 - DNA, 745 bp, Unknown
  Bacterial polypeptide expressing nucleotide sequence isolated from the Sargasso Sea
acaggcccgttgggccaaggcatctcgaccgcagttggtatggcattagcggaacgtattttggaggctcgtttcggcgaggatgtcgtcagccattatacttatgtgatcgctggtgacggtgacttgatggaggggataagccatgaagcagcgtccttagccggccatcttgggctctcacgtcttatcgttctgtatgacgataacggcatttcaattgatgggagtacttccctgtcgtggtctgatgacgtgctggcaaggttcgcggcttatggctgggatataagtgccgtagatggacatgaccccgatgctgtagtggcggcaatcgaatccgcacaaggaaaaaaagaaccatcattaattgcttgccgcaccaccattgcctttggtgctcccaccaaagctggcacctccggttcacatggtgcaccgctcggtgatgatgagatcgcgggtacccggaaggccattggttggtcccatgccgcctttgaaataccaggtgatattatcggtgcatggcgcgaggcgggtagtaaaggagccgaagttcggcgggcttgggaaactcgactgtccagtcttaatgatgaggctcgtaatgaatttaatcgagcgatgtctggtgatctaccgtctgggtgggaaagcgccattcaggagattaaagccgaatttgcagctgatgcgccagttcaggctacgcgggtttcatccggagctgttctcgagaagg

SEQ ID NO: 230766 - DNA, 901 bp, Unknown
  Bacterial polypeptide expressing nucleotide sequence isolated from the Sargasso Sea
atgaccattcatcaaattacagattttaaagatttaaatgataatcaaaaggatttaataacagtaaatattattaaagggctcgtaatggatggagtcagaaatgctaactccggacacccaggtggtcctatgtctttagcagactttacctatattttgtattctgaatttctaacaattgatccaaaaaatcctgattgggaaaatagagatcgagtggtattatcagtcggtcatacatgcatgctcatttattctatattgtatttatgtggctatttaaaaatggatgatctgaaaaattttagaaaattagggagcttaactccaggtcatccagaaatagagactccaggcgttgatgcaagtactggtccgcttggacaaggagtaggaatgggaattggaatggcactagcagaaaaagcttcatctaattcaccattgaaaagatttacatacatattagcaggtgatggcgacttacaagaaccaatagctcttggagctagcactcttgcaggtcattggaaattatcaaatctagtaatgttttatgataaaaatgatattcagattgcaggaaatacttcaagagttgattcaacagattatgccaaactttatgatgccatgggatggcatgttcaagaaattgatggtcataatcacgatgaaataagattatctttaaagaatgcgcagtcaagtgataagccaagcataataattggaaaaactattattgcaaaaggaagttatagcttagaacatagccctaaatctcatggttctccattcagtgaagatgaaattaagctcacaaaagagaaacttgaaattcctcaggattcatttttctgcaatgaagatattattggtcatttcaaaagaaatt

SEQ ID NO: 230767 - DNA, 856 bp, Unknown
  Bacterial polypeptide expressing nucleotide sequence isolated from the Sargasso Sea
aattgttttctttgacaacaataaaatttcaatagatggatcaacttctctaagcgtatctgatgattataaaaaaaggtttcaaagctatggttggtcttttcaagaaatcaatggtcataattataagcaaatctctaatgcgattaagaaagctaataaatctaaaaaaccatcaataatttcttgtaaaactattattggatttggttcacctaataaatctggcaaagcatcgtctcatggagctcctttaggagatgatgagataaagttagtgagaaaaaagcttggttggaaacatagtccatttgagattcccgaggatttacttaacacctggaaagacataggtagaaaaggtgaaaaattagaaaatgaatggaatggaattttaaataaaaaaaatactaaaattaaagaacagtacgaaagattgatgaaaaatgagctaccaacaactttagacaaaatacttggagatgaaaagttaaaattctttcaaacaaaaccgaaaatggcaacaagacagtgttcttcctcaattataagcagcatatcaaacgttctgccagagctcattggaggttctgcagatttaagtggatcaaataatacaaaaactgataattcaaaagttattaattctaaaaatttttcaggaaattatattcattacggtgttagagagcacgctatggcaggagttatgaatggcctggcactctatagcggcttaataccatttggtggaacttttttaattttctcggactatttgaaaccggcaatgagattatctgctcttatgaagttgagagtaatttatattttttctcatgactctattggtctt

SEQ ID NO: 230768 - DNA, 924 bp, Unknown
  Bacterial polypeptide expressing nucleotide sequence isolated from the Sargasso Sea
cggcccattatcacaaggactttcaatggtgttggttttgctattgcagaaaagaaattatcatcttctttaggccaagatttaataaatcattacacatacgtatttgctggtgatggatgtttgatggagggtttaagtcatgaagcatgtagcttggcaggtcatcttaaattaaacaaactaattgttttctttgatgataattcaatttcaatagatgggcctttatcactaagtagcagtgatgatgtagctcaaaggtttaaatcttataattggaatattttaactattgatggtcataatcatgatgaaataaatgatgctatagttaatgcaaaaagctcagataagcctactttgatttgttgtaaaacaaaaattggatttggctctccaaacaaagagtcaacatcctcctctcatggctctccattaggtagtgaggaaatagaattaactaggaaaaatttaaattggcatcatgatgaatttacaattcctgatgatcttctcaaacaatggagaggttttgcaaaaaaaaatttagagatcaaaaataattgggaaaataaaaatagagattttttaaactctaaagaatttaaaaaattttttaatataaaattagaaaataaaacaaaagaagcaattataaatttcaaaaaatcctatgcggctgatgaaacaaaatatgctactcgtaaagcgagtgaaaaaagtcttgagctactggataatcatatacaaaattttattggtggttctgctgatcttactggctcaaataatacaaaaactagtgagatgggtatttttaatgctgacaactataacgggagttatatttactacggaataagagaacacgctatggctgggataatgaatggattagctcttcatggaggaattagagct

SEQ ID NO: 230769 - DNA, 502 bp, Unknown
  Bacterial polypeptide expressing nucleotide sequence isolated from the Sargasso Sea
aatgagcaataatcctattacagatttcaataaattaaatgataaacaaaaagatttacatacagtaaatattatcaaaggactagtaatggatggagtccgaaatgctaattcaggacatccgggtggtccaatgtctttagcagactttacctacattttatattctgaatttttaacaattgatccgaaaaatcctgattgggaaaatagagatcgagtggtattatctgtcggtcatacatgcatgctcatttattctatattgtatttatgtggctatttaaaaatggatgatctgaaaaattttagaaaattagggagcttaactccaggtcatccagaaatagagactccaggtgttgatgcaaatactggtccacttggacaaggagtaggaatgggaattggaatggcactagctgaaaaagcttcatcaaattcatcattgaaaagatttacatacatattagcaggtgatggcgacttacaagagcaatag

SEQ ID NO: 230770 - DNA, 520 bp, Unknown
  Bacterial polypeptide expressing nucleotide sequence isolated from the Sargasso Sea
ttgacttctaatattaaaaatttatcagaaaatgaaaaattatcaaattgcattagatttcttgccattgacgcagttcaagcagctaaatcaggacatcctggcatgcctatgggtatggctgatattgctactgttctatttaaagaacatttaaaatttgatccagatgatccgcattggatagatcgagatagatttattgtttcaaatggtcacggatcaatgcttctatatgctctattatatttaacaggatataaagacataactttaaatgatataaaaaacttccgacaattaggctttccaacagctggtcacccagagtacggagatctagcaggaattgaaacaactacaggtcctttatctcaaggattagcgaatggtgtaggttttgctcttgctgaaaaaattttacaaaataggtttgggaaaaatctatttgatcattatactaatatctttgctggagatggatgcttaatggaaggtcttagtcatgaagcatcaagct

SEQ ID NO: 230771 - DNA, 811 bp, Unknown
  Bacterial polypeptide expressing nucleotide sequence isolated from the Sargasso Sea
atgagcaataatcatatttcagatttcaataatttaaatgataatcaaaaagatttatttaccgtaaatattattaaaggactcgtaatggatggagtcagaaatgctaattcaggacacccaggtggtcctatgtctctagcagattttacctatattttgtattctgaatttttaaccatagatcccaaaaatcctgattgggagaatagagatagagtagtattatcagttggtcatacatgtatgctcatttattctattttatatttatgtggtatcctgaaaatggatgacttaaaaaattttagaaagttaggaagcttgacgcctggtcatcctgaaatagagactcctggaatagatgcaagtactggaccacttggacaaggagttggaatgggaattggaatggctttagcagaaaaagcatcatctaattcatcaattaaaagatttacatatattttagcgggtgatggagacttgcaagaaccaatagcacttggagccagtactcttgctggtcattggaagttgtcaaatctcatcatgttttatgataaaaatgatattcaaattgctgggaatacttcaagagttgattcaacagactatgccatgctttacgacgctatgggatggcatgttcaagaaattgatggccataaccatgaagaaataagaacagctttaggtaatgcacaatcaaacgataaaccaagtataattattggaaaaacagtgattgcaaaaggtagtcatagtttagaaaatagccctaaatcccacggttctccatttagcgaag

SEQ ID NO: 230772 - DNA, 291 bp, Unknown
  Bacterial polypeptide expressing nucleotide sequence isolated from the Sargasso Sea
tttgaaaactaataatataaaatcagaaaaactatctcaattagctaattgtatacgttttttatcaattgatgctgtgcaaaaggcaaattcaggacatccaggcatgcctatgggtatggctgacatagctacagttttatttaaaaatcatttaaaatttgatccaaatgatccaaaatggatagataaagacaggtttattttatcaaatggacatggctcaatgcttctttatgcatgtttatatttaacaggctacaaagatatcagtatcgataatattaagaa

SEQ ID NO: 230773 - DNA, 153 bp, Unknown
  Bacterial polypeptide expressing nucleotide sequence isolated from the Sargasso Sea
tatgcaaggacacataagatcaaaagataatatgtcctctaaaatggctgatgcaataagatttttatctatggatgcagtgcaggctgctaattctggtcatccgggaatgccgatgggcatggcagatgttgctacagttctttttaaaga

SEQ ID NO: 230774 - DNA, 348 bp, Unknown
  Bacterial polypeptide expressing nucleotide sequence isolated from the Sargasso Sea
tttgggtcaaggaatatcaaatgcagtaggttttgctttagccgaagaaattttaaaaaaaaaaaatggtaaaaataaaatagatcacaaaacttatgttatcgctggtgatggatgtttaatggaaggaataagtcatgaagcattaagtcttgcagggcatttaaaattaaaaaacctaatacttttatttgacaataactcaatatctatagatggacctaccagtcttgcagtttcagatgactacaaaaaaagatttaacagttatcaatgggactatttagaaataaatggtcataactttaaagaaatttttaaagctttaaaaaaagcacaaaaatcaaa

SEQ ID NO: 230775 - DNA, 682 bp, Unknown
  Bacterial polypeptide expressing nucleotide sequence isolated from the Sargasso Sea
attggggcgcaacctagcttttggagttagagaatttcctatggcagctgcaatgaacggcattgctcttcatggagggctgattccttttggaggaacttttttagtttttgctgattatgaacgcccagcattaagattagcatctattcaaaaatgtggagtcattcacgaatttacccatgattcattttgggtaggcgaagatgggccaacccatcagcccgttgagcaagctatgtctttgagagctattccaggatttaatgtttttcgtccagctgacgctaaagaaacgttagcgtcttttgaattggccatgaacaataaatcatctccaagcgcgcttttactcaccagacaaggtgttcccgtattaaatcattctatggatattgttgttgatggtgttagtaagggtgcttatgcggttcttgaacaagacaatccagaattagttttcattgcaacagggtctgaggtcagtttggcaatagacacagcaaacaaaatgaaagataagaggattagagttgtaagtatgccatgttgggagatttttgaaaatcaaagtaatacctataaagaatcaattattccgcaaagaggagctctaaaaatttcttttgaagcgggagtaactttagggtgggaaagatatgttggagacaatggaatgtct

SEQ ID NO: 230776 - DNA, 1097 bp, Unknown
  Bacterial polypeptide expressing nucleotide sequence isolated from the Sargasso Sea
aaaaccttctttaattgcttgcaaaccaatcatagtttttggttcacctaatttagctggcacagaaaaaacacatggcgctcctttaggttctgcagaagtaaaagaagttaagaagcaactcaattggcagtatgattcgtttcatgtgcctcagaatattgttgatgattgggaagttgttaaaattagaggaaataaaaaaagaatggattggaacaagagattacaatctaattcgaaaaaagaaaaatttaataattttctaagccaatccacaaacgaaaagtttgaaaaaaaatttaaaacttatattgaaaatttaaaaaaagagaaaccaaaattggctacaaggcaggccagcatgaattttttagaaatcttgaatagctctgtagaaaatacaattggtggatctgctgatttgacaggatcaaatttaacaaaaactcagaagatgaaaccagttagtgctggcagatataaaggtaattatattcattatggaatcagagagcatatgatgggttctgttatgaatggtatcgcattgcataaaggatttgttacttatggtggaacctttttggtctttagtgattatatgagagcctcaataaggttatcagcattaatgaaaactaaagtgatttatgtattaactcatgattctataggcttgggtgaagatggccctacacatcagccaatagagcatcttgcaatgttgagagccacacctggtttaaatgtattcagacctgcagacgctgttgaaactgctgaagcttgggaagaatctcttaaaactaacggtccatctatacttgcactatctagacaaggtttgcctgcgatccgggatgagaagtcttcggaaaacttaacaaaaaaaggtggatatatcttaaagcatgcaaatgggaaaagagatgtcactctaatagcatctggttcagaagttgaaattgcaattaaaacctcagaactcttgcttgaggccaacattaatgctgctgttatatcattgccttgttgggaattatttgaaaatcaaagtaaagaatataaatcagaagtattaggcaatgttttaa

SEQ ID NO: 230777 - DNA, 793 bp, Unknown
  Bacterial polypeptide expressing nucleotide sequence isolated from the Sargasso Sea
tttttccggaaattatatccattttggagtaagagaacatgcaatgtgtggtattatgaatggtatctcacttcatagtgagcttgttccttatggtggaacttttttaatatttagcgactactgtaaaccatcaataagactagctgctatgatgaaacaaaaagttatttatgtttttacacatgattcaattggtcttggagaagatggaccaacccatcaaccaatagaacaattgacaagtttacgatcaataccaaatttgaatatttttagaccttctgacttaatagaaacttttgagtgttggcaattggcattaaatagcaaaagttctccaagcgtaatagccctaacaagacaaagcttaaatccagttcgtacaaaaaaatcatcaaaaaatttgtctttagctggcgcttatgaagttttaagaacgagtaataaaataagtgcaactattatagcaacaggatctgaaactagtcttgcaatagaagttagtcataaattagccacagatggcatttactcaaaagtaatatcaatgccttgccaggaattatttgatcaacaaagtgaaatctacaaaaataaaattttaaatgaaactaagcttgtagtttctatagaggcctctgaaactggttattggaaaaaatatactggcagcaaaggacttaattttggaattgatgattttggaaaaagtgcgccttataaagatatatataatcactttggattaagctcagagataatagtaaaaaaaattaaaaaaagattatga

SEQ ID NO: 230778 - DNA, 312 bp, Unknown
  Bacterial polypeptide expressing nucleotide sequence isolated from the Sargasso Sea
gttgaataaaattaatacagaattagctaatgcaattagatttttgtctattgatgccgttgagaaagcaaattcgggtcacccgggaatgccaatgggaatggcagatgttgctacgatattattcaaaaattttttaagatttaaccctaaagatccagactggattaatagagatagatttgttctgtctgctggccatgggtccatgctattatattcattgctatatttaactggttataaaagtatatctttaaatgatattaaaaattttagacaattaaattctatatgtgcaggtcatcctga

SEQ ID NO: 230779 - DNA, 766 bp, Unknown
  Bacterial polypeptide expressing nucleotide sequence isolated from the Sargasso Sea
gtaagagaacacgctatgtgtggtattatgaatggtttgtctttgcatagtggtttaataccttatggtggaacatttttaattttcagtgattattgtaaaccctcaattagattagctgcaatgatgaaacaaagagtgatttatattttcactcatgactcaattggacttggtgaggacggtccaacacatcaaccaattgagcagttagctagtttaagatcaattcctaatttaaatgtttttagacctgcagatacaattgaaacttttgagtgttggcaattagcactggaaagtaatgagtcaccaagtgtaattgcactatctagacaaaaaataaatcctttaaggaaagaatatagtaaaattaataagtgctctaaaggagcatatgaaataatgagaacgggagaaaatataaaagtaatattactttcaagcggttctgagactagcttagcgtgcgaagttagccataaattagccacagaaaatatttattcaaaagttatatcaatgccttgtcaagagttgtttgacaaacaagatgagatctacaaaaaagaaattttctctggaacagaacttttggtctctatagaagcttctgaaactgaattctggaaaaaatatacaggttctaatggaatgaattttggtattaatgattttggtaaaagtgctccctacaaagatatttatgatcactttaaacttaattcgacggctataactaaagctataaaaaagaggatatgaa

SEQ ID NO: 230780 - DNA, 349 bp, Unknown
  Bacterial polypeptide expressing nucleotide sequence isolated from the Sargasso Sea
gagcagctggcgaacgtcgcccgcggcggctacgtgctgaaagactgcgcgggacagccggagctgatcttcatcgccaccggttctgaagtggagctggcggttgccgcttacgaaaaactgactgccgaaggcgtgaaggcgcgcgtggtttccatgccgtccaccgacgcgttcgacaagcaggatgccgcttaccgtgaagccgtgctgccgaaagccgtctctgcgcgcgtggccatcgaagcgggtatcgccgactactggttcaaatacgtgggcctgaacggcgcgatcgttggcatgaccaccttcggtgagtctgcgccggcggagcagctgttcaggc

SEQ ID NO: 230781 - DNA, 808 bp, Unknown
  Bacterial polypeptide expressing nucleotide sequence isolated from the Sargasso Sea
acctgaaaatttcaacggtaattatatccattatggagttagagagcatgcaatgtgtgggattatgaatggattagcgttgcacagtaaactaataccatacggaggaacttttttaattttttctgattattgtaaaccttccattaggttagcggctatgatgaaacaacaagttatatacgtaatgacacatgattctataggtcttggggaagatggaccaacacatcaaccaatagaacaattatctagtttaagaactattcctaatttgaatgtttatagacccgcagatagatttgaaacaattgaatgttgggaaaatgctttaaaaaataccaaaactccgagtgtattatctttaaccaggcaaaacttaaaatcatttagaaaaaaatattctgataataacaaatgttcaatgggcgcttacgaagtcttaagaacaaataaaaaaattaatttaacgatattagcaagcggttcagaagtaaatttagcattagaaaccagccatgaattagccaaagataggatatattctaaagtcatttcggtgccatgtatgaatatttttgacttacaatcaagtaattacaaaagaaaaatcttaaaagagactaattttataatttcaatagaagctgggtcaactgactgctggaaaaaatatgttggaaaaaatggattaacatttggaattgacgaatttggaaaaagtgcaccctacacggatatatataaatattttggtctggtatctaaaaaaattgtaaataaatcaaagaaattgatgggatattaa

SEQ ID NO: 230782 - DNA, 346 bp, Unknown
  Bacterial polypeptide expressing nucleotide sequence isolated from the Sargasso Sea
aatgacttctacacctagccatcaagaaatggcaaacgcgatacgctttttatctccagatgcagttcagaaagctaattcaggacatccaggcatgcctatgggaatggcagatgtggctactgttctactttcaagtttcttgaattttagtgcgagtaatccgtactggcccgacagagaccgtttgatcttatctgcgggacacggatccatgcttttatactctctgcttcatctgaccggctaccaggatttcccaatatatgaaattaaaaattttcgacagcttggatctcttactgcaggtcatccagagttcggtcatggagcaggtattgaacaa

SEQ ID NO: 230783 - DNA, 949 bp, Unknown
  Bacterial polypeptide expressing nucleotide sequence isolated from the Sargasso Sea
ttcaactcttataagaaaaaatatccaaaacaatttagcgaactacaaaggagaaaaaaatcacgtataaagagctccattcccaagatactaatgaattttaaggtagacaaggataaatcgatagcgacaagaaaatgttctcagatggtgttagaacgtataggagaacatgtacctgaacttattggaggctcggcagatttgaaagattcaaatcttgcatactggtctaaatctctaccatttatggctaaatcatatagtggaaaatatttgcattatggtgttagagaatttgctatgtcggctattagtaatggaatatctctgtatggaggtttcagaccttatgcaagtacatttttaattttctcggagtacgctaaaaatgggatcagaatgtcatctataatgcatcaaccagtaatttatattttcactcatgattctattggtttaggcgaagatggcccaactcatcaagcagttgagcagatgaattctctgcggttaattcctaaaatgtcactgtggagacccgctgatctcacagagacggcggtatcatggaacatgatgttacataaacaggatggtccgtcatcaatcgtcttatcacgacaatcacttcctcagattcatagaaccgagcagcagaaaaaaaatataactagaggaggttatattatttttgaacctaaaaataaattaaacggcataattatatctacaggatcagaactatacatcagtataaatgctgctaaggaattggaaaaagataaaatattcgtcagagttgtatcaatgccatgtattgagacttttctaactcagtctaaatcttaccgcaacaaagtattgactgatactaaaaatatacttgcagtggaggcaggcgtaggtgattgctgggacaagtttataggtaaagacggtggataaa

SEQ ID NO: 230784 - DNA, 925 bp, Unknown
  Bacterial polypeptide expressing nucleotide sequence isolated from the Sargasso Sea
gactggattgaacccacaggtccattaggacaaggccttggaaatgctgttggaatggccatagctgaagaagtcttaagaaaaaaatttggttcaaatttaattaataataaaacatacgtaattgctagtgacggagatctcatggaaggaataagtcatgagtgcatgagtttagctggccatttaaaacttaaaaacctaatagttttttttgataataataaaatttctatagatggttctacctctttaagtgtatctgataattacaaaaaaagatttgaagggtatggttggaattttttaaatattaatggacataatgaaaagcaaatttttaatgctatcaacaaagctgtaaaatcaaataaacccacaattatctcttgtaaaactgtaattggttttggttctccaaataaatctggaaaagcctcatctcacggatctccattgggagaagatgaaattgctttagtaagaaaaaaactaaaatggaataatgatccgtttgttgtgcctgaaaatattttaaaagcatggagagaaattggtaagaaaggaattgagttagagaaaaaatggatagaaacacttggtaaaaaaaattctaaaattaaatcagaattagaaaatgtatatattaaatcagatcttaataatcttgagagcttgattaaagacgagaaaaaaaaatattttgagtcaaaaccaaatttagctacaagacaatgttcgtcattagcaatagaaaatatttcaaaaattttgcctcaattaattggtggttccgcagatttaagcggatcaaataataccaaaacaaaaaattcaaaagtaatttcatccaaaaattttgatggaaattatattcattatggtgtgagagaacatggaatgggctgcataatgaatggtctag

SEQ ID NO: 230785 - DNA, 859 bp, Unknown
  Bacterial polypeptide expressing nucleotide sequence isolated from the Sargasso Sea
tgatgtcagcaaaataaattcttgcatagaaaaggcaaaaaaatctgcaaagcctacattgatttgttgcaaaaccgtcataggcaagggttctccaaacaaatctggcacttctgaggtgcatggggcagctttgggcgacgaagaaatacaacttactagagaagagattggatgggagtaccctccattcgaagttcccgagcatgtttatgaagcttggaataatgaaaaagatggtcaagctgtagaagatgattggaacgcaatgtttgacgattactcaaaaaattattcaaaagagcattcggaaattgaaagaatattttcaaactctttacctgaggagctaaataaaatttttgaagacttaatagaaaatttttcaaacgatgagacgcaccatgcttcaagaaaggcatctggcatgtgccttgattcattaggtcctagaattccagaattgtttggaggttctgctgatttatctccatctaacaatactcaatgggagggttcagaaattttagaaaacggaatagggaattatttaagttatggggtaagagaatttggcatgtctgccataatgaatgggctttatttgcatggtggttttagaccttatggagggacttttttaacctttttagattatgcaagaaatgcagttcgaatgagcgcattgatgaagttgccaataatatacgtttatacacacgattctatcggtgtaggtgaggatgggccaacccatcagcccgttgagcatctaaccatattaagatctacgccgaacttaaatacttggcggccttgcgatggcgttgaaacagcttactcttggaaagcgcattaa

SEQ ID NO: 230786 - DNA, 737 bp, Unknown
  Bacterial polypeptide expressing nucleotide sequence isolated from the Sargasso Sea
tgcattacacagtaaaataattccttatggtgggacatttttaattttctcagattattgtaaaccatcaataagattgtctgctatgatgaaacagcaggttatatatgtgatgactcatgactcaattggtcttggtgaagatgggcctactcatcaacctatagagcaattatcaggattaaggaatattccaaaccttaacgtttttagaccagcagatagatatgaaactattgagtgttggcaggaggctttaaaaaattcaaaaacccccagtgttctatctttaactcgacaaaacctgaatcctataagaagcaaatactcaaaaattaataaatgctcttatggagcttacgaagtatcaaggactaataaaaaaattaaaattacaatattagctagtggttctgaagtaaatttagcaattgaaacaagccataaattagccaaagaaaaaatatattctaaagttatttcagtaccatgtatggatctttttgacaaacaatcatcaacttataaggataaaattttaaatgaaactaaattaaaattatctattgaagctggatcaactgatatatggaaaaaatatgttggaaaaagtggcttaacttttggaattgatacatttggaaagagcgctccatataaagatatatttaaacactttggattaatatcaacaaatattgcaaataaattaaaaaaaaatttaggaactacatgaa

SEQ ID NO: 230787 - DNA, 829 bp, Unknown
  Bacterial polypeptide expressing nucleotide sequence isolated from the Sargasso Sea
ttgcaattatctaattgtataaggtttctatctatagatgcagtacaaaaagcaaattctggtcatcctggtatgcccatgggaatggctgatattgctactattctttttaaagatcatttaaaatttgatccatctgatccagattggattgatagagataggttagttatatcaaatggtcacggatctatgctcttatattcttgtttatatctattaggatataaagacattacacttaatgatttaaaaaattttagacaattaggttctcccacagctggccatccagagtatggagaaattggtggtatagaaactacaacaggtccattatctcaaggtttagcaaatgctgttggtatggcaatagctgaaaaaaaactctctaatgaatttggtaaggattttattgaccacttcacatatgtttttgctggtgatggttgtttaatggagggcttgagtcatgaatcatgtagcttagctgggcaccttaaattgaataaattaattatgttttttgacaataattctatatcaattgatggttcaacaaatttatctacatctgatgattttaaaaaacgatttgaatcatatcaatggaattattttgaaatagatggacataactttgaacaaatatcaaaagcaatttcaaaggcaaaaaacagtaatcgccctactgtaatttcctgtaaaacaagaattggctttggttcaccaaataaggaaggcaaatcatcttcacatggatcgcctttgggtgaagatgaaataatacttacaagagaaaaacttttttggaattataatagtttga

SEQ ID NO: 230788 - DNA, 903 bp, Unknown
  Bacterial polypeptide expressing nucleotide sequence isolated from the Sargasso Sea
aataagcttattatgtttttcgatgataattctatttctatagatggatcaacagatctttcagtttcagacaatgttaaaaaaagatttgaagcttataattggaatataattgaaatagatggtcataactatgaagaaattgatcaagctataattcaagcaaaaaaaagtgatgctccaacaattatatcttgtaaaactaaaattggtttcggctctcctaacaaagagggttcggcttcatcacatggttcacctcttggtgaagatgaaattagtttaacaagaaaaaaattaaaatggaattattcgccgtttgaaattccaaatgatttattaaatgaatggagaaatttttataaaagaaatgatggatcaagaaattcttggttatcaaaaaataaagaattaattgaaagtaaaaattttaaagatagttattatcaaaaaattgatacacaacttccagaaaaactaggtgaattaaaatctgaacattttaataacaaaacaaattgtgcatcaagaaaatcgagtgagctaacgttaaatttaatttcaaactatcaaaaaaatcttattggtggatctgctgatcttactggatcaaataacactaaggcaaaagatatgaatgtaattaaatcagataattttaatggaaattatattcattacggcatcagagaacacggaatggctgggataatgaatggcattgctttgcataaaggtttaattccatacggaggaacgtttttggtatttacagattattgcagaccttcaattaggttatcagctcttatgaatgtaccagttatttatgtaatgacgcatgactcaataggattaggagaagatggaccaacccatcaaccagttgagcatcttgcatcg

SEQ ID NO: 230789 - DNA, 202 bp, Unknown
  Bacterial polypeptide expressing nucleotide sequence isolated from the Sargasso Sea
ttgagcaagcaaaatagagatttggcaaatgcaatcaggtttttatcgattgatgctgttgaaaaagccaattccggacatcccggtttacctatgggaatggccgatgttgttacaatgctttttagatactaccttaagtttaatccaaaaaatcctggatgggtaaatagagacagattcgttttatcagtctggacac

SEQ ID NO: 230790 - DNA, 1015 bp, Unknown
  Bacterial polypeptide expressing nucleotide sequence isolated from the Sargasso Sea
ctcaaaaatcagggaagtaaaacatttaaaaataatgttgttactatatcattttcaaaaaaaattcaaaatattattaaagaagaaaagcaaaattatatcaagtcgatggaagcaatggctacaagaaaatcttcagaaaaaatattagaagtacttacaaaaaaagtaccagaacttattgggggatctgcagatcttgccggatcaaataatacaaagaccagtagtcacaaaataattaaacctggaaattttgaaggtaattatattcattatggagtaagagagcatgcaatgagcggaattatgaatggaattgcattgcatagcaacttaattccatatggtggaacttttcttatttttagtgattattgcaaaccatctataagattgtctgctctcatggatcaaagagtaatatatgttatgactcatgactctataggacttggtgaagatggcccaactcatcaaccggtagaacaactttcaagtttgagatctgtacctaacttaaatgtatttagaccagccgatacaatagaaacgtttgaatgctgggagatggcaataaatcttaagtgcccaagtattatcgctttatctagacaaaaaattaatcctgtaagaaaagaatataatgtccaaaataaatgtatggatggagcatatgaaatattaagaactaatcaaaaaatagatttaactattcttgcaacaggatcagaagttaatttagctattgaagttagtcataaattagccacacaaaagatttattcaaaagttatatcaatgccttcatttgaaatgtttgaacttcaaactaatcgatataaaaaagaaataatgaatgaaactaaatataaaatttctatcgaggcaggctcaacagaaccttggaaaaaatatataggtgaaaatgggatttgctttggtgttgatgattttggaaaaagcgcacctggaaaagatgtttatgagtctttttacctatacagcgattata

SEQ ID NO: 230791 - DNA, 526 bp, Unknown
  Bacterial polypeptide expressing nucleotide sequence isolated from the Sargasso Sea
tttggtagcccccaataagtccggctctcatgattgtcacggctcacctttaggcgacaacgaaatcgccaaagcccgtgagttcctgcactggccttatgcaccttttgaaatcccgtccaacatttatgcagcctgggacagcaaaactaaaggcgcagcactggaacaacaatggacagaattatttgctgcttatacaaaggaatacccacaactggctgctgaataccaacgccgggtgatcgacagagtattaccagctaattttgaagcagccacgcaaagctttatcgacaattgccaaaaccagcaacaggatatcgccagccgcaaagcctctcagctttgtattgcgcactttgccgccttagtgcctgagattttgggtggttctgccgatttagcaggttcgaacctgactttatggtcgggcagcaaaggtctgagcaaagaagatagttccggtaactatatttattacggtgtacgtgaatttggtatggcggccatcatgaacggcatc

SEQ ID NO: 230792 - DNA, 286 bp, Unknown
  Bacterial polypeptide expressing nucleotide sequence isolated from the Sargasso Sea
gatggaaggtttatcccatgaagcctgttcactggctggtactttaggcctgggtaaactgatcgctttttgggatgacaatggtatttctattgatggtcatgttgaaggctggtttaccgatgacacgccatcacgttttcactcttatggttggcaggtcattcaggtagatggccataacccggcgcaaattgcagatgcgatcacacaagctcaggcagaaacagccagacctacactgatttgctgcaaaaccattataggttttggtagcccccaataa

SEQ ID NO: 230793 - DNA, 809 bp, Unknown
  Bacterial polypeptide expressing nucleotide sequence isolated from the Sargasso Sea
tggtcatggatctatgttgctttactctttgctttacttaacaggttacaaaagtgttaaattaaatgacataaagaattttagacaaattaactctatttgtgcaggccatcctgagtatgttgaaaactcaggtattgaaacaacaacaggtcctttagggcaaggaatttctaatgcagtaggttttgctttagcagaagaaattttaaagaagaaaatcggtaaagatattataaatcataaaacttatgtaattgcaggagatggttgtctaatggagggcataagtcacgaagctatgagcttagctggacatttaaaacttaaaaacttaataatgttatttgataataattctatatccattgatgggccaacaagtttagcagtttcagataattttaaaaaaagatttgagagttatggatgggattacctagaaattgacggtcataaggaaaaagaaatattcaatgcccttaaaaaagttcaaaatgcaaaaaaacccacagttgtttcttgtaagactaaaattggttatggatcgcctaataaatctggaaaagcctcctcgcatggaagtcctctaggtgctgaggaaattgaactagttcgaaaagaattaagttggaattataaaccatttgaaattcccaaaaatattttgaagctttggcgaaatgttggaggaaagggagaaaaaattgaaagcagatggaataaaatttataggaagaaaaaaactaaaataaataaatttttcaaaaatgatttaaaaaagtcagcagcaaataaaaaaaaatagc

SEQ ID NO: 230794 - DNA, 336 bp, Unknown
  Bacterial polypeptide expressing nucleotide sequence isolated from the Sargasso Sea
gtaagagaacatgcaatgtgcggaataatgaatggtctttcactacatagcaaacttataccttatggaggaacttttttaattttttctgactattgcaagccatcaataagattgtcagcaattatgaaacaaagggttatttatgtgatgacacatgattcaattggactaggtgaggatggacccactcatcaaccaatagagcaactttctggactaagatctataccaaatttaaatgtttttagaccagcagatagaattgaaacaatagagtgttgggagctagcaattaaaaattctaaaacacctagtgttttatctcttacaaga

SEQ ID NO: 230795 - DNA, 937 bp, Unknown
  Bacterial polypeptide expressing nucleotide sequence isolated from the Sargasso Sea
caatggggatcaaaaactcctggacatcagaaaacattcgaaactgaaggtgttgaagttacagctggtcctcttggagctggtatttcaaatgcagttggtttagcaatagctgaaactcacttagcggctaaatttaataagcctgattgcaatattgttgatcactatacatacgtaataatgggtgacggctgtaatcaagaaggtattgcatcagaggcctgctcattagctggtcaccttaagcttggaaaattaattgcactctatgacgataatcaaattacaattgatgggcgaaccgacgtttctttcaccgaagatgttttaaaaagatacgaagcttatggatggcatgtacaacatgttgaagatgggaatcatgatgttaaaggaataactgaagctatcgaaaaagcaaaattaattacagacaaaccttcgattattaaaatttctacaaccataggttatggttctccaaataaatcagatactgctggaattcatggagcagctgttggagaagaagaagctgcattaactagagagtttcttaattgggaatatcctccatttgaaataccagatgaagtatatgcgcattttagaaaatcaataaacaaaggcgaaaacttagagaaagaatgggattctaaatttgaagaatatcaaaaaaaatatccttctgaaggagccgagttaaacagaatgttaaaaggccaattacctgaaaattgggactcagatctcccttcttatacacctgatgataaaggattagccaccagaaagcattcacaaatatgtttaggtgcactaggtcctaacttgcctgaattaattggtggatccgcagatttaactcactctaactacacagacatcaaaggaaaaaccgggtcatttcagcctcatagtcctgaaaaaagat

SEQ ID NO: 230796 - DNA, 973 bp, Unknown
  Bacterial polypeptide expressing nucleotide sequence isolated from the Sargasso Sea
aaatcaaattaaaaattttagacaattacataataaaactgcaggtcacccagaatacggaagtgcagaagggatagaaacaacaactggacctttatctcagggtttagcaaatgcagttggaatggcgttagcggaaaaaaaattatcaaataattatggaaaagaattattcgatcattacacttatgtttttgctggagatggatgcttaatggagggtttaagtcatgaagcgtgcagtctcgcagggcatttgaaattaaataagcttattctgtttttcgataataattctatttccatagatggatcaacagatctttcagtttcagatgatgttaaaaaaagatttgaagcttataattggaatataattgaaatagatggtcataaatatgaggagattgatcaagctattattcaagcaaaaaaaagtgatgctccaacaattatatcttgtaaaactaaaattggtttcggttctcctaacaaagaggggtcagcttcgtcacatggctcacctcttggtgaagatgaaattagtttaacgagaaaaaaattagaatggaattattcaccgtttgaaattccagatgatttattaaaagagtggagaaatttctataaaaggaatgatgaatcaaaaaattcatggttatcaaaaaacaaagaattaattgaaagtaataattttaaagatagttattatcaaaaaattgactcagaacttccagaaaaacttaaggaattaaaatttgagcattttaatgataaaacaaattgtgcatcaagaaaatcaagcgaactaactttaaacttaatttcaaactatcaaaaaaatcttattggtggctctgctgatcttactggatcaaataacactaaagcgaaaaatatgaatgtaattatatctgataatttcaatggaaattatgttcattatggcatcagagaacatggaatggctgga

SEQ ID NO: 230797 - DNA, 652 bp, Unknown
  Bacterial polypeptide expressing nucleotide sequence isolated from the Sargasso Sea
atggctaatgccatacggtttttgtctgctgatgctgttgaaaatgctaaatcaggtcacccgggaatgcctatgggtattgccgaggttgttactttactttttgctaaacatttaaagtttaatccagagagtcctgaatggaaaaatagagatcgttttattttatctgcagggcatggttctatgttgatttattcattattgtatcttttaggatatcctaaaatttcaatggatcacatcaagaattttagaaaagtaaattctccagctgctggacaccctgaatttggtgagttaccaggaatagaaactactacagggcctttaggacaagggttaggaaatggtctaggtatggccatatctgagaaaataatgagacagagatacggagaaaatgtatttaaccattatacttatattttagcaggtgatggatgtcttatggaaggaataagccatgagtttgcttcactagctgggcatttaaatttatcaaatttagtattaatatatgatgacaataagatttcaattgatggacctacctccttaactatgtctgataatactttagaaagatttaatgcactgggatggcatactacgagcattgatggttataatttagaagaaagtagatagt

SEQ ID NO: 230798 - DNA, 892 bp, Unknown
  Bacterial polypeptide expressing nucleotide sequence isolated from the Sargasso Sea
tctcctaacaaagagggttcagcttcatcacatggttcgcctcttggtgaggatgaaattagtttaacaagaaaaaaattagaatggaattattcgccgtttgaaattccaaatgatttattacatgaatggagaagtttttataaaaaaaatgatggatcaagaaattcatggttatcaaaaaataaagaattaattgaaagtaaaaattttaaagatagttattatcagaaaataaattcacaacttccagaaaaactaggtgaattaaaatctgaacattttaataacaaaacaaattgtgcatcaagaaaatcgagtgagctaacgttaaatttaatttcaaactatcaaaaaaatcttattggtggatctgctgatcttactggatcaaataacactaaggcaaaaaatatgaatgtaattacatcagataattttaatggaaattatattcattacggcatcagagaacatggaatggctggagtaattaatggcattgctctgcataaaggtttaattccatacggaggaacgtttttggtattcaccgattattgcagaccttcaattaggttatcagctattatgaatataccagttatttatgtaatgacgcatgactcaataggattaggagaggatgggccaacccatcaaccagttgaacatctcgcatctttaagagctataccaaatttaacagtcattaggccttgtgatattattgaaactatagaagcatgggaatgtgcaataaacaatactggaccaacaatcctagttttaacaagacaaaatctaccaatgttacagaaagataatcgaaaagaaaatcttgtaaataaaggtgcttataaaataagagatttaaagaatatgatgcaac

SEQ ID NO: 230799 - DNA, 790 bp, Unknown
  Bacterial polypeptide expressing nucleotide sequence isolated from the Sargasso Sea
gaaatactagatgaatggagaaatataggtaacaagggtgagcaacttgaaaataaatggcttgaaacagtaaataaaaatcataaaattaaaagtgaacttaatggcgctaatgagaaattggatttgaacggtctagaaaatttaattcgtaaagaaaaagataaatattttgaatctaagccaagtttagctacacgacaatgctcaatggctgctatagaaaaaatttctgcttttctccctaaattaataggtggttctgcagatttaagtggttctaataatacaaaaacaaataattctaaaattataaactctaaaaattttaatggaaattatattcattacggagttagagaacatggtatggcagcagttatgaatggtttagcgctttatggaggtataataccttatggtggaacatttttaatattttcagattattgtaaaccctctataagactatctgctttaatgggtctcaaggtaatttatgttttttcacacgactcgattggtctaggtgaagatggtcccactcaccaacctatagaacaacttactgggttgcgagcaattccaaatttaaatgtcttcaggccagcagatattaatgaaacatttgaatgttgggaaatagctttaaaaagtgaaaataacccaagtgccattgctttatctagacaaaaagttccctacatcaatccaagcaattctaaagagaataaatgtgaaaaaggagcctatgtcattaatttaacttcgcatgagagcaatgtaacat

SEQ ID NO: 230800 - DNA, 696 bp, Unknown
  Bacterial polypeptide expressing nucleotide sequence isolated from the Sargasso Sea
gatcttgctggatcaaataatactaaaactaacaatcataaaataattagaccaggaaattttaacggaaactatattcattatggagtaagggaacatgcaatgtgtggaataatgaatggattagctttacacagcaaattcataccttatggaggaacttttttaattttttcagattactgcaaaccatcaataagattagcagcgatgatgaaacaacaggttatatatgtaatgacacatgactctattggacttggggaggatgggccaactcaccaaccaattgaacaattatctggattaagatcaataccaaaccttaatgtttttagacctgcagatagattagaaactattgaatgttgggaactcgctttgaggagctctaaaacaccaagtattctatcgttaaccagacaaaaccttaatcccatcagaaataaatattcaaatacaaacaagtgttcattaggagcatatgaagttttaagaacaaataaaaaaataaaattgactattttagcaagcggttctgaagtaaacttagctatagaggcaagccataaattagccaaagataagatatactcaaaagttatatcagtaccatgtatggagctatttgactcacaaacgattaattataaagataaaattttaaatgaaacaaaaataaaaatatcaatcgaa

SEQ ID NO: 230801 - DNA, 640 bp, Unknown
  Bacterial polypeptide expressing nucleotide sequence isolated from the Sargasso Sea
tttgagcagtaataatataaaatcacaaaaagtatcccaattagctaattgtatacgttttttagcaattgatgccgtgcaaaaggcaaattctggacatcctggaatgcctatgggtatggcagacatagctaccgttttatataaaaaacatctcaagtttgacccagctgatccaaaatggattgatagagacagattaattctttcaaatggacatggctccatgcttctttatgcttgcttatatttgactggttacaaagatatcaatctcgaagatataaaaaattttagacagcttaaatctccaactgccggacatccagaatatggtgaacttgaggggattgaaactacaacaggtccattatctcaaggactttctaatggaattggttttgcaatcgctgagaaaaaattatcatctacactgggggaagatactatcaatcatcatacatatatctttgcaggagatggctgtctaatggaaggtttaagtcatgaagcttgcagcttagctggtcatttgcgattgaacaaactgatagttttctttgatgataattcaatttcaatagatgggccagtttcattaagtagtagcgatgatatcagtctaagatttaaatcatat

SEQ ID NO: 230802 - DNA, 739 bp, Unknown
  Bacterial polypeptide expressing nucleotide sequence isolated from the Sargasso Sea
catgcaatggggagcaattacaaatggtataactttacatagtaatttgataggttatgcttcaacttttttggttttctcagactatatgaggccaagtattcgtttagcatctttaatggatattaattctgtatttatttttacacatgattcaatatatcttggtgaagacggaccgacccatcaacctatagaacatttaatgtctttaaggcttattcctaatgtagacgtgataaggccttctaatagcattgagatagatcattcttataggtatgcattttctgattctaaaaatccaaaagtgctctcattaacaaggcaagatttagattatttagactttgatattaaatatgaagaatttattaaaggaggatatgtggtttctgatggagatgattttacccttgtagcttcaggatccgaattggaaatagcctttaagattaaagcagctcttcttgaatattcggtaaggattatcagtgttcctatcttaaataaactttcaaacatgcaaaatgaagaaattaatgaactcttaaaaaataaacacgtttttccaatcgaacttggtagatcaattggttgggagagttatttagggagaataacaaagactttttctattgatagttttggtgagtcagctcctatagaagatcttgaaaaaaactttggatttgacgtaccctcaattactaaagaaattattaagtatttaaattag

SEQ ID NO: 230803 - DNA, 196 bp, Unknown
  Bacterial polypeptide expressing nucleotide sequence isolated from the Sargasso Sea
tttgagcaaacaacatagagaattagctaacagtattagatttttgtcaatagatgctgtgcaaaaggcaaattctggtcatccaggtatgccaatgggaatggcagatgttgtaactgttttgtataaaaattttttaaaatttaacccaaaaaaccctaattggttaaacagagatagatttgtattatcagct

SEQ ID NO: 230804 - DNA, 892 bp, Unknown
  Bacterial polypeptide expressing nucleotide sequence isolated from the Sargasso Sea
atttacaaaaacactaattgatcattatacatatgtttttgctggagatggatgtttgatggaaggtcttagtcatgaagcttgtagtctagcaggtcatttaaaattaaataaattgattatgttttttgatgataattcaatttcaattgatggctcaacagaactctcaagttctgacgatattaaaaaaagatttgaatcttataactggaattatcttaaaatagatggccacagttttgaagaaattaacaatgcaatatttgaagcaaaaaaaagtttatctcctactattatagcttgcaaaacaacaattggttatggatcgccgaataaatcaggtaaagcttcctcgcatggatccccgcttggtgaagatgaaatagagcttgtaagaaaagaactaaattggaactacaaagcttttgaaattcctaatgacttattaatgtcttggagaaactttcataatagaaatattaaaattagagactcttggattaaaacgaactcagaaattataaaatctaaagaatttaataattatttttttaataatattaataatgaattaaataaagatatcattaactttaaaaataatcattttgaagaaaagactatttgtgcaacaagaaaagcaagtgaattatccttaaatttaatttctgatcatttgccaaatttaataggaggttccgcagaccttaccggttcaaataatactaaaaccaaagaaatgaaaatattaaaagcagatgattttagtggtagttatcttcattatgggattagagaacatggtatggctggtattatgaatggtatagcgttacatggaggtttaagaccatatggaggaacttttttagtattttctgattactgc

SEQ ID NO: 230805 - DNA, 801 bp, Unknown
  Bacterial polypeptide expressing nucleotide sequence isolated from the Sargasso Sea
aacaaaaccaactattatagtctgtaaaactataattggatttggatcaccaaataaggagtctacttcatcttctcatggttcacctttgggaaaagaggaggtagagcttacaagaaagaatttaaattggaataatgaagaatttataataccagatgatcttctttttgaatggcgaaattttgcaaaaagaaattctaaagaaaaaaaatattgggaagataaaaacaaagaatttctaaattcaaaaatatataaaaaatatttttattcaaaactagatgaaaatattaaagatcaaattatagattttaaaaaattacatggagatgatgaaactaaatacgctacaagaaaagctagtgaaaaatctcttgagcttttaaataataatattgaaaattttttaggaggttctgcagatctaacaggttctaacaatacgaaaaccaaagatatgagcatttttaattccaaaaattataaaggcagttatgtttactatggtatcagagagcatgcaatggctggaataatgaatggtttaactcttcatggaggaattagagcttatggggggacttttttggttttttcagattattgtaggccttcaataagattatctgctttaatgaacttacctgttatttatgtcatgacacatgactctataggtctgggagaagatggcccaacccaccaacccgttgaacatttagcttctttaagatcaataccaaatttaaatgttattaggccttgtgatgtaattgaaactattgaatcttgggaagt

SEQ ID NO: 230806 - DNA, 844 bp, Unknown
  Bacterial polypeptide expressing nucleotide sequence isolated from the Sargasso Sea
aaagttaaaattggtaagaaatttataggccataaaacttatgttatagcgggggatggttgtttaatggaaggtataagtcatgaagctttgagtcttgcaggtcatttaaaattaaacagtcttattttattgtttgataataactctgtatcaatagatggcccaactaacttagcagtatcagacaatacaaaaaaaaggtttgaaagttacggttggaattatttagatataaacggacataacgaaaaacaaatttttggtgcattaaaaaaagctcaaaattctaaaaaaccctttgctatatcttgcaaaactacaattggttttgggtctccaaataaaggcggcaaagcatcttcccatggaagtcctttaggccaagatgaaattgcgttagttagaaaaaaattaaattggaagtataagcctttcgaaattccagatagaatattaaatgcgtggagggaaattggaaataaagcatctttagcagcagaaaagtttgattctgtaaacaacttaaaaaaggaaaatttaatcccagtatctataagtgaggaaatcgagaaatttaagaaaagttacacaaaaactttggaaccgatggcgacaagaaaatcttcagaaaaatttcttgaaattgcatcaaagttaacaaatcttattgggggatctgctgaccttgctggttctaataatacaaaaactaaaaatcacaagattattaaaccaggaaaatttgatggaaattatattcattatggagttagggaacatgccatgtgtggaataatgaatggaatttctttacatagtaatctaattccttatgggggaa

SEQ ID NO: 230807 - DNA, 763 bp, Unknown
  Bacterial polypeptide expressing nucleotide sequence isolated from the Sargasso Sea
aacattcattatggtgttagagagcatgcaatggcagcaattgcaaatggtatggctgttcatagaggtgtaattccatatatagctacttttttaatcttttcagactacatgaaaggagctattcgtttatcagctttgatgggaatcaaagtaatttatatttttactcatgatagtattggagtaggtgaagatggtcctactcatcaaccaatcgagcaaacaatgtcattaaggttaattcctggtttaactgttattagacctgcagatgctaatgaaacagcaaatgcctggaaaaccgcattagaaaataatggtccaacagcaatattactaacaaggcagaaacttccaattattgattcggatattgtaagtcattctgacaatggattgaattggatagaaaaaaaagaaaataagacagatttaatattattagcatctggttcagaagtttctctagctatgaatgcaagaaatgatttaatgaaagaaaatatttctgcacaagtgatatcaattccaagttgggaattatttaaaaaaaataattttggtagcgaaaatattcccattattacaattgaagcaggaacaacaattggatggtctcaattttattcaggcagagaaggtaaatctattggaatagataggtttggtgcctctgcaccaggtgacatagttatggaaaaacttggtttaagtgtaaaaaatgtagttttgactgcaaaaaaactattaaataaataat

SEQ ID NO: 230808 - DNA, 778 bp, Unknown
  Bacterial polypeptide expressing nucleotide sequence isolated from the Sargasso Sea
gaaattccacaagatattttaaatgaatggaaaaatattggtaaaaaaggtgagcaattagaaaaaaaatggcgagagctaatagataaaaaacacactaagattaaagatgaattagaagaagactattttaattctggacttagtgaattagaaagtttaattgaaaaagaaaaaactaaatattttgagtcaaaacctagcttagcaacccgacagtgctctatggcaactattgagagtgtttccgctttgcttccgcagcttataggcggttcagctgacttaagtggctctaataatactaaaacaaaaaattccgtaattattaattctaagaattttaaaggaaattatatacattatggagtaagagaacacggcatgtctgcagttatgaatggagtcgctctttatgcaggattaataccttacgggggaacttttttgattttttcagactacagcaaaccatctataagattatctgctttaatgggtttaaaagtaatatatattttttctcatgatagcattggcttaggtgaagatggtcctactcatcaacctattgaacaacttacagggctgagagcaattccaaatttaaatgtttttagaccagcagatattaatgaaactttagaatgttgggaaatagcactaaaaagcaatggaaccccaagcgcgattgcattgtcaagacaaaaggttccttacattaaccctcaaaatacaaaaggaaataagtgtagaaaaaggtgcttacgtagttaat

SEQ ID NO: 230809 - DNA, 391 bp, Unknown
  Bacterial polypeptide expressing nucleotide sequence isolated from the Sargasso Sea
tttgaaaacttacaataataaaccaaaaaaagtatctcaattagctaattgtatacgttttctatcaattgatgctgtacaaaaagctaagtctggccatcctggtatgccaatgggtatggctgatattgctactgttttgtttaaagatcatctaaaatttgatccaaaagatccaaaatggatagatagagacaggtttgtattatcgaatggacatggctcaatgctgctttattcgtgtttatatttagcagggtatagagatatcaatattgatgacataaaaaattttagacaactaaattctccaacagctggtcatcctgaatatggagagttagcagggatagaaactacaactgggccactatctcaaggtttgtctaat

SEQ ID NO: 230810 - DNA, 820 bp, Unknown
  Bacterial polypeptide expressing nucleotide sequence isolated from the Sargasso Sea
ttagcagaagaaattttaagagaaagatttggcacgcaagtttttaatcataaaacttatgttttagcaggtgatgggtgtttaatggaaggtataagtcacgaagcattaagtcttgctggccatctaggtcttaaaaatttagttatgttatttgacaataactctatatctattgacggaccaacgagcttagcagtttcagataactataaaaaaagatttaattcatatggatgggacttcgtagaaatagacggtcataatgaaaagaaaatatttaatgcattaaaaaaagtacaaaaagcaaaaaaaccaactgttatatcttgtataacaaaaataggatttggatcacctaataaatcgggaagcgaaaaggcgcatggaagccctcttggtataaatgaagtaaaactagtgagaaaaaaattagattggaaacataaaccttttataattcccaaaaatataatcgaaagttggagaaaaataggaaaaactggacaaatcaaagaagataaatggaaaaaattttatgtaaaaaaaagaaaagaaatagataaaattttttcatcaaaattttctgatatatttaaaaaagaaaaaaaacaggcactaaaagatttaagtgcactagcgacaagaaaatcatcagaaaaaattctgactgcattgaatgtaaaaaaaaatatgataattggtggatctgcagaccttgcaggatctaacaataccaagactaaaaatcatagacctattaagaagaatgattttaaaggcaactatattcattatggtgttagagaacatgcgatgt

SEQ ID NO: 230811 - DNA, 634 bp, Unknown
  Bacterial polypeptide expressing nucleotide sequence isolated from the Sargasso Sea
gttatatacgtcatgactcacgactcgatagggctaggtgaagatggtcctacgcaccaaccaatagaacaattaactggtttaagagctattcctaatttaaatgttatgagaccagctgatagaactgaaaccattgaatgctgggagctggccttaaagagtttaaataaaccaagtatattatctttaacaagacagaatctaaatcctgtaagagaaaaatattctaaaacaaatagatgtgcttctggtgcttatgaaatatcaaggacaaataataaaattaaactaactatacttgcttctggctctgaggttaatttggctatcgatacgagccataaattagccaaacataaaatatattctaaagtaatatcagtgccatcactagaattatttaaattacaatcaaaaccatataagaataaaattctaggtgaatcaaagtatagggtttctatagaagctggctcaacagaaccatggaaacaattaattggaaatgatgggttttgctttggtctagatgattttggaaaaagtgctccttacaaagatgcatataaatattttggtttaactactcaaaatatagtaaataaaataaaaaaaatgatacataaataga

SEQ ID NO: 230812 - DNA, 766 bp, Unknown
  Bacterial polypeptide expressing nucleotide sequence isolated from the Sargasso Sea
gaagaaattttaaaaaataagttaggaaatgatttaattaatcataaaacttatgttttggcaggagatggctgcttaatggaaggaataagtcatgaagcaatgagtttagcaggacatttaaaacttaaaaatttagttatgctatttgataacaattcaatttcaattgatgggccaactagtcttgctgtttcagataattttaaaaaaagatttgaaggatatggttgggattatatttctatcaacggtcataatgaaaaagaaatttttaaagcactaaaaaaagttcaaaaaactaaaaaacctactgtgatttcttgtaaaacaaagattggatatggttcaccgaataaatcaggaaaagcatcgtcccatggaagtccattgggaacagatgaaatcaagcttgtaagaaaagccttaaattggaaaaccaaaccttttgatatcccaaataaaattttaaatgaatggagaaaaattggccaaagaggtgaaattttagaaaaaaaatggaacaaagcattaaaaagaaaaaaaataaaatttaatcaaactttaaaaaataactttactacggtgcttaaaaaagaaaaagagaatgcaataagggagccaaaaagtttagctactagaaaatgttcagaaatgacattgaatgcattaacaaagcaaaaaaataatttaattggtggctctgctgatttagcgggatcaaataatacaaaaactaaaaaccataaaataattaaacctggag

SEQ ID NO: 230813 - DNA, 832 bp, Unknown
  Bacterial polypeptide expressing nucleotide sequence isolated from the Sargasso Sea
aatttgaaattaaaaagtaactggctaaaaaagaataataagactcttaaatcatcaaaatttaaaaatttttttaaaaattctatagataaaaaagtaataaatgaaataaataaatttaaattagaacaccaaaataaaaatactgcttgtgctacgagaaaggcaagtgaattatctttagaacttttaaatgataaaataggtaatcttttgggtgggtcagcagatttaacaggatcaaataatacaaaaacaaaagacatgaagatttttaattcttcaaatttctcaggaaattatatttattatggagtgcgtgaacacgcaatggctgcaatcatgaatggcataactctgcatgggggattgcgtccatatggcggaacttttttagtttttactgattactgtcgtccatcaattagactagctgcattaatgaaaattccaacaatatttgtcatgtcacatgactctattggtcttggagaggatggtcctacacatcaacctgttgaacatcttgcttcattaagagctatacctaatcttattgttcttagaccttgtgatattatggaaactatagaatcttggcaaattgcgctagaggttcaaaatccaagtatcattgtattaactaggcaaaatttaccattaattaggaacacatatttaaaggataatttagtaaaaaaaggcgcgtatttagtcaaagattataaaaaatatgatgcaacaatcttagcaacaggatcagaagttgaaattgctctacaagcttcagccaaacttaaaaaaaataataaaaatattagagtagtatcta

SEQ ID NO: 230814 - DNA, 742 bp, Unknown
  Bacterial polypeptide expressing nucleotide sequence isolated from the Sargasso Sea
atgatgaaaatagaccaagcaattgtttctgcaaaaaatgaaactgaaaaaccaactatgattttctgccgaacaactattggttttgggtctccaaataaatctggaacctcagatgttcacggcgctcctcttggcgaagaagaaattgtaaaaaccagggaagctctcggctgggaatatgcaccttttgaactacctaaatcaatttatgatttttgggatcataaatctgaaggaactagcataaatgaatcatggaatgctggaatgcaggcatataaatctagcaatcctgaaaagtatgaagagctaaatagaagaattgcttcgaaaatgccagtagattttgaagaaaaatttagtgactttcttaatcagtgtgatgcagaaaatagctcgatggcaacaagaaaagcatctcaactatgcttaaacttttttgttaaagaactttctgagcttgttggtggctcagctgatctcactccttcaaataatactttttccaaatcaagttcaactttttcaaatgaaaaccctactggcaatcatataaattatggtgttagggagtttggtatgtctgcaattatgaatggaatggttctacatggaggtattaagccatatggcgcaacctttttagtatttactgattatgctagaaatgcagtgagactatctgctctaatgggattgccaaacatatttgtttatacacatgattctatagctttag

SEQ ID NO: 230815 - DNA, 571 bp, Unknown
  Bacterial polypeptide expressing nucleotide sequence isolated from the Sargasso Sea
caattaggctctaaaacacctggtcatccagaatttgacatagatattggcgttgaaactactactggcccattaggccaaggtattggcaacgctgtgggaatggctctagcagaaaaaatgttagcaagcagatttaatcaagacgatggactaaaaccaattgatcatttcacctatacatttttgggagacggctgtttgatggagggagtctcacatgaagcctgttcatttgcaggaacccatggtttaggaaaattaatatgtttttatgatcaaaatggaatttcaattgatggggagatagctaattggttcacagataacacttcacaaagatttgaaagctatggatggcaagtgcttgaggtagatggtcataatgttgaggaaaccttagaagcaattcgaacagctcaacaagatgcagagcgtccaactttaatatgctgcaaaacaattattggctttggatcgccaaataaatcaggaacatctggtgttcatggctctgcattaggagaggatgaagttaaaaaaactcgggacgagcttgggtgggagcata

SEQ ID NO: 230816 - DNA, 961 bp, Unknown
  Bacterial polypeptide expressing nucleotide sequence isolated from the Sargasso Sea
gaagttgaagttacagctggacctcttggggcaggaatttctaatgcagttggtttggcaatagctgaaactcacttggcagctaaattcaataagcctgattgtaatattgttgatcactatacttacgtcataatgggtgacggctgtaatcaagagggaatcgcatcagaggcttgctcattagctggtcatcttaagcttggaaaattgattgcactctatgacgataatcaaattacaattgatgggcgaaccgatgtttcttttactgaagatgttttaaaaagatacgaagcttatgggtggcatgtacaacatgttgaagatggtaatcatgacgttaaaggaataactgaagctatcgaaacagctaaattgattaaagacaaaccttctataataaaaatctctacaaccattggttatggatcacctaataaatccgatacagctggaattcatggagcagctgttggagaagaagaagctacattaactagagagtttctaaattgggaatatcctccatttgaaataccagaagaagtatatacacattttagaaagtcgatagagaaagggggaaacttagagaaagaatgggattctagatttgaagaatatcaaaaaaaatatccctctgaaggagccgaattaaaaagaatgttagagggtaaattacctgagaattgggactcagatcttccctcctattcacctgatgataaaggtttagccactagaaagcattcacaaatatgtttgggtgctctaggccctaacctgcctgaattaattggtggatctgcagatttaacacactctaactacacagatatcaaaggggaaacaggatcattccagccacatagccctgaaaaaagatatttacattttggtgtacgagagcatgcaatggcagccgtacttaatggtattgcctatcacaatagtggcc

SEQ ID NO: 230817 - DNA, 901 bp, Unknown
  Bacterial polypeptide expressing nucleotide sequence isolated from the Sargasso Sea
ttcactggcgatggctgcctgatggaaggcatctctcacgaggcctgttcgctcgcaggtacgctgaagctcggcaaactgatttgcctgtatgacgacaacagcatttcgatcgacggcgaaaccgatggctggttcacagacgacacggcgaagcgtttcgagtcctatggctggcaggtgattgacgaggttgatggtcatgacagcgcatcgattgcggcagcgatcgatgccgccatcgcggacaccgacaggccgacgctgatttgttgtaggacgattattggctatggctctccgaacaagcagggtacggccggcacgcacggcgcaccgctcggtgacgacgagattgccgaggtcaggaagacgatcggctgggaattcccgccgttcgagatcccggcgcatgtcgccgatggctgggatgcccgcgacgcaggttcggccgcagaagctgcctggcagaagacctgggacgcctacaaggaagcacgccccgatctggccgccgaatacgagcggcgcatgcggggcgacctgccgtctgactggagtgattttgccgacaaagcgattgtggaaatcgatgcggccggtgctgatatggcgacgcgcaaagcgtcactgattgcccttaacgcttttacgccggcattgccggaaatggcaggtggttctgcggaccttacgggttcgaacctgacccggcattccggatcggctgacatcaccgggaacgacgcctccggcaactacatctactttggcgtgcgagagttcggcatggccgcgatgtgcaacggcatgggtctgcatggtggtgttttgccgtattatggcactttcctcgttttctcggactacgcccgcaatgcgcttcgcatggcagcactta

SEQ ID NO: 230818 - DNA, 757 bp, Unknown
  Bacterial polypeptide expressing nucleotide sequence isolated from the Sargasso Sea
atgaaattttataatttttgggatgctaaagaaaccggcgctagcttaaattcagattgggataatctgataaaaagttatcaaaaaaaatatcctgaaaaatcaaaagagctcctaagaaggataaaaggcagtactccagaaaattttgaaagtgactttgatcaatttcttaaagattgtgatatgaataatctttctatggcaacaagaaaagcatcaaaagtttgcctcgacttctttgtcaaaaaaatgccagaattgattggaggatctgcagacctcactccatctaataataccttttctgagtctagctcaactttttccaatgaaaacccttcgggtaatcatataaattatggagtaagagaatttggaatgtcagctattatgaatggaatggtcttacatgggggaataaagccatatggggcaacctttttggtttttactgactatgcaagaaacgcagtaaggctttctgcactgatgggactgccgaatatctatgtttatacacatgactcagtagcattaggcgaagacggaccaactcaccaacctatagaacacttggtaaccttaagatcgacacctaatttaattaattggcggccagctgatttagtcgaaacagctgttgcatggaaggaggcagtaatatcaacttcaactccttcatgtttagtatttagccgacagggaacttcagcaattcaaagaacctccgaacaacttgaagctatacataaag

SEQ ID NO: 230819 - DNA, 700 bp, Unknown
  Bacterial polypeptide expressing nucleotide sequence isolated from the Sargasso Sea
aagaaatttagacaacttaattcaatttgtgctggacacccagagtatcacccaaactcaggtattgaaacaacaacaggtcctttaggtcaaggaattgcaaattctgtgggttttgcaattgcagaagaaattttaaaaaaaaaattaggaagtaatttaataaatcacaaaacctatgtcttggctggtgatgggtgccttatggagggaataagtcatgaagcaatgagtctagccggtcatcttagacttaataatcttataatgctttttgataataattctatttcaatagatggtcctactagtttagcagtctcagatgactataaaaacagatttaaaagctatggatggaattatattttgatcaatgggcataattacagagaaatttataatgcgttaaaaaaagcgcaaacatcaaaaaaaccgactgtgatatcttgtaaaacaaaaataggatttggatctccaaataaaggtggaaaagcctcttctcatggaagtcctcttggaatagatgaaattaagttagttagaaaaaaattagattggaattataaaccatttaaaatacctcaaagaattttaactgattggagaaaaattggagaaaaaggtatcaaaaaagaaaaagtctggaataaaacttttagcaaacacaatcaaaaatttaaaagtattataaaaaata

SEQ ID NO: 230820 - DNA, 304 bp, Unknown
  Bacterial polypeptide expressing nucleotide sequence isolated from the Sargasso Sea
atggctaatgcgattcggtttttgtcagccgatgcagttgaacaggctcagtcaggccatcctggaatgccgatgggtatggcagacgttgctacaattttgttttcagaatttctaaaatttgatgccgaaaaccctctttggcccgaccgggatagatttgtgttgtcagctggtcatggctcgatgttattgtattcgctactttatttatcaggttatcgagatatgacaattgacgaaattaagaactttcgacagttgggttcaaaaacagcgggacatccagagttgggcacgcaag

SEQ ID NO: 230821 - DNA, 916 bp, Unknown
  Bacterial polypeptide expressing nucleotide sequence isolated from the Sargasso Sea
taaaaatatatttaatcacaaaacgtatgtgcttgctggggatggttgtttaatggaaggaataagccatgaagctttaagccttgcaggtcatttaaaacttaaaaatttaataatgctttttgataataattcaatttcaatcgatgggcctaccagtttagcagtttcagataactataaaaaaagattcaatggttatggatgggattacttagatatagatggacacaatgaaaaacaaatatttaatgcaattaaaaaagttcaaaaagcaaaaaaaccaactgtaatttcatgtaaaactaaaattggctacggttcacccaataaatctggaagtgcatcatcacacggaagccctttaggtgaagatgaaataaacttggtaagaaaaaaattaaaatggagttataagccttttgaaataccaaaacatatactagatgtctggagaaatatcggaaacaaaggtttaaaagaagaagaaaaatggaaaaaaaactataataagaaaaaaactcttttgaataaattttttaagaataatttaaaaaatatttttgaagatcaaaagaaaaatcttattaaaaatcaagaagatattgctacaagaaaatcatcagaaaaaattttaaatagtcttattaaagaaaatcaaaatattataggagggtcggcagacctcgctggctcaaacaatacaaaaacaaaatatcatgagataattaaacctaataattttaaaggtaattatattcactacggagtaagagaacatgctatgtgtggtattatgaatgggatagcactacacagtgggctaataccctatggaggaacatttctaatttttagtgactattgtaaaccttcaataagattatcagcaattatgaaacaaagagttttgtat

SEQ ID NO: 230822 - DNA, 599 bp, Unknown
  Bacterial polypeptide expressing nucleotide sequence isolated from the Sargasso Sea
atactacctgcggtttaatccaaagaatccaagttggatcaacagggacagatttattttatcagctggacatggctctatgcttctatactcaattttatttttaacaggatataaaaagattaaattacaagatatacaaaattttaggcaacttaattccatttgtgcaggtcaccctgagtatgaaaaaaactctggtatagaaacgactactggaccgttaggtcaaggtttggctaactctgtaggaatggctttggcacaagaaattttaagtaaaaaacttgggaaggatattattaataacaaaacttatgtaattgctagtgatggagatttaatggaaggtattagccatgaagctatgagcctagctggacatttgaatttaaaaaatttaattgttttttttgataacaacaagatatcgattgatgggtcaacttcattaagtgtttctgataactacaaaaaaagatttgaaagttatggatggtcctttcaagaaataaatgggcataactataaacaaatatttaatgcaattaaaaaagcaaataaatcaaaaaaacctactttaatttcatgtaaaacta

SEQ ID NO: 230823 - DNA, 493 bp, Unknown
  Bacterial polypeptide expressing nucleotide sequence isolated from the Sargasso Sea
aatcgagcagatcaaacactttcggcaattgaaaagcattacagcaggtcatcccgaatacgggcatgtgtcaggcgctgagactactaccgggcctttaggtcaaggattggctaacgctgttggtatggcgctgggtgaacagttgttggcggctcggtttggagtcgagggaattgaccactacacatacgttgttgttggcgatggctgcctcatggaaggtgtaagtcatgaagccatctcattggctggccatttgaaacttagaaaactgatcgtcctattcgatgataatggaataagtatcgatggctcgactaatttgacggtttcagatgatcagcgaaaacgtttcgaagcatctggctggaatgtttgggctattgatgggcatgatcctgaagagatttcagcagcaatcaaggccgcacaaaaaagcgacaagccagctatgatagcttgtcgcacagtcatcggttttggtgcgcca

SEQ ID NO: 230824 - DNA, 783 bp, Unknown
  Bacterial polypeptide expressing nucleotide sequence isolated from the Sargasso Sea
ccacgtattattcagccgcattctgcgttacagcgcccaacatccgaactgggtcaaccgtgaccgctttattctcagtgctggccatgcatcgatactgcaatatgcgatgctttatttgactggctacggattaaccctcgatgacattaaaaatttcagacaatgggatagcctcacacctggacaccctgaggtaggacatactgacggtgtagaggtcaccaccggccctcttggacagggattcgccaatgcagttggaatggccatctctgaacgctggcttcgagaaaaattcggctcagagaatatagatcattcaatatttacaatatgtggcgatggcgacctttcagaggggataagccacgaagctgcttcacttgccggccaacagaaattaggccgccttatatgcatatacgatgataatcatgtgaccatagatggcccgacagagcttgctttacaagataacgcagttaaaagattcgaagcttacggatgggaagttatagacctaggagaatcaggtgaggaccttaataaaattgaaaacgctctcctccaagctaaggcaaatgaagatcagccaacccttgtaatcattcggtcccatatcggcttcccctcgcctaccttgacggatgctcctagcgctcatggatatgcatttaaagatgatcaaatcgcagaagtaaagcaagttatgggctttcctaatgacgagcaattttatgtacctgaggatgtcatacacttctatagagacgctggttc

SEQ ID NO: 230825 - DNA, 769 bp, Unknown
  Bacterial polypeptide expressing nucleotide sequence isolated from the Sargasso Sea
tggtgtgagagagcatgctatgtgtggtgttatgaatggaatatctttgcacagcggtttaattccttatggaggaacttttttaatttttagcgattattgtaagccatcgatcagacttgcggctatgatgaagcaaagagtaatttatgttttcactcatgactctattggacttggagaagatggacctacgcaccaacctattgaacaattgactagtttaagatcaattccaaatttaaatgtatttaggcctgccgatatgattgagacttttgaatgttggcagttagcgctagagaacaaagacactccaagtgtaattgcgttaacaagacaaaaaattaatcctgtcagaaaaaaaaatacttctaaaaatctttcttcaaatggtgcttatgaaattttaagaactaatgataaaataaaattgacaatacttacgtctggatcagaaactagcttagcgtgcgaaattagtcataaattggccacagaaaatatttactcaaaagttgtttcaatgccatgtcaggaaatatttgatcaacaaaaagatgattatcgaagaaaaatattaaacgaaactgatctggttgtttcaattgaagcttctgaaactaatttttggaaaagatatactggtcaaaaaggattaaattttggaataaatagtttcggaaaaagcgcaccatacaaagatatatatgaaaattttggattaaatataaggaatataacaaaaataattaaacaaaaattatga

SEQ ID NO: 230826 - DNA, 672 bp, Unknown
  Bacterial polypeptide expressing nucleotide sequence isolated from the Sargasso Sea
aaccttcaattagactatcagctataatgaaactaagagtaatttatgtaatgacacacgactcaataggtttaggggaagatggtccaacgcaccaaccaatagagcagctatcaggattaagatcaattccaaatttaaatatttttagaccagctgatagaattgaaaccattgaatgctgggagttagctcttaaaagcataaaaactccatcagttctatctctatctcgacagaaccttgatcctgtgaggaaaaaatattctaaacaaaataaatgctcatatggtgcatatgaggttttaagaacaaaagataagataaatttaactttaattgcaagcgggtctgaagtgaaaatagcagtagatgttagccataaattagccaaacataatatatactcaaaagttatatcaatgccatgtcaagaaatttttgatttacaaaaaaattctattaaaaagaaaataatgaatgaaacatctaacaaagtatcaatagaggcttcaactactgatagctgggataaatacataggaaagaatggcatgaaatttggtatgagtgattttggtaaaagtgccccttataaagatatttataaacattttggtttaacaagcgagaatatttcaaaaaaaataataaaattttttaaaaaatagt

SEQ ID NO: 230827 - DNA, 937 bp, Unknown
  Bacterial polypeptide expressing nucleotide sequence isolated from the Sargasso Sea
tctatagatggatcaacagatctttcagtttcagacaatgtaaaaaaaagatttgaagcttacaattggaatataattgaaatagatggtcataactatgaagaaattgatcaagctataattcaagcaaaagaaagtaattctccaacaattatatcgtgtaaaactaaaattggtttcggctctccaaacaaagagagttcggcttcatcacatggttcacctcttggtgaagatgaaattagtttaacaagaaaaagattagaatggagttattcaccattcgaaattccagatgatttattacatgagtggagaagtttctataaaagaaatgatgaattaagaaattcatggttatcaaaaaacaaagatttaattgagagtaaaaattttaaagatagttattatcaaaaaattgattcaaagctttcagaaaaacttaatgaattaaaatttgagcattttaatgataaaacaaattgtgcatcaagaaaatcaagtgaattgactttaaacttaattgcaaataatcaaaaaaatcttattggtggatctgctgatcttactggatctaataacactaaagcgaaagatatgaatgtaattacatcagacaatttcaatggaaattatgttcattatggcatcagagaacatggaatggctgcagtaatgaatggtatagctttgcataaaggtttaataccatacggaggaacgtttttagtattcaccgattattgcagaccttcaattaggttatcagctattatgaatataccagttatttatgtaatgacacatgactcaataggattaggagaagatggaccaacacatcaaccagttgaacatcttgcatctttaagagctataccaaatttaacagtcataagaccatgtgatattattgagactatagaagcatgggaaa

SEQ ID NO: 230828 - DNA, 691 bp, Unknown
  Bacterial polypeptide expressing nucleotide sequence isolated from the Sargasso Sea
ttttattttctctgactactgcaaaccatcaataagattaactgcaatgatgaagcaaagagtaatatatgtgatgactcatgattcaattggtctaggtgaagatggtcccactcatcaaccaattgaacaattgtcaggattaagagctatacctaatttaaatgtattaagaccagcagacagaactgagacgattgaatgttgggaaatagcactgaaaagttcgactaagccaagcatcttatctttaacaagacaaaatcttaatcctataagaaataaatactcaaaaattaataaatgttattttggcgcttatgaaattttaagaactagtaataaaattaaattaactatactggcgagtggttctgaggttaatttagcgatcgatgttagccacaaattagccaaatataaaatatactctaaagtagtatctgtgccatctcatgaactgtttgaattacaatcaaaatcatacaaaaccaaaatccttaatgagtcaaagtataaattttctattgaagcaggttcattagattgttggaaaaaatttattggtgaaaatggtttaagctttggaataaataaatttggaaaaagtgctccttataaagacgtttataaacactttggtttaaaaacagaaaatatagtaagtaaaataaaaaaatttattaaatga

SEQ ID NO: 230829 - DNA, 272 bp, Unknown
  Bacterial polypeptide expressing nucleotide sequence isolated from the Sargasso Sea
tttgaataaaattaacaaagaattagctaaagcaattaggtttctatctattgatgccgttgagaaagcaaattccggccatcccggcatgccaatgggaatggcggatgttgctacgatattatttaaaaattttttaagatttaaccctaaagatccaggctggattaatagagatagattcgttctatctgctggtcatggatcaatgctattatattcattgctatatttaactggttataagagtgtatcttttaatgatattaaaa

SEQ ID NO: 230830 - DNA, 754 bp, Unknown
  Bacterial polypeptide expressing nucleotide sequence isolated from the Sargasso Sea
tactcgcttctttatttaacaggatataaaagtattactttagaagatatcaaaaactttaggcaattagattcgatttgtgctggtcatcctgaatatcatcctaacactggtatagaaactacaacaggtcctttgggacaaggaatatctaatgcagttggatttgcattagcagaggaaattttaaaaaaaagattaggaagtaaaatcattaatcacaaaacctatgtattagctggagatggatgtttaatggaaggaattagtcatgaggcattaagtcttgctggacatttaaaattaaaaaatcttattttattgtttgatgacaattcaatttcaattgacggaccaactagcttagctgtttctgataaccatgagaaaaggtttaaaagttatggctgggattttataaaaataaatggacataatcaaaaagaaatacttagagctttaagaaaagcccaaaaatcaaaaaagcccatagcgatttcttgtaaaacaactatcggttttggatcaccaaacaaaagcggcaaagcatcttcacatggaagtccattaggtgaagaagaaataaagctagtaagaaaaaaacttaaatggaatcatgaagcatttaagataccaaacgaatttttaaatgaatggagaaaaattggtaagaatgcctctgaaaaagcaaaaaaacacgagaatagaaataaaaaaattttttcaaaatttagaaatattaattcttataaaa

SEQ ID NO: 230831 - DNA, 724 bp, Unknown
  Bacterial polypeptide expressing nucleotide sequence isolated from the Sargasso Sea
atattccttgcttcatttgacgggatacaaatcagtttctatagaagatattaaagaatttagacaatggggatcaaaaactcctggacatccagaaacatttgaaactgaaggtgttgaagttacggctgggcctcttggagcaggaatttcaaatgcagttggtttagcaatagctgaaactcacttagcagctaaatttaataaacctgattgcaatatagttgaccattatacttacgtaataatgggtgacggctgtaatcaagaaggaatcgcatcagaggcctgttcattagccggtcatcttaaacttggaaaattaattgcactctatgacgataatcaaattacaattgacgggcgaaccgatgtttctttcaccgaagatgtcttaaaaagatacgaagcttatggatggcatgtacaacatgttgaaaatgggaatcatgatgttaaaggaataactgaagctatcgaaaaagcaaaattaatcacagataagccttcaattataaaaatttccacaaccataggttatggttcgcctaataaatcagatactgctggaattcatggagcagctgttggagaagaagaagctgcactaacaagagagtttctaaattggggatatcctccatttgaaataccagatgaagtatatgcgcattttaaaaaatcaataaacaaaggcgaaaatttagagaaagaatgggattct

SEQ ID NO: 230832 - DNA, 703 bp, Unknown
  Bacterial polypeptide expressing nucleotide sequence isolated from the Sargasso Sea
ttatggtggacttttttaatatttagtgattactgtaaaccatcaatccgattagctgcaatgatgaagcaaagagttatttatatatttacacatgactctattggtttgggtgaagatggtcctactcatcaaccaattgaacaattaactagtttaagatcaattccaaatttaaatgtttttagaccagctgattttattgaaacatttgagtgttggcagaaagctcttgagagtgaaaattctccaagtgttatcgctctaactagacaagctattgatcctataagaattaaagatacttctgaaaacaagtcatcatttggagcatatgaagttttaagatctgacaataatattaaaataacaataatagcatccggatccgaaacaagtttagcaagtgatatttgtcataaattagccacagagaacatttattcaaaagtaatatcaatgccttgtcaggaattatttgatcaacaaagtgaagattacaaaaataaaattttaactgaaactgaattgactgtttcaatagaggcctcagaaacccattattggaaaaagtacacaggagctaaaggattaaactttggaattaatgattttggaaaaagtgcgccatataaagaaatctataatcattttggattgaatgccgataatataattaaaaaaattaaagaaaaattatgaa

SEQ ID NO: 230833 - DNA, 869 bp, Unknown
  Bacterial polypeptide expressing nucleotide sequence isolated from the Sargasso Sea
ttatggaaaagattattcgatcattacacttatgtttttgctggagatggatgcttaatggaaggtttaagtcatgaagcttgtagtctcgcaggtcatttaaaattaaataagcttattatgttttttgataataattctatttccatagatggatcaacagatctttcagtttcagacaatgtgaaaaaaagatttgaagcttataattggaatataattgaaatagatggtcataactatgaagaaattgataaagctataattaaagcaaaaaaaaatgatgctccaacaattatatcttgtaaaactaaaattggttttggctctccaaacaaagagggttcagcttcatcacatggttcacctcttggtgaagatgaaattaatttaacaagaaaaaaattagaatggaattattcgccgtttgaaattccaaatgatttattacatgaatggagaagtttttataaaagaaatgatggatcaagaaattcatggttatcaaaaaataaagaattaattgaaagtaaaaattttaaagatagttattatcaaaaaattgattcacaactttcagaaaaactaggtgaattaaaatctgaacattttaatgacaaaacaaattgtgcatcaagaaaatcgagtgagctaacgttaaatttaatttcaaactatcaaaaaaatcttattggtggatctgctgatcttactggatcaaataacactaaggcaaaagatatgaatgtaattaaatctgataattttaatggaaattatattcattacggcatcagagaacatggaatggctggagtaatgaatggtattgcattgcataaaggtttaattccatacggaggaacgtt

SEQ ID NO: 230834 - DNA, 905 bp, Unknown
  Bacterial polypeptide expressing nucleotide sequence isolated from the Sargasso Sea
cggtcctttgggtcaagggatagccaacgccgttggaatggccctgggcgagactcgccttgctgctgaattcaaccgagaagggttttctgttgtcgatcattatacctatgcatttgttggggatggttgcttgatggaggggatatcccatgaggcttgttcattggcaggcacctgggggctcggtaagctcatcgttttctgggatgacaatgggatttccatcgacggtaaggttggcccttggttcagtgataacacaccggtgcgttttgagtcgtacaactggcaggttattcgcggtgtggatggccacaaccccaaggagttgaacaaggccatcacaacagcacaagaagaaaccggtcgcccgacgctcatttgctgtcggactcagattggtttcggctcacccaaggttgccaatacagctgctgcgcatggcgctcctttgggtaacgaagaaattgccagcaccaaagaacagattggttggccacatgggccttttcaaatccctgctgaaatcaaagacgcttggtctattcagtcgcgtggtgcccagcaaatggcgcagtgggatgcgttatttgcagactacgcaaaagaacaccctaacttggcaagcgagtttaagcgacgcatgagtggtgatttgccagctaactttgaaaagttaagcgatggttttatcgcagaaactcaaaaagagcaggccaaggtagcgactcgcaaagcatccttgcaagctctcaatgcttatgctccccttctaccagaaatggtgggtggctctgcagatttgacgggttccaacctgacgaagtggtcacgggcaaccaactattcactcgatgcacaaactggaaactacatccgttatggtgtgcgtgaatttggga

SEQ ID NO: 230835 - DNA, 915 bp, Unknown
  Bacterial polypeptide expressing nucleotide sequence isolated from the Sargasso Sea
gccgttggtttagcaatagctgaaactcacttagcagcaaaatttaacaagcctgattgcaatatcgttgatcactatacttacgtaataatgggtgacggctgtaatcaagaaggtatcgcatcagaggcctgctcattagctggtcaccttaaacttgggaaattaattgcgctatatgacgataatcaaattacaattgatggacgaaccgacgtttctttcaccgaagatgttttaaaaagatacgaagcttatggatggcatgtacaacatgttgaagatggaaatcatgatgttaaaggaataactgaagctatcgaaaaagcaaaattaattacagataaaccttcaattataaaaatttcaacaactattggttatggttcacccaataaatcagatactgctggaattcatggagcagctgttggagaagaagaagctgcattaacaagagaatttctaaattgggaatatcctccatttgaaataccaaatgaagtatatgcgcattttagaaaatcaataaacaaaggcgaaaacttagagaaagaatgggattctaaatttgaagaatatcaaaaaaaatatcctattgaaggagctgagttaaacagaatgttaaaaggccaactacctgagaattgggactcagatctcccttcttatacacctaatgataaagggttagccaccagaaagcattcacaaatatgtctaggtgctttaggacctaacctgcctgaattaattggcggatcggcagatttaactcactctaactacacagatataaagggggaaactggatcattccagcctcatagtcctgaaaaaagatatttacactttggtgtgcgagagcatgctatggcagctgtacttaatggaattgcctatcacaatagtggt

SEQ ID NO: 230836 - DNA, 799 bp, Unknown
  Bacterial polypeptide expressing nucleotide sequence isolated from the Sargasso Sea
tgttttcgcacgaaaataggctttggctccccaaacaaggagggttctgagtccagccacggctcagcattaggtaccgaagaggtctccctggtgagagagaatctcggttgggatttgccggaatggcagatacctgacgagttatataaagcctgggatcaaaccgagaggggagcaggagtccatgcggggtgggatgagaaaataacagcctacaagcgaaaggatgaggccaagtcggaggaattgtttaggcgtttagaggggaaactaccgtcgggatggtcttctgagttggatgagcttgcatgggcagaacaatcttcgggccagaacacggcgactagaaagtcatcggaaaaatgcatagggaagttagtggatcctctgcctgaggtctttggtggatccgcagatcttaccgggtcaaatttgacgagctgggaaggtgctggatcatcgcgttatttaaactatggggttcgcgagttcgccatgacttccatcacgaatggaatgattcttcatgggggctttcgccccttctcaggcactttcttagtgtttatggagtatgcaagaaacgcagttcgtttagcgagtttgatgagattgccaaatatctttgtatatacccatgactcgatagcggtgggagaggatgggccgacgcaccagcccgtagaacagcttacaaatctcagaacgaccccgaacctgtccacttggaggccttgtgatggtgtagagacagctttcgcttggaaggcggcagtaagctctgatgataagccta

SEQ ID NO: 230837 - DNA, 664 bp, Unknown
  Bacterial polypeptide expressing nucleotide sequence isolated from the Sargasso Sea
gattattgtagaccttctgttcgattggcagctttaatgaatttacctataatttatataatgactcatgattctatagggcttggtgaagatggtcctactcatcaacctgttgagcatttagcttcacttagagcaataccaaatttaacagttattagaccttcagatattattgaaactattgaagcttggcaatatgccctggaatcgcaatctccctgtgtaattgtcttaactagacaaaaccttccaatgcttagaacaaataataatattaatgtagttgaaagtggggcatatcctataatcgattttgaaaattaccaaggaactattctagcaacaggatcagaagtagagatagcatgtgaaagttcaaaaattttatcaagtgaaaatataaatattagagttatttcttttcctagttgggaaatttttgataaaaagagtaaaaaagaaaaaatgcaaattttaggaaataaattactatttgctattgaagctggcgcgataaatggatgggaaaaatatgtttcaaatgaaaactttatagggatgaaatcttttggagctagtggaccatataaagaattatttgaacattttggaataactgcaaaagcattggtgaaattaattaaagaaagaataaaataaa

SEQ ID NO: 230838 - DNA, 826 bp, Unknown
  Bacterial polypeptide expressing nucleotide sequence isolated from the Sargasso Sea
ctcaattcaaaaacagcaggtcaccctgaatatagacatatttctggtattgaaactactactggtcctcttggacaaggtctaggtaatgcagttggtttcgctattgctgaagaattcataggcgctagatggggtagcactctttgtgatcattatacatatgttatcgcaggagatggttgcttaatggaaggaattagccaagaagccatatcattagcaggaaaattagagttaaagaaacttatagtaatttgggatgataatggaattacaattgatgggggagttgatctatcttgcagcactgaccagattagtaggtttaaatcctcaggttggtccaccttttcgtgtaatgctcacaacccaatagaaattgatcaggcaattattgaagctaaaaaagacagtcgcccatctcttattgccgcaaagtcaattataggttttgggtcaaaagctaagcagggaacttccggagcacacggagcaccattaggaaaagatgaggttgaagatttaaggaaaaactttgactggaaatataaagagtttgtaattccgccaaatataaaagatgcctgggaaaagattggggaaagtagcaaacgaaagtttacggcttggtcagaccgcttccagtccttatctaaaaagaaaaaagctgcttttttaaatgagttagatcaaacatttcccttgaagctaaaaagcggtattaaaaattttaaagaatttcattcacaagagtctgaaaaaaaactagcaactagaaaagctagcgaaatatgcttggatttaattaatgattgcttcagta

SEQ ID NO: 230839 - DNA, 601 bp, Unknown
  Bacterial polypeptide expressing nucleotide sequence isolated from the Sargasso Sea
tcttggtgaagatggaccaactcatcaacctattgagcagctttctggacttagatccattccaaatttaaatgtttttagaccagcagatagaatggaaactatagaatgttgggagttagctttaaaaaattcaaaaactcctagtatattatctttaactagacaaaatcttaatccagttcgaaataaatattctataaacaataagtgtgctctaggagcttacgaaattttaagaacaaataaaaaaattaatctaactatactagcaagtggatcagaagttaatttagcactagaaactagccataaattggccaaaaacaaaatatattcaaaagtgatatcggtaccatgcaaagatatttttgactcgcagtctaaatcgtataagaaaaaaattcttggagagactaaatttaaaatatcaattgaagcagggtcaacagattcttggaaaaaatacgttggaaatgaaggttttacttttggaattgatgagtttggaaaaagcgctccatataaaaatatttataaatactttggattaactgcagaaaatatttccaaaaaaattaaaaatcgattaaagaattaa

SEQ ID NO: 230840 - DNA, 725 bp, Unknown
  Bacterial polypeptide expressing nucleotide sequence isolated from the Sargasso Sea
gatggagggaataagccatgaagcaatgagtttagcaggtcatttgaaactaaaaaatttagtgatgctttttgataacaactctatctcaattgatggacctacaagtttggctgtatcagataattataaaaaaagatttgaaagttatggatggaattatatttatattaatggacacaatgaaaaagaaatttttagatcactaaaaaaaatacaaaacacaaaaaaacctacagtaatttcatgtaaaactaaaattggatttggttctccaaacaaatccggaaaatcttcatcacatggaagcccacttggagatgatgaaattaaattggtaagaaaaaaattgaattggaaatacaagccttttcaaattccaaaaaatatattagatgaatggagaaagattggcagtaagggcataaaagtcgaagctaaatggaataaaatttataaaaagaaaaaaaattttataaataaaatattaaataacaatttattaagagctttaaatattgaaaaaaagaacgctttgaaagaaaataaaagcttagctaccagaaaatcttcagaattaactttaaatacactgataaaaaaaagtaatatattaataggtggttctgctgatcttgcgggctctaataatacaaagactaaatatcataaaattattaagccgggagatttttcgggaaattatattcattatggagtaagag

SEQ ID NO: 230841 - DNA, 211 bp, Unknown
  Bacterial polypeptide expressing nucleotide sequence isolated from the Sargasso Sea
ttgagcaaactacacaacgatttagctaattgcatcagatttttatcaattgatgctgttcaaaaggcaaattcaggtcacccaggaatgcccatgggtatggcagatgttacaacagtgctatttaaaaattttttgagatttaatccaaaaaatccagattggttaaatagagatagatttgttttgtctgctggtcatggttctatgc

SEQ ID NO: 230842 - DNA, 794 bp, Unknown
  Bacterial polypeptide expressing nucleotide sequence isolated from the Sargasso Sea
tgggaattatatacattatggagttagagaacacggtatggcagctgtaatgaatggcttagctctttacggaggaataataccatatggcggaacatttctaatattttcagattattgtaaaccctcaattagattatctgctttaatgggtctgaaagtaatttatattttttctcatgactctattggtcttggagaagatggtcctactcatcaaccaattgagcaacttactggtttaagggctattccaaatttaaatgtttttaggcctgctgacataaatgaaactttagaatgttggcaaatagctttgaggagcaacagcaccccaagtgctatagctttatctcgacagaaagttcgttacatcaatcctaaaaattctaaagaaaataaatctgaaaaaggagcttacgttgtaaatataacttcacatgatagtaatgtaacattagtagcctcaggtacagaagtagaacttgctttaaatgttcagatgaaactaaaagaaaataatattcattcaaaagtcgtttcaatgccatgtatggaactgtttgataaacaatctaaggattatcaaaaagatataatagaggaagattcgctaattgtaacattagaagctggaagcattatgtcttggcagaaatatatcaagcaagatggactaaatttaggtatagataaatttggtgaaagcgctccatacaaagaagtctataatcattttaatctgtcggaagaaaatataacaaacttcatccaaaaaaaacttagagagtaga

SEQ ID NO: 230843 - DNA, 806 bp, Unknown
  Bacterial polypeptide expressing nucleotide sequence isolated from the Sargasso Sea
aaaaaactttgatggaaattatattcattacggtgttagagaacatggaatggcggctgttatgaatggattagcattatacagtggattaattccttatggtggaacttttttaattttttctgattattgtaagccatcaataagactatctgctttaatgggtttaaaagtaatttatattttctctcatgactctattggacttggtgaagatggtccaacacatcaacctatagaacaattaaacggtttaagagcaattccaaatcttaatgtatttcgcccagcagatataaatgaaactcttgaatgttgggaaatagccttaaaaagtaaaaatactcctagtgtaattgctctatcaagacaaaaattaccttacattaatcctaaattgtcagaaaagaataaatgcgaaaatggagcctacatagtcaagatgatttcccacagcaaccaagtaacattagttgcctctggatcagaagtcgagcttgcattagaagttcaaaatgcattaaaagaaaatagtattaactccaaagtagtctcgatgccttgtcaagaactttttgataaacaatcagatgattttaaaaaagatattctagatgaagaatctttaatagttacaattgaagcaggtaatgtttcttcctggaaaaaatatttagggaataaaggtataactctaggtattgatagatttggtgaaagcgcaccctataaaaaaatatacgagcatcttaatttatcagtggaaaaaatagtgcttgttatccaagaaaaacttagaaaataac

SEQ ID NO: 230844 - DNA, 773 bp, Unknown
  Bacterial polypeptide expressing nucleotide sequence isolated from the Sargasso Sea
tggggttagggagcatgctatggctggtataatgaatggtatttcattgcacaaaggtcttagaccctatggtggaactttcttggtttttacagattattgcagaccatcaattagattagctgcattaatgaagcttcctgttatttatgttatgactcatgactcaattgggttaggagaagatggccctactcatcaacccgttgaacatttatcatctttaagatcaattcctaatttgcaagttattagaccttgtgatgtaatagaaacaattgaggcttgggaagtagctctcaaaagtacagactcgcctacaattttagttttaacaaggcaaaacctgcctttactaagaaatattagtacaaaatataatttactaaaaaaaggagcttatcctatcatagattttaaagattatgatgccactattcttgcaactggttcagaagttgagattgctcatcaaagctcaaaaaaattatatactaaaggtataaaagtgagagttatttcttttccttgttgggaaatttttgaaaaacaaagcatcaaatatagaaaaaaaataattggaaaaaaaccagtttttgctattgaggctggagtgataaatggctgggaaaaatttatagacgaaaaaaattttataggtatgaaatcctttggctccagcgctccatataaaaaactttatgaatattttggtctaacagaatcaaatttaacaaaaattgtacaaaaaaaaataaaaaggagaacttgat

SEQ ID NO: 230845 - DNA, 810 bp, Unknown
  Bacterial polypeptide expressing nucleotide sequence isolated from the Sargasso Sea
atatcatcaaataattaaaccaggagatttttctggaaattatattcattatggagttagagagcatgcaatgtgtggtataatgaatggtttagcattacatagtaagttaataccatatggtggaacttttttgatattttcagattactgcaaacctgcaataaggctagcagcaatgatgcaacaaagagttatctatgttttaactcatgactctattggtttaggagaagatggacctacacatcaaccaatagaacaactttcagggctaagaactattcctaatttgaatgtgttgagacctgcagatagagtggaaactattgagtgctgggagttagctttaaagtattcgaataagcctagtgcaatatgtctaacaagacaaaacttagaaccagtaagaaaaacacatactaattcaaataaatgctcttttggagcgtatgaaatatttagaagcggaaagaaaattaatttaactatgcttgcgagtggatcggaagtttatttggcaattgaaactagccttaaattagccaaagataaagtatactcaaaagttatttctgtgccatgtgttgagatatttgaaaaacaagctagtagttacaaaaataaaattttaggagaaacgaaatttaaagtatctttagaagctggatcaaccaatttatggaaaaaatatgtaggtcaaaatggtttaacttttggaattaatgaatttggtaaaagtgctccatataaaaaaatttataaaaattttggattgactagtgaaaatatttctaaaaaaattaaaaa

SEQ ID NO: 230846 - DNA, 703 bp, Unknown
  Bacterial polypeptide expressing nucleotide sequence isolated from the Sargasso Sea
tcttgcattacatagtaatttaatgccatatggatcaacttttttagttttctcggattatatgaggccaagtatgcgattagcatctttgatgaatgttaattcgttatttatattcactcatgattcaatatatcttggagaggatggaccaacacatcagcctattgaacatttaatgtcgctaagactgatacctaatcttgatattatcaggccatcaaatagtatggaattaatacattcttataggtatgcattagaaaaaagagataatcctaaagcaataattttatcaagacagaacatgaaattttttgataatgacgttagctataacgattttcaaacaggtgcctatgaatttatgcctggtaaagatattactttggttgcgacaggttctgaactcgagctagccgttgaaataagtaaaaacttaaaagatttatctgtgcagataataagtgctcctattcttaacaagataaataaagacaggatagaatcattaaatttcaatcaaaatatttttacacttgagcttggaagatcaacaggttgggattcatacattgaaaatattataagatcattttcaattgattctttcggagaatcagctccaattgaagacctaactgaaaagtataattttagtgccgaaaaaattagtgatgaaataagaagtttattgaattaa

SEQ ID NO: 230847 - DNA, 715 bp, Unknown
  Bacterial polypeptide expressing nucleotide sequence isolated from the Sargasso Sea
aatggatatagataatttaaagaaaaattttgaatcacattgggataaagctactgctattagaatgttgtcaattgatgctgtacaaaaagcaaaatcaggtcaccctggaatgcctatgggaatggccgatgtttgtactgttttatttggtaaccatttaaaatttgattcaaaacaccctaattggcctgatagagaccggtttattttatcagcgggtcatggatcaatgcttctctattcaattttatatttatctggttatgaagatataaatataaatgatataaaaaattttcgccaaatagcatcaaaaacagctggacatccagaatttgggcatattcaaggaatagaaactactactggaccacttggccaaggtttagcgactggcgtaggaatggcaattgcagaactaattttaaggaataaatgggggaaaaaccttattaaccacaaaacttacgtattggctggtgatggttgcttaatggaaggtataagccaagaagctattacactagctggaaaacacgaattatctaatttaattgtattatgggataataatagaataacaattgatggagatataagcaaatcatgtgtaacaaatcaaattgatcgatttaaatcttcaaattggtctacttttgaatgtgatggacatgatcctgaagaaattgattttaccatttcaaaagctcaa

SEQ ID NO: 230848 - DNA, 627 bp, Unknown
  Bacterial polypeptide expressing nucleotide sequence isolated from the Sargasso Sea
atagcataggcttgggtgaagatggaccaacccaccaacctgttgagcatttagcaataagccgttctactcctaatactttagtatttcgaccggctgacagtgtggaaacggccgaagcttgggaaattgctttgcattctaaaaatacaccttcagtgctcgcacttactagacaagggcttccaactttaaggacaaaccataaatccgcaaatttatcatcaaaaggtgcctatattttagcggaatcggagggaaagagacaagtaatattaatcgccacgggatcagaagtcacattggcacttgctgcaagagcagaattacaaagtgagggtataggtacaagagtagtatcaatgccatgtatggaactcttcgaaaaacaagacgaaaaatatcgcaaacgcattctgcccggagggcggcatattagaattgcaattgaggctggtgtcagagatagttgggataaatggttaatgggagaacgcggtagagaagccagttctggatttatcggaatgtctagttttggtgcttctgcaccagctaacaccctatttgatcattatggaatcacttccaaacaaattataaaacttgtgaaatccaaaatataaa

SEQ ID NO: 230849 - DNA, 710 bp, Unknown
  Bacterial polypeptide expressing nucleotide sequence isolated from the Sargasso Sea
atggtggaactttcttattttttcagactatgcaaagccatcaattaggctcgctgcgttaatgggtttaaaagtgatttatattttttctcatgactccattggtctgggtgaagatggacctactcatcagcctattgagcaattaactggtctaagagccattcctaatcttaatgtttttcgtcctgcagatataaatgaaactcttgaatgttgggaaattgctttaaaaagcaaaaatactcccagtgtaatcgctttatcaaggcagaaattaccttacatcaatcctaatttttcagaaaaaaataaatgtcaaaatggagcttacgtagtaaaaataaattctcatgataacaaagttactttggttgcctctggttctgaagtagagctggctttaaatgcccaaatagaactaaaaaaaaataatattgaatccaaagtagtttcgatgccatgccaagagcttttcgacaaacaatctcatgattttaaaaaagatataatcgatgaagaatctttgatagtaacaattgaagcaggaggtgtttcttcttggagaaaatattctggagataaaggtatttctttaggcgttgaaaaatttggtaaaagtgctccttataaaaaagtatacgaagattttaatttatcggtagaaaaaatagtttcaggcattcaagaacaccttagaaaaaattaac

SEQ ID NO: 230850 - DNA, 881 bp, Unknown
  Bacterial polypeptide expressing nucleotide sequence isolated from the Sargasso Sea
gatgggtatggcggatgttgcaactgtattatttaaatactaccttaggtttaatcccaaaaatccaagttggataaacagagatcgttttattctttcagctggacatggttctatgcttttatattcacttttgtatttaactggatacaaaagtatttccataaaagatattcaaaattttagacaacttaattctatatgcgctggtcacccagaatatgaaaaaaattctggaatcgaaactactactggacctttggggcaaggattatcaaatgctgtgggaatggcaattgcagaggaaatattaaaaaaaaaatttggttctaatttaattaatcacaaaacttatgtcattgtgagtgacggagacttaatggaaggaataagtcatgaggcaatgagtttagctgggcatttaaaactaagaaacctcatagtattttttgataataataaaatatcaatagatggaccgactagcttgtctgtgtcagataattataaaaaaagatttgaaagttatggctggtcttttcaggaaataaatggacataacgaaaagcaaatatcaaaggcaattaaaaaaagtctaaattctaaaaaacctaatattatatcttgtaagacaatcataggatttggatctccaaataaagctggtaaagaaacttctcacggtgctgcgcttggagaagatgagattgctctggttagaaaaaaattaaaatgggaacaccccccttttaaaattccaaaaaatattttagatgaatggagaaaaattggtgaaaaaggttctaaagatgaacaaaaatggattatttcttataacaaaaaaagtaaaaaaattaaggatcaattcaatagagtaatta

SEQ ID NO: 230851 - DNA, 919 bp, Unknown
  Bacterial polypeptide expressing nucleotide sequence isolated from the Sargasso Sea
cttaatcttgttatttgataacaattcaatatctatagatggacctactaatcttgctgtatctgataactttaaaaaaagatttaatagttatggatggaattacattgaaatagatggacataatgaaaaacaaatattcaatgctttaaaaaaggtacaaaactcaaaaattccctcagcaatttcatgtaaaacaataataggctatgggtccccaaataaatctgggaaagagttagcgcatgggagtcctttaggaaaagatgaggtttccttagtaagaaaaaaattaaaatggaatcataaaccttttgaaattccacagaatataatggacgaatggagaaaaattggaaagaaaggatttcacaaatcaaaaaataagaaaattcaaaaaaatattaatgaaatattttctaaaataattaaagaagaaaaaagaaattatattgaatcaattgaagctatggctacaagaaaatcttcacaaaaaatattaaatagattaacaaaaaaaatacctacgcttattggaggatcagcagatctttctgggtctaataatacaaagactaatagtcataaaataattaaacctggaaatttcaatggaaactatattcattatggagttagagaacatgcaatgtgtggaattatgaatggtatagcacttcatagtaatttaattccatacggtggaacttttcttatttttagtgattactgcaaaccctctataagattgtcagctttaatgaaacagagagtaatttatgttatgtcgcacgactctattggtttaggtgaagatggaccaactcatcaaccaattgaacaactttcaaacttaagatctataccaaacttaaatgtttttagaccagctgatactatagaaacttttgaatgctgg

SEQ ID NO: 230852 - DNA, 778 bp, Unknown
  Bacterial polypeptide expressing nucleotide sequence isolated from the Sargasso Sea
agttttggttagaaaaaaattaaaatggaattatgaacctttcaaagtacctgaaaaaatattagaagaatggaaaaaaattggtaacaatggagctaaggaagagataaaatggaaaaaaatatatcaaagaaaaaaaaatcttatagaaaaaactttttcaaataatttcagtaaaattcttgaaaaagaaaaaaaaaatataacaaataatcccgaaacaatagctacaagaaaatcctcagaaaaaattttaagtaagttggttgaaaaaaataaagctttaattggaggttctgctgatttatcaggctcaaacaatactaaaacaaaaaaccataaaataataaaacctggaaattttgtaggtaactatattcattatggtgttagagaacatgctatgagcggaatcatgaacggcttagcacttcatagtcgactaataccatatggtggaacatttcttatttttagtgactattgcaaaccttcaatgagactctctgctttaatgaagcaaagagttatttatgtgatgtctcatgattcaattggcttaggcgaagatggcccaacacatcaaccaattgaacagctatctgcactaagatctattccaaacttaaatgtttttagacctgcagatactaccgaaacattagaatgctggaagcttgccttagagaacacaaacaccccaagtgttatagccctaactagacaaaaacttgaacaagttagaaaagaatttgttaaagaaaataaatgcgctaag

SEQ ID NO: 230853 - DNA, 667 bp, Unknown
  Bacterial polypeptide expressing nucleotide sequence isolated from the Sargasso Sea
ttcgattagattgtcagcattaatgaaaaaaagagtcatatatgtaatgactcacgattctattggtctcggagaagatggccctactcatcaacctatagaacagctttcaggcttacgtgctatacctaatttaaatgtatttaggcctgcagacagaattgaaactatcgaatgttgggagcacgccttaaaaagctcaaaaacacctagtgtgctatcgttgacaagacaaaatttaaatccaataagaaaaacatactcaaataaaaacttatgctcatcgggtgcttacgaggttttaagaacaaataaaaaaattaatctaacaatattagcaagtggatctgaagttaatctagcaatagaggttagccataaattggccaaagataaaatatactccaaagtgatatcaatgccttgtatggaacttttcgaattacaattaaaatcttataaaaataaaattttagaagaaactaaatttaaaatatcgatagaagcgggatcgagtgattgttggaaaaaatatgtaggtgataacggtattacttttggagttgatcaattcggaaaaagtgcaccctataaagatatttataaatattttggactagagagcacaaagattaaaatcattactaaaaaattagtaaaaaaataa

SEQ ID NO: 230854 - DNA, 446 bp, Unknown
  Bacterial polypeptide expressing nucleotide sequence isolated from the Sargasso Sea
cagccgccagaacctgccgcaccagagccgcgatgcccagcagcttagtgatatcgcgcgcggtggctacgtgctcaaggacagcgctggcgagccggagctgatcctgatcgccaccggttcggaagtcggtctggccgtggccgcctacgacaaactgaccgccgccgggcgcaaggtgcgcgtggtgtcgatgccgtccaccagtgtgttcgacgctcaggacgccggctacaagcaggacgtgctgccgctgcaggtcggtgcgcgtatcgccatcgaggcctcgcacgccgactactggtacaagtacgtgggcctggaaggtcgcatcatcggcatgaccagcttcggcgagtcggccccggctccggccctgttcgagcacttcggcttcaccgtcgacaacgtcgtcgccactgccgaagaactgctggacgcctgag

SEQ ID NO: 230855 - DNA, 571 bp, Unknown
  Bacterial polypeptide expressing nucleotide sequence isolated from the Sargasso Sea
atggatatagagaatttaaagaaaaattttgaagcgcattgggataaagctactgccattagaatgttatcaattgatgctgtacaaaaagcaaaatcaggtcacccaggaatgcctatgggaatggccgatgtttgtactgttttatttgacaatcatttaaaatttgattccaagtaccctaattggcctgatagagaccgatttattttatcagcaggtcatggatcaatgcttttgtattcaattttatatttaactggttatgaagatataaatattaatgacataaaaaattttcgccaaatagcatcaaaaacagctgggcatccagaatttggtcatattcaaggaatagaaactactactggaccacttggccaagggttagctactggcgtaggaatggctattgcagaaagaattttaagtaataaatggggtaaaaaccttattaatcacaaaacttacatactggctggtgatggttgcttgatggaaggtataagccaagaagctataacactagctggaaaacacaaattatctaacttaatagtattatgggata

SEQ ID NO: 230856 - DNA, 839 bp, Unknown
  Bacterial polypeptide expressing nucleotide sequence isolated from the Sargasso Sea
aaaatcaaaaaaaccaatagctatttcttgtaaaacaactattggctatggatctcctaacaaaagtggtaaggaatcttctcatggaagtcctttgggtgaagatgaggtaaaattagtaagaaaaaaattaagttggaattataattcctttgaaattccacaaaaactattaaatgaatggaaaaaaattggagataaagcttctaaaaaagctaaaaaaaaagaaaacaaaacaaaaaagatttttaaaaataacataaattcaaattcatttaataatttaattaatgaaataaaaaaaagttacttaaaaaatccaaaaccacttgcaacaagaaaggcatctgaaaaatttttagatattgcctctaaattaccaaatattattggtggttcagctgacttaaccggttcaaataatacaaaaactaaaaatcataaaataataaagccaggtaatttttcaggaaactatattcactatggagttagagaacatgcaatgtgtggaataatgaatggaattgcactccacagtgatcttattccttacggtggtacatttttaatatttagtgattattgtaaaccgtcaataaggctagcggcaatgatgaaacaaagagtaatttatgtttttagtcatgactctattggactaggagaagatggacccacacatcagccaattgaacaattaactagtctaagatcaattccaaacttaaatgtgtttaggccagctgatttaatagaaacttttgaatgctggcaattagcagttgagaataaaagctctcacaagtgttatagctttaacaagacagtctattagt

SEQ ID NO: 230857 - DNA, 688 bp, Unknown
  Bacterial polypeptide expressing nucleotide sequence isolated from the Sargasso Sea
ttttcagattattgtaaaccttctattagactttctgcactaatgcagcaaagagttatttatataatgacacatgactcaataggtttaggagaagacggacctacacatcaacctattgaacaattatccggattgcgatcaattccaaatttaaatgtttttagacctgcggatagaattgaaactatagagtgctgggaagaagcgctaaaaaattcaaaaacacctagcattttatctttaaccagacaaaacctagatccgattagaaataaatactctagtgttaacaaatgctctttaggagcatacgaagttttaagaacaaataaaaaaataaatttaactatacttgcatctggttctgaggttaatttagcaattgcaactagccataaattggccaaatataaaatatactctaaagttatatcaatgccatgccaagatatttttgatcaacaatcagtatcatataagaaaaaaattcttggcgagtctaaaattaaaatatccattgaagcagcatccactgattgttggaaaaaatatgttggaactaatggtttaacttttggaattaatgcttttggaaaaagtgctccatataaagatatttataggtactttggtttaacagcttcaaatattgcaaataaaactaaaaaattaatgagaaattaat

SEQ ID NO: 230858 - DNA, 166 bp, Unknown
  Bacterial polypeptide expressing nucleotide sequence isolated from the Sargasso Sea
gtacaaaaagcaaattctggtcatccaggaatgcgtatgggaatggctgatgtggcaacagttttgtttaaagactttttaaaatttaatcccaaaaatccaaattggttaaatagagatagatttgttttgtcagcgggacatgggtcaatgttgctttattcgc

SEQ ID NO: 230859 - DNA, 670 bp, Unknown
  Bacterial polypeptide expressing nucleotide sequence isolated from the Sargasso Sea
cttcaatttaggttatctgcgttaatgcaaaaaagagtgatatatgtaatgacgcatgactctataggacttggagaggatgggccaacccatcagccaattgaacagctctcaggtttgcgatcaattccaaatttaaatgtctttaggccagcagatagagttgaaacaattgaatgttgggaacatgctttaaaaagttcgaaaacaccaagtattttatctttaacaagacagggcctaaatcccataagaaaaacatttacaaatataaataaatgttctttgggagcctatgaagttttgagaaccaataataaaattaatttaacaatatttgcaagcggttccgaggttaatttggcaatcgaaactagtcataaattagccaaagataaaatatactgtaaggttatatcaatgccatctatggagcttttcgatcaacaatcaaaattatataaaaataaaattttaaacgaaactaaatttaaaatttcaatagaggctggatcaagcgattgttgggaaaaatatgtagggagttcaggtttaacatttggaatcaatgaatttggcaagagtgcaccctacaaagatatttttaaacactttggactaacagtttcaaatattgtcagtaaaaccaaaaaaatgataggaaattaaa

SEQ ID NO: 230860 - DNA, 774 bp, Unknown
  Bacterial polypeptide expressing nucleotide sequence isolated from the Sargasso Sea
aagaaaagtttaaattctacaaagccaaatataatttcttgtaaaactattattggatatggttcaccaaataaagcaggaaaagcatcttcgcatggagcggctttgggtgatgaagaagtagctttagtaagaaaaaaattgaaatggaaatacgaacctttcgaaatcccaaaaaaaattcttgatgaatggcgaaagattggagaaaaaggcagcattgaagaaaagaaatggaactctatttataataaaaaaaataaaaaaataagagatgaaatctctagaataacagataataaattacctaaagaatttaatagccaaatttcatcattaaagaaaaaaatctttgaattaaaatcaggcatggcaacaagaaaatcatctgcttacgttttggaaaatttaacaaaaaatataccagagttaatcggaggttctgctgatttgagcggttccaataatacaaaaacaaaaaattctacaataattaaaccttcaaactttaacggtaattatattcactatggtgtaagggagcatggtatggctggaattatgaatggtatggctcttcatgggggaataattccttatggaggtacttttttaatttttttagattattgtaagccttccttgagattatcagctctaatgggtctcaaggtaatttatattttttcacatgattcaattggactaggtgaagatgggccaactcatcaaccgatagaacacttggctcacttaagggcaataccaaattta

SEQ ID NO: 230861 - DNA, 643 bp, Unknown
  Bacterial polypeptide expressing nucleotide sequence isolated from the Sargasso Sea
aagggaaactatattcattatggagtaagagaacatgcaatgtgtggaataatgaatggtttggcattacatagtgaattaattccttatggtggaacttttttaatctttagcgattattgtaaaccatcgataagattggctgcaataatgaatcaaaaggtaatttatgtaatgagtcatgactcaattggacttggagaagatggtccaactcatcaaccaattgaacaattgacaggactaagatctattccaaatttaaatgtttttagaccggcggatactgctgaaacatttgaatgttgggatcttgctgcatcatccagtagaaatggtccgagcataattgctgtaagcagacaaaaaattaatccaattaggaaagaatttacaaaagaaaacaaatgttcggctggagcctatgaagtatcaagaacaaaaagtgaaatagatgtaactataatagctactggctctgaagttgaattagcaattgaagttagtcaaaaattggccatagaaaagatttattcaaaagttatatccatgccatgccaagaattatttgatatgcaaaaaaaagactataaatctaaaattttaaatgaaacaaaacttaaaatttcaatagaagcagcta

SEQ ID NO: 230862 - DNA, 898 bp, Unknown
  Bacterial polypeptide expressing nucleotide sequence isolated from the Sargasso Sea
ttagttaaaaaaattgattctctagtaggtggttctgcagatttatctggatcaaacaatacaaaaacaaaaaatcataaaattattaaacgtgcaaactttgatgggaattatattcattacggcgttagagaacatgcaatgagtggaattatgaatggtcttgctcttcatggtgggctaattccatatggaggaacatttcttatttttagtgattactgcaaaccatctataaggctttctgctttaatgaaacaaagagtaatttacataatgtctcatgactctattggtctaggtgaagatggcccaacacaccaaccaatagaacaattgtcaggtttaagagcaattccaaatttaaatgtttttagaccagcagatacaacagaaacattggaatgttggcagattgctttggaaagtttaaatactcctagtgtaatagctttaactagacaaaaacttaatcaagttagaaaagaattttctcaagaaaacaaatgctttaaaggagcttatgaaatttcaagaaataatgaaaaaatagatttaacaatatttgctactggatcagaggtaagcttagcagttgaggttagtcataaattggccacacataatatttattcaaaagttgtatcagttccttgccaaaatttttttgataaacaaacaactgaatataaagaaaagattttgaacgaaacaaaatacaaagtatctatagaagctgcttcgaccgactgttggagaaaatttgttggagaaaatggtttgtgctttggtatagatgattttggtaaaagtgctccttacaaggatgcatttaaacactttggtcttacaaaagaaaatatagtgaaaaaaatatacgaaataattaaaaaataaa

SEQ ID NO: 230863 - DNA, 756 bp, Unknown
  Bacterial polypeptide expressing nucleotide sequence isolated from the Sargasso Sea
tttaacggtaactatattcattatggagtaagagaacatgccatgtgcggaataatgaatggattagctttacacagtaaattcataccttatggaggaacttttttaattttttcagattactgcaaaccatcaataagactagcggcaatgatgaaacaacaggttatatatgtaatgacacatgactctattggacttggggaggatggaccaacacaccaacctattgaacagttatctggattaagatcaataccaaaccttaatgtttttagacctgcagatagattagaaactattgaatgttgggaacatgctttaaagagctctaaaacaccaagtattctatcgttaaccagacaaaaccttaatccaataagaaataaatattcaaaaattaacaagtgctcattaggagcatatgaagttttaagaacaaacaaaaaaattaaattgactattttagcaagtggttctgaggtaagcttggctatagaggcaagccataaattagccaaagagaggatatactctaaagttatatcagtaccatgcatggagctttttgactcacaatcaaataattataaaaataaaattttaaatgaaacaaaattgaaaatttcaattgaggctggatcaagagattgttggaaaaaatacgtaggtgatttaggaatggcttttggaattgatgcatttggaaaaagtgctccctataaagatatttataaatattttggtctaatatcc

SEQ ID NO: 230864 - DNA, 771 bp, Unknown
  Bacterial polypeptide expressing nucleotide sequence isolated from the Sargasso Sea
tatgggtatggcagatgttgcaacggtattatataaatactacctgaagtttaatcctaaaaatcctgattggttaaacagagacaggtttattttgtctgcgggacatggatcgatgctcctatactctttgctttatcttacgggttataaaaaaataaaaattgaagatattaaaaatttcagacaacttaattcaatttgtgcaggtcatcctgaatatcataaatcttcaggaattgagacaacaacgggccctttaggtcaaggattagcaaattctgttgggatggcaatagctcaagaggttttaagaaaaaaatttggatcagatattataaataataaaacttatgtaattgccagtgatggggacttgatggaaggaattagtcatgaagcaatgagtttagccgggcatttaaatttaaaaaatttaattgtatttttcgacaataataaaatttcaatagacggttcaacatctttaagtgtttcggacaattataaaaagagatttgagagttatggttggtcttttcaggaaattaatggacataattataaacagatttttaatgcaattaaaaaagcaaataaatcaaaaaaacctacaataatttcatgtaaaacaataattgggtttggttcgccaaataaatcaggtaaagcatcttctcatggtgctcctcttggtgatgatgaaataaaactggtcagaaaaaaacttaattggaaatacgagtctttccaaatacctaacgaaatatt

SEQ ID NO: 230865 - DNA, 908 bp, Unknown
  Bacterial polypeptide expressing nucleotide sequence isolated from the Sargasso Sea
aatggaaggtattagtcatgaagccatgagtttggcaggacacttaaaacttaaaaatttaataatgttatttgataataactctatctctattgatggaccaaccagccttgcagtttcagataattttaagcaaaggtttaaaagttatggttgggattacattaacattaatggtcataaagaggaagaaatatataaagctcttaaaaaagttcagggagcaaaaaaaccaacagtaatttcttgtaaaactaaaattgggtatggatccccaaataaatctggaaatgcttcttctcatggtagtccgttaggtgcagatgaaattaaattagtccgtaaagaattagattgggattatatgccatttgaaattccaaaaaatatattaaaaatttggagagatattgggaaaaaaggagaaaaaattgaaaaaaaatggaacaaagcctatataaagaaaaagactaaaatcaataaattaaccataaacgatttttcaaagtcattattgattgaaaagaaaagagccattttagaaaataaaagcatagcatcgagaaaatcttccgaagcagtgataagcacacttctaaaaagaagtaatacactaatcggtggctcagcagatctagctggatcaaacaatacaaagacaaaagaccacaaaatattaaaaccaggaaattttaatggaaattatattcattatggagtcagagaacatgcaatgtgtggaataatgaacggaatagcattacatagtaaattaataccgtatggagggacttttttaatattttctgattattgtaaaccatcaatgaggttggcggcaatgatgaaacaacaagttatttacataatgacacatgactcaattggacttggagaagatgggccca

SEQ ID NO: 230866 - DNA, 793 bp, Unknown
  Bacterial polypeptide expressing nucleotide sequence isolated from the Sargasso Sea
gaagtgccccaggaggcctacgaccagttccgccaggccatcgatcgtggcgccagcctcgaagccgagtggaaccaggccctggcgacttaccgcaacaagtaccccagcgaagccgctgagttcgagcggatgctgcgtggcgaactgcccgaaggttgggataaggatctgcccaccgccggccccgaagagaagggtctggccacccgcaagcactcccagatctgtctgggtgccctgggccccaacatgcccgaactgatcggcggctccgccgacctcacccactccaactacaccgacatcaagggcgaaaccggctcctaccagcctgaaactcccgagaagcgctacctgcacttcggtgtgcgcgagcacgccatggcagccatcctcaacgggatcgcgtatcacgacagcggcctgatcccctacggcggcaccttcctggtgttcgccgactacatgcgcggctccatgcgcctgtcggccctgagtgaactgggtgtgatctacgtgctcacccacgactccatcggcgtcggcgaggatggccccacccaccagccgatagaaacaatcccgtccctgcgtgccatgcccgggatgctggtgttccgccccggcgatgccaacgaaaccagcggtgcatacaagctggcaatccagaaccgcaagcgccccagtgcgctctgcctcagccgccaaggcatggccaaccaggccaactcttcaatcgacaaggtcgccaaaggtggctacgtgctggaagattgcgacggcacgcctg

SEQ ID NO: 230867 - DNA, 844 bp, Unknown
  Bacterial polypeptide expressing nucleotide sequence isolated from the Sargasso Sea
gcataatcacaaagaaatatttgattctattgaacaagcaaaaaaaagttctaaaccaacattaattgcttgcaaaactaaaattggttatggctctcccaacaaggaatccaaatcttcatctcatggatctccattaggcaaagaagaggttgatcttactagaaaaaatttaaattggccctacgacaactttataattccaaaagaacttcttgtagaatggagaaattttgcaaatagaaataaaaatacaaaagaaaaatggatcaaatttaataatgatattatttcctcagataattttaaaaagtttttttctaattcattaccaaagaatattgataaaaaaattgatgaatttaaaacaaaacattttggagaaaaaactaattgtgcctccaggaaagcaagtgagctttcactagaaatttttacctctgaaatagaaaacttaatcggaggttctgctgatcttactggttcaaataacacaaaaacaaaaaacatgattcctataacaaaaaacaattttaacggttcatacatatattatggaattagagaacatggcatggctggtataatgaatggacttgctttacatggaggtattaggccttacggaggaactttcttagtttttactgattattgcagaccttcaataagattagcagctttaatgaatttgcctgtaatttatgtaatgacccatgattctataggattaggggaagatggacctacacatcaacctattgaacatttagcttctttgagagctattccaaatttaacattaatcagaccctcagatataatagaaacgattgatgcttgg

SEQ ID NO: 230868 - DNA, 908 bp, Unknown
  Bacterial polypeptide expressing nucleotide sequence isolated from the Sargasso Sea
aatgattaatcataaaacctatgtcttggctggtgatggttgtttgatggaaggtataagtcatgaagctttaagtcttgctggacacctaaagttaaaaaatcttattttactttttgataataattctatttcaattgatggtccaactagcttagcagtttcagacgatcatgaaaaaagatttaaaagttatggatgggattatataaaaataaatggtcataattttaaagaaatatcaaaggccctaaaaaaagctcaaaaatcaaaaaagcctatcgccatttcatgtaaaacaacaattggttatggatctccaaacaaaggtggtaaagcttcatcgcacggaagtcctttgggtgatgaggaaataaagttggttagaaaaaaattaaattggaattacagtgcttttgaaattccaaaaaaattaaatgaagaatggaaactaatcggttctaaagcatcaataaaagctgaaaagcacgaaaaaatttataaaaataaattcaaaaaagattttccactagaaaataatctttctaaagatactattgttggatcaattgaaaaagtaaaagcggattatttaaaaaccttagagccaatggcaacaagaaaatgctctgaaaaatttttagaaattatttcaaaacttccaagcttaataggtggctcagcagacttggccggttcaaataatacaaaaactaaaaatcataaaactataaagccaaatgatttttcaggaaattatattcattatggagttagagaacatgcaatgtgtggaataatgaacggtatttcacttcatagtggattaataccttacggcggaacttttctaaattttagcgattattgtaaaccgtcaatcagattagctgcaatgatgaagcaaa

SEQ ID NO: 230869 - DNA, 874 bp, Unknown
  Bacterial polypeptide expressing nucleotide sequence isolated from the Sargasso Sea
aaaaaaggacaaaaattaaacaaaaattggaaaaataaattcaataaatctttaaaacataaagaaattttaaaacaaatgaagatcaataaattaacccgatcaaaagatacaattacatttttggaaaaaataataaaatcttccaaaaatgaagcaactagaaaatcatcacaaaattctttagaatttttatcaacaaaaattacaaatctcataggaggatcagcagatttgactggatcaaatcttacaaaaacatcatcatcaaaacttaacggcaaaggtcttaattatattcattatggtgttcgtgaacattttatgtcagctgctatgaatggtattgcagtacatggtggatttttaccttacggaggtacttttttagttttttctgattattgtaaaaattctataaggctttcagcaatgatggaacaaagagtaatctacgtatttacgcatgattcgatcggcctcggagaggacggacccacgcaccaaccaattgaacatcttgctggtcttagatcaattcctaatttaaatgtgtttaggccatgtgatgcagttgagacatttgaagcatgggaaattgcagtcaatagtctaaagacaccatctgttttagctctttcaagacaaaacttaccattacttagaaaaaaatataaaactaatttatcttcaagaggtggctacttacttaaaaaaactgaaaaacctaagctaactctaataactagtgggtctgaagtatcaattggttttgaaattagtcaaaaattattagaaattgggatacattcaaatttagtttctatgccatgcattgaagttttgaaagacaaaataaaagctataaaaacaa

SEQ ID NO: 230870 - DNA, 389 bp, Unknown
  Bacterial polypeptide expressing nucleotide sequence isolated from the Sargasso Sea
tatgcctaacaaaaaaaatcaatctacagttactcatgatgatttagctaatgcgataaggtttctttcaattgatgcggttgaaaaagcaaaaagtggtcatccaggtttgccaatgggcatggctgatgtagcgactgttctttttacgaagttcttaaaatacaatcctaacgttccgaagtggcatgatcgagataggttcgtactatctgctggtcatggatccatgcttttatactcacttctctatttaagcggtcataaagatatgactattcaagagatcaagaaatttagacagcttggtagtaaatgtgctggtcatccagagtatggacacgctaaaggaatagaaaacacgactggcccacttggacaaggtatcg

SEQ ID NO: 230871 - DNA, 900 bp, Unknown
  Bacterial polypeptide expressing nucleotide sequence isolated from the Sargasso Sea
catccgaaaactggcattgaaacaaccactggtccacttggacaaggaatagctaatgcagtaggatttgcaatagctgaggaagtgctcaaaaaaaaattaggaaaaaatttaattaatcacaaaacatatgttctagcaggagatggttgcttaatggaaggtattagccatgaagcaatgagtttagctggtcatttaaaattgaaaaatttagtgatgcttttcgataataataatatttcaatagatggcccaaccagtcttgctgtttcagataattttaaaaaaagatttgaaagctatggttgggattacatattggttgatggtcacaatgaaaatcaaatttatagagctttaaaaagagttcaaaatgcaaaaaaaccaactgtaatttcttgtaaaacaacaattggatatggttctccaaataaatctggcaaatcatcttcacatggtagtcctttaggacttgaagaaattaaattagtaagaaaaacacttaaatggaaatataaaccctttgaagtcccaaataagttattgaataaatggagagctataggaagaaggggtcaattaatagaaaaaaaatggaacaagctaattaaaaaacaaagtaaaaaattcaatctggtcaaaaaaaataactttaaaaatgctttaaattcagaaaagaaacttgcaatcaaagaacctaaaagcttggcaacaagaaaatgttctgagttaactttacacgcattaaccaattcaaataataatctcattggtggttctgcagatttagctggatccaacaacactaaaacgaaaaaacataaaattattgcaccaagaaattttgatggaaattatattcactatggtgttcagagagcatgcaatgagtggggt

SEQ ID NO: 230872 - DNA, 340 bp, Unknown
  Bacterial polypeptide expressing nucleotide sequence isolated from the Sargasso Sea
tttgaacgcaaataataaagatttatccaacgctatcaggtttttatccatagatgctgtacaaaaagctaactctggacaccctgggatgccaatgggcatggcagatgtggccacgatattgttcaaaaactttctaaaatttaatccaaaaaatccaaattggcttaatagagataggtttgttttgtcagctggtcacggttctatgttgctttactctttattatacttaactggatacaaaagtatttccttaaaagatataaaaaactttagaaaattaaattcaatttgcgcaggacatccggaatacattcctaattcaggaatagagaca

SEQ ID NO: 230873 - DNA, 714 bp, Unknown
  Bacterial polypeptide expressing nucleotide sequence isolated from the Sargasso Sea
tcagaccacttatccagaattggaatatccaacttttgatgccgggacaaagcttgcaaccagaaaagcatttggagcgactttagataaatttgccgatcaaattcctaacctaattggtggatcagcggatctagagccctcaaattataccggaaattttgctacaaagtttggtgatttttccaaaactaatcgtacgggtcgcaatttagcctttggagtaagagaatttccaatggcagcagcaatgaacggtattgcgctacatggcggcttgatcccttttggcggcacttttttggttttcgcagattatgagcgcccagctctacggttaggctctattcagaaatgccgcgtgatgcatgagtttacccacgattcattttgggtgggcgaagatggcccaactcaccaaccaattgagcacgctatggcactgcgcgcaatcccaaactttaatgtttatcgtcctgccgatgcaaaagaaaccgcggtatgttttaaactagcattggagtctcatgaaacacccagtgcattattattaaccaggcaaggggttcccgttttagaatcttcgattgacgccactatagatggcgttactaaaggcgcatatgcagtttatgattgcgattccccagagttaatatttcttgcaacaggttctgaggtgagccttgcaatagaagttgcacagcaaatgaa

SEQ ID NO: 230874 - DNA, 598 bp, Unknown
  Bacterial polypeptide expressing nucleotide sequence isolated from the Sargasso Sea
ttgatttggttcgttcaagtctatataggttttaaagtgagtctagtcttcaaagatttatcaaacgcattaagatttctttctattgatgcagttcagaaagctaattccggtcatcccggtttaccgatgggtatggcggatgtcgcgacggttttatttaaatactacctaaggtttaatccaaaaaatcctagctggatagatcgggatcgttttattctttcagctggtcatggttcgatgttgctgtactctttgctttacctgactggatataaaagtgtttctttaaaagatatacaaaatttcagacaattaaattctatttgtgccggccatcctgaatatgaaaaaaatacaggaatagaaactacaacaggtcctttggggcaaggtttatctaacgctgtaggtttggcaatggccgaagaaatattaaaaaaaagatttggtactaaattatttgatcataaaacttatgtcatagcaagcgatggagatttaatggaaggtataagccatgaagctatgagtttagcaggccaccttaaattaaagaatttaattgttttttttgataataataaaatatcga

SEQ ID NO: 230875 - DNA, 769 bp, Unknown
  Bacterial polypeptide expressing nucleotide sequence isolated from the Sargasso Sea
agttagagaacatgcgatgagtggaatcatgaatggaattgcattacatagtaacttaattccatacggtggaacttttcttatttttagtgattattgtaaaccatccataagattatctgctctcatgaaacaaagagtaatttatgttatgacgcatgactctataggtctcggtgaggatggaccaactcatcaaccaatagaacaactttcaagtttaagatatgtgccaaacttaaatgtatttagaccagccgatacaatagaaacatttgaatgttgggaattggctataggacttaataaaccaagtatcatcgctctatccagacaaaaaattaatcctgttagaaaagaatacgatgctcaaaataaatgtaagaatggcgcatatgaaatattaagaactaatcaacaaatagaactaactattctatcaactgggtcggaagttaatttggcaattgaagttagtcataaattagccacacaaaacatttattcaaaagttatatcagtgccttcatttgaattatttaatcttcaaacagaacaatataaaaggcaaataatgaatgaaactaaacataaaatttctattgaagcgggcgtgactgaaagctggaaaaaatatgtaggagaaaacgggatttgttttggaattgatgattttggaaaaagtgcacctggaaaagatgtttatgactcttttaatctaaacagcaattatataattggtcaaatcaaaaatatgttaaataaataa

SEQ ID NO: 230876 - DNA, 202 bp, Unknown
  Bacterial polypeptide expressing nucleotide sequence isolated from the Sargasso Sea
cttgagtaaactttataaagaattagcgaattgtatcagatttttgtctatagatgctgtccaaaaagctaattctggacatccaggcatgcctatgggaatggctgatgttgcaactgttctttttaaagatttcttaaactttaatcctaaaaatccagattggattaacagagatagatttgttctctcagcaggacat

SEQ ID NO: 230877 - DNA, 862 bp, Unknown
  Bacterial polypeptide expressing nucleotide sequence isolated from the Sargasso Sea
tccgttaggaaaagacgaggttgctttagtaagaaaaaaattaaaatggaactataaaccttctgaaattcccaaaaaaataatggacgaatggagaaaaattggaaaaagaacatctaaaaaatcaaaaaataataaaattaaaaaaaatatttcaaaaatagtttcagagataattaaaaaagaaaaacgcaagtatataaaatcattagaatcaatggccacaagaaaatcttcacaaaaaatactaaatgctttaacaacaaaaatacctactattattggagggtctgcagatctttctggatcaaataatacaaaaacagaaagtcataaaataattaaacctaaaaactttgatggtaattatattcattatggagttagggaacacgcgatgagtggtattatgaatggtattgcattacatagtaatttaattccatatggtggaacttttcttatttttagtgattactgtaaaccctcaataagattgtctgctttaatgagacaaagagtaatttatgttatgtcacacgactctattggactaggtgaagatggaccaactcatcagcccattgaacaacttacaaatttgagatcaataccaaatttaaaagtatttagacctgctgatactacagaaacatttgaatgttgggaacttgcattaacaaatcgcaattcaccaagtataatagcgttgtctagacaaaaaattaatccaataagaaaaaaatatgagtctgaaaataagtgtgctttaggcgcatatgaaatattaagaactaaagagaaaatagatgtaactattctagcaacaggatctgaagttgatttaggtatcgaagttagt

SEQ ID NO: 230878 - DNA, 697 bp, Unknown
  Bacterial polypeptide expressing nucleotide sequence isolated from the Sargasso Sea
ctttttaattttttcggactatctaaaaccctcattaaggttatcagcatttatgggtttaagagtaatttatatattttcacatgactctattggtttgggtgaagacggaccaactcaccaacctatagaacatcttgaaagtctcagatcaattccaaatttaaatgtatttagacctgcagatatcaatgaaacaattgaatgttgggaaatagctttgaaaagtaaaagtaatccaagtgctatagctttatcgagacagaagttgccttacataagtgaacataattcaggtgaaaacatgtcttcgagaggtgcgtatatcttaaaaaaaaattcaaaaaatcctgaagtatcattaattgcctccggatctgaagttgaaatcgccttagaagcgctagaaaaacttaataatctaaatattagttcaaaagtaatttctgtaccttgttttgacatttttgataaacaaaatgagaattataaaaaagaaattttaggtgaaaatacttttaaaatttcaattgaagcctcaagtcaatctggttggaaaaaagttgttggtaaagatggtgtgacagttggaatgtcgacatttggaaaaagtggtccatacaaagaaatatataaattatttaatttaaccagtgaagatgttgtaaaaatagtaaaatcaaatgttaaaaaataa

SEQ ID NO: 230879 - DNA, 341 bp, Unknown
  Bacterial polypeptide expressing nucleotide sequence isolated from the Sargasso Sea
tttgagcaaactacacaatgatttagcaaattgcatcagatttttatcaattgatgctgttcaaaaggcaaattcaggtcacccaggaatgcccatgggtatggctgatgtcgcaacagtgcttttcaaaaattttttgaaatttaacccaaaaaatccggattggttaaatagagatagatttgttttgtcagctggtcatggctctatgcttctatactctttgctgtacttaacgggatataaaagtatttcaattaataatattaaaaaatttagacagcttaattctatttgtgctggacatcctgaatatcatccaaaaacaggtattgaaacaa

SEQ ID NO: 230880 - DNA, 529 bp, Unknown
  Bacterial polypeptide expressing nucleotide sequence isolated from the Sargasso Sea
ttgatttggtacgttcaagtctatataggttttatagtgaatccagtcttcaaagatttatcaaatgcaataagatttctttctattgatgcagttcagaaagctaattctggtcatccggggttgcctatgggcatgtccgatgtagcaactgttttatataaatactacctaaggtttaacccaaaaaatcccggttggataaatcgtgatcgatttattctttccgccggacatggttctatgcttttatattcattgctctatcttactggatataaaagcatatcaataaaagacattcaaaattttagacaacttgactccatttgcgcgggacaccccgaatacgaaaaaaattctggaatagaaactactaccggtccattgggtcaaggcctatcaaatgcagttggtatggcaatcgcagaagaaaatttaaaaaaaagatacggatcaaatttaattaatcacaaaacttatgttattgcgagcgatggagatttaatggaaggtattagccacgaag

SEQ ID NO: 230881 - DNA, 547 bp, Unknown
  Bacterial polypeptide expressing nucleotide sequence isolated from the Sargasso Sea
taaatataaaaaaattagcaacgcttcttttttaaaagattttctaaaagaaaaacaaaatgtaattaataaacctgatgctattgctactagaaaatcatccgaaaaaataatcagttttttaacaaaaaaaaattctattataataggaggttctgccgatctatcaggctcaaataataccaaaacaaaaaatcaccaaataattaaacctggaaattttaaaggaaactatattcattatggagttagagagcatgcaatgtgcggaataatgaatggtttagcgctacatagtgaattaattccatatggtggaacttttttaatctttagtgattattgtaaaccatcaataagattggctgcaataatgagacaaagagtaatttatgtaatgagtcatgactcaattggactcggagaagatggtccaactcatcaaccaattgaacaattagctggtctaagatctattccaaatttaaatgtttttagacctgcggatactgctgaaacttttgaatgttgggatcttgctgcaata

SEQ ID NO: 230882 - DNA, 823 bp, Unknown
  Bacterial polypeptide expressing nucleotide sequence isolated from the Sargasso Sea
aactacaacagggcctcttggacaaggaatatctaattctgtaggttttgcaattgccgaacaaattttaaaaaaaaaaataggtaaagaactaattaatcataaaacttatgttttagcaggagacggttgtttgatggaaggtataagccatgaagcaatgagtctcgccggtcatttaaaattaaataatttaataatgttgtttgataataattctatatcgattgatggtccaacaaacctggctgtatcggataattttaaaaaaagatttgaaagctatggatggaattatttattaatagatggtcatgatgaaaaagatattttcaatgcaattaaaaaatcacataaatcaaaaaagccaactgtgatttcatgtaaaacaaaaataggttatggttcacctaataaatcaggaaaagcttcttctcatggaagtcccttgggagaagatgaaataaaattagtaaggaaaagattaaattggaattatgataaatttgaaataccaaataaaattttaaacagttggagaaagattggaaataaaggagcaaaagttgaatctaggtggaataaaatttataaaaaaaagaagagcaaggtagataaaatactaaaaaataattttaacaaatcaattaaatatgaaaaaataaaagcagtaaaagaaattaatagtttggcaactagaaaatcttccgaattaactttaaattctttaattaaaaataataatacactaattggtggatcagcagatttatctggttcaaataatactaaaacaaagtatcacaaaataataaattcaaat

SEQ ID NO: 230883 - DNA, 610 bp, Unknown
  Bacterial polypeptide expressing nucleotide sequence isolated from the Sargasso Sea
gggcgaagatggaccaactcatcaaccaattgaacatttagcatctctgcggtcgattccaaatttaaatgtctttagaccctgcgatataatagagactattgaatgctgggagattgctctcaaatcaaaaaataaaccatccattatttgcttatcaaggcaaaatttacctttaataagaaaagaaaaagctttaacaaaccactctcagaagggagcctatatagtaaaagatttcgttaataagaagaaagttatacttatggcaactggctctgaagttcaaattgcattgaaggcaagagacactttagaaaaaaaggggatcggcactagagtaatttccttaccctcatgggaattatttgaagagcaagaagagaaatacaagaagaaaattttgcctaaaggtaccgtcaggatagccatagaagcaggtgttaagcttggctgggaaaaatggctttataaaaatggtggaagccaaattaagacttcatttgttgggatgagtggtttcgggacttcagcgccagaaaaagatatctttgatcacttccaaatcaatgttcaagaaatctgtcgccgggttgaatcattaatttaa

SEQ ID NO: 230884 - DNA, 712 bp, Unknown
  Bacterial polypeptide expressing nucleotide sequence isolated from the Sargasso Sea
tattccttatggaggtacttttttaatattttcagactattgcaaaccttcaataagactgtctgccataatgaaacaaaaggtaatttatataatgacacatgactctataggactaggagaagatgggcctacgcaccaacctatagagcaacttgctgctttgagatctattccaaacttaaatgttttgaggccagctgatcaaaccgaaacaattgaatgttgggatattgcattaaaaagcaacaaaacacctagcatattagccttgaccagacaaaacttaaaacccataagaaataactttagcaaaaaaaatcaatgttctaagggagcttacgaggttttgaggactggaaaaaatataaatttaactattttagcttcgggatcagaagtcaatcttgcaattgaaacaagtcataaattggccaaagaaaaaatctattcaaaagtaatatcaatgccttgccaagaaatttttgacaaacaaaacaaaagctataaagataaaatcttaaaagaaagcaaaaacacttttgcaattgaggcaggttcaaaaatgtcttgggaaaaatatattaaaaaaggcttgtctttttcaatagaggactttggtaaaagtgctccttataaaaaagtctacgatcattttggtttaagtagtggaaaaattagtaaaaaaattaaattttatataaaaaaatga

SEQ ID NO: 230885 - DNA, 661 bp, Unknown
  Bacterial polypeptide expressing nucleotide sequence isolated from the Sargasso Sea
ttcattaggcttgcagcaatgatgaaacaaagggttatatatatttttactcatgactctattggacttggtgaagatggcccaacacatcagcctatcgaacagttaactagcttaagatcaattccaaatttaaatgtgttcagacctgctgatatgattgagacttttgaatgttggcaattagcacttgaaagcaaaaacacaccaagtgtaattgctttgacaagacaaagtgttaacccagttagaaaaaaaattatttcaaaaaatgaaacgtcaagaggtgcatatgaaatattaagaacaggcgatgatataaaaataacagtactatcttccggatctgaaacaagcttagcatgtgatattagtcataaattagccacagaaaatatttattccaaagttatatccatgccttgtcaggaattatttgatcaacaaagcaacaattataaaaaagaaattttaaatgaaactgacctaattgtgtctatcgaagcatctgaaacagattattggaaaaaatatactggccaaaatggattaaattttggaataaacaactttggaaaaagtgcaccttataaagaaatatataatcattttaatttaaatgtagaaagtatagttaataaaattaaaaaaaaattatgaa

SEQ ID NO: 230886 - DNA, 844 bp, Unknown
  Bacterial polypeptide expressing nucleotide sequence isolated from the Sargasso Sea
ggagcaggaatttctaatgcagttggtttagcaatagctgaaactcacttagcagctaaattcaataagcctgattgtaatatcgttgatcactatacttacgtcattatgggtgacggctgtaatcaagagggtatcgcatcagaggcctgctcattagctggtcatcttaagcttggtaaattaattgcactatatgatgataatcaaattacaattgacgggcgaacagatgtttctttcactgaggatgttttaaaaagatacgatgcttatgggtggcatgtacaacatattgaagatggtaatcatgatattaaaggaataactgcagctatcgaaaaagcaaaatcaattaaagacaagccttcaattataaaaatttctacaactattggttatggatctcctaacaaatcagataccgctggaattcatggagcagccgttggagaagaagaagcaggtttaacaagagagtttctaaattgggaatatcctccatttgaaatacctgaggaagtatatacacattttagaaaatcaatcagcaaaggagaaaacttagagaaagaatgggattctagatttgaagaatatcaaacaaaatatccttctgaaggagcggagttaaaaagaatgttagagggtcaattacctgataattgggactcagatctcccctcttattcaccggatgataaagggttagccaccagaaaacattcacaaatatgtttaggtgctttaggtcctaacctacctgaattaattggtggatctgcagatttaactcactctaactacacagatatcaaaggagaaactggatcattccagccac

SEQ ID NO: 230887 - DNA, 706 bp, Unknown
  Bacterial polypeptide expressing nucleotide sequence isolated from the Sargasso Sea
acaaatgaaaaaagaattgccaaaacttgctacaaggcaagcaagtcaaaaagctctagaagtaataaataaaactattgtgaacacattaggtggatctgcagatttgacaggatcaaatttaactaaaactagtgaaatgaaaacagtaagctcaaggaagttttcaggaaattatattcattatggaattagagagcatgctatgggctctattatgaatggtgttgcattacataaaggttttataccttatggaggaacatttttagtttttagtgattacatgagagcatctatcagactttccgcattaatgtctttaagagtgatttatgtattaactcatgattcgattggtcttggtgaagatgggccaactcatcaaccaattgaacatctagcaattttaagagcaacacctaatttaaatttgataagaccagcagatattgttgaaactgcagaggcttgggatgttgcactcaaaactaacggacctacagttttagcattgtcaagacaaagtttgagagcttatagatctgacaaaaataataaaaacatggttttaaatggtggatatattctaaataatatttcaaaagacagagatattactttaatagctactggatctgaaatagaaatagctatggaagcttttgaaataatgttcaaagaaggtattaaagctgctgttgtt

SEQ ID NO: 230888 - DNA, 852 bp, Unknown
  Bacterial polypeptide expressing nucleotide sequence isolated from the Sargasso Sea
cttattcttttatttgacaataattctatatcaattgatggtccaacaagtttatcagtttcagatgatcatgaacaaagatttaaaagttacggttggaattatttaaatataaatggtcataattataaagaaattataaaagctttaaaaaaagcacaaaaatctaataagcctattgcaatttcttgcaaaacaacaattggttatgggtctccaaacaaaggtggtaaagcctcagcgcatggaagccctttaggtcaagatgaaataaaactagtcaaaaaaaaactaaaatggaattatgaaccttttaagataccaaatgaaatattaagtgaatggagaaaaattggagaaagcgcttcacaaaaagcaaaaaaaaataggagtaaatataaaaaaattttttcaaattttaaaaatttaaagtcatttaaaaatttaattgaaaaaacaaaaaacgattacttaaaaaattcaaaaccattagctacaagaaaatcatctgaaatgtttttaaacattgtatctagattaccaaatctaattggtggttcggctgatttagctggttcaaataatactaaaacgaaagatcatagaatcataaaaccaggtaatttttctggaaactatattcactatggagttagggaacatgcgatgtgtggaattatgaatggaattgcgttacacagtaatttaattccttatggtggtacgtttttaatattcagcgactactgcaaaccatcaatcagattggcagcgatgatgaagcaaaaagttatttatgtatttacacatgactcaattgggttaggagaagatggtccaactcatcaacct

SEQ ID NO: 230889 - DNA, 847 bp, Unknown
  Bacterial polypeptide expressing nucleotide sequence isolated from the Sargasso Sea
tcaaataatacaaaaactaaaaaccataaaataattaaacctggagattttactggtgactacatccactacggagtgagagaacacgcaatgagtggggttatgaatggtatcgcacttcacagtcatctaattccttatggaggtacttttttaatattttctgattattgcaaaccttcgatcagattgtctgccttaatgaaaaaaagagtcatttatgtaatgacacatgactctattgggctcggagaagatggacctacccatcaacctatagaacagctttcgggtttacgtgctatacctaacctaaatgtattcagacctgcagatagaattgaaactatcgagtgttgggaacacgcattaaaaagctcaaaaacacctagcgtgctatctttaacaagacaaaatttaaatccagtaagaaaaatatacccaaataaaaacttatgctcattaggtgcttatgaggttttaagaacaaataaaaaaattaatctaacaatattagcgagtggatctgaagtaaatctagcgttagaggttagccataaattagccaaagataaaatatattccaaagtgatatcaatgccttgtatggaactttttgaattacaatcaaaatcttataaaaataaaattttagaagaaacaaaatttaaaatatccattgaagctggatcaagcgattgctggaaaaaatatgtaggtgataacggtattgcttttggaattgatgaattcggaaaaagtgcaccttataaagatatttataaatattttggacttgagagtacaaacattaaaaatgtcactaaaaaattattaaataaataaa

SEQ ID NO: 230890 - DNA, 356 bp, Unknown
  Bacterial polypeptide expressing nucleotide sequence isolated from the Sargasso Sea
aatgtcatcgcgtaaaacgctggccaatgcacttcgtgcgctgagcatggatgctgtacagaaagccaaatccggccacccgggcgccccgatggggatggctgacattgccgaagtcctgtggcgtgatttcctgaaccataacccgaacaacccgtcatgggccgaccgcgaccgcttcgtgctgtccaacggccacggctcaatgctgatttacagcctgctgcacctctccgggtacgatctgccgatcgaagagctgaaaaacttccgtcagctgcactccaggacgccgggccacccggaagtcggctacaccgccggcgtggaaaccaccaccggcccgctgggccagg

SEQ ID NO: 230891 - DNA, 845 bp, Unknown
  Bacterial polypeptide expressing nucleotide sequence isolated from the Sargasso Sea
ctactacgggtccattggggcaaggttaggaaacgctgttggtatggcaattgcagaggagatatttagaaaaaaatttggatctggtataattaataacaaaacttatgttatcgctagtgacggggaccttatggaaggaattagtcacgaggcaatgagcttagcaggtcatcttaaattaaagaatttaatagttttttttgataacaataaaatctcaattgacggctccacttcgttaagtgtctccgataattataaaaaaagatttgagtcctatggttggagtttcttagaagtaaatggtcataatgaaaagaaaatatctaaagcgattacaaaggcatcaaaatcaaaaaaacctacaataatatcttgtaaaactataataggatttggatcacctaataaatctggtaaagcttcctctcacggctctcctttaggagatgaggaaatagctttagtgagaaaaaaactaaaatggaacaaccagccatttgaagtgcctcaagaaatactagatgaatggagaaatataggtaacaagggtgagcaactggaaaataaatggcttgaaacaataaataaaaaaaatcctaaaattaaaagtgaacttaacggtgctaatgagaaattagatttgaacggtttagaaaatttaattcgtcaagaaaaagataaacattttgaatctaagccaagtttagctacacgacaatgctcgatggctgctatagaaaaaatttctgcttttcttcctgaattaataggtggttctgcagatttaagtggctctaataatacaaaaacaaataattccaaaaattataaactctaaa

SEQ ID NO: 230892 - DNA, 933 bp, Unknown
  Bacterial polypeptide expressing nucleotide sequence isolated from the Sargasso Sea
ctgcgggactggttcgatgctgatctatgcgctgctgcacctcaccggctatgccgacatgacgatggaccagctgcgcaacttccgccagctgggcgcgatcaccgccggccaccccgagtctggacacgccggcggcatcgagaccaccaccggtccgctcggccagggcattgccaatgcggtcggcatggcgatggcggaacatcaccttgccgccaagttcggccgcgacctggtcgatcacttcacctatgtcatcgccggcgacggatgcctgatggaaggcgtcagccacgaggcggcttcgatggccggccatatgggattgtcacggctgattgtgctgttcgacgacaatggcatctcgatcgacggcagcaccgacctagccgtctccgaggacacgacagcgcgtttcgaagcctatggctggcaggtgctcgccgttgacggccatgacatggatgccgtgtcggcagcaattgccgaggcccgtgcagataccgcacggccgagcctgatcaggtgccgcaccgtgatcggctttggcgcgccgaagaaagccggctctgccagtgtccacggcgccccgctgggtgccaaagaaatcgaggacacacgcgccgccatcggctggtcgcatgcgccgttcgaaattccggccgagatcagcgatgcctggcgcgccgtcggcagccgcggcagcgccgcacgcaaagcttggcagtcgcgtcacgacgccgccgacaccgcggctttcgatgccgcgatgaagggcgatttcaacaccgctatcgacaagtccgtcggcgcctggaagcagagcctgtcggcggagccgcagaagctcgccacccgcgtcgccagccagaaggccatcgaggccatcctgccggcctgcccgtcgctgatcggcggatcagccgacct

SEQ ID NO: 230893 - DNA, 898 bp, Unknown
  Bacterial polypeptide expressing nucleotide sequence isolated from the Sargasso Sea
ttatgatttagattggagcggagatccatttctacatagtgatgatatttatgattactttaaagaaaagagagagaaagataatgaagaacttaggaaatgggaagaaaattttaaaaacaaatatcaagaagattcatcatttaaagataattgggatttattaacttctgaagactttcctagttttgatggagtcagtggggaaaagtatgcatcaagaattttaggttcaaaaatactagaaaacttatcagagtctacaaattcgataattggaggctcagcagatttagctgcttctacgaagcaaataattgatgaaagctacttttcatctactaattacaaaggcaggagcctggagtttggaattagagaacatgcaatgggagcaattacaaatggcataactttacatagtaatttgataggttatgcttcaacttttttggttttctcagactatatgaggccaagtattcgtttagcatctttaatggatattaattctgtatttatttttacacatgattcaatatatcttggtgaagacggaccgactcatcaacctgtagaacatttaatgtctctaaggcttattccaaatgtagatgtcataaggccttctaatagtattgagatgaaccattcttataggtatgcattttctgattctaaaaatccaaaagtactttcattaacaaggcaagatttagattatttagactttgatgttaaatatgaagaatttcttaaaggaggatatgtggtttctgacggagacgattttaccatcgtagcttcaggatccgaattggaaatagcttttaagattaaagcagctcttcttgaatattcggtaagaatcgtaagtgttcctatcttaaataaattt

SEQ ID NO: 230894 - DNA, 267 bp, Unknown
  Bacterial polypeptide expressing nucleotide sequence isolated from the Sargasso Sea
aatggtcgctgcatctgtttcattagaatcactttgtgtaaatagtataagaatgcttgctgtagatgcagtaaataaatctaatagcggacatcctggattaccaatgggatgtgctcctatgggttatgcattatggcaaaacatacttaatcacaaccctaacaacccaaaatggttcaacagagaccgttttgtattatcagctggtcatggctgtatgctgttatattccttacttcatttgacaggatataaatcagtttt

SEQ ID NO: 230895 - DNA, 623 bp, Unknown
  Bacterial polypeptide expressing nucleotide sequence isolated from the Sargasso Sea
ggattccgtatgtgcaggacatcctgaatatcatcctaacacgggcattgaaaccaccacaggtccattaggacaaggaatttcaaatgcggttgggtttgcaatttctggggaaattttaaataaacatttgagaaaaaaaaaaattaatcataaaacttacgtcctcgctggcgatggatgcttaatggaaggaattagtcacgaggcattgagtctagctgggcatttaaaattaaaaaatcttattttattatttgataataactctgtctcaattgatggccccactaaactagctgtttcagataatcacgaaaaaagatttaaaagctacggttgggactacttaaaaattaatggtcatgatttcaaacaaatatctaaagctctaaagaaagcacaaaaatcaaaaaaacccatcgctatttcatgtaaaactacaatcggttatggatctccaaacaaagggggtaaggcttcatcgcatggaagtcccttgggtgatgaggaaataaaacttgtaagaaaaaaactagaatggaaatatgagcctttcaagattccagctgaattattaagtgaatggagaaaaatagggacaagagcctcaaaaaaagctc

SEQ ID NO: 230896 - DNA, 795 bp, Unknown
  Bacterial polypeptide expressing nucleotide sequence isolated from the Sargasso Sea
acccaggaatgcctatgggcatggcagatgttgccacggtattatttaaataccacctgaggtttagtcctaaaaatcctaactggattaacagagatagatttattttatccgccggtcatggatctatgcttttatattctttgctttatttaactggctacaaaagtatttctattgatgacataaaaaattttagacaactaaattctatttgcgcaggtcatcctgaatatgtaaaaggctcaggtattgagactacaactggacctttaggtcaaggtcttggcaatgcagttggaatggcaattgctgaagaaatattgagaaaaaaatttggatctactttaatcaataacaaaacatatgtgatagctagtgatggagatttaatggaaggaattagtcacgaagctatgagtttagcgggtcatctgaagcttaaaaacttaatagttttttttgataataataagatctcgattgacggctctacttcgctgagtgtatctgataattataaaaaaagatttgagggttacggatggaactttttagaaatcaacggtcataatgaaaaacaaatttcaaaagcaataactaaagcatctaaagcaaataagcctactataatatcatgtaagactattattggatttggatctccgaataaatctggaaaagcttcttcgcatggttctcctttgggtgatgacgaaattgcattagtaagaaaaaaacttaaatggaataatgaaccatttgaaattcctgaggatattttaaatgcttaaa

SEQ ID NO: 230897 - DNA, 904 bp, Unknown
  Bacterial polypeptide expressing nucleotide sequence isolated from the Sargasso Sea
aattcaaagagcaaattttggtaaaagtatagtcgatcactatacatatgtatttgctggagacggttgtctaatggaaggtgtcagtcaggaagcaattaccatagctggaagacaaaaattatcaaaactaatagtgttctgggacaataacaatataacgattgatggcaaagttgaactatccgacaataccaaccaagttgaaagatttaggtcgtcggggtggcatgttttagaaattgatggccataatcctgtcgaaattgaccgagcaataattgaggctaaaaaaagcaacaaaccaacaatgatagcctgtgagacgcatatcgctctgggatcatcagctcaagatacgtcgaaaggtcacggcgcactcactgatagcaaattaattgaagaaacaaaaaaagtttacgggtggagccagaaaaaattttatgttccaccagaagtgaaaaaagagtgggaaaaaataggtcaaaaagggcataaagaaaagttatcctgggaacatcgtttcaaatcactctcatcgaaaaaacagttggagttttcaagaatgcactcaatggaagtgcctcaaaatcttaccagagcaattaacaggctcaaaaagtcaataagtattgaaaagccgaaagtagcaactcgcaaatcgagcgaaatggtcttaaatgtaatcaatcctattatgactgaaactataggagggtctgctgatctgtcgggttctaataatacaaaatcatcagacatgacagtattcgacgtagataatagaaaaggtcgatatattcattggggcgttcgtgaacatggcatggctgctgccatgaatggtatggctcttcacggaggactaagaccatacggcggaactttcatgtgttttaccgat

SEQ ID NO: 230898 - DNA, 874 bp, Unknown
  Bacterial polypeptide expressing nucleotide sequence isolated from the Sargasso Sea
ataggttatgcaccaggagttgagactactactggaccattaggtcaaggcattgctaacgctgttggaatggctttggcagagaaaatattggctacaaaatacaataaagataatttccaaatttttgatcacaaaacctatgcctttgttggagatggagatttaatggaaggtatttctcatgaagcttgttccctagctggaacattagaattaggcaatttaatcgtattttacgacgataatgaaattagcattgatggaagggttgataattggtttacagatgatactaagaaaagatttgagtcttatggctgggaagtttttggtaatgtagacggtcatgatgtcaataaaataaattcttgcatagaaaaggcaaaaaaatctgtaaagcctacattgatttgttgcaaaactgtcataggcaagggttctccaaataaatctggcacatctgaagtgcatggggcagctttgggtgacgaagaaatacaacttactagggaagagattggatggaaccacccaccatttgaagttcccgagcatgtttatgaagcttggaataatgaaaaagaaggtcaagctaaagaagatgattggaacgcaatgtttgacgattacttaaaaaattattcaaaagagcactcagaaattcaaagaatattttcaagttctttacctggggagttagataaaatttttgaagacttaatagaaaatttttcaaacgatgatactcaccatgcttcaagaaaggcatctggtatgtgtcttgattcattaggtcctagaattccagaattatttggaggttctgctgatttatctccatctaacaatactcaatgggaagggttctgaa

SEQ ID NO: 230899 - DNA, 352 bp, Unknown
  Bacterial polypeptide expressing nucleotide sequence isolated from the Sargasso Sea
ttgagagaactaaataaaaccttgtctaactctatacgtgctctttcaatggatgccgtacaaaaagctaattctggtcaccccggtatgcctatgggaatggctgacgtttctacaattcttttcaaatattttctaaagtttaacccaagaaacccaagttggataaatagagatagattcgttttatctgctggtcacggatcaatgttgctttattctttactttatttaactggttacaaaagcgttaaattaaaagatattaagaattttagacagataaactctatttgtgcaggtcatcctgagtatgttgaaaactcagggattgagacaactacaggtcctt

SEQ ID NO: 230900 - DNA, 841 bp, Unknown
  Bacterial polypeptide expressing nucleotide sequence isolated from the Sargasso Sea
taatacaaaaactaaaaaccataaaataattaaacctggagattttgctggtgactacattcactacggagtgagagaacacgcaatgagcggggttatgaatggtatcgcacttcacagtaatctaattccctatggaggtacttttttaatattttctgattattgcaaaccttctatcagattgtctgccttaatgaaaaaaagagtaatttatgtaatgactcatgactctattgggcttggagaagatggccctacccatcaacctatagaacaactttctggcttacgtgctatacctaacctaaatgtattcagacctgcagacagaattgaaactattgagtgttgggaacatgcattaaaaagctcaaaaacacctagcgtgctatctttaacaagacaaaaattaaatccagtaagaaaaacacacccaaataaaaacttatgctcattaggtgcttatgaagttttaagaacaaataaaaaaattaatgtaacaatattagcgagtggatctgaagttaatctagcgttggaggttagccataaattagccaaagataaaatatattccaaagtgatatcaatgccttgtatggaactttttgaattgcaatcaaaatcttataaaaataaaattttaaaagaaacaaagtttaaaatatctattgaagctggatcaagtgattgttggaaaaaatatgtagatgataaaggtattgcttttggaatagatgaattcggaaaaagtgcaccttataaagatatttttaaatattttggactagagagcaaaaacattaaaaatattactaaaaaattattaaaaaaataa

SEQ ID NO: 230901 - DNA, 469 bp, Unknown
  Bacterial polypeptide expressing nucleotide sequence isolated from the Sargasso Sea
attgaggtttttatcagttgacgctgtgcaaaaggctaattccggtcaccccgggatgccaatgggaatgtccgatgtggcaacggtcttgtataaatactacctccggtttaatcccaaaaatccaaattggattaatagagatagatttattttatcagcaggacacggttcaatgcttttatactctctgctctacttgactggttatgagagaataaaattagaagatataaaaaattttagacaattaaactctatttgtgctggtcacccagaatatgaaaatggctcaggtattgagactacaaccggacctttgggtcaaggtttggctaattctgttggtatggcaattgcacaggaagttttaaaaaaaagatttggctcagatttaattaacaataaaacttatgtaatagctagtgatggcgatctaatggaaggaattagtcatgaagcaatgagt

SEQ ID NO: 230902 - DNA, 694 bp, Unknown
  Bacterial polypeptide expressing nucleotide sequence isolated from the Sargasso Sea
tttaattttttcagattattgcaagccatcaataagattagcggctatgatggaacgacaagttatatatgtaatgacacatgactccattggtcttggagaagatgggccaacacaccaacctattgaacaattatctggattaagatcaatacccaaccttaatatttttagacctgcagatagattagaaactattgaatgttgggagcatgctttaaagagttttaaaacaccaagtatcttatccttgactagacaaaacctcaatcccattagaaataaatactcaaaaactaacaagtgctcattgggagcttatgagattttaagaactaacaaaaaaattaaactaacaattttagcaagtggttctgaagtaaacttagctttagaggccagccataaattagccaaagataagatatattcaaaagttatatcagtgccatgtatggagctttttgatttacaatcaaataaatatagagataaaatcttaaaagaaactaaattgaaaatttcaattgaagctggatcaagtgattgttggaaaaaatatataggtgataatggaatgacttttggaattgacgtttttgggaaaagtgctccttataaagatatttataaatattttggattaacatcttcaaatattgcaaataaatcaaaaaaattatttaaaaactga

SEQ ID NO: 230903 - DNA, 646 bp, Unknown
  Bacterial polypeptide expressing nucleotide sequence isolated from the Sargasso Sea
aatgaaacaacaagttatatacgtaatgactcacgactcaattggtctgggtgaagatggaccaacgcatcaacctattgagcagctttctggacttagatccattccaaatttaaatgtttttagaccagcagatagaatggaaactatagaatgttgggagttagctctaaaaaattcaaaaactcctagtatattgtctttaactagacaaaatcttaacccagttcgaaataaatattctataaacaataagtgtgctctaggagcttacgaaattttaagaacaaataaaaaaattaatctaactatactagcaagtggatctgaggttaatttagcactagaaactagccataaattggccaaaaacaaaatatattcaaaagtgatatcggtaccatgccaagatatttttgactcgcagtctaaatcgtataagaaaaaaattcttggagaaactaaattaaaaatatcaattgaagcagggtcaacagattgttggaaaaaatatgttggaaatgaaggttttacttttggaattgacgagtttggaaaaagcgctccatataaaaatatttataaatactttgggttaactgcagaaaatatttccaaaaaaattaaaaatcgattaaagaattaa

SEQ ID NO: 230904 - DNA, 775 bp, Unknown
  Bacterial polypeptide expressing nucleotide sequence isolated from the Sargasso Sea
aaaataataaaagaagaaaaagctaagcattttagttcaaaaccgactatggctacaagacagtgctcttcatctgtaattgaggttgtttctaaacttttgcctgaacttgttggaggttcagctgatttaagcggatcaaataacacaaaaaccaaaaattctaaaattattacttcaaaaaattttaatggaaattatatacattacggtgttagggagcatggaatggcggctataatgaatggtttagctttgtatggtggattaattccttatggaggaacatttttaatcttttctgactattgcaaaccttctgttagattgtcagcgttaatgggtcttagagttatatatattttttctcatgactctattggtcttggagaagacggcccaacacatcaacccatagaacaactttctggccttagagcaataccaaatttaaatgtttttcgtccagctgatataaatgaaacattagaatgttgggaaatagcattgaaaagtgaaaataatcctagtgccatagctttatctcgtcaaaaacttccatatgtaagtaaaaatgtatctgaaaaaaataaatgtagtctaggagcttacgaacttaatataacttctcatgattacaaattaatattaatagcttctgggtctgaagttgagattgctttagaagcacaaaataaactaaaagaagaaaatatagacacaaaagtagtttcaatgccttgtcatgaactttttgataagcaggataaagatt

SEQ ID NO: 230905 - DNA, 883 bp, Unknown
  Bacterial polypeptide expressing nucleotide sequence isolated from the Sargasso Sea
ttcggacaattataaaaaaagatttgaaagttacggatggagctttcaagagattaatggtcataatgaaaaagaaatatcaaatgcaatcaaaaaagcatcaaaatcaaaaaaaccaaatttaatatcttgcaaaacaatcattggatatggttcgcctaataaatctggaaaggcatcatcgcatggctcacctttaggggaagaagaaattgaactcgtaagaaaaaaattaaaatggaggtggaattcttttgagattccgaacgaaattttagaagcttggagggatataggaaaaaaaggtagatctattgaaaaagattgggaagaagatttaactaaaaaaaatcccaagattaaacttgaattagaaaaaatgattaagggatttgacgtcaaagatcttgagaaaataattaatgaagaaaaaatgaaatattttagttcaaagcctgatatggctacaagaaagtgttcctcaaatacaattgagactatatcaaattttttacctggacttattggaggatcggctgacttaagtggatcaaataataccaaaactaaaaattctagaattatttcctcaaggaattttaatggtaactatatccattatggagttagagaacacggcatggcctctataatgaacgggctagcattatacggtggtttagttccttacggaggaacatttttaattttttctgattattgcaaaccatctataagactatcagctttgatgggtcttagagtaatatatatattttcccatgactcaattggcttaggagaagatgggcctactcatcagcctatagaacatcttgcaggtctcagagctataccgaatttaaatatttttcgtccagca

SEQ ID NO: 230906 - DNA, 973 bp, Unknown
  Bacterial polypeptide expressing nucleotide sequence isolated from the Sargasso Sea
caagagaaaaaaaaatattttgaagagaagcctcaaatggccactagacaatgttcaatgaaaacaatcgaaagtttaacagatattttaccaaatctaataggcggttcggcagacttaagtggatctaataatactatgacatcaaaatcaaaagtaataaaagccaaaaattttggtggcaattatattcattatggtgttagagaacacggtatggcagctgccatgaatggtctggctttgtatcataatataattccgtttggcggcacctttttaatattttctgattattgcagaccatccattagactctcagctttgatgggattaagagtcatttatattttttcccatgactcaattggtctcggagaagatggaccaacccatcagcctatagaacagcttacaagtctaagggcaattcctaacctcaatgttttcagaccagctgatatgaatgaaactcttgaatgttgggaaatggcgttaaaaaatgataaaggtccaagtgcaattattctttcgagacaaaaacttccatatataaatcaaaatttttctgaaataaataactgctcaaaaggtggataccaattaaagatttcatcacatgctagtaatattacattaattgcttctggctcagaagtttccttggctttagaagtccagaaagatttaaaagatcttaatattgactctttagtagtatcaatgccttgtcaggaaatttttgataaacaagataaagaatacagagataaagttttagaaaatgatagtttgaaaatatctattgaggctggaaattgtattagttggaagaaatatatgtctgaaaaagatttaagtataagcattgaaacttttggaaaaagtgctccttataaaaaactttttgaggattataaactgacaagtcaagaaatcattcagttaattcagcaaaagatcagaaaataat

SEQ ID NO: 230907 - DNA, 850 bp, Unknown
  Bacterial polypeptide expressing nucleotide sequence isolated from the Sargasso Sea
aaaaaaacctactatcatatcttgcaagactaaaattggttatggatcaccaaataaagctggtaccgcatctgcacacggtagtcctttaggagataaagaagtaaaattagtaagaaaaaagttaaattggagtcataaaccattttttattccaaaagatattttaaatgagtggagagagattggaaaaaaaggggaaaaaatagaaaataagtggaaaaaaataaataaagacaaaataaaaaatttttataaacaaattaacttaggtaatttaattactaaagaaaaagaaaaattcataaaaaatcaaacggcaatcgcaacaagaaaatcttcagaaaaatttttagaaatacttgatttaaaaaatttaattggtggttctgcagatttaactggatcaaataatacaaaaactataaatcataaaataatcaaacctggtaattttaaaggtaattatatccattatggagtaagagaacatgctatgagtggtgtaatgaacgggattgctcttcatagtaatctagttccatatggaggaacttttttaatatttagtgactattgcaaaccttctatccgtttatctgctttgatgaagcaaaaagtaatatatgtatttagtcatgactctattggacttggagaagatggaccaacacatcaaccaatagaacatcttgtatctttaagatcaattcctaatttaaaagtttttagaccagccgatacagttgaaacatttgaatgttggcagttggctttggaagcaaaagattttccaagcgcaatagctttaacacgacagaaggttaatcccgtcagattggcacacgaa

SEQ ID NO: 230908 - DNA, 895 bp, Unknown
  Bacterial polypeptide expressing nucleotide sequence isolated from the Sargasso Sea
tatttttaattcaggtatagaaactaccactggtcctttaggacaggcattagctaattcagtgggcttagcaatcgctactgaaatttataaaaaaaaatttggttcaaaaattattaataacaagacatatgttatagcaagtgatggagatctaatggaaggaattagtcacgagtcaatgagtttggctggtcatttaaagttaaaaaatttaatagttttttttgataataataaaatatcaattgatggatcaacgtctcttagcgtatcagataactataaaaaaagatttgaatcatatggttggaattttttagaaataaatggacacaatgaaaaacaaattaattcagctattaataaagctcacaagtcaaacaaaccaaccttgatttcttgtaaaaccataattggttttggctcacccaataaatctggaaaatcttcatctcatggagctcctttaggagaggatgaaataaaattagttagaaaaaaattaaaatggcctcatcttccatttgatataccacaacaaattttaaaagaatggagggatattggatcgaagggagagacgcttgaaaaaaattggttaaatgagcttaataaatcaaaatctgaaataaaagaaaattttaataatttaaacaataatatatttagagacaagttaaatcagttggtaagttcggaaaaagaaaaatattttagagataaacctatcatggctaccagacaatgttctatgaaagtaattgaaactataaataatttaataccaaatttagttggcgggtctgcagatttaagtggttcaaataatacaaaaacttctaactcgatcattataaattctaaaaattatggaggaaattatatacattat

SEQ ID NO: 230909 - DNA, 679 bp, Unknown
  Bacterial polypeptide expressing nucleotide sequence isolated from the Sargasso Sea
ttttcagattactgtaaaaatgctattagattatctgcaatgatgaagcaacaagtaatctatgtttttactcatgactcaataggcctaggtgaagatggaccaacacaccaaccaatagagcatttagcaagccttagatcaattcctaacctttttgtaatccgtccttgtgatgcaatagaaacttttgaggcatgggagtttgcaattaaaaatgtgaattctccaacagcattgatactatcaaggcagaatctaccattaataagaaatgattttaaagaaaataaaattaataaaggggcttattttcttaggcaagttaatggtggaaaattttcaataatttcaacggggtctgaagtatcacttgcactagaagttcataatttttttatgagtaaaaaaataaaaagtaatgtaatatctatgccatcaatggaattatttaacaaacaaaactctaactatcagaacatcattctaggtaataaaccgaaagttataattgaagctgcctcaagttttggttggcataaatatattcgtaaaaatgacttattaattagcatagatagttttggagaatccgggaaaggcaatgatctttttgatttatttggttttaattgtaataatatagttcgtttaattaaaaaagaaattctgacgtgat

SEQ ID NO: 230910 - DNA, 942 bp, Unknown
  Bacterial polypeptide expressing nucleotide sequence isolated from the Sargasso Sea
agatttattgtatcaaatggtcatggttcaatgctattgtactcatgtttgtatttatcaggttattcaggaattaatcttgaaaatattaaaaactttagacagctaaataatcctacagctggacatcctgaatatgggtccgcacctggcattgaaacaactactgggccgttatcacaaggattatcaaatgcagttggaatggcaattgcagagaaaaaacttgcttcaaaattttcaaataaactaattgatcattatacttatgtgtttgcaggtgatggctgtttaatggaaggattaagccatgaagtatgtagtttagcagggcatttaagattaaataaactaattttgttttttgatgacaactcaatttccattgatggatctacagacctttcaagttcagatattactaagaaaagatttgagtcttataactggaattatttaagtatagatggtcataactttgaagaaatagatcaagccattaaagaggcaaaaaaaagttctttaccaacaattatagcttgcaaaactataattggttatggctctcctaataaatctggcaaggcttcatcccatggctctcctcttggtgaagatgaaataaagctagtaagaaagcaattaaaatgggaatctgatccttttgaaatacctttggacttaaaaaacaaatggaaaaatttctatagaagaaatattgaattaaaagaaaattggaacaatacaaatttaaatatttttaaaagctctgattttaaaaattatttttttaatcttgaatataaagaattaaatgaagaaattattaattttaaaaaaatacattttaatgaaaaaactaattgtgcaactagaaaatcaagtgaaatgtcattaaatttaatctctgattatttatcaaactttataggtggttcagct

SEQ ID NO: 230911 - DNA, 773 bp, Unknown
  Bacterial polypeptide expressing nucleotide sequence isolated from the Sargasso Sea
cggagtcagagagtttggtatgaccgccatgacaaatggaatggttttgcatggtggaataaaaccttacagcggaacttttttagtttttatggattacgccagaaatgctgtcaggctagctgcgcttatgaaaataccaaatatctttgtttatactcacgactcaattggtcttggtgaagatgggccaacgcatcagccaattgagcagcttgttacattaagagctactcctaatttaaataattggaggcctgctgacattatagagactgctgtaagctggaaagaagcaatttgctctaaagatacacctcacaccttaatattatcaagacaaaaccttccctttattgagagatcaaaaggacaaatagagatgattgagaaaggaggttatttattatcttctgatgataaagctgatattacattgattagttcagggagtgaggttaagttaattattgaagcagctaaaacaattgcaaaagaaggtttaaaagccaatgttgtttctatgccctgccttgataagtttgtctcacaagataatgcttacagagacagtattattaatcctgaaataccaaaactcgtagttgaggctcttcatccaaattcttggcattgtttggtaaatctaaatgatgttgtaattggcatggaaacatttggagaaagtgctccaggagatgagttaatgaatgagtttggctttacagtcaacaacattgttactcaagctaagaaactaactgcaaaatgag

SEQ ID NO: 230912 - DNA, 801 bp, Unknown
  Bacterial polypeptide expressing nucleotide sequence isolated from the Sargasso Sea
gaataaaagaccgacaattatttgctgtaggaccgtaataggttacggttctcccaagtttcaaggaacaaaccaagctcacggcgcaccacttggaaatgatgaagccgaagtggttagaaaaaaactagagtggaaatataaaccatttgaaataccaaaggacatctatctcaagtggaatgctaaagctaagggtaagaagtatgaggatgcatggagattaaaagtaaataaatacaaaaaattatacaaaagtgagttcgcagagttagagagaagaatcaagagaaagataccaaaaactgttctaacaaaacttaataatttcatgtcgaaaaatcataaaccaatggcaacaagaaaatcatctcaaatagttatgacggaatttggtaagtcaatgccagaacttattgggggatccgcagatcttaaagggtcaaacctatcatattatgatgatatggattcattttcttattcaaatccttcaggaaaatatatttactatggcgtcagagaatttggtatgtcagccatatcaaatggcatcttcctgcatggggcatcaaggccattcgcaagtacttttctaatattttctgagtacgctaaaaatgcgattcgaatgtcagctttgatgaaattgccaatcatttatatatttacacatgattcaataggactaggtgaagatggtcctacacaccaggcagttgaacaactatcttcactaagacttgtcccaggattggatgtttggcgaccagctgatacccaagaaacagctgctgcatg

SEQ ID NO: 230913 - DNA, 781 bp, Unknown
  Bacterial polypeptide expressing nucleotide sequence isolated from the Sargasso Sea
tctttgctgtacctaactgggtataaaagcatatcgataaataatattaaaaaatttaggcagctaaattctatttgtgctggacatcctgaatatcatccgaaaacaggtattgaaactacaacaggccctctaggacagggtatatctaatgctgttggttttgcaatcgctgaggaaattttaaaaaataaattaggtaaagatttaattaatcacaaaacttatgttttagctggagatggatgcttaatggaaggaataagtcatgaagcaatgagtttagcgggacatttaaaacttaaaaatttagttatgctatttgataacaattcaatttcaattgatggtccaacaaatcttgcagtttcagataattttaaaaaaagatttgaaggatatggttgggattatatttcaataaacggtcataatgaaaaagaaatttttaaagcactaaaaaaggttcagaacgctaaaaaaccttctgttatttcttgtaaaacaaaaattggatatggttcaccgaataaatcaggaaaggcatcatctcatggaagtccattaggagcagatgaaatcaaacttgtaagaaaagtcttaaattggaaaaataaaccttttgatatcccaaataaaattttaaaagattggagaaaaattggccaaagaggtgaaattttagaaaaaaaatggaacaaaatattaaatagaaaaaaaattaaacttagtcaaacattaaaaaataactttaatacagcacttaagaaagaaaaaagaa

SEQ ID NO: 230914 - DNA, 865 bp, Unknown
  Bacterial polypeptide expressing nucleotide sequence isolated from the Sargasso Sea
aaaaattctaaacttaaaaatgagtatgatagattagaaaaaggagatttgcctgaaaatttagatgatgtattgggagatgaaaaattaaaattttttaaagaaaaacctaaaatggctacaagacaatgttctgcttcaattataaatactatatctaatattatgccagaattaataggtggttctgcagatcttagtggttcaaacaatacaaaaactgaagcttcaaaggtgattaatgctaagaatttttcaggaaactatattcattatggtgttagagagcatgctatggccggggtaatgaacgggatggctttatacggaggtttaattccattcggtggaacatttttaatattttcagattatttaaaaccctcaatgaggctatctgctcttatgaagttaagagtaatttatattttttcacatgattctattggtcttggagaggatggccctacccaccagcctatagaacatttagagcacctgagagcaattccaaacttaaatatttttagacctgcagatattaatgaaactattgaatgttgggaaattgccttaaaaagtaaaaataatcctagtgcaatagctttatctcgacaaaagttaccttatgtaagtgaacacagctctggtgaaagcatgtgctctaaaggtgcgtacgttttgaaaaaaacttctgaaaatgttgatgtttcattaatagcttctggatcggaagttgaaattgcactggaggcccaagagaaacttaaaaacttaaatataagctcaaaagtcatttcggttccttgttatgatctattccaaaatcaaactgagcattacaaaaacgatgttcttggcaaag

SEQ ID NO: 230915 - DNA, 910 bp, Unknown
  Bacterial polypeptide expressing nucleotide sequence isolated from the Sargasso Sea
cgcagttggaatggctatagcacttaaaaaattatcaaaagaaaaaaaattatcaaaaacaccaaaagtatatgtcttttgtggtgatggttgtttgatggagggaattagccaagaggcaataagtctagctggacacttagagttaaataatttgatattaatttatgataacaacaatattagtatcgacggttccaccgaattagcttttagtgataatacaaacctaaggttcaagtcagttaattggaaggtgtatagtggtaaaggtcatgaccatcaaaatatttatgatttatttaaaaaagcgcaaatatcaaacgctccatgtttgttaaattttaaaactactattggttttggttcacctaacaagtctgccaaagcatcatcacatggttcacctttaggttcagatgaagttaatttaactagaagtaaattatcttggagcgaaaaaccatttcaaatacccgataaactcttaaagatttggagaggatctgctgataaaaataaaaagttatacaaaaagtcgaaatcaacatttcattcaaacttatctaaaaaagatatagataagttattcaacaagatagaattagatttgaaaaattttaattctgatcaagctacaagaaaatcctctgaagcaatcttaaattatattaaagaagatcatccaatccttggtggctctgcagatttaactggttctaataatactaaaggtaaagagatgtctgtcatgaatagtaaaaacatgtcaggtcaatatattcactatggtgtaagagaacacggcatggctgctataatgaatggaattgcagctactaaaatttataaaacctattcaggaacctttttaagttttgctgattacatgaagccaagtcttcgtctt

SEQ ID NO: 230916 - DNA, 843 bp, Unknown
  Bacterial polypeptide expressing nucleotide sequence isolated from the Sargasso Sea
atcttacaggttcaaatacactaaattgggaaggtacgcatgagattaaatatggggatttttctggaaattacataaattatggtgttagagagttcgccatgacaggaataatgaatggtttagttctacatggcggaattaagccttatagtggtactttcttgacctttcttgattatgcaagaaatgctgtcaggatggctgcactgatggaaatacctacagtattagtctactcacacgactccataggagttggggaagacggaccaactcaccaaccagttgagcacctaacaagcctaaggactaccccaaatttggaaacttggaggccttgtgacacttctgaaacagccatctcttggttatcagcgataaccaatacttctaagcctacagcattgatactttcaaggcagaaacttccaacattttctagaaacgaatcgcaaataaactcaatttctaaaggcgcttatgttctctatgaacctgagtctaaagcagaattagttttaattgctaccggttcagaagttaaacttgccatggaagttgcagaagaacttaaaggtaaaaaaaatataagagtggtttctatgccttgttcagaaaggtttgatgagcagtcagatgaatacaagacttcggtattaggaaatggcattaaaagggttgccattgaagcctctcatgaagattggtggagaaaatatgtaggccttgaaggagaggttattggcatgacttcctttggggagtccgcccccggcgatgatctatttgagcattttggatttaccaaagaaaagatcataaaaactttaggtttataaa

SEQ ID NO: 230917 - DNA, 927 bp, Unknown
  Bacterial polypeptide expressing nucleotide sequence isolated from the Sargasso Sea
aattatcaataattatggaaaagaagtattcgatcattacacttatgtttttgctggagatggatgcttaatggaaggtttaagtcatgaagcgtgtagtctcgcaggacatttgaaattaaataagcttattatgtttttcgataataactccatttccatagatggatcaacagatctttcagtttcagacaatgtgaaaaaaagatttgaagcttataattggaatataattgaaatagatggtcatagatatgaagaaattgatcaagctataattcaagcaaaaaaaagtgatgctccaacaattatatcttgtaaaactaaaattggtttcggctctccaaataaagagggttcagctgcctcacatggttcacctcttggtgaagatgaaataagtttaacaagaaataaattagaatggaatttttcgccgtttgaaattccaaatgatttattacatgaatggagaaatttctataaaaaaaatgatgaattaagaaattcatggttatcaaaaaataaagaaataattggaagtaaaaattttaaagatagttattatcaaaaaattgattcacaacttccagaaaaactaggtaaattaaaatctgaacattttaataataaaacaaattgtgcatcaagaaaatcgagtgaacttacgttaaatttaatttcaaactatcaaaaaaattttattggtggttctgctgatcttactggatcaaataacactaaagcaaaagatatgaatgtaattacatctgataattttaatggaaattatattcattacggcatcagagaacatggaatggctggggtaatgaatggcattgctttgcataaaggtttaattccttacggaggaacatttttggtattcactgattattgtagaccttcaataaggttatcagc

SEQ ID NO: 230918 - DNA, 794 bp, Unknown
  Bacterial polypeptide expressing nucleotide sequence isolated from the Sargasso Sea
acaaaaaatcaccaaataattaagcctggaaattttaaaggaaactacattcattatggagttagagaacatgcaatgtgtggaataatgaatggtttagcgctacatagtgaattaattccatatggtggaacttttttaatctttagtgattattgtaaaccatcgataagattggctgcaataatgaaacaaagagtagtttatgtaatgagtcatgattcaattgggcttggagaagatggtccaactcatcaaccaatcgaacaattaactgggctaagatctattccaaatttaaatgtttttagacctgcagatactgctgaaacttttgaatgttgggatcttgctgcagtatctggtaaagcacaacctggtataattgtagtgagcagacaaaaaattaatccaattagaaaagaatttacgagcgaaaacaaatgttcgactggtgcctatgaagtatcaagaacaaaaagtgaaattgatgtgactatactagctactggctccgaagttgaattagcaactgaagttagtcaaaaattggccacagaaaagatttattcaaaagttatatccatgccatgccacgaattatttgatatacaaaaaaaagattataaatctaaaattttaaatgaaacaaaacataaaatttcaatagaagcatctacaactgattattggaaaaaatatataggtgaaaacggaatagcttttggaatagataactttggaaaaagcgcaccctataaagagatttatgaacactttggtttaacaagtaa

SEQ ID NO: 230919 - DNA, 863 bp, Unknown
  Bacterial polypeptide expressing nucleotide sequence isolated from the Sargasso Sea
tttcaattttttaacaaaagaaaattcattcctaataggtggatctgctgatctctctggttcaaataataccaaaacaaaacatcacaagataattaaaccaggaaattttgatggaaactatattcattatggggtaagagaacatgcaatgtgtggaataatgaatggtcttgctctgcatagtaaaattattccatatggtggaacatttttaatttttagtgattactgtaaaccttcaataagattagcatcaatcatgaagcaaaaagtaatttttgtaatgagtcatgactcaattggtcttggagaagatggtccaacacatcagcctatagaacaattagctggattacgatctataccaaatttaaatgtttttagacctgcagatagctcagaaacttatgaatgttggaagcatgcaattgaagaaaaagaaaccccaagtattattgcagtaagcaggcaaaaaactaactctattagaaaagaatttacaaaagagaataaatgctcatttggagcatatgaggtatttagaacaaatagcaatatcaatctaattattatagctacaggctccgaagtaaatttagcagttgatataagtcaaaaattggccacacaaaacatttattcaaaagttatatccatgccatgtcaagaattgtttgataaacaaaataaagaatacaaatcaaaaattttaaatgaggcaaaatttaaagtttctattgaagcgtctacatcagatcaatggaaaaagtatgtaggagatggtggaatttctttcggaatagatgattttggaaaaagtgcaccttataaaaagatatatgaacattttggtttaacag

SEQ ID NO: 230920 - DNA, 819 bp, Unknown
  Bacterial polypeptide expressing nucleotide sequence isolated from the Sargasso Sea
ttaagcctggagattttactggagattatattcactacggagtaagggaacacgcaatgagtggggttatgaatggtattgcacttcacagcaatctaattccttatgggggtacttttttaatattttctgattattgtaaaccttcaatcagattgtcagcattgatgaaaaaaagagttatatatgtaatgactcatgattctattggtctcggagaagatggtcctactcatcaacctatagaacagctttcaggcttacgtgctatacctaacttaaatgtgtttaggccggcggatagaattgagacaattgaatgttgggagcatgctttaaaaagttcaaaaacacctagtgtgctatctttaacaagacaaaatttaaatccagtgcgaaaaaaatactcaaataaaaacttgtgctcattaggagcttacgaagttttaagaacaagtaaaaaaattaatctaacaatattagccagtggatctgaagttaatctagcaatagaggttagccataaattggccaaagataaaatatactccaaagtgatatcaatgccttgtatggatcttttcgaaatacaatcaaaaacttataaaaataaaatattaaaagaaacaaaatttaaaatatcgattgaagctggatcaagtgattattggaaaaaatatataggtgataacggaattgcttttggaattgatgaattcgggaaaagtgcaccctataaagatatttataaatattttggactagagagtacaaacattaaaaatattactaaaagaattattaaaaaaataaaatgac

SEQ ID NO: 230921 - DNA, 763 bp, Unknown
  Bacterial polypeptide expressing nucleotide sequence isolated from the Sargasso Sea
agaaaaaaacttaaatggccctatccaccatttgaaatacctgaaaacatattaaaagaatggagaaaaataggtcagcagggcgaggtgctagaaaaaaattggatagacactttaaataagtctaagccggaaataaaagaaaaatttaatattcttaataacaaactttataataaagatttaggggaattaatttattcagaaaaaactaaatattttcaagaaaaaccaacaatagctaccagacaatgttcgatgaaagttattgaaaaaattactgagattatgccaaatttaatagggggctctgctgacttaagtggttcaaataatacaaaaactaataaatcaattgtaataaatgcaaaaaactttggggggaactacattcactacggagtaagagagcacggaatggcagcagcaatgaatggattagcattgtatcataacttaataccttttgcaggaacttttttaatattttctgattactgtaaaccgtctataagattatctgctttaatgggtttacgtgtaatttatattttttcacatgattcaattggattaggagaagatggaccaactcatcaaccaattgagcaattgagctcattaagatcaataccaaatttaaaagtttttagaccagccgatatcaatgaaactttagagtgttgggaggcggctattctcaacgataagggaccaagtgcattaattttatcaagacaaaaacttaactacgtaagcaatt

SEQ ID NO: 230922 - DNA, 900 bp, Unknown
  Bacterial polypeptide expressing nucleotide sequence isolated from the Sargasso Sea
ttttttttgacaataataaaatttcgattgatggttcaacctctttaagtgtttcagataattataaaaaaagatttgagtcatatggctggaattttttggaaataaatggtcataatgaaaaacaaataacaaaagccatttcaaaagcttcaaaagctaaaaaacctacaattatatcttgcaaaactttaattggatttggctctcctaataaatctgggaaagcttcctctcatggctctcctttgggagatgaagaaattaaattagttagaaaaaaactaaaatggaattttaaaccttttgaaattccacaggaaatactggatgaatggagagagattggaaaaaaaggtgaactgctagaaagaaaatgggaagagactatcaacaataaaagttcgaaaataaaagatgagctagaaaaaaattatattaattctgatttaagagatttagaaagcattattgaaaaagaaaaaacaaaatattttgagtctaaacctagcttagcaactcgacaatgttcgatggcagcaattgaaagcatttctgttatgctaccacaacttattggaggatctgctgacctgagtggatcaaataatacaaagactaataattctaaaattattaattctaaaaactttgacggaaattatattcattacggagttagagaacatggtatggctgctgtaatgaatgggttggcactttatggtgggcttataccttacggtggaacatttttgattttctctgattattgtaaaccctctataagattatctgctttgatgggtcttaaagttatatatattttttctcatgactctataggtttaggagaagatggtcctactcaccaacccattgaacaactcgctggatgag

SEQ ID NO: 230923 - DNA, 580 bp, Unknown
  Bacterial polypeptide expressing nucleotide sequence isolated from the Sargasso Sea
ttggaaactaaaaatattaaatcagaaaaactatctcaattagctaattgtatacgttttttaacaattgatgctgttcagagggcaaattctggacatccgggcatgcctatgggtatggctgacattgctacagttttattcaaaaatcatttaaaatttgatccaaatgatccaaaatggatagatagggacaggtttattttatcaaatggacatggttcaatgcttctttatgcatgtttatatttaacaggctacaaagatatcagtttggataatattaagaattttagacaaattggctctcctacagctgggcatccagaatatggagaattagaaggcatagaaacaacaactggtccattatcacaagggctttcaaatgctgtgggatttgcaatggcggaaagtaaactttcttctacattgggtaaagactccattaaccattatacatatgttttcgctggagatgggtgcttgatggagggattaagtcatgaagcttgtagtttagcaggtcacttaaaattaaataagctaatagttttttttgatgataactcaatttcaa

SEQ ID NO: 230924 - DNA, 904 bp, Unknown
  Bacterial polypeptide expressing nucleotide sequence isolated from the Sargasso Sea
cataaaacttatgttttagctggagatgggtgtttaatggaaggaataagccatgaagctttaagtcttgcaggtcatttgaaattaaaaaatcttattttgctttttgacaataattcaatatcaattgatggtcctacaagtttagcagtatctgatgatcacaaaaaaagatttaatagctacggatgggattttatagacattaatggacataatgaaaaagaaatatttaaagccttaaagaaagcacaaaattcaaaaaaaccgattgctatttcttgtaaaactaaaattggatatggatcaccaaacaaatccggtaaagcttctgctcatggaagtccgttgggtgaagacgaaattaaattagttagaaaaaaattaaaatggaaatttgaaccttttgaaatacccaaaaaaatactggatgattggagggctataggtgataaagctacaaagagagcccgctcgcatcaaaaaaattatcaaaaaaaattatcttcaatgagttggctaggctggtccctatcaaataattttaataataactttcctcctaaaaataatttaataaaaggtccaatttattctgcaattgaaaaggtgaaattagaatacttaaaatctttagagccaatggccaccagaaaatgttctgaaaaatatttagaaattgtctcaaaaattccaaatttaattgggggatcagcggatcttgctggatcaaataatacaaagactaaaaatcataacataataaagccagggaattttttaggtaattacattcattacggtgttagagagcatgcaatgtgtggaataatgaatggtttagctttacacagtggattaattccttatggaggaacttttttaatttttagtgattatgcaa

SEQ ID NO: 230925 - DNA, 986 bp, Unknown
  Bacterial polypeptide expressing nucleotide sequence isolated from the Sargasso Sea
caattgatgctgtgcaaaaagctaattcagttcatcctggtatgccgatgggaatggctgatgtggccactgtattgtttaaataccacttgaggtttaacccaaaaaatccaaattggatgaacagagacagatttattttatcagccggtcatggttcgatgctgctttattctcttctttacctttcaggttataaaagtatttcaatagaagatataaaaagttttagacaattaaattcaatttgtgctggtcatcctgaatataaagagggtactggtattgaaacaactactggtccgctaggtcaaggattggctaatgcggtaggtatggcaacagctgaagaaatatttagaaaaaaattcggttctacggttattaataataaaacttatgtgatcgctagtgatggagatttaatggagggaatcagccacgaagcaatgagtttagccggacacctaaaattaaaaaacttaatagtattttttgataataataaaatttcgattgatggttccacttcattaagtgtttcagataattataaaaaaagatttgaatcttatggatggagttttcaagaaattaatggtcataatgaaaaacaaataacaaaggcaatttcaaaagcgtcaaaatcaaataaaccaacaattatatcttgtaaaactataataggttatggatcaccaaataaatctggtaaagcttcttctcatggctcgcctttaggtgatgaagaaatatctttagtaagaaaaaaacttaattggaatagcaagccatttgaaattccaaaagagatcttagaagaatggagagaaataggaaataaaggtgaacaattagaaaataaatggctaaagacgataagtaaaaaaaataataaatttaaaagtgaaattattaaaaattctcaaaaattagattttacagctttagaaaagttaattatgaggaaaaagagaaacatttga

SEQ ID NO: 230926 - DNA, 811 bp, Unknown
  Bacterial polypeptide expressing nucleotide sequence isolated from the Sargasso Sea
aataataagtcagggaggaatatcccatttggagtaagggaatttccaatggcagctattatgaatggcatggctttgcatggagggctcattccttttggtggaacatttcttgttttttctgattatgagaggccagctcttcgcttagcagctatccaaaaagttcgggtaatacatgagtttacacatgactcattctacgttggtgaagatggccctactcatcaaccaattgagcatattatgagtcttagagctattccagatttcaatgtttataggcctgctgatgcgaaagagacagcatcttgtattaagcttgctattgaaaatgggaatactccatctgctctactattaaccaggcagggtgttccaatattaaatggtagccaaaagcaagttgatgcgaatgtgtcaaaaggtgcttatacactcattgataccaaagggtctccagaaataatcattcttgccacaggatcagaagtaagtttggcaatagaagtcgcaaaaaaattagagggtaaaaaggtccgtgttgttagcatgccatgctgggagacattcgataagcaaaccgatgagtataagaaagaggtcatcccagatagaggcagcctaaaaatatcaatcgaggctggaattacaaatggctgggagaaacacattgggataaatggtctggcaataggaataaaccactttgggagctctgcgcctgccggcgaccttgcacgagaatttggatttactgctgatcagattgctgataacatagaaaaatttctgggaaaactattgtgaa

SEQ ID NO: 230927 - DNA, 604 bp, Unknown
  Bacterial polypeptide expressing nucleotide sequence isolated from the Sargasso Sea
agaccatttttactttatgcttttcttggcgacggctgtctaatggaaggtatttctcatgaggtttgctcttttgcaggaacacataaactcggaaaactcatatgtttttatgatcaaaatggaatatccatagatggagaaattgatctatggtttaccgataatacaaaacaaaggtttgaaagctatgggtggcatgtagttgaaattgatggccatgatatagatgaaattaataaagctactgaagaagctaagaaagaaacagaaagaccatcaatgatttgctgtaagacaactattggatttggctcgccaaataaatcaggaactgctggagttcacggaagtccattaggtgacgacgaaattgaaataaccaggaaagagcttaattgggagcatgccccttttgaaatacctgaagatatttacgatgcctggaatgcaaaagatgagggcgccaaaaaagaaaaagcctgggaagatcttctggaaacttataaacaaaaatatccagaggaatccaatgaattggagagaagatttaattcagagatgactcatgaatttaatgaaagattcgatgactttttaagag

SEQ ID NO: 230928 - DNA, 890 bp, Unknown
  Bacterial polypeptide expressing nucleotide sequence isolated from the Sargasso Sea
aatgctaaaatccttaaaagtaccagattttggaaatgaccttatggcaactagacaagcttttggaattactcttgatgaatttgctaataaatttccaaatatcattggtggttcagcagatttagatggatcaaattgtacaacaaactttgctaatacttatgatgacttctcagcatcaaatcctaaaggtagaaatattgcttttggtgtaagagaatttccaatgggagctataatgaatggaattgctctatatgggaaacatcttccttttggtggaacatttttagtgtttagcgactatgtaagatctgctattagattatctgcaattcaaaaactacaagctctatatgagtttacacatgattcaatttttgttggagaagatggtccaactcatcaacctgttgaacatgctatgtccttaagaaatattccaaatcttctagtatttagaccttcagattcttttgaaacatattgttgctttaaagaagtaattaaaaatactgaatctccaagtgcaatgcttcttacaagacaaaaattgccaaaattaagtcttgagcaaaactatattgaacaaggtgtaagtaaaggtgcatatattttgaaaaaacaagataatcctgaagcaatcttatttaccactggatctgaagctcatttagctctagatatttgcaattctttagataaaaaaattcaaatagtaaatattccatgttgggagctatttaataaacaagataagaattacatttcatctataatgttgaaagattgtaaaaagagaatttcacttgaagcaggtattacattaggttgggaaaagtttacaggaattgatggactaagtattggaattaatgaatttggtg

SEQ ID NO: 230929 - DNA, 786 bp, Unknown
  Bacterial polypeptide expressing nucleotide sequence isolated from the Sargasso Sea
aatgggtaactacattcattacggtgtcagagaacacggtatggctgcgataatgaatggtttagctctttatggtggattaataccttatggtggaacatttttaatattttctgattactgcaaaccgtctattagactttctgctttaatgggtctgaaagtaatctatattttttcacatgactctattggtcttggtgaagatggtccaactcaccaacccattgaacaacttgctggtttgagggctattccaaatttaaatgtgtttagacctgcagatattaatgaaactcttgaatgttgggagatagctttgaaaagtagtaacactccaagtgcaatagctttatcaaggcaaaaagttccttacatcaatcctaataacactaaagttaataagtgtgaaaaaggagcttacacagtaaatctaacttcacatgaaagcaaagtaacattagtagcttctggaaccgaagtggagttggccttaaaagttcaggagcagcttaaagaaaataatattcactcaaaggtagtctcaatgccatgtatggagctttttgataaacagccagatgaataccgtaaagatattttggaagaaaattcgttaattgtaacattagaggctggaagtattatgtcttggcaaaaatatataaaagataaaggtattaatttaggaatagataaatttggggagagcgctccatataaagaagtttacaaacattttaaattatcagaggaagatataacaaattttattcaaaaaaaatt

SEQ ID NO: 230930 - DNA, 945 bp, Unknown
  Bacterial polypeptide expressing nucleotide sequence isolated from the Sargasso Sea
tccagaatatgaaaaaggttccggtattgagaccactactggacctttaggacaaggtctaggaaatgctgttggaatggcaatcgctgaagaaatattgagaaaaaaatttggaccaactttaataaataataaaacatatgtgatcgcaagtgatggagatttaatggaaggaattagtcatgaagctatgagcttagctggccatctgaagctaaaaaatttaatagttttttttgataataataaaatttcaattgatggttctacttccttaagtgtatcagataattataaaaaaagatttgaaggatatggatggaactttttagaaattaatggtcataatgaaaaacaaatctcaaaagcaattacaaaagcatctaaagctaataagcctaccgtaatatcatgcaaaacaataattggatttggatctccaaataaatctggaaaagcttcttcacatggatctcctttaggtgatgaggaaattgctttagttagaaaaaaacttaaatggaacaaagaaccatttgaaatacctgaagatattctaaatgcctggagaaaaattggtgaaaaagggattcaattagaacaaagatggctagaaactcttgataaaaaagacactaaaattaaatcagtattaaaagatacttatatagagtcgaatttaaaagatcttgaaaatttgattaaaaaagaaaaagcaaaatattttgagactaagcctgccatggcaacaagacagtgttcttctgttgctatagagagtattttaaatattttaccccagctggttggtggttctgcagaccttagtggatcaaataatactaaaactaataactctaaagtcattaattcaaaaaactttgatggcaattatatacattacggtgttagagaacatggaatggcagcagttatgaatggata

SEQ ID NO: 230931 - DNA, 285 bp, Unknown
  Bacterial polypeptide expressing nucleotide sequence isolated from the Sargasso Sea
tttgagcaaacaatatagagatttagccaattgtattagatttttgtcaattgatgccgttcagaaagctaattctggacacccaggaatgcccatgggaatggcagatgttgcaacagttttgttcaaagattttttaaattttaaccccaaaaatcctaattggattaatagagaccgatttgttttatctgcaggtcacggatcaatgttgctttatagcttactatatttaactggttataaaagtgtttctttaaatgatataaaaaattttagacaatt

SEQ ID NO: 230932 - DNA, 777 bp, Unknown
  Bacterial polypeptide expressing nucleotide sequence isolated from the Sargasso Sea
tgtttctttagaggatataaaaaattttagacaattagactctatttgtgcaggacatcctgaatatcacccaggatctggaattgaaactacaactggcccactaggtcaaggcatagcaaatgcagttggttttgcattagcagaagaaattttaaaaaataaggtaggtaaaaaaattataaatcataagacttatgtcttggctggggatggatgtttaatggaaggaataagccatgaagcattaagttttgcaggtcaccttaagttaaaaaatcttattttattatttgataataattcaatatcaattgatggaccaactaatttagcagtatctgataacacaaaaaaaagatttgagagttatggttgggattatctagatataaatggacatgatgaaaaacaaatttttaaagcacttaaaaaagctcaaaaagcaaaaaaaccttttgctatctcatgtaaaacaacaattggttatggttcgccaaacaaaggtggaaaagcatcttctcacggaagtccactaggtgaagaagaaattaacttggttagaaaaaaattaaattggaattataaaccatttgaaattccaagtgaaatcagaaaattgtggagagaaattggcgataaagcatctgcgaaagctgaaaaagatgaagctaaatatcaaaaagagataaaaaagtttggttggttgggatggtcaataacaaggcattttaaaaataattaccctattggtttcaaaaatcataaagatcagat

SEQ ID NO: 230933 - DNA, 549 bp, Unknown
  Bacterial polypeptide expressing nucleotide sequence isolated from the Sargasso Sea
tttgatacaactagctaattgtatccgttttttgtcaatagatgcagttcaaaaagcaaattctggtcatccaggaatgccaatgggtatggcagatattgctactattttattcaaagatcacttgaagtttgatccaaataaaccaaattgggttgatagagatagatttgtagtttcaaatggtcacggatcaatgcttttatatgcatgcctctatttaagcggctataaagatattacaattgaagatataaaaaattttagacaactaaattcaccaacggcaggccaccctgaatataaagagttaggtggaattgaaacaactactggaccattgtcacaaggacttgcaaatgcagtaggacttgcaattgcagagaaaaaattatcaaacaaatttggaaaagatttatttaatcatttcacctatgtatttgctggtgatggatgtttgatggaaggtctaagtcatgagtcttgtagtttagctggtcatttaaaactaaataaactgatagtattttttgatgataattctatatc

SEQ ID NO: 230934 - DNA, 823 bp, Unknown
  Bacterial polypeptide expressing nucleotide sequence isolated from the Sargasso Sea
ttgtttaaatacccacctgaggtttaatccaaaaaatcctaattggattaatagagatagatttattttatctgccggccatggttcgatgttgctttactctcttctttatctaactggttataaaagtattacgattgatgacataaaaaattttagacaattgaattcaatttgcgctggacaccctgagtataaaaaaggaaccgggattgagacaacaactggtccactagggcaaggattagccaatgcagttggtatggcgattgccgaggaaatatttagaaaaaagtttagtaaagcagttattaataataaaacatatgttttcgctagtgatggagatttaatggaaggaataagtcacgagtcaatgagtttagctggtcatctaaaattaaaaaatttgatagtattttttgataataataaaatttcaattgatggctccacctcgctaagtgtctcagataattacaaaaaaagatttgagtcctatggttggagttttcaagaaattaatggtcataatgaaaaacaaatatctaaagcaattacaaaagcatcaaaatcaaaaaaaccaacaataatatcttgtaaaactataattggtttcggttctccaaataaatctggtaaagcttcttctcatggttcacctttaggtgatgatgaaatatctttagtgagaaaaaagcttaagtggagcagtcaaccatttgaaattcctaaagaaatctttgatgagtggagagaaataggaaaaagaggtgatcaattagaagtaaaatggcttgaaacattaaataaaaaaaatcct

SEQ ID NO: 230935 - DNA, 931 bp, Unknown
  Bacterial polypeptide expressing nucleotide sequence isolated from the Sargasso Sea
tactatgagtcaaagccaagcttagcaacacgacaatgctctatggctgcaattgaaagtatttctgcaattcttccgaaacttattggaggctccgcagaccttagtggttcgaacaatacaaagactagtaattctaaagtaattaattcaaaaagttttaatggaaattatattcattacggagttagagagcatggcatggctgctgtcatgaatgggttagcactctatggtggaatagtgccttatggaggaacatttttgattttttctgactattgcaaaccttcaatacgactatcggctttaatgggtcttaaggtaatttatattttttctcatgactctatcggtttgggagaagatggtcctactcaccaacctattgagcaacttgcaggattgagagcgataccgaatttaaatgtatttagaccagcagatatcaatgaaactttagaatgttggcagatagcattagaaagtcaaaacactccaagtgtaatagcgttatctaggcaaaaagtttcttacatcaatcccgaaaattctagagaaaataaatgtaaaaaaggtgcgtacgtagtaaaaataacttcccacgaaagcaaggttactatcgttgcttctggcactgaggttgagttagctttaaaagtccaaaaaaatttaaaagaaaataatattcattcaaaagttgtttcaatgccatgtatggagctttttgatatacagcctgagaattttcgaaacgatattatagagcaagattcattaattgtgacattagaggctggaagtgtcatttcatggcaaaaatacgtgaaagataaaggaatgagcctaggtattgatcaattcggagaaagtgcaccttataaagaggtatataatcattttgatctatctgaagaaaagataacaaaaa

SEQ ID NO: 230936 - DNA, 771 bp, Unknown
  Bacterial polypeptide expressing nucleotide sequence isolated from the Sargasso Sea
tctacatagtgatgatatttatgattactttaaagaaaagagagagaaagataatgaagaacttaggagatgggaagaaaattttaaaaataaatatcaagaagattcatcatttaaagataattgggatttattaacttctgaagactttcctagttttgatggagtcagtggtgagaagcatgcatcaagaattttaggttcaaaaatattagaaaatttatcagaatctactaattcgataattggaggttcagcagatttagctgcctctacgaagcaaataattgatcaaagctatttttcatctactaattacaaaggcaggagcctagagtttggaattagagaacatgcaatgggagcaattacaaatggtataactttacatagtaatttgataggctatgcctcaacttttttggttttctcagactatatgaggccaagtattcgtttagcatctttaatggatattaattctgtatttattttcacacatgattcgatatatcttggtgaagatggaccaactcatcaacctatagaacatttaatgtctctaagacttattccaaatgtagatgttgtaagaccttctaatagcattgagatagaacattcttataggtatgcattttctgattctaaaaatccaaaagtgctttcattaacaaggcaagatttagattatttagactttgatgttaaatatgaagaatttcttaaaggaggatatgtggtttctgatggagatgattttacacttgt

SEQ ID NO: 230937 - DNA, 907 bp, Unknown
  Bacterial polypeptide expressing nucleotide sequence isolated from the Sargasso Sea
caaaaagctttagaagtaataaataaaactatagtaaatacattaggtggatctgcggatttgacaggatcaaatttaactaaaaccagtgagatgaaaactgttacctcaagtaaattttcaggaaattacattcattatggaataagagagcatgctatgggctctattatgaatggtgttgcgctacataaaggatttataccttatggaggaacatttttagtttttagtgattacatgagagcatctataagactatctgcattaatgtctttaagagtgatttatgtattaactcatgattcgattggtcttggtgaagatggaccgactcatcaaccaattgaacatttagcaattttaagagcaactcctaatttaaatttgataagacctgcagatatagttgaaacagcagaggcttgggatgtagcaatcaaaactaatggaccaactgttttggctttgtcaagacaaggtttgaaagcttatagatctgaaaaaactaataaaaacttagtatcacatggtggatatattctaaataatatttcaaaagatagggatattactttgatagctacaggatctgaaatagaaatagctatggaagcttctgaaataatgtataaagaaggtgttaaagctactgtcgtctcgcttccttgctgggaattatttgataaacaaagtgaagaatataaaaatcaagttttaggaaattgtccacgtatagctattgaggctgcttctgaaatggggtggagcaagtatataggcgaaaagggaattttcattggcatgaaaagttttggagcatctggaccggcttcggacttatacaatcattttaatattactactaaatctataattgattctgcaaaattattattaaaataag

SEQ ID NO: 230938 - DNA, 849 bp, Unknown
  Bacterial polypeptide expressing nucleotide sequence isolated from the Sargasso Sea
actggggattgaaactacaactggacctttgggacaaggaatatcaaatgcagttgggtttgctttagcagaagaaattttaaaaaaaaaagtaggaaaaaaaattatagatcataaaacttatgttgttgctggtgatggatgcttgatggaaggaataagtcatgaagcattaagtctcgcaggacacttaaaattaaaaaatcttatcttattatttgataataactcaatatctatcgatggccctactaatttggcagtttcagatgatcacaaaaaaagatttaagagttatggatgggactatataaagatcaatggtcataattttaatgaaatatcaaaagctttaaaaaaagctcaaagaacaaaaaaaccaatcgcgatagcatgtaaaactaccattggttatggttcaccaaataaaagtggcaaagcatcctcacatggaagtccattaggcgaggaagaaataaaattagtcagaaaaaaattaagttggaaacataatccttttgaaattccacaagacttattaattaggtggagatctattggggctaaagcatcaaaaaaagctgagatacatgaaaagcgttataaaaaaataatttctaagttaggttggttgggatggactctatcaaataattttaaaaatgattttccaccaaaaaataatctgattaaaggtactatctataaagcaatagaaaaaacaaaatcagattatcttaaatctttagaacctatggccacaagaaaatcctctgaaaaatttttagatattatttgcaaactacctaatcttattggtggatcagcagatttatcaggctcaaacaa

SEQ ID NO: 230939 - DNA, 265 bp, Unknown
  Bacterial polypeptide expressing nucleotide sequence isolated from the Sargasso Sea
cttgtctaactctatacgtgttctttcgatggatgccgtacaaaaagctaattctggacacccaggtatgccaatgggaatggctgacgtatctacagtacttttcaaatattttctaaaatttaatccaaaaaatcccaactggattaatagagatagattcgttttatctgctggacatggatctatgttgctttactctttactttacttaacaggttacaaaagtgtaaaattaggtgacataaagaattttagacaaatc

SEQ ID NO: 230940 - DNA, 326 bp, Unknown
  Bacterial polypeptide expressing nucleotide sequence isolated from the Sargasso Sea
tgccaccggctctgaagtacagttggctgtagacgctgcggccaaactgagcgagcagggtaaagcggtacgtgtggtgtctatgccttctaccgatgtgttcgatcgtcaggatgcggcttaccgtgagtcagtattaccatcggccgtggtgaaacgcgttgctgtggaagcgctgtctaaagaaagctggtataagtacgttggctttaacggcgcaattgtgggcatggacacctttggtgaatcagccccggccggcgagctgttcaagcatttcaacattactgttgatgccgtggtagaagctgcgctggggctttaat

SEQ ID NO: 230941 - DNA, 248 bp, Unknown
  Bacterial polypeptide expressing nucleotide sequence isolated from the Sargasso Sea
cttgagtaaactttataaagaattagctaattgtatcagatttttgtctatagatgctgtccaaaaagctaattctgggcatccaggcatgcctatgggaatggctgatgttgcgactgttctttttaaagatttcttaaactttaatcctaaaaacccagattggattaacagagatagatttgttctttcagcaggacacggttccatgctactttactcgcttctctatctgacaggttataaaa

SEQ ID NO: 230942 - DNA, 783 bp, Unknown
  Bacterial polypeptide expressing nucleotide sequence isolated from the Sargasso Sea
atgcagttggttttgcaatatcagaggaaattataaaaaaacaaataggaaaaaaaattattgatcataaaacttatgtcttggctggtgatgggtgtttaatggagggaattagccacgagtctttaagtttagcaggtcatcttaagcttaaaaatttaattttactttttgataataactctatttcgattgatggacctacaagcttgacggtttcggacgattatgaaaaaaggtttaaaagttatggttggaattatttaaaaattaacggtcataattttagagaaatatcaaaagctttaaataaagctcaaaaatcaaaaaaacctgttgccatttcttgtaaaacaacaattggctatgggtctccaaataaaagtggcaaagcttcatctcatggaagccctttgggcgtagaagagataaaactggtcagaaaaaaacttaaatggaattatgaaccttttaagataccaagtaaatttttaagagagtggagaaaaattgggcaaagtgcatcacaaaaagcaaaaagacacgaaattaaatataagaaaattccctattatttaaaaaatttaaactcatataaaaaattaattgaaaaaacaaaaaataactatttaaaaaatttaaaaccacttgcaactaggaaatcatctgaaatgtttttgaatgttatagctaaacttcctaatttagttggtggttcagctgatttggcaggatcaaataatactaaaaccagagaccataaaataataaaacgaaggtaat

SEQ ID NO: 230943 - DNA, 673 bp, Unknown
  Bacterial polypeptide expressing nucleotide sequence isolated from the Sargasso Sea
ttttttagttttctcagactatatgaggccaagtattcgtttagcatctttactggatattaattctgtatttattttcacacatgattcgatatatcttggtgaagacggaccgactcatcaacctatagaacatttaatgtctttaaggcttattcccaatgtagacgtgataaggccttctaatagcattgaggtagatcattcttataggtatgcattttctgactctaaaaatccaaaagtactttcattaacaagacaagatttagattatttagactttgatgttaaatatgaagaatttattaaaggagggtatgtggtttctgatggagatgattttactcttgtagcttcaggatccgaattggaaatagcatttaagattaaagcagctcttcttgaatattcagtaagaattatcagtgttcctatcttaaataggctttcaaacatgcaaaatgaagaaattaatgaactcttaaaaaataaacacgtttttccaattgaacttggtagatcaattggttgggagagttatttagggagaataacaaagactttttctgttgatagttttggtgagtcagctcctattgaggatctcgaaaaaaactttgggtttgatgtaccttcaattactaaagaaattattaagtatctaaattag

SEQ ID NO: 230944 - DNA, 841 bp, Unknown
  Bacterial polypeptide expressing nucleotide sequence isolated from the Sargasso Sea
cttggagaagaagaggtttctctggttagaaaaaaattaaaatggaaatatgagccttttattataccaaaggaaattttgtatgaatggagggaaattggaaaaaaaggaacccttgaagaaaaaaaatggaattcaatttttaataaaaaagataagaaaattagagatgaaattaacagaataattaaaaataaactacccgaagatctcgataaacaaattgcatctttaaagaaaaaaatttttaatctaaaaccagttcaagcatcaagaaaatcttccgcatttgttttagaaaatataacagaaaatttaccagaattaattggtggatcagctgatttaagtggttcaaataatacaaaaacaaaatattccacgataatcaaaccttcaaactttaaaggaaattatattcattacggagtaagagaacacggtatggctggaattatgaatggcatggctcttcatggaggaataattccttatggaggtacttttttaattttttctgattattgtaaaccttcgttaagattatcggctttaatgggtttaaaagttatttatatattttctcacgactctattggtttaggagaagatggaccaactcatcaaccaatagaacacttggctcacttaagagctataccaaatctaaatgtttttagaccagctgacacaattgagacacttgaatgttgggaaatggccttaaaaagtagtactaatcctagcgtgatagccttatcaagacaaaaaatttcatttgtcactgaaacgctcacaaacaaaaacatgagcgctcttggaggttacgagcttaagaaaa

SEQ ID NO: 230945 - DNA, 806 bp, Unknown
  Bacterial polypeptide expressing nucleotide sequence isolated from the Sargasso Sea
cttggtggaattcaaaagaaggcatacagaagagaagacaaaaattgcttcacgtaaagcgagtcaggaaactttaaatgtacttaccgaggttattccagaattggcgggcggttcagcagacttgaccggatcaaatcttacaaaaactagatcacaaaaaacaattgttccaggagaatttggaggaagctacatccattatggagttagggaacatggaatggctgcagccatgaacggtattgcacttcacggaggttttattccttatgggggaacttttttgatttttacagattattgcagaccttcaataagactatctgctatgatggaacagcgtgtcatttatgtaatgactcatgattcaataggtctaggagaagatggccccactcaccaacctgtggagcatctagcaagcttgagagccattccaaatttaaatgtgtttaggccatgtgatattgttgagacagcagaatgttgggccgccgcacttgcaacaaaatcaacaccatcagttatttcactttcgcgtcagggacttccatgtctgagaaaggatcacactgaaaaaaatttaagtgctaatggtggatatgttttgtctggtacagattttgagcgtgatattacattgcttgctactggttctgaggtgtctttagcacttgaagcaggaatccaactgatgcaggaaggaattaatgctgctattgtttccatgccttgtattgaaatctttgaagcacaaaatgtggagtatagaagtaaggtactgcaacctggtgttcctattg

SEQ ID NO: 230946 - DNA, 889 bp, Unknown
  Bacterial polypeptide expressing nucleotide sequence isolated from the Sargasso Sea
tctctaagtagtagtgataatgttgaagctaggtttttatcatacggttggaatgttttgaaaatcgatggtcacaatcatgaacaaattaatgaggcaataaataaagctaaaacttcaaaacagcctactattatttcttgtaaaacaaaaattggatttggttcaccaaataaagaagggagctcttcttcccatggatcacctttaggagaagaagaagtaaatctcactcgaaaacaattagattggcataacgaagagtttataattcccgaggaacttctcatggaatggagaagttttgcaaaaagaaatgaagaaattataaataaatggaaaaataaaaataatgattttattaattcaactcaatataataaattttttgatacaaatttagatgatgaaataaaaaaagaaattgtaaattttaaaacaacatatgcaaatgatgatacaaaatttgcaacacgaaaagcaagtgaaaactcactttcattactaaataaacatatagttaattttattggcggctctgcagatttaacaggatcaaataacaccaaaacaaaagatatgaatatttttaatgctgaaaactatgctggcagctatatttattacggtatcagagagcatggcatggcaggcataatgaatggattggccttacatggaggtataaaggcatacgggggaacatttttagtgttttctgattattgtagaccttcaattagattatctgctttaatgaaattacctgtagtttatgtcatgactcatgactctattggtctaggagaagatggtcctacacatcaacctgttgaacatttagcagccttaagagcaattcctaatttaaatataataagaccttgtg

SEQ ID NO: 230947 - DNA, 797 bp, Unknown
  Bacterial polypeptide expressing nucleotide sequence isolated from the Sargasso Sea
tggaaaggcctcctcacatggctctcctcttggagatgaggaaattatgttagtgaggaaaaaattaaaatggaattataaaccattcgaaattccaaaactagttttagatgaatggagaaaaattggcgataaaggggatttattagaacgaaaatggagtgaaaatttaagtaaaaaaaattcaaaagttaaaaacgatttagaaaaaaactttattaattcaagtttaggaggtttagagagattaattgaaagggaaaaaactaaatattttgaatcaaaaccaagcctggctactcgacagtgttcgatggcgtcaatagaaagcatttcaaaaatacttcctcaacttattggtggttcggcagacttaagcggatcaaacaacacaaaaactaccaattcgaaaattatcaattctaaagattttgacggaaattatatacactatggagtaagagagcacggtatgtctgcagtgatgaatggtttagctttgtatgggagtttaattccatatggcggaacatttttaattttttcagattatagcaaaccttctattagattatctgctttaatgggtttaagagtaatatatattttttctcatgactcaattggtctgggagaagacggtccaactcatcaacctattgaacaacttactgcacttagagcaataccaaacctgaatgtttttagacctgcagatattaatgaaactttagagtgttggcaaattgcattaaaaacacatggtacaccaagcgcaatagctttatcgagacaaa

SEQ ID NO: 230948 - DNA, 1004 bp, Unknown
  Bacterial polypeptide expressing nucleotide sequence isolated from the Sargasso Sea
ggaagaattaatgaagctataattaatgctaagaattctgataagccaacaattatttgctgtaaaactaaaataggatttggttcacctaataaagaagctagcgcttcttctcatgggtcacctttaggtaaagaagaggtagaacttactagaaaaaatttgaattggaatcatgaagaattttatattcctgatgatcttctctcagaatggagaggctttgcaaatagaaacgctgaaattaaaaaaaattgggaaaataaaaatgcagattttttaaattctagtaaattcaataatttttttaatgaaaatttagactccgatattaaagctgaaataattaattttaaaaaattatatgctaaagatgatacaaagtatgcaacaagaaaagctagtgaaagttcactagatctccttaataatcatattgtaaactttctgggagggtctgctgatttaacaggatctaataatactaaaacaaaagggatggatattttcaatgctgaaaattataaaggaagctatgtttattacggtataagagagcatgctatggccggtgtaatgaatggtttagcattacatggagggattaaaccgtacggaggaacatttctagttttttctgattactgtagaccatcaataagattatctgctttaatgaaacttcctgttatatatgtaatgacacatgactctataggtcttggagaagatggtccaacgcatcagcctgtagaacatttagctgctttaagagcaattccaaatttaaatatcattaggccgtgtgatatattggaaacaattgaagcatgggaaatagctctagaaactaaagggccaactattttagcattaactagacaagggttgccaactaataaaagagattcctttgaaagatacttggttaagaaaggtgctttatatataaaaaattactccaaatataatgcttcaatttttgcatcaggttctgaagttga

SEQ ID NO: 230949 - DNA, 762 bp, Unknown
  Bacterial polypeptide expressing nucleotide sequence isolated from the Sargasso Sea
atgctatgtgtggaattatgaatggattagctttacatagtaatttaataccttatggtggaacttttttaattttttcagattattgtaagccatcaataagattagcatcaatgatgaagcggcaagtaatatatgtaatgacacatgattctattggacttggagaggatgggccaacacaccaacctattgaacaactatcaggattaaggtcaatacctaaccttaatatttttagacctgcggatagattagaaactattgaatgttgggagcatgctttaaagagttctaaaacaccaagtgttctatctttaaccagacaaaacctaaacccttttagaaataaatactccaagactaatatgtgttcctcaggagcatatgaagttttaagaacaaataaaaaagttaaattgacgattttagcaagtggttctgaggtaaacctagctatagaaaccagtcacaaattggccaaagataggatatattcaaaagtgatatccatgccatgtatggagctttttgatttacaatcaaatagatataaaaataaaattttaaatgaaaccaaattgaaaatatctattgaagctggatcaagtagttgttggaaaaaatatgtaggtgattatggaatgacttttggaattgatatgtttggtaaaagtgcaccctataaagatatttataaatattttggtttagaatcttcaaaaattacaggcaaactaaagaaagtaattaaaaaataaa

SEQ ID NO: 230950 - DNA, 831 bp, Unknown
  Bacterial polypeptide expressing nucleotide sequence isolated from the Sargasso Sea
ctgtaattgggatttggggtctccaaataaatctggaaaagcttcttctcatggttctcctctaggggaagaggaaattagtttagttcgaaaaaaacttaaatggaaaagtaagccttttgaaatacctagagatattttaaacacttggagagaaattggcgaaaaaggaattaaattggaggaaaaatggtcaaatatattaaaaaaaaaaagtaataatattaaatcagcattaaaagagacatatatagagtcaaatttaaaagaccttgaaaatttaattaaaagagaaaaaacaaaatattttgagtcaaaaccaagtatggcaactagacagtgttcgtcggctgcaatagagtgcataactagtatattgcctcaattaattggaggatcagcagaccttagtggatcgaacaatactaaaacaaataattctaaagtaattaattcgaaaagttttgatggaaattatattcattatggtgttagagaacatgggatggcagctattatgaacggattagctctgtacagtgggataattccatatggcggaacttttttaattttttctgattattgcaaaccatcaataagattagcagctttgatgggtttaaaagtaatttatattttttctcatgactctattggccttggggaagacggtccaacacaccaacctatagaacaactaaatggattaagagctattcctaatctaaatgtttttcgtcccgctgatattaatgaaactctagagtgttgggaaattgctttaaaaaataaaaatactcctagtgcgattgctttatcaagacaaaa

SEQ ID NO: 230951 - DNA, 607 bp, Unknown
  Bacterial polypeptide expressing nucleotide sequence isolated from the Sargasso Sea
gactcgattgggcttggagaagatggtccaactcatcaacctattgagcagctagcaagtttacgatcaattccaaacttaaatgtttttaggccagctgaccttatagaaacttttgaatgctggcagttagcaattgaaaataaaaactcacctagtgtaatagctttgaccagacaaggagttaatcctgtcagaattaaaaattttcctaaaaatgaatctgcttttggagcttatgaagttttaagaactggtgaggatattcaaataacaatattatcatctggttcagaaacaagtttggcttgtgaagtaagtcataaattagccacagaaaacatctactcaaaagtaatatcgatgccttgtcaggaattatttgatcaacaaaatgaaagttataaaagtaaagttttgtctgaaactaaattaattgtatctatagaggcctctgaaacaaattactggaaaaaatatacaggcactagcggtttaaattttggaatagatgattttggtaaaagtgcaccatataaggaaatttataatcattttaatttaaacccagaaagtattattaaaaaaataaaagaaaaattatgac

SEQ ID NO: 230952 - DNA, 694 bp, Unknown
  Bacterial polypeptide expressing nucleotide sequence isolated from the Sargasso Sea
ggaacattcttagtcttttcagactactgtagaccttcaataagattatcagctttaatgaacattccagttatatatgtcatgacacatgactctataggacttggagaagatgggccaactcatcaacctgttgaacatttatcagctctaagatcaattccaaatttaactgttataagaccctgcgatatcattgaaactattgaggcttgggaagttgctctcagtagtaatgggcctacagtcttagttcttactagacaaaatttacctatttcacagatagaacatagagaagaaaatttattaaaaaaaggagcttatgcaattattgattattcaaaatatgatgcaactattttgtcctctggatcagaagttgaaatagcatgttctgcatctaaaaaattgaagaaaaataaaaatttaaatataagagttgtaagtatcccatcatttgaactttttgaaaaaaacaattctgattataagaatcaaatcttaggcgaaaagaacttgtttggtattgaggctggtgttgtgaatggttgggaaaaatatatagaaagtaaaaatttcattggtatgtcaacatttggtgaaagtggaccttacaaagatctatatgatcactttaatattaacgatgaaatgttgataaataaaattttagaaaacttagaagagtaaa

SEQ ID NO: 230953 - DNA, 602 bp, Unknown
  Bacterial polypeptide expressing nucleotide sequence isolated from the Sargasso Sea
tctgacagtgagcataaaattaaacgaactagcaaacgcaataagatttttatccattgatgctgtgcaaaaagcaaactctggtcatccgggtatgcctatgggtatggctgatgtagcagcagttttatttaaataccacctgaggtttaatcctaaaaatccagaatggattaatagagatagatttattttgtccgctggtcatggatcaatgcttttgtattctttactttatttaactggatacaaaagtgtttcaattaatgacataaaaaattttagacagcttaattcgatttgtgctggccatcccgagtacaaaaaaaatacaggaatagaaactacaactggtccgctcggacaaggtcttggaaattctgttggtatagcaattggtgaagagatttttagaaaaaaatttggatcaaatgcaataaatcataaaacttatgtaatagctagtgatggtgatttgatggaaggagttagccacgaagttatgagtttagctggccatctcaagcttaagaatttaatcgttttttttgataataataaaatctctatagatggatcaacctctttaagtgtttcagata

SEQ ID NO: 230954 - DNA, 688 bp, Unknown
  Bacterial polypeptide expressing nucleotide sequence isolated from the Sargasso Sea
tcatggtggcataaaaccatatggcgcaaccttcttggtatttactgactatgctagaaatgcagtaaggttatcagccctaatggggataccaagtattttcgtatatacacatgattcagtagccctgggtgaagacgggccaacacatcagcctatagaacatatggttaccctaagatctactccaaatttaaatagctggaggccagcagatcttgtagaaactgcggtagcttggaacgaggcagttaaatcaaaaaaaactccaacctgtttaatctttagcagacaaggaacttcagcaatatcacggactgaagatcaattatctttaattaataagggtggttatcttatcgatgaaagtgacaactctgatattactctcattgcatcaggaagcgaagttcaattggttatagatgcagcaaaagaattaaaaaatcactctatctctgcaaatgttgtatcaatgccgtctttagataaatttttacagcaatctgaggaatttcagagttcaataattaatcctgacaaaccaatacttgttgttgagtgcagtcatcctaactcttggtacaggattttaaatagaaaagataaagtaattggaatagagagttttggagaatctgctccaggcagtgaattacttgagcattttggatttaatattgaaaat

SEQ ID NO: 230955 - DNA, 765 bp, Unknown
  Bacterial polypeptide expressing nucleotide sequence isolated from the Sargasso Sea
atttcattaaaaagtataaaaaattttagaaaattaaattcaatttgtgcaggacatcccgaatttgaagctaatactggtatagaaacaacaacagggccacttggtcaaggaatatccaatgctgttggctttgcgatagctgaaaaaattttaaaaaataaattaggaaaagatataatcaatcataaagtatatgttttagcaggagatggctgtttgatggagggtataagtcacgaagcaatgagtctagcgggtcacttaaagctaaataatcttgtaatgttattcgacaataactctatatcaatcgatggacctacaagtctagcagtatcagataattataaaaaaagatttgagagttatggatggaattatttattaattgatggtcataatgaaaaagaaatttttaaagctttgaaaaaagttaatctgtcaaaaaagcctactgtaatttcatgtaaaacaaaaattggttatggatctccaaataaatctggaaaagcttcgtcgcatgggagcccattaggcgaaaatgaggtaagcttggtgagaaaaaaactaaattggaaatataaaaaatttgaaataccaaataatattttaaatcaatggagaacaattggaaataaaggttcaaaaatagagtctagttggaataaaatttataaaagaaaaaaaaatagaattaataaaatattaaaaaataactttagtaagtcaattagatctgaaaaaatcaatgctataaaagaa

SEQ ID NO: 230956 - DNA, 859 bp, Unknown
  Bacterial polypeptide expressing nucleotide sequence isolated from the Sargasso Sea
tttagcagaagagattttaaaaggtaaaatcggcaagaatttgatagatcataaaacttatgttctggctggagatggttgtttaatggaaggtataagccatgaagctttgagtctggcaggtcatttaaaattaaagaatcttattttactgtttgataataactctgtatcgatagatggcccgactaacttagcagtatcagataacacaaaaaaaagatttgaaagttatggttggaaatatttagatataaacggacatagcgaaaaacaaatttttaatgcattaaagaaagctcaaaattcaaaaaaacctattgcaatatcttgcaaaactacgattggttttggctctcctaataaaggtggtaaagcatcttctcatggaagtcctttaggtcgagatgaaattaagttagtaagaaaaaaattaaattggaagcataagcctttcgaaattccagatagaatattaaatgcatggagagatattggaaacagagcatctttagaggcagaaaaatttaattctaaagatatcacaaataaggaaaatttaattccaatttctattaaagaggaaattgagaagttcaagaaaaattatttaaaagtgttagaaccaatggcgacaagaaaatcttcagaaaaatttcttgagattgcatcaaagttaacaaatcttataggagggtctgctgatctagccggctctaataatacaaaaactaaaaatcataaaattattaaacccggaaaatttgatggaaattatattcattatggagttagagaacatgcaatgtgtggaataatgaatgggatttctttacacagtaatttaattccttatgga

SEQ ID NO: 230957 - DNA, 724 bp, Unknown
  Bacterial polypeptide expressing nucleotide sequence isolated from the Sargasso Sea
ggattgattccttttgggggaacttttttagtttttgcagattacgagcgtcctgctttaagactaggtgcgattcaacaatgtagagtcattcatgaattcacacatgattctttttgggttggtgaggatgggccgacacatcagccaattgaacatgcaatggcattaagagcaattccaaactttaatgtatataggcctgcagatgcaaaagaaacagcagcttgttttgaattaactatttcacaaaataatactccttgcgcattactattatcaaggcaaggcgttccagttttaaataaaaatttagattttgtaattgatggagtatcaaaaggagcttattctattcttgattgtgataatcctgaactaatatttatagcaacagggtctgaagttagcttagcgcttgaagttgcagaaaagatgagtgataaaaaaattcgtgttatcagtatgccttgcagggaaatttttgagcaacaatcagatgattataaaaactcaattatccctaatcgtggagcaatgaaaatttcaatggaagctggcatcactatggggtgggaaaagtatattggagtcaatggcttgtcaataggtattgaccattacggggcatctgcaccaggaaaagatctttctgaagaatttgggtttacatctgaaaaagtcgaaaataaaattagagaccatttaagtaaattattataat

SEQ ID NO: 230958 - DNA, 289 bp, Unknown
  Bacterial polypeptide expressing nucleotide sequence isolated from the Sargasso Sea
tgttgcaacagtgttattcataaattttttaagatttaatccaaagaatccagattggttaaatagagatagatttgttttatctgctggtcatggttctatgcttttatattctttactttacctaacgggatataaaagcatatcaattaataatattaaaaaatttaggcagcttaattctatttgtgctggacatcctgaatatcatcctaaaacaggtattgaaactacgacaggtccccttggacaaggtatatctaatgcagttggttttgcagtagactga

SEQ ID NO: 230959 - DNA, 830 bp, Unknown
  Bacterial polypeptide expressing nucleotide sequence isolated from the Sargasso Sea
acttcaatctgataagaatttcagacaattatggaatcaatttaataattttgaaattccagaggttgaattggattggtcaagtgatgaagcttcaagggttattggtgggaaaatattgaacgaatatggtttatctaacaaatttattattggtggctcagcagatttagctgcatcaacaaaacaaataattagtgacaatatctttggttcaaataattatagtggtaacagtattgaatttggaataagagaacatgcaatgggaggaattgttaacggccttgcattacatagtaagttaataccatacggatcaacttttttagttttctctgattacatgaggccaagtatgcgattagcatctttaatgaaagttaattctttatttatattcactcatgattctatatatctaggagaggatggacctacacatcagcctgttgaacatttaatgtcgttaagacttatacctaaccttgatgttatcaggccagcaaatagtatagaattaattcattcctatagatatgctttggaaaatagggataatcctaaagcaataattttatcaagacaaaacatgaaatttttcgatcacgatgttagctataaagattttcaaacaggtgcttatgaatttatatcaggtacagacattactttgattgcaacaggttcagaacttgagcttgcccttgagataagtacaaaattaaaagatttttctgtccaaataattagtgctccaattctaaatagattgagtcaaaagaggcttgaatctttaggcctcagtccaaatatttttacacttgagc

SEQ ID NO: 230960 - DNA, 304 bp, Unknown
  Bacterial polypeptide expressing nucleotide sequence isolated from the Sargasso Sea
ttgaacaaagagaatagagatttagcaaatgcaattagatttttatctattgatgctgtagaaaaggctaactcaggccatccaggtatgccaatgggcatggctgatgtcataacagtactctacaaatactaccttaagtttaatccaaaaaatccaaactggataaatagagataggtttgttctttcagcgggtcatggttcaatgcttctttattcaattctatatttaacgggatataaaagtatttatttaaatgacataaaaaattttagacaattaaattctatatgtgcgggtc

SEQ ID NO: 230961 - DNA, 652 bp, Unknown
  Bacterial polypeptide expressing nucleotide sequence isolated from the Sargasso Sea
gcattaatgaaaaaaagagtcatttatataatgactcacgactctattgggcttggagaagatggccctactcatcaaccaatagaacagcttttaggtttacgagctatacctaacttaaatgtatttaggccagcagatagaatagaaactatagaatgttgggaacatgccttaaaaagctcaaaaacacctagtgtgctatctttaacaagacaaaacttaaatccagtaagaaaaatatcctctaataaaaacttatgctcattaggggcttacgaggttttaagaacaaataaaaaaattaatctaacaatattagcaagtggatctgaggttaatctagccaaagaggttagccataaattagccaaagataaaatatattccaaagtgatatcaatgccttgtatggaacttttcgaattacaatccaaatcttataaaaataaaattttagaagaaacaaaatttaaaatatcgattgaagctggatcaactgattgttggaaaaaatatgttggtagtaaaggtattacttttggaattaatgaattcgggaaaagtgcgccttataaagatatttataaatattttggactagagagcacaaatattaaaaatatttcgaaaaaattattgaaaaaataac

SEQ ID NO: 230962 - DNA, 964 bp, Unknown
  Bacterial polypeptide expressing nucleotide sequence isolated from the Sargasso Sea
ggtcagggtttgagtaattctgtgggcatggctcttgctcaagaaattttaaagaaaaggtttggatccgatttgattaataacaagacatatgtcgtggctagtgatggtgattttatggaaggtattagtcatgagtcgatgagtctagctggtcatttaaatttaaaaaacttaattgttttctttgataataataaaatatctatagacggacctacctctttaagtgtttctgatgactataaaaaaagatttgaaagctacggatggtcttttcaagaaataaatggacataattttaagcaaatttttaatgctattaaaaaagcaaataagtcaaaaaaaccatcaataatttcttgtaaaacaatcattggttttgggtcgcctaataaatctggaaaagcttcgtctcatggtgcccctttgggtgatgatgaaataaagttagtgagaaaaaaactaaaatggaaatatgatccttttgaaattccacaagaattaacagactcttggagggagatagggaataaaggggaaatgatagagggggaatggaataaaattttgaataaaaaaaataataaaattaaagaggaatacgatagacttatgaaaggagagcttccattatctttggacaaagtattaggagatgaaaaattaaaattttttcaatcaaagccaaaaatggcaacaaggcaaagttcttcttatgtgattaattctatatcaaatattttaccagaattaattgggggttctgccgatcttagtgggtcaaataatactaaaacagaaagctcaaaagtaattaattctaaaaatttttcaggaaattacattcattatggagttagagaacatgcaatggcaggtataatgaatggtctagccttatatggttgtttaattccatttggaggaacctttttgattttttcagattatctgaagcctt

SEQ ID NO: 230963 - DNA, 755 bp, Unknown
  Bacterial polypeptide expressing nucleotide sequence isolated from the Sargasso Sea
tttgcaatggtcaaatgatgaaaaagacgaatattcaattgcagtattaaagggcttggtaatggatgctacgagaaaggccaatagcggtcatccaggtggaccattatcctgcgctgattttgcatatgtactttataaatattatttaaaatttgatccagaaaatcccaattggtttaatcgtgataggtttatcctgtctggtggacatatgtcgatggtacagtatgcactcttacttttttcaggctggttaacattagaagacataaagaaatttaggcagtttaatagcaacactcctggccatcctgaagtggaaattccaggagtggaatgtacaaccggaccgctaggacaaggttttgggatggctacaggcatggcacacgctgaagcatatttgcgtaacatatttagagctaaatcctcaaaagcttaccaattagtgaaccactttacatatgtacttgcaagtgatggtgatctccaggagccagtcgctctaggagcggcatcactagctggccatttaggtttatcaaaactaattgtattctatgatgcgaatgaagcacagatatccggccacacaaatcgttcagattctactaattataaaaaaatatttgatggtttcaattggcatgttcagaaaataaatggccatgatcatgatgagatcaaaaaagcgatagattccgctcaggaagatggtcgtcctagcataattataggtaatacaattatgg

SEQ ID NO: 230964 - DNA, 858 bp, Unknown
  Bacterial polypeptide expressing nucleotide sequence isolated from the Sargasso Sea
gatgttgttactggttttatttaaaaactttttaaaatttaatcctaaaaatccaaattggttgaacagagatagatttatcttgtcagcaggtcatggttcaatgctactttactccttgctttaccttacgggatataaaagtatttcaattaacgatattaaaaattttagacaaataaattctatttgtgctggacatcccgaatttcatcatgggtctggaatagaaacaacaaccggaccactgggtcagggaattgcaaatgcagttggctttgcattagcagaggaaattttaaaaaataaagttggaaaagatataattaatcataagacatatgttttagtgggcgatggatgtctaatggaaggaataagtcatgaggcgcttagcttagctggtcatttaaagttaaaaaatcttattttattattcgataataattcaatctctatagatgggcctacaaatctggctgtttcggacgatattaaaaaaagatttaatagctatggctgggattgtgttgaaataaatggacacgatgaaaaacaaatattcaaagcattaaaaaaagctcaaaaagcaaaaaaaccttttgctatttcttgtaagacgacaattggctatggatcaccgaataaaggtggaaaagcatcatctcatggaagtcctttaggcgaagaagaaatcaacttagttagaaaaaaacttaattggcaatataaaccttttgaccttcctgaaaaaataaaaaaacaatggaatatgattggtgaaaaagcatccattaacgcgcaaaaatatgaagctaagcataaaagtaaattaaaaaaattaggatggctttcatt

SEQ ID NO: 230965 - DNA, 856 bp, Unknown
  Bacterial polypeptide expressing nucleotide sequence isolated from the Sargasso Sea
caaggtatatctaatgccgttggttttgcaatcgctgaggaaattttaaaaaataaattaggtaaagatttaattaatcacaaaacttatgttttagctggagatggatgtttaatggaaggaataagtcatgaagcgatgagtttggcgggacatttgaaacttaaaaatttagttatgctatttgataacaattcaatttcaattgatggtccaacaaatcttgcagtttcagataattttaaaaaaagatttgaaggatatggttgggattatatttctatcaacggtcataatgaaaaagaaatttttaaatcactaaaaaaggttcagaacgctaaaaaaccttctgtaatttcttgtaaaacaaaaattggatatggttcaccgaataaatcaggaaaggcatcatcccatggaagtccattaggagcagatgaaatcaaacttgtaagaaaagtcttaaattggaaaagtaaaccttttgatatcccaaataaaattttaaaagattggagaaaaattggcctaagaggtgaaattttagaaaaaaaatggaacaaaatatttaaaagaaaaaaaataaaatttaatcaaactttaaaaaataagtttaccacagcacttaagaaagaaaaagaaaatgcaattaaggaaccaaaaagtttagctactagaaaatgttcagaaatgacattgagtgcattaacaaaagaaaaaaataatttaattggtggctctgctgatttagcaggatcaaataatacaaaaactaaaaaccataaaataattaagcctggagatttaaatggagactacattcactacggagtgagggaacatgcaatgagcgggg

SEQ ID NO: 230966 - DNA, 754 bp, Unknown
  Bacterial polypeptide expressing nucleotide sequence isolated from the Sargasso Sea
ggctctgctgatttagcaggatctaataatacaaaaacaaaatatcaaaaaataattaaacctggagattttagtggagattatattcactacggagtaagagagcatgcaatgagtggaataatgaatggtattgcactctatggaaatttaattccatatggtggaacttttttaattttttctgattattgtaaaccttcaattaggttatctgcgttgatgcaaaaaagagtaatatatgtaatgacgcatgactctataggacttggagaggatgggccaacccatcagccaattgagcagctatcaggtttacgatcaattccaaatttaaatgtttttagaccagcagatagagttgaaacaattgaatgttgggaacatgctttaaaaaattcgaaaacaccaagtattttatctttaacaagacagggcctaaatcccataagaaaatcatttacaaagataaataaatgttctttaggagcctatgaagttttgagaaccaataataaaattaatttaacaatatttgcaagcggttcggaggttaatttggcaatcgaaactagtcataaattagccaaagataaaatttactgtaaggttatatcaataccatctatggagcttttcgatcaacaatcaaaattatataaaaataaaattttaaacgaaactaaatttaaaatttcaatagaagctggatcaagcgattgttggaaaaaatatgtagggagttcaggtttaa

SEQ ID NO: 230967 - DNA, 385 bp, Unknown
  Bacterial polypeptide expressing nucleotide sequence isolated from the Sargasso Sea
atggatattgatactctacgaaaaagtttttccgatcactgggataaagctactgcaattagaatgttatctgtggatggagttgagaaagctaatagcggtcatccaggtatgccaatgggtatggctgatgtggtaacagttttatttgaaaaacacttaaaattcctttcatctgaacctaactggttcgatagagatcgttttattttatctgcgggtcacggatcaatgcttttatattctgttctttatttagctggttatcctgatattactttggaggatattaaaaacttcagacagcttaattcaaatactgccgggcacccagaatatggccacattcctggtattgaaacgactacaggtccattaggacaag

SEQ ID NO: 230968 - DNA, 724 bp, Unknown
  Bacterial polypeptide expressing nucleotide sequence isolated from the Sargasso Sea
agcaatctaattccttatggaggtacttttttaatattttctgattattgtaaaccttcgattagattgtcagcattaatgaaaaaaagagttatatatgtaatgactcatgattctattggtctcggagaagatggccctactcatcaacctatagaacagctttcaggcttacgtgctatacctaacctaaatgtatttaggcctgcagacagaattgaaactatcgaatgttgggagcacgccttaaaaagcccaaaaacacctagtgtactatctttgacaagacaaaatttaaatccagtaagaaaaacatactcaaataaaaacttatgttccttaggcgcttacgaagttttaagaataaaaaaaaaaattaatctaacaatattagcaagtggatctgaagttaatctagcaatagaagttagccataaattggccaaagataaaatatactccaaagtgatatcaatgccttgtatggatcttttcgaattacaatcaaaaacttataaaaataaaatattaaaagaaacaaaatttaaaatatcgattgaagctggatcaagtgattgttggaaaaaatatataggtgataacggaattacttttggaattgatgaatttggaaaaagtgcaccgtataaagatatttataaatattttggactagagagcacaaacattaaaaatatttctaaaaaattagttaaaaattaaa

SEQ ID NO: 230969 - DNA, 796 bp, Unknown
  Bacterial polypeptide expressing nucleotide sequence isolated from the Sargasso Sea
aatgggtaaaagtacaaattatattcactacggtgtaagagaacatctgatggctgcagcaatgaacggaatagcagttcatggtggattcttaccatatggtggtacttttttagttttttcagattactgtaaaaacgccattaggttatctgcaatgatgaagcaacaagtaatctatgtttttacacatgactcaataggtctgggagaagatggaccaacgcaccaacccatagagcatttagcaagtctcaggtcaattcctaaccttatcgttattcgtccttgtgattcaatagaaacttttgaagcatgggagtttgcaattaaaaatacaaattcaccaacagcattaatactatctaggcaaaatttacctttaataagaaatgattttaaagaaaataagcttaataggggggcttatttccttaggcaatttaatgatggaaagttttcaataatttcaacgggatcggaagtatcgcttgcgctaaaagttcatgatttttttgtgagtaaaaaaataaaaagtaatgtagtatcaatgccatcgatggaattatttaacaaacaaacctctagctaccaagacaaaatactgggtaataaaccgaaagttataattgaggctgcctcaagttttggctggcataaatatattgataaaaatgacttattggtaagtattgacaattttggagaatctggaaaaggtgatgacctttttgatttttttggttttaattgtaataatatagtccatttaattaaaaaaaaaattctgacgtga

SEQ ID NO: 230970 - DNA, 753 bp, Unknown
  Bacterial polypeptide expressing nucleotide sequence isolated from the Sargasso Sea
tgacggcaatcatgaatggaatgcttttgcatggaggaatgaaaccatatggtggaacatttttagtctttatggattacgctaggaatgctgttaggttggctgcactcatggagattcctaatatttttgtatatacccatgattctattggactgggagaagatggaccaactcatcaaccagttgagcatcttgtaactcttagagcaactccaaacttaaataattggagaccagcagatattattgagactgcggttggatggaaagaagcaataacttcattaaagactccgcatagtctcatcttatcaaggcaaaatttaccaaatattcaaagaaataaagatcaaattgttcagatagaaaatggaggctatttgctttctcatgaggagaatgctgatataacgctaattgcatcaggcagcgaggttcagttgattttagctgttgccaaatcaatccaagaagaaggatttaaggtgaatgtagtatctatgccatgccttgataagttctaccagcaggataagacatatagagatagtgttgtggatcccatgatacctaagcttgttgtagaagccctgcatccggattcttggcatggtttgctcaatcttgctgatactgttattggtatgaatactttcggtgaaagtgctccagcagaagaattgatggcaaagtttggttttacagaaaataatataattaccgaagcaaaaaaactacttaaaaaatgag

SEQ ID NO: 230971 - DNA, 274 bp, Unknown
  Bacterial polypeptide expressing nucleotide sequence isolated from the Sargasso Sea
aatggctacaaataataatgatttagctaatattctaagagtattagcaatggatgctgtagagaaagcaaaaagtggtcatccaggaatgcccatgggaatggcagatatagctgaagccctatggagaaatcatttaaatcacaaccctaacaatcctaattgggctaatagagatagatttgttttatctaacggccacgggtctatgctcatttatgctttacttcatttatcgggatacgatcttagtttagatgagataaaaaacttt

SEQ ID NO: 230972 - DNA, 326 bp, Unknown
  Bacterial polypeptide expressing nucleotide sequence isolated from the Sargasso Sea
tttgagcaagcaaaatagagatttggcaaacgcaatcagatttttatcgattgatgctgttgaaaaagctaattccggacatcccggcttacccatgggaatggctgatgttgttacagtgctttttagatactaccttaagtttaatccgaaggaccctggatggataaatagagatagattcgttttatcagcaggacatggatcaatgctactttattctttgctatacctaactgggtataaaagtatatcactaaataatattaaaaattttaggcaattaaattcaatttgtgcaggtcatccagaatatgtacccaatt

SEQ ID NO: 230973 - DNA, 862 bp, Unknown
  Bacterial polypeptide expressing nucleotide sequence isolated from the Sargasso Sea
ataaaaagatttaaagcgtataactggaatactctttcaattgatggtcataatcatttaaagatttcaaatgctattattaaagctaaaaaaagcaagttaccaacacttatagcttgtaaaacaaaaataggttttggttctccaaataaagaagcaaaatcatcgtcacatggatctccattaggagaagaagagataattttaactagaaaaaaattgaattggcagcacaaggcatttcttattccaaaaaatctttctgataagtggaataattttcataaaagaaacattaataatattgcaaattggaaaaaaaatgcaaagaaaattattagttctaaaaattatcaaatgttttttgataataaaaaattgaaaaaactagataaagatatttctgattttaaattttatcatattaaaaatcaaactaattgcgcaactcgtaaagcaagtgagctttcattagaaatttttactgatcatcacaaaaatttaattggaggttctgctgatttgacgggatctaataatacaaaagttaaaaatatgcagattttatcaaaagaaaactttaaagctcaatatatccattatggagtgcgagaacatgctatggcagctataatgaatggtttggcacttcacggtggaataaaaccttatggaggcacatttttagttttttcagattattgtagaccttcaataagacttgcagcattgatgaaacttcctgtaatttatgtttttactcatgactctataggtttgggtgaagatggacccacacatcaacctgttgaacatcttgctgcattaagagctattccaaatttaaatgtcattaggcgca

SEQ ID NO: 230974 - DNA, 901 bp, Unknown
  Bacterial polypeptide expressing nucleotide sequence isolated from the Sargasso Sea
agagatttaaaaaaaaaactcggtaaaaaaataattaatcacaaaacatacgtattagctggagatggttgcttaatggaaggaataagccatgaggctttaagtcttgcaggtcacttaaaattaaaaaatcttattttgctttttgataataattctatttcaatagatggtccaactaaactagctgtatcggataatcacaaaaaaagatttaatagttatggttgggattttttagatataaatggacacaatgagaaagaaatatttaaagctttaaaaaaagcacagaattcaaaaaaaccaattgctatctcttgtaaaactaaaattggatatggctcaccaaataaatctggcaaagcatctgctcatggtagtccactaggagaagatgaagttaaattggtaagaaaaaaattaagatgggaatatgaaccttttgtgctacctcaaaaaatacttaatgaatggagagagattggtaataaagcttcaaaaaaagcaaaactaaatcaaaaaaattaccagactaaaaataaattaattggagattcaacttattcagcaattgaaaaggtaaaatctgaatatttaaaatctttagagccaatggctactagaaaatgttctgaaaaatttttagaaattgtttcaaagatttcagaaataattggtgggtctgcagaccttgctgggtctaataatacaaaaactaaaaatcacagtattataaagcctggaaatttttcaggcaattatattcattacggtgttagagaacatgcaatgtgtggagtaatgaatggattagcattgcatagcagtttaattccttatggagaaacgtttttaatttttagtgattactgtaaaccttctataagacttgcggcta

SEQ ID NO: 230975 - DNA, 730 bp, Unknown
  Bacterial polypeptide expressing nucleotide sequence isolated from the Sargasso Sea
ttatcattacacagcagcttagttccttatggcggtacatttttaatttttagtgattattgtaaaccctccataagacttgcggctatgatgaaaaaaaaagtaatatatgtatttactcatgactctgtaggtcttggagaagatggaccaacacatcaacctattgagcagctaacaagcttaagatcaattccaaatttaaatgtatttcggccttgtgatttcattgaaacatttgaatgttggcagcttgcgctagaaaaaaatgataccccaagtgtaattgcattaactagacaaaaaattagtcctgttagaaaacaatatgactcccgaaatctttcgtctaaaggggcttatgaaattcttaggactaataaaaaaataaaagttactattttatcctctggctctgagacaagcttagcatgcgaaataagtcataaattggccacagaaaatatttattcaaaagttatttcaatgccttgccaggaattatttgaccaacaaaaagaagattatcataaaataatattaaacgaaactgatctaatcgtttcgatagaggcctctgaaactagcttttggaaaaaatatactggccaaaaaggattgaatttcggaataaatagctttggaaaaagtgcaccatataaagatatatatgacaactttggattaaattctgaaacaataacaaagaaaattatacaaagattatgaa

SEQ ID NO: 230976 - DNA, 787 bp, Unknown
  Bacterial polypeptide expressing nucleotide sequence isolated from the Sargasso Sea
ttgaataatttaaataataacaaaaatctaagacaattatcaaattgtattagatttttatctatggatgcagtggaaaaagcaaaatctggtcatcctggtatgcctatgggtatggcagacatagcaacagttctttacaaaaatcatttaaagtttgatccgaatgacccaggttggattgatagagatagattaattatttcaaatggacatggatcaatgcttttatactcttgtttgtatctaacaggatataaagacattgacataaatcaaattaaaaattttagacaattacataataaaactgcaggtcacccagaatatggaagtgcagaaggaatagaaacaactactgggcctttgtctcaaggtttagctaatgcagttggaatggcgctagcggaaaaaaaattatcaaataattatggaaaagaattattcgatcattacacttatgtttttgctggagatggatgcttaatggaaggtttaagtcatgaagcgtgtagtcttgcaggacatttaaaattaaataagcttattatgttttttgataataattctatttccatagatggatcaacaaatctttcagtttcagacaatgtgaaaaaaagatttgaagcttataattggaatataattgaaatagatggtcataaatatgaggaaattgaccaagccataattcaagcaaaaaaaaatgatgctccaacaattatatcttgtaaaactaaaattggttttggctctccaaaacaaagagggtttcagcttcatc

SEQ ID NO: 230977 - DNA, 805 bp, Unknown
  Bacterial polypeptide expressing nucleotide sequence isolated from the Sargasso Sea
ttgtctaataatcggtcaaaaccttcaaaacttatacaattagctaattgtataagattcctttcaattgatgcagttgaaaaggctaaatcaggacatccaggaatgccaatggggatggctgatgttgcaacagttttatttaaagatcacttaaaatttgaccctcaagatcctaaatggcttgatagagatagattaataatttcaaatggtcatggatcaatgttgctctattcagctctatatttgctaggatataaggatataaatataaaagatttaaaaaattttcgacaattaggctctcctactgctggacatccagaatttggtgaattgaaaggtattgaaacaacaactggcccactagctcaaggattagcaaatgcggttggatttgctctatcagaaagaattctaaacgcgaagcttggggctaaaacaattaatcactatacatatgtttttgcaggagatgggtgtttaatggaagggctaagtcatgaggcttcaagtttagctggacatctaaaactgtcaaagttaattgttttttttgatgataattcaatttcaattgatggaccaacaaatcttacaatatctgaagatacagttgcaagatataagtcatatgggtggaacacaatcaaaattgatgggcacaatcataaagaaatatcaaaagcaatttctttagcaaaaaagagttctttgccaactttaatttcttgtaagacaaaaattggttttggatctcctaataaagaatcatcatcatcctcacatgttcaccattagg

SEQ ID NO: 230978 - DNA, 638 bp, Unknown
  Bacterial polypeptide expressing nucleotide sequence isolated from the Sargasso Sea
taatgtctttgaagtaatttatgttttaactcacgattctattgggcttggtgaagatgggcctactcatcaaccaatagagcatttagctatattaagatctacaccaaatctaaatttaataagaccagctgacacagtcgagaccgctgaagcgtgggacatagcacttaaaactaacggtccaacagtcttggctctttcaaggcaggctttaaaagcttttcgttgtgaaaaatcgtctgaaaataaagtttctagaggtggttatctagtaaatgatacttcttcaagaagagatctgactctcatagctactggatcagaggttgaattagctatagaggcgtctaatttgttaaaacaagacggtattaacgtagctgttgtttctcttccttgttgggaattatttgacaagcaaaatgatgattataaactgaaagttttaggtaatagtcctcgtattgctattgaagctgcttgtgaaatgggctggagcaaatatactggagaagatggtatatttataggtatgagtggttttggagcttcagggccagcccccgatctttacaaacactttggtattacttcaaaagctatagtagaacaagcaagatcgttttttaaataaa

SEQ ID NO: 230979 - DNA, 1291 bp, Unknown
  Bacterial polypeptide expressing nucleotide sequence isolated from the Sargasso Sea
gatattaagaattttagacaacttaaatcaccctcagctggtcatcccgaattaggagaattcgaagctatagaaacaacaacaggccctttatcccaaggtctttcaaatgcggttggttttgcaatggctgaaaaaaaactatcctcaattctaggagaaaatacaatcaatcattacacatatgtattcgctggagatggttgcttgatggagggattaagtcatgaagcttgtagtttagccggtcacttaaaattaaataaattaatagttttttttgatgataattctatctctatagatgggcctattgctctaagtagcagtgatgatgttcaaaaacgttttacatcttataattggaatataattaatatagatggtcataatcataatgaaatatctgatgccatacataaagccaaaaagtcttataaacccactcttatatgtgcaaaaactaaaataggttatggttcaccaaataaagaatctaaagcttcatctcatggatcaccgctaggtgaagatgaaattacacttactcgaaaaaatttaaattggaatcatgatgaatttataattcctgatgatttacttactgaatggagaagttttgctaatagaaatacaaaagaaaaaaatgattggataaataaaaatacagattttctaaattcttcaaaatttaataaattttttaatcaagaattggaaagtgatttaaaaaaaaatataataaattttaaaataaactattcaaaagatgaaacaagatacgctacaagaaaagcaagtgaaaaatcaattgaacttttgaacaatcatgtcgaaaactttattggaggttcagcagatctaactgggtcaaataatacaaaaactaataaaatgagtgtttttaactctgagaattataatggtagttatgtatattacggcataagagaacatgggatggccggagttatgaatggtttagcccttcatgggggtgtgagggcatacggcggcacttttttggttttttctgattattgcagaccatcaataaggctatcagctttaatgaaattgcccgttatatttgttatgactcatgattcaattggtctcggagaagatggtcccacacatcagcctgtagaacatttagcttctttgagagcaattccaaatttaaaagtaattagaccatgcgatataatagaaactatagaagcttgggaagttgctttagaagcaaaagggccaactattttagcattaactagacaagggctatcaa

SEQ ID NO: 230980 - DNA, 862 bp, Unknown
  Bacterial polypeptide expressing nucleotide sequence isolated from the Sargasso Sea
tgctgatttagcaggatcaaataatacaaaaactaaaaaccataaaataattaaacctggagattttagtggtgactacattcactacggagtgagagaacacgcaatgagtggggttatgaatggtatcgcacttcacagcaatctaattccctatggaggtacttttttaattttttctgattattgcaaaccttcgatcagattgtctgccttaatgaaaaaaagagtcgtttatgtaatgactcatgactctattgggctcggagaagatggccctacccatcaacctatagaacagctttcgggcttacgtgctatacctaacctaaatgtattcagacctgcagacagaattgaaactatcgagtgttgggaacatgcattaaaaagctcaaaaacacctagcgtgctatctttaacaagacaaaacttaaatccagtaagaaaaacttactcaaataaaaacttatgctcattaggtgcttatgaagttttaagaacaagtaaaaaaattaatctaacaatattagctagtggatctgaagttaatctagcgttggaggttagccataaattagccaaagataaaatatattccaaagtgatatcaatgccttgtatggaactttttgaattacaatcaaaatcttataaaaataaaattttagaggaaacaaaatttaaaatatccattgaagctggatcaagcgattgttggaaaaaatatgtaggtgataacggtattgcttttggaattgatgaattcggaaaaagtgcaccctataaagatatttataaatattttggactagagagtacaaacattaaaagtatcactaaaaaattattaaataaataa

SEQ ID NO: 230981 - DNA, 424 bp, Unknown
  Bacterial polypeptide expressing nucleotide sequence isolated from the Sargasso Sea
tttgagcaaacaatataaaaaattggctaattgtattagatttttgtctattgatgctgtgcaaaaagctaactctggtcatcccggaatgcctatgggtatggcggatgtggcaactgttctttttaaagactttttaaattttaatccaaaaaatccaagttggataaatagagacagatttgtgctttccgctggtcatggatctatgttgctatactctcttttatatcttgtgggctacaaaagtatttcgttaaatgatattaaaaattttagacagttagactctatttgtgcaggtcaccctcgaatatcatcaaaatactggaatagaaactaccactggtcctttgggtcaaggaatatcaaatgcagtaggttttgctttagccgaagaaattttaaaaaaaaaaaatggtaa

SEQ ID NO: 230982 - DNA, 1288 bp, Unknown
  Bacterial polypeptide expressing nucleotide sequence isolated from the Sargasso Sea
ggcctgcgccgaagaggaccggccgagcctgatccgctgccgcaccgtcatcgggttcggcgcgccgaacaaggccggcacctccggcgtccacggcgccccgctcggcggcgacgagatcgccggcacgcgcgccgccctcggctgggatcacgcgccgtttgaaattccgcagcccatcgtcgaatcttggcgcgccgtcggcgccagggggcgcgccgcgaggcaggcctgggaagcgcgccacaaggccgccgacagcgccgcgttcgacgccgccatggccggcgatttcgacggcccgatcggcgacgccgtgctggcatggaaacaggcgcttgccgccgagccgcagaaaatcgccacccgcgtcgccagccagaaggcgatcgacgccatcattccggcctgcccggcgctgatcggcgggtcggccgatctgaccggctcgaacaacacccgcgccggcgggcaggacgtctactcccgcgacaacccggccggaagctatgtccattacggggtgcgcgagcacggcatggcggcggcgatgaacgggatcgcgctgcatggcggagcgatcccatatggcggcaccttccttgtcttcaccgattactgccgcccgtcgatccggctgtcggcgctgatgaagcagcgcgtcatctatgtgatgacgcatgattcgatcggcctcggcgaggacggcccgacccaccagccggtcgagcatcttgcggcgctgcgggcgatcccgaaccttctggtcttccgcccgggcgacgccgtcgaaacggccgaagcctggcagtgcgcgctggcagcgcatgatcgcccgtcggtccttgccctcagccgccaagggctggagcagttccggcacggcgacatgaccgacaacctgacagcgaagggcgcctatgtcgccgccgaggcggacggcgcgcggcaggtgaccatcatggcgaccgggtccgaggtcggcatcgcgctggcggcgcgccaggcgcttgccgccgacggcatcgatgccgccgtcgtttcggccccctgcctcgagctgttcgccgaacaggacgccggcgcccgcgccgcggttctcggcgacgcgccgcgcatcgccgtcgaggccgcgatccggcagccctgggacaggcttcttcgcgacggcgacgactttgtcggcatggacggcttcggcgcctctggcccggcaggcgatctctatgcgcatttcgggatcaccgccgacgccgtcgccgcgcgggcacgcgcgatgatcggttaa

SEQ ID NO: 230983 - DNA, 598 bp, Unknown
  Bacterial polypeptide expressing nucleotide sequence isolated from the Sargasso Sea
aggtgaagatggacctactcatcaaccaatagaacagttgtcaggattgagagcaatacccaatttaaatgtttttagaccagctgatagaatagaaactattgagtgttgggaattggctctaaaaagtttaaaaactccaagcgttttagctttaacaagacaaaatcttgaacttgtcagacataaatatttaaatagaaacaaatgctcttttggtgcttatgaagtcttgaggaccaacaataaaattaaattgactatattggcaagtggatcagaagttggtttggcgattaaaactagccataaattggccaaagacaaaatatattctaaggttatatctatgccaagccaagaattgtttgaaatacagtcaaaagcttacaagcataaaattcttggtgaaacaaaattaaagatatctatagaagcgagctcaactgaatgctggaaaaaatttgttggagcaaatggtataacatttggtattaatgaatttggtaaaagtgctccctataaagaaatctataaatttttcgggctaacttcagaaaatatttctaaaaaaataaagaaaataattaggaaataa

SEQ ID NO: 230984 - DNA, 1039 bp, Unknown
  Bacterial polypeptide expressing nucleotide sequence isolated from the Sargasso Sea
gggatttgcagagttagagagaagaataaagagaaagataccaaagacggttattacaaaacttaacaattttatgtcaaaaaatcacacaccaatggcaacaagaaaatcatcacaaatagttatgacggaatttgggaagtcaatgcctgaacttattggaggatcagcggatctcaaagggtcaaacttgtcatattatgatgatatggattcattttcgcattcaaatccttcaggaaaatatatttactatggtgtcagagaatttggtatgtctgctatatcaaatggtatcttccagcatggcgcttcaagaccattcgcaagtacttttctaatattttctgagtatgctaaaaatgcaattcgaatgtcagctctaatgaagttgccaattatttatatatttacacatgactcaataggactaggtgaagatggtccaacacaccaggcagtcgaacaactaacctcacttagacttgtcccaggattggacgtttggcgtcctgctgatactcaagaaacagctgctgcatggagagaagcaatattatcaaaagatagaccaatagccttagcgttatctcgacaaacacttaaagagatacctaaaactaagagacaaataagcaacatatcaaggggaggatatgtggtatatggcgatagctctgatccccatgcaatcatcatcgctacaggttcagaggtttcaatttcagtgagtgctgctgagcaactcaaaatcaaggggataaatatacgcgtaatctctatgccttgccaggaagtttatgagcgacagactcttgaatataaaaataaatgtatccctaaaaattttgccaatatcctcgctatagaatcagggattggagaaagttggtataagtttattggggggaaaggtgcgatgatatcaatggagtcttttggattatcaggcacaggtagcgatgtcatgaatcattttggattcagtatcagcaatattaaaaaaaatataaataaattaatcaaaaaaaataggtga

SEQ ID NO: 230985 - DNA, 435 bp, Unknown
  Bacterial polypeptide expressing nucleotide sequence isolated from the Sargasso Sea
tttgactataaaatataaagatttatcaaatgcaataaggtttttatccatagatgcagtggaaaaagctaaatcaggacacccgggtttgccgatgggaatggctgatgtggttacagttttatttaaaaattttttaaattttaatccaaaaaatcctagttggttaaatagagatagatttgttttatcggcaggacatggttcaatgctgttgtactcgtgcttatatttgtccggttataaaagtataagtttaaaggatattcaaaatttcagacagctaaattgtatttgcgctggtcacccagaatatgaaaaaaattctggtattgaaactacaacaggacctttgggacaaggaatttctaatgctgtaggttttgcaattgcagaggaaattttaaaaagtagatacggtaaaaaaatgtttaa

SEQ ID NO: 230986 - DNA, 291 bp, Unknown
  Bacterial polypeptide expressing nucleotide sequence isolated from the Sargasso Sea
aatgtctcaaaacttaaattcatcttctattcctcacgagaatatggcaaatgccataagattcttatcgattgacgcagtggagaaagccaagagcggacaccctggattgccaatgggaatggctgatgttgccactattcttttcactaaatttctgaagtttaattctgctgcccccaagtggcatgatagagatagatttgtattatctgcaggtcacggctcgatgcttctgtattcacttctttatctcactgggtaccgtgatatgaccataaaggatatcaa

SEQ ID NO: 230987 - DNA, 1313 bp, Unknown
  Bacterial polypeptide expressing nucleotide sequence isolated from the Sargasso Sea
taatcaaaagaaaaaatttgaatcagtagggtggcaagttttagaaattgatggtcacaatgagtctgaaatcactgaagctataaacttatcaaaagaagaaaccaatatgccttctttaattattgcaaaaagcacaattggtaaattcgcaccaaacaaacaaaacacaagctccattcatggtgcgccgcttggtggtgaagagatggaattatttttaaatgaagttaattggaatggagatgtttttgagcacgatgatgatgtttatgaatattttgcagaaaaaagactagaagatgaaaaaaaatatgaagattggaaaagtaatctagataaaaaattaaaaaatgatgaatcattcaaaattatgtggaaacaattttgtacaaatgaattaatatttccagaaaactttgaaatatctgatggtgcgaccagggcaacaggcggaagttatttaaatttaattggtgcaaaaaataaatttgtgctcggaggctctgctgatcttgcagcttctactaagcaggttgtaagtgacaaaacttactcaagtgaaaatagaaatggacaaaatattgattttggaattagggaacacagcatggcagctatagtaaacggtattaatcttcacagtaagttgtttgcttatggttcaacttttttagtattttcagattatatgagacctagcattagactagcttctcttatgaatttaaattcttcatatgtatttacacatgattcaatttatttaggagaggatggtcccactcatcaacctattgaacaccttatgtcattaaggttgattcctggtttagatgtcataaggccttcaaacagcatagagatcctacactcttatagatatctgttttcaaacactaaaaatcctaaagttctctctttaactagacaaaatttagaatatctagatttctcaatagattatgctgaatttctaaatggtgggtatgttgtttctgatggaaaggatattacaatttttgcttctggttcagaggtaaatttagcatttgatttaaaagacaggttaaacaaatattctgtcaagattgtaagcgttcctgtacttaataagcttactcctgaaaatgcattgtcattaaacaccacaaagttcacttttacattagagcttggtaaatcaatcggctggggtgactacattggagatattactgaatcaattagtatagaatcttttggaagttcagcacctcaaaacgatttaagtaaatattttaaaatagatgttgagtcaatagaaaaaagaa

SEQ ID NO: 230988 - DNA, 783 bp, Unknown
  Bacterial polypeptide expressing nucleotide sequence isolated from the Sargasso Sea
ttaactccaattcatctggcaactatgtctattatggcgtaagagagtttggaatgaatgcaattatgaatggaatgtctttgcatggtggcattattccatacggtgggacattcttggtttttatggattatggcagaaatgctgttcgtatgtctgctttaatgggaatcagaacaatttatgttttttcacatgattctgtcgctcttggtgaagatgggccaacacaccaaccaatagaacatttaacgacattaagatctactccaaacatgcatacttggagacctgcttctttgattgagaccgcagttgcttggaaaaaagctctaacaaacaaggatggaccaacatcaattattttatcaaggcaaaatcttaataatttttcaattgaaaatatctcagatgttgaaagaggtggttattttataaaacattctccagattcaacaattaatttaattgccacaggatctgaagtcgatactgtattagaagcagcaaaaattttagaagagagtgggacaaagaccaatatagtcagtgttccatgtttagaggagctagaaaaagatcaatctatttatcagaaaatattctctcaaaacaccagcaatattgtagttgaatgttctcacccaaattcatggtataagcatactgataaggttattggtatagacacctttggagaatctggcaaaggcaatgatttaatggagcattttgggtttacgccaagtaaagttgctaagaagatttcacaattggtatgaa

SEQ ID NO: 230989 - DNA, 1155 bp, Unknown
  Bacterial polypeptide expressing nucleotide sequence isolated from the Sargasso Sea
aatgagtttagcaggtcatctaaaacttaaaaacttaatagttttttttgataataataaaatctcaattgatggttctactagtttaagtgtatctgataattataaaaaaagatttgaaggttacggatggaattttttagatataaatggtcataatgaaaaacaaatatcaaaagcaataagtaaggcatctaaggctaataaacctactataatatcatgcaaaactttaattggatttgggtccccaaataaatctggaaaagcttcttctcacggttcccctctgggtgaagaagagatcgctttagtccggaaaaaacttaaatggaaatatgggccatttgaaattcctgaagatattttaaatgcttggagaaaaattggtgaaaaaggagctgaattagagaaaaattggtcagaaactttaaataaaaaaaaccctaaaattaaatcagaattaaaaaatacatatatagattcaaaccttgaagatcttgaagatttaattaaaaaagaaaaaataaaatattttgattcaaaaccaaacatggcaacgagacaatgttcatcagttgctatagagagtattttgactattttacctcagttaattgggggttcggccgaccttagtggatcgaacaatacaaaaacaaataattctaaagtaattagttcaaaaaattttgatggaaattatattcattacggcgttagagaacatggaatggcatctgttatgaatggattggcattatacagtggattaattccttatggaggaacttttttaattttttctgactattgtaaaccatcaataaggttggctgctttaatgggattaaaagtaatttatattttttctcatgactctattggacttggtgaagatggtccaactcatcagcctatagaacaattaaatggtctaagagcaattccaaatcttaacgtttttcgcccagctgatataaatgaaactctagagtgttgggaaatagctttaaaaagtaaaaatacgcctagtgcaattgctttatcaagacaaaaattaccctacattaatcctaaattttcagaaaagaatgaatgtaaaaatggagcttatgtagttaaaatgaattcacacgattacaaagttacttt

SEQ ID NO: 230990 - DNA, 1579 bp, Unknown
  Bacterial polypeptide expressing nucleotide sequence isolated from the Sargasso Sea
tctgataaattttggaagtcatttagtaaatcataaaacatttgttatggcaggtgacggtgatttaatggaaggaatttcccaagaggccataagtcttgccggtcacctgaaattgaagaaacttactcttctatttgatagtaacaatatttctatagatggacccattgcaaaaactgactcgacaaatcaaataaaaagatttgaggcttcaggctggaatgtcactgaaatcaacggtcacaacacaaaagaaatttttgaagcaattaaagactcaaactcatcagataagcccacaatgattttgtgcagaacagtaattggatatggatcacccaataaacaagggaccgcaagtgttcacggatcaccgcttggtcaagatgagtataatctaaccagaaaagaacttggcattaaatattcaaaattccagataccagcagaaattctaaaaatgtggaggagcgttggtatcaaaggacagaaacagaaaaaaatttggaacgataagctccaaaaatcgccgccaagcgtaaaaaaagagtttaaagatcaaattaaaaaatttatacaccccagtgtatttgcaaaattgaatgaacttaaggcagagctaaaagaagagccccagagcattgcgacaaggaaagcgtctgagatttgtctgaaatatatcaacgatgctacagcaattactcttggtggttctgcagatttgacaggatcaaataatacaaaaacagataacatcaatcctgtgacagctgaggcatacggcagatatattcattatggaataagagagcacgcaatgggcgcaataatgaatggggtatcccttcatggtggatttattccatatgggggaacttttcttattttctctgattattgtcggcctgcaattagattagctgctttgatgcaacaacaagtgatttatgtattaacacatgactccattgggttaggtgaagatggtccaacacatcagccaatagaacagctgtcaagtctgagggcaataccaaatgtgagcgtatttcgtcccggatcagctatcgagaccgttgagtgttgggaattggtattagaaaataagactggaccaagcttgttggctctatcaagacaaaatctgaatgaatttaggcagagtcttgatctagagtcaaaatataacccctgtaaaaatggtgcatattgtgtggcatccaattcaaagaaacctgaatttgcaatatttgcatctggctctgaagtgaatattgcgcttgaagcttaccaagaattatcacggttaaacagagaagttagcgtttactcagtgccatgtctagattatttcaattcgcaagataatgacttcagagaaaggataattagcaacgctacttgtaatatagtggtagaggcgggagtttctcagggttgggataaaatattaagggataatggaatatttatcgggatgtcaacatttggagcaagcgggccatataaagacttgtataaaaattttaatattaccaaagaacgcataatagatgtaatcttaaatagcaaataa

SEQ ID NO: 230991 - DNA, 232 bp, Unknown
  Bacterial polypeptide expressing nucleotide sequence isolated from the Sargasso Sea
catgattcaaatcggcttaggtgaggatggcccaacacatcaacctattgaacatttggttactctcagagcaacgccaaacttatacaattggaggccagctgatcttaaagaaacagcagtagcatggaaagagtcaattttatcaaaatctccaagctgtcttatcctcagcagacaaagccttccgcaggtcaaaatgagtgaggacaagattagtaatatctcctag

SEQ ID NO: 230992 - DNA, 658 bp, Unknown
  Bacterial polypeptide expressing nucleotide sequence isolated from the Sargasso Sea
tttggtattttcagattatatgaggccaagcataaggcttgctgcattaatggaattaaactctgtttttatattcacgcatgattctatttatctgggagaagatgggcctacacaccaaccaatagagcatcttatgtcactaagacttatacctggtgttgacgtaataagaccttcgaacagtgaagaaatagtgtattcatatcaatacatattttcaaaaacaaataatccaaaagctttagttttaaccagacaaaatattgactatttagagaccaacacttcttatgaagattttaaaaaagggtattatgaattagctcatggaactgatgcgacaatttttgcttcggggtcagaagttaatcttgctatggaagttagtaagttgttaaaaggaaaatcaatacagataattagtaccccaatacttaataaattgaaaccagagttaatcgactctataggtattaataataaagttttcactattgagttaggaagatcgataggctggcaagactatgtaggaccagtaacaaaaagttttagcatagattcctttggggcttcagcaccaattgatcagttagaagataatttcaatatggaagccaaaaaaatatctcagcagattttagatctattgtaa

SEQ ID NO: 230993 - DNA, 1069 bp, Unknown
  Bacterial polypeptide expressing nucleotide sequence isolated from the Sargasso Sea
tttgattaaaacctacgacgaaaaatatcctgataaatcagcagaacttaaaagaagaattaaaggcgacttacctgatgattttgagaatagttttaaaaccttcttgtcagaatgtgataaaaataatatgccaatggcaacaagaaagtgctcaaaagcatgccttgattttcttgtaaaagaattaccagaattaattggcggatcagctgatttaactccatcaaataatactttttcatcatcaagttctactttctcaaatgaaaacccttcaggtaatcatattaactatggagtaagagagtttggaatgtctgcaattatgaatggcatggttcttcatggtggcataaaaccatatggagcaacttttttggtatttactgactatgctagaaatgcagtaagattatcagccttaatggagataccaagtattttcgtatatacacatgattcagtagctttaggtgaagatggtccaacacatcagcctgtagaacatatggtaactttgcggtctactccaaatttaaatagttggagaccagcagatcttgtagaaactgcggtagcttggaacgaggcagttaaatcaaaaaaaacaccaacttgtttaatctttagtagacaaggaacttcagcaatatcacgtactgaagatcaattatccttaattaacaagggcggttatcttatcgatgaaagtgacaactctgatattactctcattgcatcaggaagcgaagttcaattgattatagatgcagcaaaagaattaaaaaatcactctatctctgcaaatgttgtatcaatgccgtctttagatttatttttacagcaatctgaggaatttcagagttcaataattaatcctgataaaccaatactcgttgttgaatgtagtcatcctaattcttggtacaggattttaaatagaaaagataaagtaattggaatagaaagttttggagaatctgctccaggcagtgaattacttgatcattttgggtttaatactgaaaatgttgttaattcagctaaatcattactaaatgattaa

SEQ ID NO: 230994 - DNA, 550 bp, Unknown
  Bacterial polypeptide expressing nucleotide sequence isolated from the Sargasso Sea
attgaaagtagaacataaacaattagctaacgcaattagatttttatcaattgatgcggtagaggaggcaaattctggtcatccagggatgcctatgggcatggcagacgtcgcaactgttttatttaaaaattttttaaaatataatccaaaaaatccaaattggattaatagagataggtttattttatcagcaggacatggatctatgcttttgtattcactactttatctaactggatataaaagtgtcactttaaatgacataaaaaattttagaaaactagattctatatgtgctggacatccagaatatcattcaaactctggtattgaaacaactacaggtccacttggtcaaggaatttcaaatgctgtgggttttgctttagccgaagagattttaaaatttaaaattggaaagaaatttatagatcataaaacttatgttatagctggagatggttgtttaatggaaggtgtaagtcatgaggctttgagtctggctggtcatttaaaattaaagaatcttattttattgtttgataat

SEQ ID NO: 230995 - DNA, 648 bp, Unknown
  Bacterial polypeptide expressing nucleotide sequence isolated from the Sargasso Sea
ttatgaaattaagagtaatttttattttttcacatgactctattggattaggagaagatggacctacccaccaacctatagaacaattagaacatcttagggcgataccaaatttaaacgtatttaggccggctgatattaatgaaactattgaatgttgggaaattgcattaaaaagtaaaagtaatccaagtgcaatagctctctccagacaaaaattgccttatgttagcgaacataactctggtgaaaacatgtgttctaaaggtgcttatgttttaaaaaaaacttctgataatgcagatatatcaataatcgcctcaggttctgaagttgaaattgctctggaagctcaagaaaaacttaaagacatgaatatagattcaaaagtcatctctgttccttgttatgatctgttccaaaatcaaaccaatgattacaaaaatgatattctaggcaaagatacttttaaaatctcaattgaagcatcaagccaatcaaattggaaaaatgtggttggaaagagtggtgttacacttgggttgtcaacttttggaaaaagtgctccatataaagagatttataaattatttaatttgaccagtgatgaaattgttaagacagtaaaatcaagggtaaagaaataat

SEQ ID NO: 230996 - DNA, 1685 bp, Unknown
  Bacterial polypeptide expressing nucleotide sequence isolated from the Sargasso Sea
cctgaagttgagatccctgggagttgaagcaacgactggtccattaggtcaaggcgttgggatggctgtgggaatggcaactgtagaatcaatgcttcgggctagatttggtgaattggttgataatgctgatgatcttgttggccattatacttatgttgtagctggggatggtgattttcaagaaccagtagttttaggatcaggatccatggcaggtcattggggtctttctagacttatagttttttatgattcaaataatgctcagatttcaggaaatgttgatcgatcagattcgacaaattatgctcaggtttttgaaggttttggatggcatgttcaagaaattgatggacataattacgaccaaatttgtgaggccattgaaaaagcacaagttgtagatcgtcccagtctaattattggtacgactacaatggctaaaggttcagcaaatatggagggagaccatgaaacacatggagcaccgttaccgcaagaagaaattaacgcaacgaaagagcagcttggtttgcctgatgaatctttttatttacctcaagaagtaattgatttttttcaatctcgattttcttctttatctgattctgttgttaagtggaatgaggatactaatgctgccttaaataatgataaattccaatccctttggaatgcaactattttaaataaaatagaagatcttgattatcctgaatttgaaaataactcctctttagcaacccgaaaagcatttggagtgacattagataaatttgctgaacagcttccatcaatcattggtggatcagcagatttggagccatcaaactatactgggaactttgcaaatacttacggcgatttttcaaaagaaaatcgtcttggtagaaatttagcttttggcgtaagggagtttcctatggcagcagcaatgaacggaatggcactccatggtggagcgattccttttggcggaacgtttttagtttttgcagattatgagcgtcctgctttaagactaggtgcgattcaacattgtagagtcattcatgaattcacacatgattctttttgggttggtgaggatgggccaacacatcagccaattgaacatgcaatggcattaagagcaattccaaacttcaatgtatataggcctgcagatgcaaaagaaacagcagcttgttttgaattaaccatttcacaaaataatactccttgcgcattactattatcaagacaaggggttccagttttaaataaaaatttagattttgtaattgatggagtatcaaaaggggcttattctattcttgattgtgataatcctgaactaatatttatagcaacagggtctgaagttagcttagcgcttgaagttgcagaaaagatgagtgataaaaaaattcgtgttatcagtatgccttgcagggaaatttttgagcaacaatcagatgattataaaaactcaattatccctaatcgtggaacaatgaaaatttcaatggaagctggcatcactatggggtgggaaaagtatattggagtcaatggcttgtcaataggtattgaccattacggggcatctgcaccaggaaaagatctttctgaagaatttgggtttacatccgaaaaagtcgaaaataaaattagagaccatttaagtaaattattataat

SEQ ID NO: 230997 - DNA, 811 bp, Unknown
  Bacterial polypeptide expressing nucleotide sequence isolated from the Sargasso Sea
aattttaaaggaaactatattcattatggagttatagagcatgcaatgtgtggaataatgaatggattagcgctacatagtaaattaattccatatggaggaacttttttaatctttagtgattattgtaaaccatcgataagattggctgcaataatgaaactaagagtaatttacgtaatgagtcatgactcaatcggacttggggaagatggtccaactcatcaaccaattgagcaattagctggactaagatctattccaaatttaaatgtttttagacctgcagatactgctgaaacttttgaatgttgggatcttgctacgctatccagcaaggagagtcctagtataattgcagtgagcagacaaaaagttaatccaattagaaaagaatttacaaaagaaaacaaatgtttggctggtgcctatgaaatatcaagaacaaaaaatgaaattgatctaactatattggctactggctctgaagttgaattagcaattgaagttagtcaaaaattggccatagaaaagatctattcaaaagttatatccatgccatgccacgaattatttgatatgcaaaaaaaagattataaatataaaattttaaatgaaacaaaatataaaatttcaatagaagcatctacaactgattattggaaaaaatatataggcgaaaatggaaaggcttttggaatagatagctttggaaaaagtgctccttacaaagagatttatgaatactttggtttaacaagcaaaaatatagtaaaaaaagttaaagaaatgattggtaagaaatcatgac

SEQ ID NO: 230998 - DNA, 754 bp, Unknown
  Bacterial polypeptide expressing nucleotide sequence isolated from the Sargasso Sea
atgtctgcaattatgaacggcatggttcttcatggtggcataaaaccgtatggcgcaacatttttagtttttacagactatgcaaggaatgcggttagattgtcagcattaatggggcttcccaatatatttgtttatacgcatgactctgtagctttaggagaggatgggcccactcatcaacctatagagcatatcgttactttaagatctacccctaatttaaataattggagacctgctgaccttgttgagacagcagttgcatggaagaatgctgtttgttccaaaataacaccaacatgtcttatttttagtaggcagggaacctcagcaataggacgaacacaagaacagatctctgcaattgaaatgggcggataccttcttaaagaaaaaaaagataatgatataactatagttgcttctggtagtgaggtccaattagccctagatgcagcaaaagaattagagaataaatcaattaatgtaaatgtggtttcaatgccctctttggatatttttcttcaacaaagcagtgaatatcaaaaaatggttattgatcctgataaaccagttctagttgtagaatgtgcgcatcctaactcttggtataagatcttgaatagaagtgacaaagttttaggaatagaaacatttggagagtctgcgccagggagtgaattgcttgaacactttggatttaataaagaaaaagtaattcaggcagcaaaatcattaatagatgattaat

SEQ ID NO: 230999 - DNA, 688 bp, Unknown
  Bacterial polypeptide expressing nucleotide sequence isolated from the Sargasso Sea
tttttctgattatgcaaacctttcaattaggttatctgcgttgatgcaaaaaagagtaatatatgtaatgacgcatgactctataggacttggagaggatgggccaactcatcagccaattgagcagctctcaggtttacgatcaattccaaatttaaatgtttttagaccagcagatagagttgaaacaattgaatgttgggaacatgctttaaaaaattcgaaaacaccaagtattttatctttaacaagacagggcctaaatcccataagaaaatcatttacaaagataaataaatgttctttgggagcctatgaagttttgagaaccaataataaaattaatttaacaatatttgcaagcggttctgaggttaatttggcaatcgaaactggtcataaattagccaaagataaaatatactgtaaggttatatcaatgccatctatggagcttttcgatcaacaatcaaaattatataaaaataaaattttaaacgaaactaaatttaaaatttcaatagaagctggatcaagcgattgttggaaaaaatatgtagggagttcaggtttaacatttggaatcaatgaatttggcaagagtgcaccctacaaagatatttttaaacactttggactaacagtttcaaatattgtcattaaaaccaaaaaaatgataggaaattaa

SEQ ID NO: 231000 - DNA, 679 bp, Unknown
  Bacterial polypeptide expressing nucleotide sequence isolated from the Sargasso Sea
ttatatgaagccagtcttcgtttagctgcacttatgaaaattaatcctatacaaattttcacacacgactctattggattaggtgaagatggccctactcatcaacctattgaacaaattaatatgttaagactcataccaaatagttatgtttttagaccctgcgatcttaaagaaacaattgtttgttggagagaggctttaaaaatcaatgatgcaccttcatttatctgtctttcaaggcaaaatctgccacaaatttcaaataaaaaattagactcaaaaaaatttaaaggtgcttatgttatatatggtccaaaaattaataatgatattactattatagctactggttcagaagtatctttagctgtcaacgttgctgtaagaattagaggtgatggtattattgcaaaagtcatttcaatgccatcaacttctgtttttgaaaaacaatcaaaaacttttaaaaacaatttattaaaatcaaaatctagtgaaacttttgtaattgaggctggatcaacaatgtattggaataagtacacaaaatatgaaaatatatttggattagataattttggtgctagtgcacccgggaatgaagtttttagaaaatttggtttaacaacagaaactgtatctagtaaaataataaggaaaattaaaacaaaatgaa

SEQ ID NO: 231001 - DNA, 754 bp, Unknown
  Bacterial polypeptide expressing nucleotide sequence isolated from the Sargasso Sea
aatgtctgcaattataaatggtatggttcttcatggtggcataaaaccatatggcgcaaccttcttggtatttactgactatgctagaaatgcagtaaggttatcagccctaatggggataccaagtattttcgtatatacacatgattcagtagccctgggtgaagacgggccaacacatcagcctatagaacatatggttaccctaagatctactccaaatttaaatagctggaggccagcagatcttgtagaaactgcggtagcttggaatgaggcagttaaatcaaaaaaaactccaacctgtttaatctttagcagacaaggaacttcagcaatatcacggactgaagatcaattatctttaattaataagggtggttatcttatcgatgaaagtgaaaactctgatattactctcattgcatcaggaagcgaagttcaattggttatagatgcagcaaaagaattaaaaaatcactctatctctgcaaatgttgtatcaatgccgtctttagataaatttttacagcaatctgaggaatttcagagttcaataattaatcctgataaaccaatacttgttgttgagtgcagtcatcctaactcttggtacaggattttaaatagaaaagataaagtaattggaatagagagttttggagaatctgctccaggcagtgaattacttgagcattttggatttaatattgaaaatgttgttaattcagccaaatcattactaaatgattaa

SEQ ID NO: 231002 - DNA, 715 bp, Unknown
  Bacterial polypeptide expressing nucleotide sequence isolated from the Sargasso Sea
aaggattattcatttggtggaacctttttaatttttttagattattgtaaaccatcacttcgtcttgcagctttgatgaaactgagagctatttatatattaacacatgattcaatcggtcttggtgaagatggcccaacgcatcaaccaattgaacagcttgcatcgctaagagcaacgcctaatgtaaaagtctttagacctgctgatttaattgaaactgcagaagcatgggaattagcgctttcaaattcaaaaggaccaagtgtaattgcacttacaaggcaaaaacttccaatgataagaaaaaagtattatgcaaaaaatattagcgctcaaggagcttacgaattaaaaagtaattcaaaaaaacctaatatttccattttcgcgtctggctctgaagttgaaatcgctttgcaattaatggctatacttgaaaaaaagaaaaagttcgtaagagtcgtctcagtaccgtgcatggaacagtttaaaatccaaagtaaaacgtatcaaaaaataattagaggaaactctgaaattaatgtatcaattgaggcgggatctaattttgggtggagccaaatatgtcctgaaaatacattaaacataggtatgaaagattttggagcaagtgctccttatcaaaagctgtatgatttttatggaatcacagcaaaaaaaatattcaaattaattagtaagaaaatatagg

SEQ ID NO: 231003 - DNA, 1222 bp, Unknown
  Bacterial polypeptide expressing nucleotide sequence isolated from the Sargasso Sea
ttgaacaataaagataaaacaaatcctgccaatgaagttagctacagcgatatggctaatgcaataagatttcttgcagttgatgctgttgaaaaagctaattgtggtcatcccggaatgccaatgggcgctgcagattttacaacagtcttgtattcaaaatttttaaaaattgatcctcaaaaacctgattggccagacagagatagaatagtattatccgcagggcatggttcaatgcttttatatgctgttaaccatttaattggttatcaagatatgacaattgaggaaattaaaaactttaggcaacttggatcaaaaacacctggtcatccagaatatggtcatacacttggagtagaaactaccactggcccgcttggtcaaggaatatcaactgcagttggtatggctattgcagaaaaaattcaaaatgcaaaatatggtgacgaattagttgatcacaaaacatatgtcatagcttctgatggagatctaatggaaggaattagtcaagaggcaataagtcttgcgggtcatctaaaactatctaaattaattgttttatttgacgataataatatttctattgatggatccatagatttatcagactcaactgatcaacttatgcgatttgaagcgtctgggtgggatgtaaatagagttgatggacataatcatgaagatattgaattagcaattgaagaggcaataaattcaaataaaccttccttgattgcatgtaaaactagaataggttttggttcaccctcaaaagaaggaaaatcttcatcacatggagcaccacttggcgcagaagatatttcagagatgaaaaaaaaccttaattgggactataaagaatttgaaacccctactgatgtaaaagatgcttggagacttataggattaaaaaattcttcaaaaagagaggaatgggaaactagggtttctgaaagtaaagacaaaggtacagaattattaaatgatattaatggagaaatttctgatgaacttgataaagcaatcaatgaaatcaaaaaaacattctcagaggaaaaacccaattgggcaaccagaaaatcctcacaagaggtactagaaactatcaataaagtattaacaaatactatcggtggttcagctgatcttacaggatctaataatacaaaaacgaataatattgaagtcatctccagtgataatttcgaaggaa

SEQ ID NO: 231004 - DNA, 698 bp, Unknown
  Bacterial polypeptide expressing nucleotide sequence isolated from the Sargasso Sea
aatcttttcagattattgtaaaccatcaataagattatcagcaatgatgggagtacaagtaatatatgtaatgacacatgactctatagggcttggtgaagatggtccaacccaccagccaatagaacatttatctggattgagagcaatccctaacttaaatgtttttagacctgctgatagattagagactattgagtgttgggagcatgctttaaatagtttaaacacaccaagtattttatctttaaccagacaaaacctaaatcctataagattcaaatattcaaaaactaataaatgctcttttggagcatatgaagttttaagaacaaacagaagggttgagctaacaattttagctagtggttctgaagtcaacttggcaattgatactagccataaattagccaaaaaaaaaatatattcaaaagttatctctgtaccatgtatggagctatttgacttacaatcaaaagcttataaagataaaatcttaaacgaaacaaaattaaaaatatctattgaagctggatcaaaagactgttggaaaaagtatattggagattttggaatgagttttggaattgataaatttggaaaaagtgctccatataatgaaatttataaatattttggattgatagcttctaatattgctattgaatcaataaaattagtaaaagttaaaaaatgac

SEQ ID NO: 231005 - DNA, 292 bp, Unknown
  Bacterial polypeptide expressing nucleotide sequence isolated from the Sargasso Sea
ttgaataaactacataatgatttggcaaattgcatcagatttttatcaattgatgcggttcaaaaagctaattctggacacccaggtatgccaatgggtatggcggatgttgtaaccgtactttttaagaattttttaagatttaatcctaaaaatccaaattggatgaatagagatagattcgttttatctgcaggtcatggatcaatgcttttatactctttactatttttaactggatataagagtaattcattaaatagtataaaaaatttcagacagctaaactcaa

SEQ ID NO: 231006 - DNA, 1310 bp, Unknown
  Bacterial polypeptide expressing nucleotide sequence isolated from the Sargasso Sea
tttggctggtcatcttaaactaagaaatttaatagttttttttgataataataaaatttctattgatggttccacatcattaagtgtatcggataattataaaaaaagatttgaaggctatggatggaactttttagaaattgatgggcacaatgaaaaaaaaatttctcaagcgataacaaaagcgtctaaatctaataaaccaactttaatatcttgcaaaactattattggatttggatctccaaacaaatcaggaaaagcttcctcgcacggatctccattaggagatgaagaaattgccttggtaagaaaaaaacttagatggaacaataaaccatttgaaataccagaggatattttaaatgcttggagaaaaattggtgaaagaggtgccgcattagaagaaaagtggcaagaaacattaaataaaaaaagccaaaagattaaatcagaacttcaagaaaattatattcaatcagatttaaaagatcttaaaaatttaattataaaagaaaaaacaaaatattttgacacgaaacctagcttagcaacaagacagtgttcttcagctgctatagagagtatttccaatattcttccacagttaatcggtggttcagcagaccttagtggttcaaataatactaaaacaaacaactctaaagtaattagttcaaaaaatttcaatggaaactacattcattacggagtaagagagcatgggatggctgctgttatgaacgggttggctttatatagcggatttattccttacggaggtacatttttaattttttcagactattgtaagccatctataagacttgcagctttaatggggttgaaagttatatatatattctcccatgactctattggtcttggagaggatggcccaacacaccaacctatagaacaacttaatggactaagagcaattccaaatcttaatgtgtttcgtccagcagatataaatgaaactttagagtgttgggaaattgcattaagaaataataatactccgagtgtaattgctttatccagacaaaaattaccttatattaacccaagtttttcagaaaataacaaatgcgaaaaaggagcctatgtagtaaatttaacttctcatgatagtaaagttacgttaattgcatctggatctgaggttgaattagcattaaatgttcaaaatgaattaaaaaaaaataatgtccattccaaggttgtttcgatgccatgccaagaactttttgataaacaatcgaacgattttaaaaaagatattttagatgaagactcgttaatgt

SEQ ID NO: 231007 - DNA, 608 bp, Unknown
  Bacterial polypeptide expressing nucleotide sequence isolated from the Sargasso Sea
gcttggagaagatggtccaacgcatcaacccatagaacatgtcccaagcctgagactgatcccaggattggatgtatggagaccatgtgacacacttgagacggcagttgcttggaagatagccactcaaaaaagaaagaccccgtctgcattgattttaaccagacagtcattgcctcagcataatcgatcaaaagaaatgacagataacatccagaaagggggttatattttaataggaggcgaagatacagagccagatgcaatcatcatcgcaacaggatcagaggtccaatatgcagttaatgcatccaatgcgcttcaatcagaagggtattccattagagttgtatccatgccatgcgttgagatatttgagcaacaatcagatgaatataaagaatctgtggttccccatgatcatgagaaaattatggtaattgaggcttcaatggcaagtgcctggagaggatatgcaggacgaaaaggagttgtggttggcatggagagctttggcgcatctgcaccagcaccggaattattcaaacactttggtttttcagacgaaaatgtgatcgaaaaactaaaggcaatgattaacagataaa

SEQ ID NO: 231008 - DNA, 1155 bp, Unknown
  Bacterial polypeptide expressing nucleotide sequence isolated from the Sargasso Sea
taaattggcccgatgatccttttaatataccgcaagaagtttatgaggactgggatgcaagaaatgaaggaaatcagaaagaggaagattggaataaaatatttgaagaatatgcttcagaaaatccagaactgtctagtgaattaaaaaggttgatctcaggtgatttaccagatcgaatcgaggatagtatttattctttcattgatgaagttcaaaaggatctacccaagatggcaacaagagtttcttctcaaaaagtcttaaatgtcctgggttctctcattccagaattattaggcggatcagcagaccttacaggctcaaacaatacaaattgggatggaactaaagaaattagagcgaatgatttttctggaaactatattaactatggcgttagagaattcggaatgactggcattatgaatggtttagttttgcatggtggtataaaagcctacggaggaacttttttaacattcttagactatgctagaaatgctgtaagaatggctgctttaatgaagctacagacaatacttgtctattctcatgattcaataggagttggagaagatggccccacccatcaacctgttgaacatttaacaagcttaaggactactcctaatttagagacatggagaccttgcgatacttctgagacagctatttcgtggctggctgctctggaaaatacagataaacccactgcactaatactatctagacaaggactgccaaacttcgttaggagtaaagagcaggttgattctattaagaaaggtgcctatatccttcgtgagccagaagtagagccagaactaattttcatagctactggttccgaagtcgagcttgcaatgtcagtggctgaagaagtgaaagataggacttcagttagggttgtttcgatgccttgctcggaaagatttgattctcaatcaaaagattacaaagaatctgttctaggtaaagggattaaaagagtttctattgaggcttcacaaactgactggtggagaaaatatgttggacttgaaggggatgttataggaatggattccttcggtgaatcagctcctggaaatatactttttgagcattttggatttacgaaagaacaaatcatctcaaaactaggtctctaga

SEQ ID NO: 231009 - DNA, 1033 bp, Unknown
  Bacterial polypeptide expressing nucleotide sequence isolated from the Sargasso Sea
atgccctcaaataatgatttaagcacattttctaattggactgaagaagataaagatctatttactgttgctgttattaaggggttgataatggatacagttcgcaatgcaaactctggacatactggtggtcctatgtcttctgccgatttttcatatttactattttcaaaatatatgaactttgatcctgataattctgagtggttcaatcgggatcgttttatattatcagcaggacatgaatctgcattgctttacacattattgactcttattggatggttaaaaattgatgatttacaacaatttagacaattacatagtaaaactcctgggcaccctgaagtagaaattgaaggagtagaagccaccacaggcccattaggtcaaggagttgcaatgggcataggaatggcagttgccgaagaaaaattacgtaatattttttcccaaaaatcaaatctgaagacagatccaatttctcattataattatatattggcaagtgatggagacatgcaggagccagtagctactggagctgctgccttagctggtcattggggtttatctaaagtgattatgttttatgattctaatgatgctcaaatatcaggtaacgtatctagatcagactcatcagactatgggacaatatttgatggatatggatggcatgttcaagaaattaatggacatgatcataaacaaatttgttctgcaatagagaaggcacaagtagttaataaaccaagtataattattggtaaaacaattatggcttatggtgcagttgaaatggaaggagatcacgaaacacatggtgctcctttacctcaaaatgaaattaatgcatcaaaagaaaaactaggtttgccaaatgaagaattttatttaccagcagaggttgtaagtcattttcaatctagattttcaacattgagaaataatgtatcaaattggaaaagtgaagttcatcaactcaacaaaaataaagaagcagaatctatatggaatctctgtattgata

SEQ ID NO: 231010 - DNA, 1333 bp, Unknown
  Bacterial polypeptide expressing nucleotide sequence isolated from the Sargasso Sea
aatgaaaaacaaatttcaaaaagcaatcacaaaagcatcaaaatcaaaaaaacctacagtaatatcttgtaaaaccataataggatttggatcacctaataaatctggtaaagcttcttctcacggctctcctttaggagatgaggaaatagctttagtgagaaaaaaactaaaatggaataaccggccatttgaagtgcctaaagaaatactagatgaatggagaaatataggttacaagggagaacaactggaaaataaatggctcgaaacggtcaataaaaaaaatcctaaaattaaaaatcaacttaacgacgctaatgagaaattggatttgaacggtttagaaaatttaatccgtcaagaaaaagataaaaattttgaatctaagccaagtttagctacacgacaatgctcgatggctgctatagaaaaaatctctgcttttcttcctaaattaataggtggttctgcagatttaagtggatctaataatacaaaaacaaataattctaaaattataaactctaaaaattttaatggaaattatattcattacggagttagagagcatggtatggcagcagttatgaatggtttggcgctttatggaggtataataccttatggtggaacatttttaatattctcagattattgtaaaccctctataagactttctgctttaatgggtcttaaggtaatttatgttttttcacacgactcgattggtcttggtgaagatggtcctactcaccaacctatagaacaacttactgggttgagagcaattccgaatttaaatgtcttcaggccagcagatattaatgaaacatttgaatgttgggaaatagctttaaaaagtgaaaataccccaagtgctattgctttatcgagacaaaaagttccttacatcaatccaagcaattctaaagagaataaatgtgaaaaaggagcctatgtagttaatttaacttcgcatgagagcaatgtaacattggttgcttcaggtactgaggtagaacttgccttaaaagttcaagataaacttaaagaaaacaatatccactcaaaagtagtttcaatgccatgtatggagctttttgataaacaacctgaagattaccggaaagatattatagaagaaaactcattgactatcacattagaagctggaagtgtaatgtcttggcaaaaatatattaaaaataaaggtgccaatttaggtatagataaatttggtgaaagtgctccttataaagaagtttataaacattttaaattatcagaggaagatataacaaattttattcaaaaaaaattgagagagtaa

SEQ ID NO: 231011 - DNA, 326 bp, Unknown
  Bacterial polypeptide expressing nucleotide sequence isolated from the Sargasso Sea
tttgaacaaaaataataaagatttatccaacgcagtgcggtttttatccatagatgccgttcaaaaagcgaattctgggcatccaggaatgccaatgggaatggcagatgtagcaaccgtattatttaaaaactttttaagattcaacccaaaagatcctagttggattaatagagacagatttgttctttctgcaggacatgggtcgatgcttctatattctttactttatttaactggatataaaagtgtttcattaaatgatatcaaaaattttagacaactaaactctatttgtgcaggacatccagaatatcatccaaatt

SEQ ID NO: 231012 - DNA, 684 bp, Unknown
  Bacterial polypeptide expressing nucleotide sequence isolated from the Sargasso Sea
acatgaaaccaagtattcgcttggcagcattgatgaatcaacgagtagttttcgtattcactcacgattctataggagtgggagaagatggtcccacgcaccagccaattgaacacttagcatcactgagatcaataccaaatttgacagtaattcgtcccgcagactccatagaaaccgtagccgcatggaggtcagccattttaaatactcatggtcccactgcattaatcttgagtaggcaatctcttccaaatctctgtacaggtgatagcatcgacttacaacccccttccaaaggaggatacatattaaagtcaagcaacaatgaacccactgtcactataattgctaccggatctgaagtacatcttggcgtacaagtaagtgagttactagaaaacaataatatttcgtctaatgtcgtatctatgccttcatgggaattattcgatcagcaatctgatgaatataaaagcaccgttatacctaaatctagtattaaagtctctatagaggctgccagtactttcggatgggcaaaatatgtaggtgaaaatgggatcagtgttggaatagataccttcggggcatctgcacctggccaagctctattctctcattttggcttcgaagcaaaaaacatatgtgaaaccattatgtccaaactcggaccgaaataaa

SEQ ID NO: 231013 - DNA, 1114 bp, Unknown
  Bacterial polypeptide expressing nucleotide sequence isolated from the Sargasso Sea
aatggagaatataggtaacaagggtgagcgactagaaaatgaatggctcgaaacagtcaataaaaaaaaacctaaaattaaaagtgaacttaacggcgttaatgagaaattggatttgaacggtttagaaaatttaattcatcaagaaaaagataaaaattttgaaactaagccaagtttagctacacgacaatgctcgatggctgctatagaaaaaatttctgcttttcttcctgaattaataggtggttctgcagatttaagtggttctaataacacaaaaacaaataattctaaaattataaactctaaaaattttaatggaaattatattcattacggagttagagaacatggtatggcagcaattatgaatggtttagcgctttatggaagtataataccttatggtggaacatttttaatattctcagattattgtaaaccctctataagactctctgctttaatgggtcttaaggtaatttatattttttcacacgactcgattggtcttggtgaagatggtcctactcaccaacctatagaacaacttactgggttgagagcaattccgaatttaaatgtcttcaggccagcagatattaatgaaacatttgaatgttgggaaatagctttaaaaagtgaaaataccccgagtgctattgctttatcgagacaaaaagttccttacatcaatccgagcaattcaaaagagaataaatgtgaaaaaggagcctatgtagtaaatttaacttcgcatgagagcaatgtaacattggttgcttcaggcactgaagtagaacttgccttaaaagttcaagacaaacttaaagaaaacaatatccactcaaaagtagtttcaatgccatgtatggagctttttgataaacagcctgaagattaccagaaggatattttagaagaaaactcattgatcttcacattagaagctggaagtgtagtgtcttggcaaaaatatattaaaaataaaggtgccaatttaggtatagataaatttggtgaaagtgctccttataaagaagtttacaaacatttgaaattatcagaggaagatataacaaattttattcaaaaaaaattgagagagtaa

SEQ ID NO: 231014 - DNA, 748 bp, Unknown
  Bacterial polypeptide expressing nucleotide sequence isolated from the Sargasso Sea
gatggaacttgaaaagcttcgaaaactttacccccaacactgggagaaggctaacgccatacgtgttctaacactggacgctgtagcggctgcaaattctggccattctggcatgccaattgggatggcagatgttgctaccattttgttcgaaaaacatcttaaatttagcaccgcacaacctaactggccagatagagacagatttattttatctgcaggtcacggatcgatgcttctttatagtgttgcatatctttgtggctatgctgattttgacatagatcaactaaagaattttaggcagcttggtaaaaaaactgcaggccatccagagaattttctatcagatgttatagaaacaactaccggtccattgggacaagggatagcaaattcggtagggttcgctattgccgaagaaagccttcgcgcaagatttgggcgaaacattattgatcaccatacttttgtaattgccggtgacgggtgtttgatggaaggtgtcagtcaggaggctatcagccttgcaggacatttacgtttacacaaacttatcgttttttgggacaacaacaatatcacgatagacggaactatcgatcttacagactcaaccgaccaaaaaacacgctttgaggcctccggttgggaggttatagagatagacggtcatgatcctgaagaaattgatagtgcaatttcagccgcaaaaaagtctgaaaaacccacaatgatagcttgtaaa

SEQ ID NO: 231015 - DNA, 997 bp, Unknown
  Bacterial polypeptide expressing nucleotide sequence isolated from the Sargasso Sea
atgtttgacaatgtaacaaaatctataagagttctttctgctgccgctgttgaaagagcaaactctggacatcctggtatgccactaggtatggcggatattggagttgttttgtacaaaaactttttaaaagtatcaaataaaaatccagactggataaatcgggataggtttgtttttagcgcaggacatggttcaatgcttctatatagccttttacactttaatggatttgatatttctttagatgaaataaaaaattttagacaattaggatcaaaaactgcaggacatccagaaaaagattctgaaattggaatagatacaactacaggacctcttggacaaggatttgcaaatggtgttggtttagcagtagctgagaggtatctatcctctgtctttggggaggatattgtagaccatcatatttatgggattgtttctgatggtgatttaatggaaggcatctcaactgaggcagcagaactagctggattatggaaacttggaaaactaatttacttttttgatgataacaacatatctattgacggaaatgttacacaagtatcattaactaaccaaaaagagaaatttatttcaatgggatgggatgtgcttgaaattgatgcacatgaagaaaatgaaattattggagcagttgaatctgcgaaaaatgtaagtaataagccaacattgattatttcaaaatcaacaataggtaaatacgcaccaaataaagaaaatacgagtggagtccacggttctccactaggtgaaaatgagttcgagctttttttagagaatatagagttttcaggcgatccttttgctcatgattcagaaatttattcgtattttgatgataaaagagcagaagataattcaaaatatgacgaatggaaagctaacttagaatctaaacttcaatctgataagaactttagcaaattgtggaaccaatttaataatttagaaactcccagaggttgaa

SEQ ID NO: 231016 - DNA, 1349 bp, Unknown
  Bacterial polypeptide expressing nucleotide sequence isolated from the Sargasso Sea
tgttcaagaaattaatggacatgatcataaacaaatttgttctgcaatagagaaggcgcaagtggttaataaaccaagtataattattggtaaaacaattatggcttatggtgcagttgaaatggaaggagatcacgaaacacatggtgctcctttacctcaagatgaaattaatgcatcaaaagaaaaactaggtttgccaaatgaagaattttatttaccagcagaggttgtaagtcattttcaatctagattttcaacattgagaaataatgtatcaaattggaaaagtgaagttcatcaactaaagaaaaataaggaaattgaatctttatggaatatctgtatagataaagaaatgccagaacttgatcttccagaatttgaggaagatattaatctagctacacggaaggcctttggtaaaacacttgattattttgcagaaaaaataccaaatcttgtcgggggatcagcagatctagaaccgtcgaattatacaggaaattttgcttctaaatatgaagatttccaaaaaaacaataggagtggaagaaattttgcgtttggcgttagagagtttcctatggctggtatattaaatggaattgatttacatggtggtttaaaatcatttggtggaacttttctagttttttcggactatgagcgacctgcgcttagacttgctgctattcaaggccttaatgtgatccacgaatttactcatgattcattttatgttggtgaagacggacctacacatcaaccaattgagcatgcaatgtctcttcgcgctatccctaattttcaagtatttcggcctgctgatgcaaaagaaactgcagtatgcttccaaattgcattgcaatttaataatacacctagtgcattattattaactaggcaaggagttccagttagttcattaaaaattaattcagtaatcgaaggcgtacaaagaggtgcttatatagtcaaagaacctgaaaataatccagaattagttattcttgcaactggttctgaagtgagcttggctcttgaagttgcagaattaattaatgatcgatatatccgtgtagtaagtatgccatgttttgagttatttgaaaaacaatctgaagaatataaaaaaagtgtaatacctgatcggggttgtatgaagatttctattgaggctggcataacgcatggatgggaaagatatataggtataaatggattttctattggtataaatcattatggattatcttccccgcataaagacttagcaaaggaattcggttttacacctgaaaaagtaaagaaaaggattattgatcatttgaataacttactatgat

SEQ ID NO: 231017 - DNA, 630 bp, Unknown
  Bacterial polypeptide expressing nucleotide sequence isolated from the Sargasso Sea
tgtatattatgactcacgactctattggacttggagaagatgggcctacacatcaaccaatagaacaattatccggtttaagatcaattcccaatttaaatgtttttagacctgccgatacaatggaaacttatgagtgttggcagcttgcactagaaagctacaagtctccgagcatacttgcgctaactaggcaaaaaattaatcaagttcgaaaagaattagccaataaaaatctctgttcctatggagcctacgaaatttttagatcaaatagtcatattcagctaactatcatggccagtggctcagaagtgagtttagcattagatgttagtcataaattagccacagaaaacatttattcaaaagttatatcagttccctgccaagagatatttgagcagcaaaatagtaattataaaaacaaaattttaaaagaaacaaacttaaatataacaatagaagctggatctactgatagttggaaaaagtacattgtgaacaagggtttaaattttggaattgaagactttggaagaagtgcgccctataaagaaatatataatttttttggtctaactgttgaaaatattgtaaatgaaactaagaaacttataaaaaactaat

SEQ ID NO: 231018 - DNA, 1078 bp, Unknown
  Bacterial polypeptide expressing nucleotide sequence isolated from the Sargasso Sea
gatatttatgattactttaaagaaaagagagagaaagataatgaagaacttaggaaatgggaagaaaattttaaaaacaaatatcaagaagattcatcatttaaagataattgggatttattaacttctgaagactttcctagttttgatggagtcagtggggaaaagtatgcatcaagaattttaggttcaaaaatactagaaagtttatcagagtctactaattcgataattggaggttcagcagatttagctgcttctacgaagcaaataattgatgaaagctacttttcatctactaattacaaaggcaggagcctggagtttggaattagagaacatgcaatgggagcaattacaaatggtataactttacatagtaatttgataggttatgcttcaacttttttggttttctcagactatatgaggccaagtattcgtttagcatctttaatggatattaattctgtatttatttttacacatgattcaatatatcttggtgaagacggaccgactcatcaacctgtagaacatttaatgtctctaaggcttattccaaatgtagatgtcataaggccttctaatagtattgagatgaaccattcttataggtatgcattttctgattctaaaaatccaaaagtactttcattaacaaggcaagatttagattatttagactttgatgttaaatatgaagaatttcttaaaggaggatatgtggtttctgatggagacgattttaccatcgtagcttcaggatccgaattggaaatagcttttaagattaaagcagctcttcttgaatattcggtaagaatcgtaagtgttcctatcttaaataaactttcaaatatgaaaaatgaagaaattaatgaactattgaagaataaacacgtttttccaatagaacttggtaggtcaattggttgggagagttatttagggagacttacaaagactttttctatagatactttcggtgagtctgcgcctattgaagatcttgaaaaaaactttggttttgatataccttcaattactaaagaaattattaagtatctaaattagc

SEQ ID NO: 231019 - DNA, 1213 bp, Unknown
  Bacterial polypeptide expressing nucleotide sequence isolated from the Sargasso Sea
agcgatggaaggcctacgctcgtctgctttaggacaaagattggttttggttcgccccacaaagaagggacggcgggtgctcatggttccgctctgggtgaagaagaagtggccctgacacgaaaagcgttggattgggacactcctgcttttgagattgataaagaaatttatgaggcgtgggacggaaaagagaagggccaaaaatcacagaatagctgggaagatttgtttgagggctatgtagagaagcatgctgaaaaaagcgccgagtttattcgtcgaatgaaatgtgagctttctgacagttgggaaggggttatcaatcaagcgataacagatgagcaatcggtctcgttagaatctgaaactcgaaagtcttcccaaaaggcgattactattttggcagatgccatgcccgaattgtttggggggtctgcagatcttacagggtcaaacaatacaaaaggagatggaaacagagaaagccagcatatcaactatggtgttcgggagtttgccatgactgcgatgacgaacggcatgctgttgcatggagggtttcgtccctatagtggaacttttctagtcttcatggaatatgccagaaatgctgttcgcttggctgcgctaatgaagattcccaatatttttgtctatacgcatgattcggtgatggttggagaagacggccccacccatcaacctgtggagcaattaaccaatttacgaacaacaccaaacctgtccacttggagaccttgtgacaccgttgagacgctagttgcttggaagatggctatcaaaagctcctcaaaaccgactgcgctagtgtttagtcgacaaaagcttcctgctcaaagtagaacgccggtccaggtagaggctattctgcgtggaggctacgtgcttcacgagccaagcattcccgttagctcgattgttgtcgcatgtggttcagaggtccaggtggccgtggaagccgctagccgtctagagactgagaatgttggtttgagagttgtatcaatgccgtgtgttgataggttcgtagagcaagacaaagattatcaggattcgatattgcccccttcgattagggcgagagtggctgttgaggcagctcatcctgattattggcgtcggtttgtagggctagatggggcagttgtaggtattgatcgctatggagtttcagcacctggcaaagaag

SEQ ID NO: 231020 - DNA, 1162 bp, Unknown
  Bacterial polypeptide expressing nucleotide sequence isolated from the Sargasso Sea
aaaagatgaagagataaaagaaacgaaaaaaattcttggaatacctgaagatgaaactttttgggtccctgatgatgtttcagagtattaccgtgaggtcggcgctcgcaatgaagagactcgtaagaaatggtataaaacagcacctaagcaaggtgagaagagcgaactgtgggaaaccctctcaggctctggccttatctctgactggcagaaatctctccccttatgggaacaaggagacaatgttgcaactagaaaggcaagtaatgagtgcatccagtctttaatggactttatgcctggactcattggaggaggtgcagatctaactggaaatacaggtacatcaatctcaaactttggagttcagtcagctgaagagcccgaaggaagacaaatcttttttggtgtacgagaacatgcaatgggtgctattagtaatggcattgccctacatggaagcttgtttccggttacaggaactttccttgttttcagcgactacatgagaggcgcggtcaggctagccgctttaagtaatgccaaaagtgtatttgtatggagtcatgattctgtcgctgtcggagaagatggccctacacaccaaccagtcgaacacgctgcttctcttcgatcgataccaaatctagacgtattcagaccagctgatgcaaatgaaacttcatctgcatgggagcttgccgtaacccatgaagggcccactgctatgctcttaacccgacaagatacgccagtaattacatccagtaaaaatactgacggagtttctaaaggcgcatacattattcgagaatccacaactgaaattgctctaaccatcattgcaactgggagcgaagtctcacttgcatgtacaactgcaaatgacattgagaaggagcttgacttaggtgttcgtgtggtgtcgatgccctgcatggaaagattcgaacgtcagacaatcgaatatcaaaagagtattatcattccaacaattccatccatttcaatagaagctggttctacatatggatggagcaaatgggcggatacaacaattggtattgactctttcgggacttctgctccgggggatgtagctctaacagaattcggtattaaaagtgaactattcaagtggcagcaaaaaatttactaa

SEQ ID NO: 231021 - DNA, 1726 bp, Unknown
  Bacterial polypeptide expressing nucleotide sequence isolated from the Sargasso Sea
ttatcagtcggtcatacatgcatgctcatttattctatattgtatttatgtggctatttaaaaatggatgatctgaaaaattttagaaaattagggagcttaactccaggtcatccagaaatagagactccaggcgttgatgcaagtactggtccgcttggacaaggagtaggaatgggaattggaatggcactagcagaaaaagcttcatctaattcaccattgaaaagatttacatatatattagcaggtgatggcgacttacaagaaccaatagctcttggagctagcactcttgcaggtcattggaaattatcaaatctagtaatgttttatgataaaaatgatattcagattgcaggaaatacttcaagagttgattcaacagattatgccaaactttatgatgccatgggatggcatgttcaagaaattgatggtcataatcacgatgaaataagattatctttaaagaatgcgcagtcgagtgataagccaagcataataattggaaaaactattattgcaaaaggaagttatagcttagaacatagccctaaatctcatggttctccattcagtgaagatgaaattaagctcacaaaagagaaacttgaaattcctcaggattcatttttctgcaatgaagatattattggtcattttcaaagaaattttgattctttgaatgacaaaatagctttaattgataatgaatttgaaaaagataatcaaaatttaagtcaaatgttcgaatcattgtcagttccagattttggagacaatccaatggctacaaggcaagcatttggactatctttagatgaatttgctgaaaaatttcagcatattatcgggggttcagctgatttagacggatcaaactgtacaactaactttgctagctcatatgatgacttttcatcatctaatccaaaaggaaggaatatagcatttggagttagagaatttcctatgggagctattatgaatggaattgctctttatggaaatcactttccattcggtggtacatttttggtttttagtgattatgtaagatcagcaattagattatctgcaattcaaaaacttcatgtaatgtacgaatttactcacgattcaatttttgttggtgaagatggtcctacccatcagccagttgaacatacaatgtctctaaggaatattcctaaccttcttgtatttagacctgcagatgcgttagaaactttttattgttttaaaacaattatgaaaaatcaaaaaaatcctagtgcaattctgcttactagacaaaaattaccaaaactcaatattagtttagataaaattgaagaaggtgtaaataaaggagcatatattttacatgaagaagataatccagatgcaattctatttgctactggatctgaagcccatttagcagttgaaatatgcagcggaatcaataaaaaaattcaaataattaatttgccatgctgggaactatttgaaaaacaagataaacaatacgtctcttctataatgagtagcaattgcagaaaaagaatatctttagaagcaggtataactactggatggcaaaaatttacgggtattgatggtctaaatattggtatcaatgaatttggtgcatctgctcctggaaaagatgtagcaaaacatttaggatttgttaaagaaaaaatcgcctctctaattgagaattatataaatgaataaa

SEQ ID NO: 231022 - DNA, 1246 bp, Unknown
  Bacterial polypeptide expressing nucleotide sequence isolated from the Sargasso Sea
ctcgccaaataagtcaggtacagcagatgttcatggagcgcctcttggcgatgaagaattaaaaaaaacaagagaagctcttggttggaattacaaaccctttgaagttcctcaagaggtatatgatttctggaactttagagaagaaggagcatcattcaatgattcttggaataagctaataaaagattatgaaaaaaaatatccaaatgattcatcagaacttcatagaagaattgatggatacttaccaaataattttcaggaaagctttgaaagttttttgaatgaatgcaactcaaataatttatctatggcaactaggaaagcatcaaaagcatgcttagacttttttgtaaaagagatgccagaacttattggaggttcggctgacctaacaccttcgaataacactttttcatcatttagttcgacattttcaaatgaaaacgcatctggaaatcacatcaattatggggtaagagagtttggaatgtccgcaattatgaacggaatggccctgcatggggcaattaaaccttatggcgctacatttttggtttttactgactacgcaagaaatgcggtgaggttatcagcgttaatgaagctttcaaacatatttgtttacactcatgattcagttgcattgggtgaggatggaccaactcaccaacctattgagcacatggtgactttaagatccactcctaatttaaataactggcgtccagctgatcttgtagagacagctgttgcatggagaagtgctgtcagttctaaaaagacgccaacttgtctgattttcagtagacaaggaacttcagcgataaagaggactcctgaccaaatatctatgattgatatgggaggatatttattggaggaaagcgataaacttgatataacaattgtcgcatctggaagtgaagttcagttagctttagatgctgcaaaagagctgaagaatgattcaattaatgcaaatgtagtatcaatgccctgtttagatattttcttagatcaagataaagagtatcaaaataagatcattaatcctgaaaaacctattttagtagttgaatgtgctcatcctaattcttggtacaggattttaaacagaaatgataaagtcataggcattgaaacatttggggagtctgcacctggcagtgagttactaaatcattttggatttaatactgataacgtcatcaaaactgcaaaatcattaataaatgattaa

SEQ ID NO: 231023 - DNA, 604 bp, Unknown
  Bacterial polypeptide expressing nucleotide sequence isolated from the Sargasso Sea
tggtctaggtgaggacggaccaacgcatcaaccaattgagcatttagagagtttaagatcagtacctaatcttaatgttttcagacccgcagacataaatgaaactatcgaatgttgggaaattgccttgaagagtaaaactaatcctagcgcgatagcattatctagacaaaaattaccttatgtaagcgaacataaatctggcgaaaacaaatgctcaaaaggagcctatgttttaaaaggtgatatgaataaagctaaagtttctttgatagcttctggatcagaagttgagattgcactagaggcatatgaaaaacttaataatgaaaacatcgacgcaaaagttatttctgtaccttgttatgacattttcaataaacaagaagagaattataaaaaagaaattttgggtgaaaacacttttaaaatttctattgaggcatcaactgagtctggatggaaaaaagttgttggcaaggatggagtaactcttggaatgtctacatacggtaaaagtggaccatataaagaagtttataaattatttaatctaacaagtgatgaagtggtaaaaatagtaaaagaaaatgtacacaaataa

SEQ ID NO: 231024 - DNA, 629 bp, Unknown
  Bacterial polypeptide expressing nucleotide sequence isolated from the Sargasso Sea
tatatttgtttacacccatgactcagttgcacttggtgaggatggtccaactcaccaaccaatagagcatatggtgactttgagatctactccaaatctaaataattggagaccggctgatttggttgagactgcagttgcatggaaagaggcggtaagttctaaatcaacaccaacatgcttaatatttagcagacaaggaacctctccaatatcaagaagtactgaacagatttctaatattcaaaaaggtggatatttgcttgaaacaaatccagatcctcatctaacaattgttgctacggggagtgaggttcagcttgcaatagatgcagcaaatgaattaaaaacagactctataaaggcaaacgttgtatcaatgccttctttagatattttcatgcaacaaaaagaagatttccaaaatagcattatagatcctgacaaaccaattttagttgttgaatgcagtcacccaaactcctggtacaagatcttaaatagaggtgacatggtaataggcatagaaagtttcggcgagtctgctccaggtaatgagctactaaagcattttgggtttaccaaagaaaatgttattgatgcagcaaaatcattaataaatgattaac

SEQ ID NO: 231025 - DNA, 748 bp, Unknown
  Bacterial polypeptide expressing nucleotide sequence isolated from the Sargasso Sea
aatgtttgacaatgtaacaaagtctgtaagagtcctttctgctgcagcagtagaaaaagcaaattcaggtcatcccggcatgccgttaggaatggctgatgttggtgttgcaatttataaaaatgcattaaaagtttcaaacaaaaatccaggttggataaacagagatagatttgtattaagtgcaggacatggttctatgcttttatatagccttctacactttaatggttttgatatttcaatagatgacataaaaaattttcgtcaactaggatctgtcactgcaggacatcctgaaaaagattttcaacttggtattgacactacgacaggcccacttggtcaaggctttgcaaatggtgttggcttagcggtagctgaaagatacctttctagtgttcttggaaaagatattatcgatcattatatttatggaattgtctctgatggtgatttgatggagggaatatcaacagaagctgcagagcttgcaggtctatggaaacttggaaaaataatttatttttttgatgataacaatatttccatagatggaaacgtaactaaagtttcaattacaaatcaaaaaaacaaatttttgtccatgggctgggatgttctcgaaatagatggacatcaagaatcagaaataattgatgcaattaaacatgcacaaaagatcgctgataagccatcattagtgattgcaaaatcaacgatggaaaatactctcccaataaagcaa

SEQ ID NO: 231026 - DNA, 888 bp, Unknown
  Bacterial polypeptide expressing nucleotide sequence isolated from the Sargasso Sea
ctggaatcagaggtttgaacaatacaaatctgaaaacccggaactggcggatgaattcttggcaagcatggaaggaaacatcagcaatgagatggctcatcttgatgcattgattgatgaattaagagaagatgcgaatgtcgttgccacaagaaaatcatcacttgttgccctgaatactttaaaggaagatcaatcaaatatgatcggtggttccgctgatctaacaggctctgtttgtacatatcatgatgcttcaaaaccaatcacgaaagatgaccatgacggaaattatatattttatggtgtaagagaatttggaatgtctgcaatcatgaatgggatagctcttcatgggggattgattccttatgctggaacatttctgacatttagtgattactcaagaaatgcgattcgtatggcagcgatgatggagttaggagtcatacatgttctgacccatgattcgattggacttggagaagatggtccaacgcatcagcccatagaacatgttccaagcctgaggctgattccaggattggatgtatggagaccatgtgacacacttgaaacggcagttgcttggaagacggccactcaaaaaagaaataccccgtctgcattgattttaaccagacagtcattgcctcaacataatcgatcaaaagaaatgacagataacatccagaaaggaggttatatattaatagaaggcgaagatacacagccagatgcaatcatcatcgcaacaggctcagaggttcaatatgcagtcaatgcatccaatgcgcttcaatcagaaggacattcaatcagagtagtatccatgccatgcgtggagatatttgagcaacaatcagatgaatacaaagaatctgtggt

SEQ ID NO: 231027 - DNA, 727 bp, Unknown
  Bacterial polypeptide expressing nucleotide sequence isolated from the Sargasso Sea
ttgtcagaatcagtaaatgcgctaagatttttatctatcgacgcagttcaaaaagcaaattccggtcatccaggaatgccaatgggtatggctgaaatagcaacagccttatggagtaatcatttaaggcataacccatcaaatcctcgctggtttaatagagatagatttgtgttatctaacggacatggctcaatgcttttatatagcctgcttcacctaacaggttacaatttgacaatagaggatataaaagattttagacagctaaaatcaaaaactcctggacatccggagtatgacattgaaattggagttgaaactacaacaggtccattaggtcaaggtattgcaaatggagttggaatggcaatttcagaaaaaatactagctgcagaattcaatgaagaagatataaaacctattgatcattttacatatgtatttcttggagatggctgtttaatggaaggtatttctcatgaggcatgctcatttgctggaactcataatcttggaaagctaatatgtttttatgatcaaaacggaatttcaatagatggagaaattaaacattggttcacagatgactctgtaaagagatttgaaagctatggatggcaaaccatttgtgtagacggccacaacatcgaagaaattgataaagctatttctgaggcaaaaattgaattaaataagccatcgatgattttttgtaaaacaacaa

SEQ ID NO: 231028 - DNA, 382 bp, Unknown
  Bacterial polypeptide expressing nucleotide sequence isolated from the Sargasso Sea
aatggctgatgcaattagatttttatctatggacgcagtacaggcagcaaattcgggtcaccctggaatgcctatgggcatggcagatgtcgcaactatactttttaaagacttcataaatatttatcctaaaaaaccagactggccagatagagacaggttcgttttatcagctggtcatggatcaatgcttctttacgctcttcattatcttttaggatacgaagatatgcctatagagaatatcaaaaactttaggcagttaaattataatactgcgggtcatcctgagtttggtcacgctaaaggtatagaaacaacaactggaccactaggacaaggtttagccactgccgtaggtatggctttaagtgaaaaatta

SEQ ID NO: 231029 - DNA, 891 bp, Unknown
  Bacterial polypeptide expressing nucleotide sequence isolated from the Sargasso Sea
tacaatttgtgtagatggtcacaacattgaagaaattaataatgctatttctcaagctaaagaaactactgataaaccctcaatgattttttgtaaaacaactattgggtttggctcacctaataaatccggaacagctgatgcacatggagcaccattaggcgatgatgaaataataaaaactagggaagctttagattggaaatattcagaatttgaactaactgatgaaatctataatttttgggatgctaaagaagctggtaataatgtaaatttagattgggataatttgataaaaagttatcaagaaaagtatcctgaaaaatcaaaagagctcttaagaagaatagaaggcaatactccagaaaattttgaaagtgattttaatcaatttcttaaagactgtgatacgaataattctccaatggcaacgagaaaagcatcaaaggcttgtctcgatttctttgtaaaagaaatgccagagttgattggaggttctgcagatttaactccgtctaataataccttttctggttcaagctcaactttttccaatgaaaaccctgcagggaatcatataaattatggagtaagagaatttggaatgtcagcaattatgaatgggatggtcctgcatggaggaataaagccatatggtgcaactttcctagtttttactgattatgcaagaaatgcagtaagactctctgctctaatgggtctacctaatatttttgtttatacgcacgactcagtagcattaggcgaagatggaccaactcatcaacctatagaacacatggtaactttaagatcaacacctaatttagttaattggcgaccagctgatttagtcgaaacagctgttgcgtggaaagaagcagtaat

SEQ ID NO: 231030 - DNA, 973 bp, Unknown
  Bacterial polypeptide expressing nucleotide sequence isolated from the Sargasso Sea
gatgagggcgccaaaaaagaaaaagtctgggaagatcttctggaaacttataaacaaaaatatccagaggaatccaatgaactggagagaagatttaattcagagatgactcatgaatttaatgaaagattcgatgactttttaagcgattgttcattacaagaagatccgatagcaaccagaaaagcatctcaaatttgtcttgatcatttttgtgctgacttacctgagctaattggtggttctgccgatttaacaggatctaataatactttttctaaacataatactgaacttactcccgacaatcctagcggatcacatatttactatggcgtaagagagttcggcatggttactatcatgaatggaatgagtctccatggaggtattaggccatatggaggaaccttcctagtttttatggattatgcaagaaatgcagtgcgtttatctgcaatgatgagtctgccaaatatatatgtctttactcatgattcaatcggcttaggtgaggatggtccaacacatcaacctatcgaacatttggttactctcagagcaacgccaaacttatacaattggaggccagctgatcttaaagaaacagcagtagcatggaaagagtcaattttatcaaaatctccaagctgtcttatcctcagcaggcaaggtcttccgcaggtcaaaatgagtgaggacaagattattaatatctctaagggaggatatttagttcaaaaggacgaagatgcagagctaaacattatatcctctggaagcgaactgcaattagccattcaagcagctaaagatcttgatcagttgggcataaaggtaaatgtggtttcgatgccgtgtttagataggtttcttgaggcggatttagaatatcaaaataaagtgatccaaaaagatttgccttccattgttgttgaggctgcccacccaaactcatggtataaaatttagg

SEQ ID NO: 231031 - DNA, 967 bp, Unknown
  Bacterial polypeptide expressing nucleotide sequence isolated from the Sargasso Sea
gactctgtgaaacaagcgaattctggtcattccggtatgcctatgggaatggcagatatcgctgaagtgctttggcagaatcatttaatacataatcctgaaaatcctgactggtttaatagagatagatttgtgttgtcgaatggccatggttctatgcttatatacggacttttgcacctctcaggttatgatttatctatccaagacctaaaagattttagacagttgcattcaaaaactgcaggtcacccagaatttggaataacaccaggcgtagaaactactactggaccattagggcaaggtattgctaacgcagtaggaatggccatagctgaaaaaactctagcttctaagttcaatactgaaaaacataaaattattgaccatatgacttatgtatttacaggagatggttgtttgatggaaggcatatctcatgaagcttgttctttggcaggaacactcggtcttggaaatttagtagttttatatgatgataatgatatttctatagacggtaatgtagaaggatggttcacagaggatattccaaaaaggtttgaatcttatggatgggaagttataccgaatgtagacggacataactttgaagaaatagaccaggcaattattaaatcaaaatctaatgccgacaaacctactctgatatgttgtaagacggttattggaaaaggatcgccaaatatgtccggcacagccactgcccatggagccattttagatcctgatgaaatcaatttaaccagaaaagaattaaattggcctaatgatccttttgacatacctcaagaagtctatgaagactgggatgcaagaaatacaggaaatcaaaaagaagaagattggaataagatacttgaagaatatatttccgaaaatccagaactatcaagtgaattaaaaagattgattgctggtgatttaccagatcgaatcgaga

SEQ ID NO: 231032 - DNA, 943 bp, Unknown
  Bacterial polypeptide expressing nucleotide sequence isolated from the Sargasso Sea
ttgcatcagtcagatcctataaacacactaagatttttatcaatcgatgcagttcaaaaagcaaacagtggacatccaggtatgccaatgggtatggccgaaatagctactgctttatggaaaaaccatcttaaacacaaccccttaaatccaacttggtttaatagagataggtttgttctatctaatgggcacggatcaatgcttttatatagcttgcttcatttaacaggttataaattgtcaattaaagatataaaggattttagacagcttaaatcaaaaacacctggccatcctgaatatgatatagatattggtgtcgaaacaactacaggtcccttaggtcaaggcattgcaaatgcggttgggatggcaatatctgaaaaaatattatcagcagagtttaacaaagttgatattaaacctattgatcattttacctatgcttttcttggagacggttgtttaatggaaggagtttctcatgaagcttgttcatttgcagggacacataatcttggcaaattaatttgtttctatgaccaaaatggaatttctatagatggagaaatacacaattggtttacagatgaatctgtaaaaagatttgatagctatggttggcaaacaatttgtgtagatgggcacaatattgaagaagtcaatgatgcaatttctcaagcaaaagaagaacttaataaacctacaatgattttttgtaagacaacaattggttttggtgcacccaataaatcaggaacagctgatgttcacggtgctcctcttggtgaagatgaaattaaaaacactagagaggctcttgattggaaataccctccttttgaattaccaaacgatatttatgagtattgggattcgaaagacataggcgctgatgtgaactcaaaatgggataatcttattgaaaattatatagaaa

SEQ ID NO: 231033 - DNA, 702 bp, Unknown
  Bacterial polypeptide expressing nucleotide sequence isolated from the Sargasso Sea
tatggctaatgctgtacgtgctctatgtatggatgcgatagaaaaagcccagtctggtcaccctggggcgcctctgggaatggcagacattgcctatacgctttggacaaaacatttaaaacacaacccatcaaaccccggttggttcaatcgcgataggttcgttttgtcaaacggccatggctctatgttgctctatgcgcttttgcatctaaccggctatgaccttcctattgacgagctgaaacgatttcgtcagctgcactctaaaacgccggggcatcccgaatacagctatacaccaggggtagaaacgaccacagggccgctaggtcaaggactcgcgaatgctgtggggatggctattgctgaaaaagtgctggccgcacagtttaataaacctgagttttctgttgtcgatcattatacctattgttttgctggcgacggctgcttgatggaaggtatttcccatgaggcctgttctttggccggcacactaggcctagaaaagctcatcgtattttgggacgacaacggtatttcaatagacggcgaggtgagaggctggttcaccgacgatacacaagccagattccaagcttatggttggcaagtatcgccaacgttgacggtcatgacaatgacgccattgataacgccatttttagaagcgaaaaagtccaccggcaaacccacttt

SEQ ID NO: 231034 - DNA, 1043 bp, Unknown
  Bacterial polypeptide expressing nucleotide sequence isolated from the Sargasso Sea
gaaacaacaacaggacctcttggacaaggaatagcgaactcagtgggatttgcaatttcagaggaaattttaaaaaaaaaattaggaaatgatttaattaatcacaaaacttatgttttagctggagatggttgtttaatggaagggataagccatgaggcaatgagtttagcgggacatttgaagcttaaaaatttagtaatgctttttgataacaattcaatttcaattgacggtccaaccgatcttgctgtttcagataattttaaaaaaagatttgagggttatggttgggattatattttaataaatggacatgatgaaaaagaaatatttaaagcattaaaaaatgttcaaaaagcaaaaaaaccaactgttatttcatgtaaaacaaaaattggatatggctcaccaaataaatcaggtaaagccacctcccatggaagtcctctaggtttagaggaaattgaacttgttagaaaagccctaaactggaataataaaccttttaatattccgaataaatttttgaaagagtggagaaaaattggtcaaagatgtgaaactcaagaaaaaaaatggattaagatatttaacaaaaacaaaacaaaatttaaaaatttaacaaaaaatagttcaataagtattttaaaaagagaaaaaagaaatgcaattctggagcctaaaaatttggctacaagaaaatgttctgagatgacacttaatgcattaacaaaccaaaatcataacttaattggtggctctgctgatttagcaggatctaataatacaaaaacaaaatatcaaaaaataattaaacctggagattttagtggagattatattcactacggagtaagagagcatggaatgagtggaataatgaatggtattgcactctatggaaatttaattccatatggtggaacttttttaattttttctgattattgcaaaccttcaattagattatctgcgttgatgcaaaaaagagtaatatatgtaatgacgcatgactctataggactggagaggatggccaa

SEQ ID NO: 231035 - DNA, 616 bp, Unknown
  Bacterial polypeptide expressing nucleotide sequence isolated from the Sargasso Sea
aatggtcgctgcatctgtttcattagaatcactttgtgtaaatagtataagaatgcttgctgtagatgcagtaaataaatctaatagtggacatcctggcttgccaatgggatgtgctcctatgggttatgcgttatggcaaaacattcttaatcacaaccctaataacccaaaatggttcaatagagaccgttttgtattatcagctggtcatggctgtatgctgttatattctttgcttcatttgacaggatacaaatcagtttccatagaagatattaaagaatttaggcaatggggatcaaaaactcctggacatccagaaacattcgaaactgaaggtgttgaagttacagctgggcctctcggagccggaatttcaaatgcagttggtttagcaatagctgaaacacacttagcagctaaatttaataagcctgattgcaatatcgttgatcactatacttacgtaataatgggtgatggctgtaatcaagaaggtattgcatcagaggcctgctcattagctggtcatcttaagcttggaaaattaattgcactttacgacgataatcaaattacaattgatgggcgaaccgacgttcttttaccgaag

SEQ ID NO: 231036 - DNA, 892 bp, Unknown
  Bacterial polypeptide expressing nucleotide sequence isolated from the Sargasso Sea
atggtcgctgcacctgtttcgctcgacaccctctgcatcaacagcatccgcatgctggcggtcgatgcggtcaacaagtccaatagcggccaccccggattaccgatgggctgtgcgcccatgggctacaccctctgggacaagttcctgaagcacaaccccaagaaccccaagtggttcaaccgggaccgtttcgtgctctcagctgggcacggctgcatgctgctctacgccttgctgcacctgaccggctacgactcagtcagcatcgatgacatcaagcagttccgtcagtggggctccaaaacgcctggtcaccccgagacctttgaaacccctggcatcgaggtgaccacaggccctctgggcgccggcatctccaacgctgttggcctggcgattgctgaggctcacctggccgccaagttcaacaagcccgacgccaaggtcgttgatcactacacctacgtgatcatgggcgatggctgtaaccaagaaggtgtggcctcagaggcctgctccttggccggtcacctcaagctgggcaagctgattgccctctacgacgacaaccacatcaccattgacgggcgcaccaacgtctccttcaccgaggacgtgcttaagcgctatgaggcctacggctggcatgtgcagcacgtggctgagggcaacaccgatgtaaacgccatcgccaaggccatcgaggccgccaaggctgtcaccgaaaagccttccatcatcaaggtgaccaccaccatcggctacggctcgcccaacaagagcgacaccgccggtgtgcacggcgctcccctgggtgaagaggaagctgctctgacccgccagcaactgggctgggattacggcccctttgaggtgccccaagaggcct

SEQ ID NO: 231037 - DNA, 919 bp, Unknown
  Bacterial polypeptide expressing nucleotide sequence isolated from the Sargasso Sea
taaggcaataaagtctgcacaaaaatcaaagaaaccaactcttatatcttgcaaaacaaagattgggtatggttcaccaaataagcaaggtaaagcctcttctcatggagcagctttaggagaagatgaagtcaaattaacaagaagaaaattaaaatggaatcataaaccttttttaatcccaaaaaaaatattagatgaatggagggactcaggacaaagatctataggtgaatataaaaaatggaataacaatcttaataaactcgtttcaaataaaaaaaatgaatttgttcgaagaataaatggaaaattacctaaagaactaaatagaattttctctgactttaaaaaagaatgtactaataatccttctgcgattgcaactcggcaatcttctgaacttgtaattaataaaatatctccaattctacctgaactgataggtggctcagcagacctgactgggtcaaataatacaagatcaaaaaaaatgaaaacactcaatgcttcaaattataaaggtgaatatatctattatggaatcagagaacatggcatggccgccgtcatgaatggactttctcttcacaaaggaattattcctttcggtggaacatttttaatattcgtagattattgtaaaccttcattaagacttgccgcattaatgaaaaaaagagcaatttacattctgacacatgactcaattggtttaggagaggatggaccaactcatcagcctattgaacaattagcatccttaagagcaacgccaaatgtaaaagtgataagaccatctgatacagtagaaacaattgaagcatggccaatcgctcttaacaataaagaaggacctaccgttatagctctaactagacaaaaaacttactcctgcgagaaaaaagtatacaagtaa

SEQ ID NO: 231038 - DNA, 623 bp, Unknown
  Bacterial polypeptide expressing nucleotide sequence isolated from the Sargasso Sea
aatgagtaaaatttcaagctcccaatcagcaaatgccttaagaattttggcgcttgactctgtgaaacaggcaaattctggtcattccggcatgcctatgggaatggcagatatcgccgaagtactttggcagaatcatttaaaacataatcccggaaatcctgactggtttaatagagatagatttgtgttatcgaatggccatggttctatgcttatatacggacttttgcacctctcaggttatgatttatctatccaagacttaaaagatttccgacagttgcattcaaaaactgctgggcatccagaatttggaataactccaggtatagaaactactactggaccattaggacaaggtatttctaatgcagtaggaatggccatagctgaaaaaactcttgcatctaaattcaacactgaaagacataaaatcattgatcatatgacttatgtatttactggagacggttgtttaatggaaggtatatctcatgaagcttgttctttagctggaactctcggacttggaaacttagtaattttatatgacgataatgatatttccatagatgggaatgtagaaggatggttcacagaggatatcccaaaaaggtttg

SEQ ID NO: 231039 - DNA, 859 bp, Unknown
  Bacterial polypeptide expressing nucleotide sequence isolated from the Sargasso Sea
gcagatttaactcactctaattacacagatataaaaggagaaactggatcattccagccacatagccctgaaaaaagatatttacattttggtgtacgagagcatgcaatggcagctgtacttaatggtattgcctatcacaatagtggtcttatcccttatggtggaaccttccttgttttcgccgattatatgaggggctcaatgaggctttcagcacttagcgaattaggagtaatctatgtcttaacacatgattcaattggtgtaggagaagatgggccaacacatcaacctattgagactatcccttctcttcgcgcaatgcctaacatgctagttttcagacctggagatggcaacgagacgagtggagcttataagcttgctattcaaaatcgaaaaagaccttctgccctttgtttaagtagacaaggtatgccaaatcaagaaaatacttcgatagacaaagttgctctaggaggatatgtagtttccgattgtgaaggaacaccagacttaatatttattggaactggaagcgaactgaatctttgcattgaagcaagtaaagaactttcaagcttgggtaaaaaaattagagttgtctctatgccttgtgtagaactttttgaagagcaagaagaatcttataaagaaagtgttttacctagtagtgtgaaaaagagagttgtagtagaagccgctcattcatttggttggcataaatatacaggttttgatggaatttgtatcactatggataggtttggtgcatcagcaccaggtggagaatgtatgaaaaattttggatttacagtcgaaaacgtagttattaagactaaggaaattctataac

SEQ ID NO: 231040 - DNA, 957 bp, Unknown
  Bacterial polypeptide expressing nucleotide sequence isolated from the Sargasso Sea
aatgatttagcaaattgcatcagatttttatcaatagatgcagttcaaaaagctaattctggacacccaggtatgcctatgggtatggcggatgttgtaacggtactttttaagaattttttaagatttaatcctaaaaatccaaattggatgaatagagatagattcgttttatctgcaggtcatggatcaatgcttttatactctttactatttttaactggatataagagtatttcattaaatagtataaaaaatttcagacagctaaactcaatatgtgccggtcatcctgaataccatcctaattcaggaatagaaacaacaacaggacctcttggacaaggaatagcgaactcagtgggatttgcaattgcagaggaaattttaaaaaaaaaattaggaaatgatttaattaatcacaaaacttatgttttagctggagatggttgtttaatggaaggtataagccatgaggcaatgagtttagcgggacatttgaagcttaaaaatttagtaatgctttttgataacaattcaatttcaattgacggtccaaccgatcttgctgtttcagataattttaaaaaaagatttgagggttatggttggaattatattttaataaatggacatgatgaaaaagaaatatttaaagcattaaaaaatgttcaaaaagcaaaaaaaccaactgttatttcttgtaaaacaaaaattggatatggctcaccaaataaatcaggtaaagccacctcccatggaagtcctctaggtttagaggaaattgaacttgttagaaaagccctaaattggaataataaaccttttaatattccgaataaatttttgaaagagtggagaaaaattggtcaaagatgtgaaactcaagaaaaaaaatggattaagatatttaacaaaagcaaaacaaaatttaaaaatttaaaaaaaaatagctta

SEQ ID NO: 231041 - DNA, 270 bp, Unknown
  Bacterial polypeptide expressing nucleotide sequence isolated from the Sargasso Sea
aatgtttgacgatgtaacaaaatctataagagttctttctgctgccgcagttgaaagagcaaactctggacatcctggtatgccacttggtatggcggatattggtgttgttttgtacaaaaactttttaaaagtatcaaataaacatccagactggatcaatcgggatagatttgttttaagcgcaggacacggttcaatgcttctatatagtcttttacactttaatggattcgatatatctctagatgaaataaaaaattttagaca

SEQ ID NO: 231042 - DNA, 649 bp, Unknown
  Bacterial polypeptide expressing nucleotide sequence isolated from the Sargasso Sea
tttgaataaactacataatgatttagcaaattgcatcagatttttatcaatagatgcggttcaaaaagctaattctggacacccaggtatgcctatgggtatggcggatgttgtaacggtactttttaagaattttttaagatttaatcctaaaaatccaaattggatgaatagagatagattcgttttatctgcaggtcatggatcaatgcttttatactctttactatttttaactggatataagagtatttcattaaatagtataaaaaatttcagacagctaaactcaatatgtgccggtcatcctgaatatcatcctaattcaggaatagaaacaacaacaggacctcttggacaaggaatagcgaactcagtgggatttgcaattgcagaggaaattttaaaaaaaaaattaggaaatgatttaattaatcacaaaacttatgttttggctggagatggttgtttaatggaagggataagccatgaggcaatgagtttagcaggacatttgaagcttaaaaatttagtaatgctttttgataacaattcaatttcaattgacggtccaaccgatcttgctgtttcagacaattttaaaaaaagatttgagggttatggttgggattatattttaataaatgga

SEQ ID NO: 231043 - DNA, 996 bp, Unknown
  Bacterial polypeptide expressing nucleotide sequence isolated from the Sargasso Sea
ctttatcttacaggatataaaagtgtctcattagaggatattaaaaattttagaaaactagactccatatgtgcaggccatcccgagtatcattctaactcaggaattgaaactactacgggaccacttggtcaaggaatttcaaatgcagttggttttgcaattgcagaagaagttttgaaaagtaaaattggaaagaaacacatagatcacaaaacttatgttttggctggtgatggatgcttgatggaaggtataagtcatgaggctttgagtctggcaggtcatttaaaattaaagaatcttattttattgtttgataataactctgtatcgatagatggccctacaaatttagcagtatcagataataccaagaaaagatttgagagttacggttggaattatttagatataaacgggcacaatgaaaaacaaattttcgctgcattaaaaaaaagccaaaattcgaaaaaacctattgctatatcttgcaaaacaacaataggttttggttcccctaacaaaggtggtaaagcatcatctcatggaagccctttaggccaagatgaaataaaactcgtaaggaaaaaattaaattggaattatgaacctttcaaaattccagacagaatattaaatgcatggagagatattggaaataaagcatcaatctcggctgagaaaagtagttcaaaaaataacggagagaaaaataatgtaattccatcaaatgtaagcgaagaaattgaagaattaaaaaaaagttatttaaaaacaatggagccattagctactagaaaatcgtcagagaaatttcttgagattgcatcaaaattatcaaatcttattggtggatctgctgatctagctggttccaataatacaaaaactaaaaatcataaaattataaaacctgggaaattcaatggaaactatattcattatggggttagagaacatgctatgtgtggaataatgaatggtatatccttg

SEQ ID NO: 231044 - DNA, 913 bp, Unknown
  Bacterial polypeptide expressing nucleotide sequence isolated from the Sargasso Sea
atgacactaaatgcattaacaaaccaaaatcataacttaattggtggctctgctgatttggcaggatctaataatacaaaaacaaaatatcaaaaaataattaaacctggagattttagtggagattatattcactacggagtaagagagcatggaatgagtggaataatgaatggtattgcactctatggaaatttaattccatatggtggaacttttttaattttttctgattattgtaaaccttcaattaggttatctgcgttgatgcaaaaaagagtaatatatgtaatgacgcatgactctataggacttggagaggatgggccaactcatcagccaattgagcagctatcaggtttacgatcaattccaaatttaaatgtttttagaccagcagatagaattgaaacaattgaatgttgggaacatgctttaaaaagttcgaaaacaccaagtattttatctttaacaagacagggcctaaatcccataagaaaatcatttacaaatataaataaatgttctttgggagcctatgaagttttgagaaccaataataaaattaatttaacaatatttgcaagcggttcggaggttaatttggcaatcgaaactagtcataaattagccaaagataaaatatattgtaaagttatatcaatgccatctatggagcttttcgatcaacaatcaaaattatataaaaaaaaaattttaaatgaaactaaatttaaaatttcaatagaagctggatcaactgattgttggaaaaaatatgtggggagttcaggtctaacatttggaattaatgattttggcaaaagtgcaccctacaaagatatctttaaacactttggactaagtgtttcaaatattgcaattaaaaccaaaaaaatgataagaaattaaa

SEQ ID NO: 231045 - DNA, 700 bp, Unknown
  Bacterial polypeptide expressing nucleotide sequence isolated from the Sargasso Sea
atgatcagtcaccacgagcttgccagtgctgtcaggatgttggctgttgatgcagttgaggctgcgcaatctggccacccgggcatgccaatgggcatggcggacattgccacggtgttgtggcgtaagcacttaaggcacaatccgtgccacccagactggtggaatcgcgatcgctttgtgttgtctaatgggcatggcgcaatgctgcaatacgctttactccacttaaccggttatgatttgtgcatgcgggagctggagcgattcaggcaatggcaatccaagacgccgggtcacccagagcacggccacacgccgggtgttgagacgaccaccgggccactaggtcaaggtttggcgaatgcggtgggtatggcgctggccgaaagcatgctggcggcccagtttaacaaagataacttttgtgttatcgaccattatacatacgttttcgctggagatggctgcatgatggagggtatttctcatgaggcgtgcgctttagcagcaacctggggtttggggaagctggtggttttttatgatgacaacggcatttcaattgacggcgccattgattcatggatgaccgagtctgtggcgcaacgatttgtggcgtatggctggcatgtgtccgagcccattgacggccatgatccggaggcaatcgacgcagcgattttggcggcacgagcgg

SEQ ID NO: 231046 - DNA, 607 bp, Unknown
  Bacterial polypeptide expressing nucleotide sequence isolated from the Sargasso Sea
ttgaataaactacataatgatttagcaaattgcatcagatttttatcaatagatgcggttcaaaaagctaattctggacacccaggtatgcctatgggtatggcggatgttgtaacggtactttttaagaattttttaagatttaatcctaaaaatccaaattggatgaatagagatagattcgttttatctgcaggtcatggatcaatgcttttatactctttactatttttaactggatataagagtatttcattaaatagtataaaaaatttcagacagctaaactcaatatgtgccggtcatcctgaataccatcctaattcaggaatagaaacaacaacaggacctcttggacaaggaatagcgaactcagtgggatttgcaattgcagaggaaattttaaaaaaaaaattaggaaatgatttaattaatcacaaaacttatgttttagctggagatggttgtttaatggaagggataagccatgaggcaatgagtttagcgggacatttgaagcttaaaaatttagtaatgctttttgataacaattcaatttcaattgacggtccaaccgatcttgctgtttcagataaatttaaaaaaa

SEQ ID NO: 231047 - DNA, 751 bp, Unknown
  Bacterial polypeptide expressing nucleotide sequence isolated from the Sargasso Sea
atggttgctattatgaatggaatgagtctccatggaggtattaggccatacggaggaaccttcctagtttttatggattatgcaagaaatgcagtacgtttatctgcaatgatgagtctgccaaatatatatgtctttactcatgattcaattggcttaggcgaggatggtccaacacatcaacctatcgaacatttggttactctcagagcaacgccaaacttatacaattggaggccagctgatcttaaagaaacagcagtagcatggaaagagtcaattttatcaaaatctccaagctgtcttatcctcagcagacaaggtcttccgcagatcaaaatgagtgaggacaagattattaatatctctaagggaggatatttagttcaaaaggacgaagatgcagagctaaacattatatcctctggaagcgaactgcaattagctattcaagcagctaaagatcttgatcagtcgggtataaaggtaaatgtggtttcgatgccatgtttagataggtttcttgaggcggatttagaatatcaaaataaagtgatccaaaaagatttgccatccattgttgttgaggctgcccacccaaactcatggtatagaattttaggaagagatgaccttgtgattggtatgacaacatttggggagtctgcacctgcaaaaatgctctttgaggagttcggctttacagcagggaatattgtttcaaaggcaaaaaaacttttaaataaatgag

SEQ ID NO: 231048 - DNA, 922 bp, Unknown
  Bacterial polypeptide expressing nucleotide sequence isolated from the Sargasso Sea
gatattgttcaaaactttctaaaatttaatccaaaaaatccaaattggcttaatagagatagatttgttttgtcagctggtcacggttctatgctgctttattctttattatacttaactggatataaaagtatttccttaaaagatataaaaaattttagacaattaaattcgatttgcgcaggacatccagaatacacccctaattctggaatagaaactactacaggacctttgggacaaggaatagcaaatgcagtgggaatggcaatcgcggaagaaattttaaaagaaaaaattggtaaaaatattataaatcacaaaacttatgttctgactggtgatggatgtttaatggaaggaatcagtcatgaagcaatgagtatagcaggtcacttaaaactaaaaaatctagttatgttatttgataataattcaatatcaattgatgggccaacaagtctggctgtttctgataattttaaaaaaagatttgaaagttatggttgggattatattttaattgatggtcataacgaaaaacaaatatcaaaagcacttaagaaagtgcagaaagcaaaaaaacccacagtgatatcttgcaaaactgttattggttttggttcgcctaataaatcaggaaaagaaactgctcacggaagtcctctaggtgaagatgaaataaaattagtaagaaaaaaattaaaatggaatcatcccccttttgtggtaccaaaaaagatattagatgagtggagaaaaattggaattagaggaattaaagaagcagaaaattggaataaaaaaaataaatataaaaaaatttttcaaacttctttttcaaaagattttcttaaagaaaaacaaaatgcaattaataaatctgaggctatggctactagaaaatcatctgaaaaataat

SEQ ID NO: 231049 - DNA, 820 bp, Unknown
  Bacterial polypeptide expressing nucleotide sequence isolated from the Sargasso Sea
aaaattaaaacaatcaaagaaatgaatattttagcaactagaaaatcatcagaattaactttgagcgcctttatgaaaaatagtaatacactagtaggtggctcggcagatttagctggttctaataatacaaaaacaaagcatcacaaaataataaaggcaaatgatttttctggaaactatattcattatggagttagagaacatgcgatgtgtggaataatgaatggtctggcacttcatagtaaattcataccttatggtggtacatttttaattttttctgactattgcaaacctgcaatcagattggcagcaatgatgaaacaaagagttatatacgtcatgactcatgactcaattggtctaggtgaagatgggcctacacaccaaccaatagaacaattaactggtttaagagctattcctaatttaaatgttatgagaccagcagatagaaccgaaactattgaatgctgggagctggccttaaagagtttaaataaaccaagtatattatctttaacaagacagaatctagctcctgtaagaaaaaaatactctaaaaaaaatagatgtgcttctggtgcttatgaaatatcaaggacaaataataaaattaaactaactatacttgcttctggctctgaggtaaatttggctatcgatacaagccataaattagccaaacataaaatatattctaaagtaatatcagtgccatcactagaattatttaaattacaatcaaaaccatacaagaataaaattctaaatgaatcaaggtataaggtttctatagaagctggatcaacagagc

SEQ ID NO: 231050 - DNA, 651 bp, Unknown
  Bacterial polypeptide expressing nucleotide sequence isolated from the Sargasso Sea
gactttcagcacttagcgaattaggagttatctatgttctaacccatgattcaattggggtaggtgaagatggtccaacacaccaacctattgaaactatcccttctcttcgcgctatgcctaacatgctagttttcagaccaggagatggaaatgagactagtggggcctataagatcgctattcaaaatagaaaaagaccttctgccctttgtttaagtagacaagggatgccaaatcaagaaaatacttcaatagacaaagttgccttaggaggatatatagtttctgattgcgaaggcacaccagatctaatatttattggtactggaagcgagctaaatctttgcattgaagcaagtaaagaaattgcaaacttaggtaaaaaaactagagttgtctccatgccttgcgtagaactttttgaagaacaagaagaatcttacaaagaaagtgttttacctagtagtgtgactaaaagagttgtagtagaagctgctcattcatttggttggcataaatatacaggttttgatgggatttgtattactatggataggtttggcgcctcagcaccaggaggagaatgtatgaaaaattttggatttacagtagaaaatgtaatcaataaaacaaaggaaattttataag

SEQ ID NO: 231051 - DNA, 850 bp, Unknown
  Bacterial polypeptide expressing nucleotide sequence isolated from the Sargasso Sea
acttgtaagaaaaaaacttaaatggagatatgagcctttcaaaattccagttgaattattaaatgaatggagaaaaattgggaaaagagcctcaaaaagagctcagaaaaatagagtagacttttcaaattttaaaaatttaaactcgtttaaaaaattaattgaaaaagcaaaatctgaatattttaagaatacaaaatcaattgctacaaggaaatcatcagaaatatttttaaatattatagcaaaattaccttttctaataggaggatctgctgatttggctggatcaaataacaccaaaactaaagatcataaaataatcaaaccaggtaatttttctggaaattatattcattatggagttagagagcacgcgatgtgtggaataatgaatggaatagccttacacagtagtcttattccttacggtggaacttttttaatatttagtgactattgcaaaccatcaatcaggttagctgcaatgatgaaacaaagagtcatatatgtatttacacatgactctattggcttaggggaggacggtcctactcatcagccaattgaacaattaacaagtttgagatctattccaaatttgaatgtttttagaccttcagatacgattgaaacttttgagtgttggcaattagctctagaaagtaaaaatactccaagtgtaatttcactaactagacagagtgtaagtcctattagactaaaaaataccctcaaaaatgagtcatcttttggtgcttacgaagttttgagaactagtagtattataactgtaacaattttggcaactgggtctgaaaccagtttggcaaacgatggtaggtcataa

SEQ ID NO: 231052 - DNA, 923 bp, Unknown
  Bacterial polypeptide expressing nucleotide sequence isolated from the Sargasso Sea
cgttttatcagcaggacatgggtctatgctgctttactcacttttgtatctcactggatacaaaagcataaaaattgaggatataaaaaaatttagacaattaaattcaatttgtgcaggtcatccagaatatcatcctaactctggcatagaaaccaccactggtcctctcggacaaggaattgctaattctgtaggttttgcaattgcggaagagatattaaaaaaaagattaggaaaaaatataatcaaccataaaacttatgttttagctggtgatggatgtttaatggagggaataagtcatgaagcaatgagcttagccggtcacctaaaacttaaaaatctaataatgctttttgataataattctatttcaattgatggtcccacaaacttggcagtttcagatgattatgaaaaaagatttaaaagctatgggtggaactatattttaattaatggtcataataacaagcaaatttacaatgctttaaataaagctcaaagctcaaaaaaaccaactgttatctcatgtaaaacgaaaataggatttggatctcctaataaaagtggcaaggcatcttctcatggtagtcctcttggagctgatgaaataaacttagtaagaaaaaatttaggttggagttataaaccattcgaaatacctaaaaaaattttaaacgagtggagagttattggaaaaaaaggttcaaaaatagaaattagatggaataagaattttatcaaacataagtcgaaatttaaaaatatcgtaaaaaataatttttcaagttcaattaacaaacaaaaaagagaggcaattaaaaattctcagactttggcaactcgtaaatcgtctgaaatttttttgacagctatattaaaaaataaaaatactttaataggaggttctgcagatt

SEQ ID NO: 231053 - DNA, 752 bp, Unknown
  Bacterial polypeptide expressing nucleotide sequence isolated from the Sargasso Sea
tcatactgctggacatcctgagcttgatcttgagcttggaattgaaaccacgactggaccccttggacaaggcattacaaatgcagttggtatggcactcgctgagagtatcttggcatcaaaattcaataaaggtgatcattcaattgtggatcacttcacatatgtttttcttggtgatgggtgtcttatggaaggtatttcacatgaagcatgttcacttgcaggcactctgaatttgagtaaattaatttgcatctatgatgacaatggaatatcaatcgatggtgaagtatatgactggtttgatgaagatgtttgtgcaagattcaagtcatatggatggcatgtcattgaggatgttgatggccatgatgcggaggccatttcgaaagcaatcacagaggcaaaagcatctgataaaccatccttgattgattgcaaaacagtgattggatttggttcacccaacaaagctggaacagctgatacgcatggtgcccccctcggtgatgaagaaatcgccaatgtaagagaatcactgggatgggagcatggtcggtttgagatcccagatgagataaaaaatgcatggaattgcagtgaaaaaggacattcagctgaaaacgactggaatgagagatttgagcaatacaaatcagagaacccggaactggcagatgaatttttggcaagcatggaaggaaacatcatcaatgagatggctcatcttgatgcattgattgatgaat

SEQ ID NO: 231054 - DNA, 526 bp, Unknown
  Bacterial polypeptide expressing nucleotide sequence isolated from the Sargasso Sea
atgggagatcaagcggtttcaaggcgagactgtgctaatgcgatcagggcgttaagcatggatgcagtacaaaaagccaactcgggccacccgggagcgccaatgggcatggcagatatagccgaagtgctctggcgcgattttatggtgcataatcctaggaatcctaactggtttaatcgagatcgttttatcctctctaatggtcatggttcgatgcttatctattctttactgcatttgactggttacgacctatctatccaagacctacaaaatttcagacaactcaattccaaaacaccgggacatccggaatatggttatacgcctggtgtcgaaacaaccacaggaccattgggccaaggtctagctaatgcagttggaatggctttagcggaaagaaccctagcagctcagtttaatcgtgaaggccatgttattgttgatcacttcacttatgtgtttgtgggcgatggatgtttaatggagggcatatcgcatgaagcgtgttctttggcaggga

SEQ ID NO: 231055 - DNA, 578 bp, Unknown
  Bacterial polypeptide expressing nucleotide sequence isolated from the Sargasso Sea
tttgaaaattgataataaagatttagcaaactcaattagatttttgtcggtagatgccgtacaaagagctaattccggacatccaggtatgccaatgggaatggcagatgtggcaacaattttattcaaaaactttatcaaatttgaccctgcaaatcccagctggattaatagagatagatttattttgtcagcaggacatggctcaatgctactgtactcattattgtatctcacgggttacaaaagcgtatctttaaaggatattaaaaattttagacaattaaattctatatgtgctggtcatccagagtttgagcaaaacagtggtatagaaacaacaacaggtccgttaggacagggaatttcaaatgctgtaggttttgcattagctgaggaaattttgaaagctcaatatggtaagaaaataattaatcataaaacttatgttttggctggtgatggatgtttgatggaaggaataagtcatgaagcgttaagtcttgcaggccatttaaaactaaaaaatttaattttgttatttgataataattcaatttctatagatggaccaacta

SEQ ID NO: 231056 - DNA, 830 bp, Unknown
  Bacterial polypeptide expressing nucleotide sequence isolated from the Sargasso Sea
agctggagtccacggctcacctttaggagatgaagaaattaaaattgtaagagaattatttggttgggaccataagccattttatataccccaacatatcattaaggcttggtacaagtctggtagcaaaaattcgcatgttagaaagcaatggaccaataatctaaataaattatcagaaaaaaagaaagaaattctactacaatctatttcaggcgagattccaactaaacttaaaaataaatttaataacttcaaaaaaacgattattaacgatcaaccaacaatcgctacaaggaaatcatctgaactatctttaacagtagttaacaaaaatattccttatactattggaggatctgcagaccttactggatctaataatacacttactcctgaattaggtatattctctcctgaaaatcctgaaggaagatacatacattatggcataagagaacatgcaatggctgcagctatgaatggaatttcacttcatggtggtctaattccatatggaggaactttcttagcatttacagattatgctcgaggtgcaataagactttcttcacttatgaaaattagagtaatatatgttatgacacatgatagtattgggttaggagaagatggccctactcatcaaccaatagaacatttagccatattaagagcaacacctaatatgcttgtatttagacctgcagatactattgaaactgcagaaacatgggaaattgcgctagaaagtaaagacacaccttcaactattgcattatcgagacaaaatttaccaacagttagaaaaaagcattctttaaaaaatt

SEQ ID NO: 231057 - DNA, 956 bp, Unknown
  Bacterial polypeptide expressing nucleotide sequence isolated from the Sargasso Sea
actaggcatggcagatattgcagaggttttatggcgaaaacatcttaggcatcccccaaagaatccaaaatggtttgatagagataggtttgttttatcaaatggacatggctctatgctcttatatagtcttttgcatcttactggctatgacttaactatcaaagatctcaaagatttcagacaattaaaatccaaaactcctggacacccagaatatggaattactccaggtgttgaaactacaacaggacctcttggacaaggaattgctaatgctgttggaatggctttagccgagaaaatcctggctaatctcctaaatagcaaaagaacaaatgtgattgatcattttacttactgctttttaggcgatggatgtcttatggaagggatttcacatgaagctatgtcttttgctggcgttcatgagcttaataaattaatttgtttttatgattcaaatggaatttctatagatggtgaaataagtgattggtacaaagatgacatttcattaaggtgtaaggcatatggatggaatgtaattgataatatagatggacataatagagaggaaattgatgaagcaatttctctttcaaagaagtcaaaaaaaccaactatgattgtatgtaaaacacacattggttatggtgcaggcaacaaacaagattctgaatcgtctcacggagctgcactcggatctgagatcgtaaaagagttaagagaaaatcttgattggccatattctgaatttgaaattcctcatgaaatttatgcagactgggatgcctcggacataggtcaaaaatatgaagatgattggaatgaaaaagtactaactctcaaatcagaaaatcctgagaaaggagagcttctagaaaggttgttaaacgaagagctgcctgagaaatttgattctaactttagtgcctttttagaggaaatttaaa

SEQ ID NO: 231058 - DNA, 928 bp, Unknown
  Bacterial polypeptide expressing nucleotide sequence isolated from the Sargasso Sea
catttaagacttaagaatttaatcatgttatttgacaacaattctatttcaattgatggaccaactagtcttgctgtatcagataactataaaaataggtttgaaagctatggttggaattatattgatattgatggtcacaatgaaaaacaaatatataatgcgattaagactgcacgaaaatcaattaagccaacggttatttcctgtaaaacaaaaattggatttggttcacctaataaaagtggtaaagcatcttcacatggtagtcctcttggacctgaagaaattgagttagtaagaaaaaaattaaactggccttttaaaccgtttgaaataccgaaaaatatcttaaaagaatggagaaaaataggactcaaaggttctaagacagagataaaatggaagaaagatttttcaagaaataaaaatagcttcaaagaattatttaacaataatttttctctttcaattttaaaacaaaaaaaagacgttattgcaaatttaaaaccgttagcaacaaggaaatcttctgaagctgttttaaactcattatttaaattaaaaaataatttgattggaggttctgcagatctagcgggttcgaataatacaaaatctaaattaaacaaagttataaatgctaaaaattttgatggtgactatattcattatggagttagagagcatgcaatgtgtggtattatgaatggtttagcattacacagtaatttaattccgtatggaggaacttttttaatattttcagattattgtaagccttcaattagactttctgcattaatgaagcaaagagtaatttacgtaatgacacatgactctataggattaggggaagatggcccaactcatcaacctattgagcaattatcgggtctaagatctataccaaatttaaatatattaa

SEQ ID NO: 231059 - DNA, 948 bp, Unknown
  Bacterial polypeptide expressing nucleotide sequence isolated from the Sargasso Sea
tgatggacatgattttgaacaaatcgatcaggcaatcctgaaggcacagaaagaaacttcaaaaccttctctcatttgctgtaaaacagtcattggttttggttctccaaacaagtctggtactgcaggaattcatggaagccctcttggtgatgacgaaatagagattacgagaaaagcattgaattggatttatgagccttttgaaatcccagaagaaatctatcaagaatggaatgctattgagaaaggtgagacaagtcaaaatgattggataaatgttgtatctgaatatctagacaagtttccagaggactacaaagagttcatgcgccgaatagcaaatttaacaccgaaggacttttctgaaagatttgaatctttgattaatgaatgtttgcagaatgatgcaagtatggccactaggaaagcttcacaggtctgtctggatcatttttgtgagtacttacctgaattattaggaggatcagcagatttaacaggatctaataatactttttcaaaacataattcagaactaaccccagataatggaggaggttcacatatttactatggggtcagagagtttggaatggtagctatgatgaatgggatgtgtcttcatggaggtataaggccttatggcggcacttttctagttttcatggattatgccagaaatgcagtccgcttatctgcaatgatgcaacttcctaacatttatgtgtttactcatgactcaattggtttaggcgaagatgggcctactcatcagcccattgagcatttagtaaccttaaggtctacccccaatctttataactggagacctgcagatttaactgaaaacagcgttgcttggaagaatgcgatcgtttgcgattccccaacttgtttgattcttagtcgacaatccttaccaaaactgcccttaactaaagatca

SEQ ID NO: 231060 - DNA, 836 bp, Unknown
  Bacterial polypeptide expressing nucleotide sequence isolated from the Sargasso Sea
atgctgctttactctttattatacttgactggatataacagtatttcgttaagagatataaaaaattttagaaaattaaattcaatttgtgcaggacatccggaatacattcctaattctggaatagaaacaaccactggacctttaggacaaggaatagcaaatgctgtgggaatggcaattgctgaagaaattttaaaagaaaaaattggtaaaaatattataaatcataaaacttatgttctggctggagatggttgccttatggaaggcataagtcatgaagccttaagtctagctggtcatctaaaattgaaaaatttaatcatgttgtttgataataactctatatcaattgatggacctactagtcttgctgtatctgataattttaaaaaaaggttcgaaagttatggttgggattatattttaattaatggtcataacgaaaaacaaatatcaaaagcacttaagaaagtacagaaagcaaaaaaacccactgttatatcttgcaaaactattatcgggtttggttcgcctaataaatcaggaaaagaaagttcccatggaagtcctcttggtgaagatgaaataaaattagtaagaaaaaaattaaaatggaatcatcccccttttgaagtgccaaaaaaaatattagaagagtggagaaaaattggaagtagaggaattaaagattctgaaaagtggtataaaaaaaataaaaataaaatagttggccaatcttcttttttaaaagattttctaaaagaaaaacaaaatgtatttaataaacctgatgttattgctactaggaagtcttctgaaaaaataatcag

SEQ ID NO: 231061 - DNA, 754 bp, Unknown
  Bacterial polypeptide expressing nucleotide sequence isolated from the Sargasso Sea
aatgaataatatttcgagctcccaatcagcaaatgccctaagaattttggctctagactctgtgaaacaggctaattctggccattccggcatgcccatgggtatggcagatatcgccgaagtgctttggcagaatcacttaatacataatcctggaaatcctaactggtttaatagagatagatttgtgttgtctaatggccatggatctatgctcatatacggacttttgcatctcacaggttatgatttatctatccaagacttaaaagattttagacagttgcattctaaaactgctggccatccggaatttggaataacaccaggtgtagaaactactactggaccattagggcaaggtattgctaatgcagtaggaatggccatagctgaaaaaactttagcatctaaattcaatactgaaaaacataaaatcattgaccatatgacttatgtatttactggtgatggatgtttgatggaaggtatatctcatgaagtttgttctttggcgggaaccctccgtcttggaaatttagtagttctatatgacgataatgatatttctatagatggtaatgtagaaggatggttcacagaggatattcctaaaaggtttgaatcctatggatgggaagtaataccgagtgtagacggacataattttgaagaaatagatcaggctatcattaaatcaaaatctagtgccgataaacctactctgatatgttgtaagacggttattggaaaa

SEQ ID NO: 231062 - DNA, 871 bp, Unknown
  Bacterial polypeptide expressing nucleotide sequence isolated from the Sargasso Sea
gacaacaattcaatttcaatagatggtccaactaacttagcagtatctgatgatcatgaaaaaagatttaagagctatgattggaattatttaaaaattaatggacataattttaaagaaataacacaggctcttaaaaaagcacaaaaatcaaaaaaacctatagcaatctcttgtaaaacaactattggatacggatccccaaataaaggtggtaaagcctcatctcatggcagtcccttgggcgaagatgaaataaaattagtcagaaaaaaattaaactggccacataaaacttttgaaattccaaaaaacttgattgatcaatggagatcaataggtaaaaaagcgtcaattaaatctgagaggaataaaagaaatttttcactaagatttaataagaatattatcaacgcagagatagatagagcaaaatcaaattacctaaaaaaattacaaccaatagctactcgaaaatgttcggaaaaatttttggaaattgtatccaaacttccaaacttaattggcggatcagcagatttagcagggtccaataatactaaaaccaaaaatcataaaattattcaatcaaatgatttttctggaaattatatccattacggagttagagaacacgctatgtgtggtattatgaatggtatatcacttcatagtgagcttgtttcttatggtggaacttttttaatatttagcgattattgtaaaccatcaataagacttgcagctatgatgaaactaaaagttatttatgtttttacacatgactcaattggtcttggagaagatggtccaactcatcaaccaatagaacaattgacaagtttacgatcaataccaaacttaaatgttt

SEQ ID NO: 231063 - DNA, 898 bp, Unknown
  Bacterial polypeptide expressing nucleotide sequence isolated from the Sargasso Sea
tggtactggaatagagacgacgacaggacctttgggacaaggtattgcaaatgcagtaggttttgcaattgctgaggaaaaattaaaaaataatttaggaaaaaaaataattaatcataaaacatatgttcttgcaggagatggctgtctaatggaaggaataagtcatgaatctatgagcttagctggccatttaaaacttaaaaacctaataatgttatttgataataactcaatatctattgatggacctacaagtcttgcggtttctgataattataaaaaaaggtttgaaagttatggttgggattatattttaattaacggccacaactataaagatatatataaagcattaaaaaaagttcaaaatgcaaaaaaaccaactgtaatttcttgtaaaacaaaaattggttttggatctccaaacaagtctggtaaagcctcatctcacggaagtcctttaggagtagatgaaattaaactggttagaaaaaaattaaattggagatataaacccttcctaattccaaaaaaaataattaatagttggaaacaaataggtaaaaatggaattaaactagagaataaatggaataaagaaaataaaaataataagaataaaataaaaaagatttttgaaacaaagtttattaatactttaaaaaaagagaaaatcgaggctttaaaaaataataaaagtcttgctacaaggaaatcatctgaattagctttaatggctttaactaaaaataataaaattttagttggtggatctgctgatttagcaggatcaaataatacgaaaacaaaatttcaaaatgtagttaaaccaggtgaattaggaggaaactatattcattatggtgtaagagagcatgctatgtgtggaatatga

SEQ ID NO: 231064 - DNA, 741 bp, Unknown
  Bacterial polypeptide expressing nucleotide sequence isolated from the Sargasso Sea
aaaaatacaacacaaacatctaaaaaattatctcatttagcaaattgtatacgttttttatcaattgacgctgtgcagaaagcaaactctggtcatccaggaatgccaatgggtatggctgatattgcaacagttttattcaaaaatcatttaaaatttgatccaaatgatccaaaatggattgatagagacaggtttgttttatcaaatggtcatggctccatgcttctatactcaattttatatttaactgggtataaagatatcaccctaaatgatattaaaaattttagacaactcggatcccctacagctggacatcctgaatttggagaactagagggaatagaaacaacaactgggcctctttcacaaggattatcaaatgctgttggctttgcaatggcagagagcaaactctcatcaatcttggggaaggattgcatagatcactatacttatgtttttgcaggagatggttgtctgatggaaggcttaagtcatgaagcatgcagtttagcaggacacctaaaattaaataagttaatcgttttctttgatgataattcaatctcaatagacggtccaatttctttaagtagtagtgataatgttgaagggagatttcaatcatatggttggaatattttaaaaataaatggtcacgatcatgaagaaataaatgaagcaataaataaagctaaaatttctgaacagcctacaattatttcttgtcaaaca

SEQ ID NO: 231065 - DNA, 496 bp, Unknown
  Bacterial polypeptide expressing nucleotide sequence isolated from the Sargasso Sea
ttgaataaactacataatgatttagcaaattgcatcagatttttatcaatagatgcggttcaaaaagctaattctggacacccaggtatgccgatgggtatggctgatgttgcaacagtactttttaagaattttttgagatttaatcctaaaaatccaaattggatgaacagagatagattcgttttatctgcaggtcatggatcaatgcttttatactctttactgtttttaactggatataagagtatttcattaaataatataaaaaatttcagacagctaaactcaatatgtgctggtcatcctgaataccatccaaattcaggtatcgaaacaacaacaggacctcttggtcaaggagtagcaaacgcagtgggatttgcaatagcagaggaaattttaaaaaaaaaattaggaaatgatttaattaatcacaaaacttatgttttagctggagatgggtgtttaatggaaggaataagtcatgaggcaa

SEQ ID NO: 231066 - DNA, 778 bp, Unknown
  Bacterial polypeptide expressing nucleotide sequence isolated from the Sargasso Sea
tatttactacggcgtaagagaattcggcatggttaccattatgaacggaatgagtcttcacggtggtattaggccatatggtggaaccttcctagtttttatggattatgcaagaaatgcagtgcgcctatctgcaatgatgaacctaccaaacatatatgtctttactcatgattcaattggtttaggtgaggatggcccaacacaccaacccattgaacacctggttacacttagagcaacaccaaatttacagaactggaggccagctgatctgaaagaaacagcagttgcatggaaagaatcaatcttatcaaaatctccaagttgccttgttctcagtaggcaagcgcttccccaaactaaaataagtgaggagagaattagtgatatctctaatggaggatacttagttcaaaagcatgaagatgcagagctaaatataatatcttctggaagtgagctgcaattagctgttcaagcagctaaagatcttgagcaaacaggcataaaggtaaatgtggtctcgatgccatgcctagataggtttcttgaagcagatttggaatatcaaagtgaagttatccaaaaagacttgccatctattgttgttgaggctgcccatccaaactcatggtataaaatcttgggaagagatgatcttgttattgggatgacaacattcggtgaatctgctccggcaaagatgatttttgaggagttcggcttcacaactgagaatattgtttcaaatgcaaaaaaacttttaaacaaatga

SEQ ID NO: 231067 - DNA, 830 bp, Unknown
  Bacterial polypeptide expressing nucleotide sequence isolated from the Sargasso Sea
gatggcatgtccacatgttgaagatggtaatcatgatgttaaaggaataactgaagctatcgaaaaagcaaaattagttacaaacaaaccctcaataataaaaatttctacaaccataggttatggatcacctaataaatctgatactgctggaattcatggtgcagcagtcggagaagaagaagcttcattaaccagagagtttttaaattgggaatatcctccatttgaaattccaaatgaagtatatgaacattttagaaaatcaataaaaaaaggtgaagaattagagaaaaattgggatgcaaaatttgatgaatatgagaacaactatccatctgaaggcgccgagttaaaaagaatgttaaatggccaattacctgagaattgggatttagatctcccctcttattctcctgaggataaaggtttagccactagaaaacattcacaaatatgtttgggtgcacttggtcctaacctccctgaattaattggcggatcagcagatttaactcactctaactacacggatatcaaaggagaaactggatcgttccaatctcatagccctgaaaaaagatatttacattttggtgtacgagagcatgctatggcagcggtacttaatggtattgcctatcacaatagtggtcttataccttatggtggaaccttccttgttttcgccgattatatgagaggttcaatgaggctttcggcacttagtgaattaggagttatctacgtattaacccatgattcaattggtgtaggtgaagatggtccaacacatcaacctattgaaactatcccttctcttcgagcca

SEQ ID NO: 231068 - DNA, 594 bp, Unknown
  Bacterial polypeptide expressing nucleotide sequence isolated from the Sargasso Sea
tttgaataaaatttataaagaactagctaattgtataaggtttctcacaattgatgctgttcaaaaagcaaactcaggtcaccctggaatgccaatgggaatggcagatgttgctacagtacttttcaaagattttttaaaatttaatccaagaaatcctagctggattaacagagatagatttattctttctgctggacacggatcaatgttgctttactctcttctttatttaactggttacaaaagcgtctctttaaatgatataaaaaactttagacaaatagagtcagtatgtgctggtcatcctgaatttcatcctaattctggtattgaaaccactacaggtccgttgggacaaggaatcgctaatgcagttggatttgcaatatcagaggaaatcttaaaaaaacaattaggaaaaaaaaatattaatcataaaacttatgttctcgctggtgatggatgtttaatggaaggtattagtcatgaggcattgagtttagctggacatttaaaattaaaaaatcttattttattatttgataataattctatctcaatcgatggtcctactaacctagctgtttcaat

SEQ ID NO: 231069 - DNA, 554 bp, Unknown
  Bacterial polypeptide expressing nucleotide sequence isolated from the Sargasso Sea
tttgtctaatgctgtcagatttttgtctatagacgcagtagaaaaagcaaattctggccaccctggaatgccaatgggtatggcagatgttgcaactgtgctttttaaaaattttctaaattttaatccaagaaatccagattggataaacagagacagattcgttctttcagctggacatggatcaatgttgctttattctcttttatatctgactggatattcgagtataaatcttaaagatattaaaaattttagacagctagactctatttgcgctggtcatccggagtttcatcctgggactggaattgaaacaactacaggacctttgggtcaaggaattgctaacgcagttggatttgctgttggagaggaaatattaagaggaagatttggaaaaaaaatatttaatcataaaacttatgtattggctggtgatggatgccttatggaaggaattagtcatgaagcattaagtcttgcaggacatttgcgactaaaaaacctaataatgttatttgacaataattccatttcaatcgatggaccaa

SEQ ID NO: 231070 - DNA, 625 bp, Unknown
  Bacterial polypeptide expressing nucleotide sequence isolated from the Sargasso Sea
aatggttgctgcatctgtttcattagaatcactctgtgtaaatagtataagaatgcttgctgtagatgcagtaaataaatctaatagtggacatcctggtttaccaatgggttgcgctcctatgggttatgcactatggcaaaatgtactaaaccacaatcccaataatccaaaatggtttaacagagatcgttttgtattatcagctggtcatggatgtatgttgttatattcactgctgcatctgacaggatataaatcagtctccatagaggatattaaagaatttagacaatgggggtctaaaacacctggacatccagaaacattcgaaactgaaggagttgaagttacagctgggcctctaggagcaggaatttctaatgcagttggcttagcaatagctgaaactcacttagcagctaaattcaataagcctgattgtaatatcgttgatcactatacttacgtcataatgggcgatggctgtaaccaagagggaatcgcatcagaggcttgctcattagctggtcatcttaagctaggaaaattaattgcactctatgatgacaatcaaattacaattgatggtcgtactgatgtttctttcactgaagatgtttta

SEQ ID NO: 231071 - DNA, 844 bp, Unknown
  Bacterial polypeptide expressing nucleotide sequence isolated from the Sargasso Sea
ttaacaggaaattttaaaaataattatcctcctggttttaaaaatcataaggatcaaattaatcaatcaattgaaaaagcaattaagaactatttaaaaaacttaaatcctattgcaacaagaaaatcatctgaaatgtttttagagttaattacatctttaccaaacttaattggaggatcagctgatttggctggttcgaataatactaaaactaaaaaacacgaaataattaagccaggaaattttaaaggaaattatattcactatggagtaagagagcacgcaatgtgcggtattatgaatggtttgtctttgcatagtggcttaataccttatggtggaacatttttaatctttagtgattattgcaaaccatcaattaggttagctgcgatgatgatgcaaagagtaatttatatttttacccatgactcgattggacttggagaagatggtccaactcatcaaccaattgagcaattagccagtttaagatcaatacctaatttgaatgtttttagacctgcagatacaattgaaacttttgagtgttggcaattagcacttgagtttaataaatcgccaagtgtgattgctttgtccagacaaaaaataaaccctgtcaggaaagaatatagtaaaattaataagtgctctaaaggagcatacgaagttatgagaactggagataacattaaactaatattattgtccagtggatctgaaactaatttagcttgtgaagttagccataaattagccacagaaaatatctattcaaaagttatatcaatgccatgtcaagaattatttgacaaacaagatggaaacttacaaaaaa

SEQ ID NO: 231072 - DNA, 422 bp, Unknown
  Bacterial polypeptide expressing nucleotide sequence isolated from the Sargasso Sea
tatgtctgaggaaattacaatagatactgttagagatgttgagcttgcaaatgcaataaggatgttgtcagtagatgctgtagaaaaagcaaattcgggacatccaggaatgcctatgggtatggcagatgtagcaacagttttatttaaaaaatttttaaaatttgatgcaaattgtccaggttggaaaaatagagatagatttgtcttaagtgctggacatggatctatgttattgtattcattactttatttaacaggttataatgatattaatattgaagatataaaaaattttaggcagttaggcgcaaaaactgcaggacacccagagtatggggagcttgaaggaattgagacgactacaggacctttaggacaaggtcttgcaaatgctgtagggatggcaatttctgagcgag

SEQ ID NO: 231073 - DNA, 968 bp, Unknown
  Bacterial polypeptide expressing nucleotide sequence isolated from the Sargasso Sea
ggatgtgctcctatgggttattgcattatggcaaaacatacttaatcacaaccctaataacccaaaatggttcaatagagaccgttttgtattatcagctggtcatggctgtatgctgttatattccttgcttcatttgacaggatataaatcagtttccatagaagatattaaagaatttaggcaatggggatcaaaaactcctggacatccagaaacattcgaaactgaaggtgttgaagttacagctggccctcttggagccggaatctcaaatgcagttggtttagcaatagccgaaacacacttagcagctaaatttaataagcctgattgcaatatcgttgatcactatacctacgtaataatgggtgatggctgtaatcaagagggtattgcatcagaagcttgctcattagctggacatcttaagcttggaaaattaattgcactctatgacgacaatcaaataacaattgatgggcgaaccgacgtctctttcactgaagatgtcttaaaaagatacgaagcttatggttggcatgtacaacatgttgaagatgggaatcatgatgttaaaggaatcactgaagctatcgaaaaagcaaaattaattacaaacaagccttcaattataaaaatttctacaaccataggttatggttctccaaataaatcagatactgctgggattcatggagcagctgttggagaagaagaagctgcattaactagagagtttctaaattgggaatatcctccatttgaaatacccgatgaagtatattcgcattttagaaaatcaataaacaaaggtgaaaatttagagaaagattggaattctaaatttgaagaatatcaaaaaaaatatctatctgaaggagccgagttaaaaagaatgttagagggtcaattacctgagaattgggactcagatctcccctcttattcgcctgatgataaaggtt

SEQ ID NO: 231074 - DNA, 871 bp, Unknown
  Bacterial polypeptide expressing nucleotide sequence isolated from the Sargasso Sea
gatgaaattaacagagctactgaaaaagctcagcaggaaactggaaaaccttcaatgatttgttgtaagacaactattggattcggctcaccaaataaatcaggaactgctggagttcatggaagcccgttaggtgatgatgaaattgaaataaccaggaaagagctaaattgggagcatgctccttttgaaatacctgaagatatttatgatgcttggaatgcaaaagatcagggttccaaaaaagaggaggcttggaaaaatcttttgaaaatttataaagaaaagtatccaaaagaatccgatgaattggaaagaagatttaattcagagctgcctcatgactttaatgaaagatttgatgactttttaagagattgtttatcacaagaagatccaatcgcaaccagaaaagcatctcaaatttgtcttgatcatttttgtgctgatttacctgagctaattggtggatctgccgacttaacaggatctaataatactttctctaaacataatactgaactaactatcgataaccctggtggatcacacatttactatggcgtaagagagttcggtatggttactattatgaacggaatgaatctccatggcggtattaggccatatggcggaactttcctagtttttatggattatgcgagaaatgcagtgcgcctatctgcaatgatgaatttaccaaacatatatgtctttactcatgattcaatcggtttgggtgaggatggcccaacacaccaacctattgaacatttagttacactcagatcaacaccaaatttacataactggaggccggctgatcttaaagaaacagcagtagctggaaagaatccatcttatcaaaatc

SEQ ID NO: 231075 - DNA, 817 bp, Unknown
  Bacterial polypeptide expressing nucleotide sequence isolated from the Sargasso Sea
aaatcctctgagtcaattattaactctcttgttaaaaataataacacacttattggtggatcagcagatcttgctggatcaaataataccaaaacaaaaaatcatgaaataataaaaccgggaaattttaacggaaactatattcattatggagtaagagaacatgcgatgtgtggaataatgaatggattagctttacacagtaaattcataccttatggaggaacttttttaattttttcagattactgcaaaccatcaataagattagcagcaatgatgaaacaacaggttatatatgtaatgacacatgactccatagggcttggggaggatggaccaacacaccaacctattgaacaattatctggattaagagcaatacccaaccttaacgtttttagacctgcagatagaatagaaactattgaatgttgggaacatgctttaaagagcactaaaacaccaagtattctatcgttaacaagacaaaaccttaatcctattagaaataaatattcaaatactaacaagtcttcattgggagcatatgaagttttaagaacaaacaaaaaaataaaattgactattttggcaagtggttctgaggtaaacttggctatagaggtcagccataaattagccaaagataggatatactccaaagttatatcggtaccatgtatggagctttttgaatcacaatcaggtaattataaaaataaaattttaaatgaaacaaaattgagaatatcaatcgaagctggatcaagcgactgttggaaaaaatatgtaggtgattttggaatgactttgg

SEQ ID NO: 231076 - DNA, 862 bp, Unknown
  Bacterial polypeptide expressing nucleotide sequence isolated from the Sargasso Sea
aattttttgaataaacaaaacaaaattttagcaaacgcagtacgttttctttcaatagatgctgttcagaaagctaattctgggcatccaggtatgccaatgggaatggctgacgttgtaacgattttattcaaaaattttttaaaatttaatccaaaaaatcctaattggctaaacagagacagatttgttttgtctgctggacatggctcaatgcttttatactctttgctttatttaacgggatacaaaaatatatctttaaaaaatataaaaaattttagacagttaaattctatttgtgcagggcatcctgagtacaaagcaaatagtggcatagaaacaacaacaggtccccttgggcaaggaattgcaaactctgtaggctttgcaatagccgaaaaaattttaaaaaaaaaaataggaaaagatataattaatcataaaacttatgttttagctggagatggttgtctaatggaaggtattagtcacgaagcaatgagccttgcgggacatttaaaattaaataatttggtaatgttgtttgacaataattctatatcaattgatgggcctacaagtttagcagtatctgataatttcaaaaaaagatttgaaagttatggttggaattatttattaatagatggacacaatgaaaaagaaatattttatgctttgaaaaaatctcaaatatcgaaaaaaccaactgtaatttcatgtaaaacaaaaataggttacggctcacctaataaatcaggaaaagcatctgctcatggaagtccgttgggtgaagatgaaataaaattagtaagaaaaaaattaaattggaaacataaaaaattgaaataccaagaaa

SEQ ID NO: 231077 - DNA, 905 bp, Unknown
  Bacterial polypeptide expressing nucleotide sequence isolated from the Sargasso Sea
gccacctaccgcacccagttccccgctgaagcggctgagttcgagcgcatgctgcgcggtgaacttcccgagggttgggacaaggatctgcccacctctggccctgatgagaagggtctggccacccgaaagcactcccagatctgcctgggtgccctcggccccaacctgcccgaactgatcggtggctcggctgacctcacccactccaactacaccgacatcaagggtgaaaccgggtcctaccagcctgaaacccctgagaagcgctacctgcacttcggtgtgcgtgagcacgccatggcggccatcctcaacggcatcgcatatcacgacagcggcctgatcccctacggcggcaccttcctggtattcgccgactacatgcgcggctccatgcgcctgtcggccctgagtgagctgggtgtgatctacgtgctcacccacgactccatcggcgtcggcgaagacggccccacccaccagccgatcgagaccatcccctccctgcgcgccatgcccgggatgctggtgttccgtcctggcgatgccaacgaaaccagcggcgcctacaagctggcgattcaaaaccgcaagcgccccagcgctctctgcctcagccgccagggcatggccaaccaggccaactcctcgattgacaaggtcgccaaaggtggttacgtgctggaggattgtgacggcacccctgagctgatcctgatcggcaccggcaccgagctcgacctctgcgtccaggctgccaagcaactgatggaagccggcaaaaaggtgcgcgtggtgtccatgccctgcgtcgagcttttcgacgagcagagcgacgcctacaaaggagaggtgctccccaacgccgtacgcaagcgcatggtcgttgaagccgctgaatc

SEQ ID NO: 231078 - DNA, 411 bp, Unknown
  Bacterial polypeptide expressing nucleotide sequence isolated from the Sargasso Sea
aatgtttgacgatgtaacaaaatctataagagttctttctgctgctgctgttgaaagagcaaactctggacatcctggtatgccactaggtatggcggatattggagttgttttgtacaaaaactttttaaaagtatcaaataaacatccagactggatcaatcgggatagatttgttttaagtgcaggacacggttcaatgcttctatatagtcttttacactttaatggattcgatatatctctagatgaaataaaaaattttagacaattaggatcaaaaactgcaggacatccagaaaaagattttgagattggaatagatacgactacaggaccactcggtcaaggatttgcaaatggcgtaggtttagcagtggctgagagatatctagcctctgtctttggaga

SEQ ID NO: 231079 - DNA, 940 bp, Unknown
  Bacterial polypeptide expressing nucleotide sequence isolated from the Sargasso Sea
ttgattccgaattacgaaaaaagctgtgtcaataccatccgttttctggcagcggatgcagtagaaaaagcgaaatcaggtcaccccggtgctccgatgggaatggctgatatggcctttgtgctgtggaatcaatttcttcgctatgatcctgatgatcccgactggaagaatcgtgatcgttttgtcctctcggcaggtcatgcttcgatgctgctttattccctgcttcacctggcaggttacaagctgagcatggatgaactgaaaaatttcaggcaatggaacagcctcactccaggacatcccgaatacggcttaacccctggagtggaatgtactaccggtccgctaggctccgggttcagcaacgctgcaggcatggcgctcggagcaaaaatgatgggttcacgcttcaacagtaacgatatcagcctaatcgattccaggatttttgtcctttgcagtgatggagatatgcaggaggggattgcttccgaaacggcttcctgggcagggcatcttggactcgggaatctgattgccctctatgacagtaacgatatcaccattgccggagatgcaggtttggcgatgagcgaggatgttggtaaacgatttgaggcttatgggtggcatgttcagcattgtgatggacacaatcacgatgaaattgcagtttgtcttgaagaatccctgtcggtagcgaccaagcccagtttgattgttgcaaaaaccatcatcggaaaaggagcaccaaccaaagaaggtactgccggatctcacggagccccactcggtccagaagaaatcgaggcggccaaattggcttcgggatggaatgataagccagattttcatgtgcctgatgaagtacgagaagtttttgcagaaagaaaaaaagaactgaaacttcaacatcagcaatgggaaggaaaac

SEQ ID NO: 231080 - DNA, 844 bp, Unknown
  Bacterial polypeptide expressing nucleotide sequence isolated from the Sargasso Sea
tatttgtgcaggtcatccggagtatcatccaaaaactggaattgaaacaaccactgggccacttggacaaggaatagctaatgcggtcggatttgcaatagcagaggaagtgctcaaaaaaaaattaagtaaaaatctaattaatcacaaaacttatgttctagctggcgatggttgcttaatggaaggtattagtcacgaagcaatgagtttagctggtcacttaaaattaaaaaatttggtgatgctattcgataataataatatttcaattgatggtccaacaagcctcgctgtatcggacaattttaaaaaaagatttgaaagttatggatgggattacgtattaattgacggtcataatgaaaatcaaatttacagagctttaaaaagagttcaaaatgcaaaaaaaccaacagtaatttcttgtaaaacaaaaattggatttggttctccaaataagtctggcaaatcctcttcacatggtagtcctttagggctagaagaaattaaattagttagaaaagttcttaaatggaaatataaaccctttgaaattccaaataaattattgagagaatggagagctataggacgcaagggtcaattaggtgaaaaaaaatggaataaatttattaaaaaacaaactaaaaaattaaatctaatcaaaaaaaataattttaaaaatgttttaaattcagaaaagaaacttgcaatcaaagagcctaaaagcttggcaacaagaaagtgttctgagttgactttaaatgcattaactaattcaaataataatctcattggtggttctgcagatttagctggatccaacaacaccaaaacaaaa

SEQ ID NO: 231081 - DNA, 921 bp, Unknown
  Bacterial polypeptide expressing nucleotide sequence isolated from the Sargasso Sea
cgagagggagccagacatcggtattgagacaactaccggtcctctcggtcaaggcatcacgaatgctattggtatggcaatggcagaaaaaatattagctgccgcatttaataaaccagattacgaaatagttaatcaccgtacctgggtttttactggcgatggctgtctaatggaaggcatttctcacgaagcttgttccctggcaggaacatggaatctcggaaagctgatctgtatttatgatgataatggaatttcaattgatggagaaattgacggatggtttactgacgatacagcagcccgctttaagtcttatggttggcaggtaatagataaagttgatgggcatgatgctgacgcgatttcatccgcgatagacgaggcaataaagaatacaaataatcccacactaatttgctgtaaaactcaaattggttttggatcaccaaataaagcggggaccgcaagcagtcatggtgcaccattaggtgaagatgagattgaaagaacaaaagaaaaacttggctggaagcatgaggcatttgagattcctcaggatataagagaaatgtgggacgactcagaaaaaggagaaaagcttgaaaaatcatgggaagacttgtttgctaattattcaaaacattaccctgatctcgcagaggaatttaatagaagaataaacagaaatctaccagaaaattgggaagagatatcaaaaaatgcaattaatgaaatcaatcatcaagccatcgatttagcaacaagacagtcttctcatctgtctctcaataagttgggagattctttaccagagatgataggtggctctgcagatcttaccggatcaaatcttacgaagcatgatgcctcagtcgtgatagatgagactaactcggacggtaactacatatatta

SEQ ID NO: 231082 - DNA, 823 bp, Unknown
  Bacterial polypeptide expressing nucleotide sequence isolated from the Sargasso Sea
ccagtcacgaaagatgaccatgacggaaattatattttttatggtgtaagagaatttggaatgtctgcaatcatgaatgggatggcccttcatgggggattgattccttatgctggaacatttctgacatttagtgattactcgagaaatgcgattcgtatggcagcgatgatggagttaggagtcatacatgttctgacccatgattcgattggacttggagaagatggtccaacgcatcaacccatagaacatgtaccaagcctgagactgattccaggattggatgtatggagaccatgtgacacacttgaaacggcagttgcttggaagatagccacacaaaaaagaaagaccccgtctgcattgattttaactagacagtcattgcctcagtataatcgatcaaaagaaatgacagataacatccaaaaaggaggttatattttaatcggaggcgaagatacacagccagatgcaatcataatcgcaacaggctcagaggtccaatatgcagtcaatgcatccaatgcgcttcaatcagaaggatattcaatcagagtagtatccatgccatgcgttgagatatttgagcaacaatcagatgaatacaaagaatctgtgatcccccatgatcatgagaaaattatggttattgaggcttcaatggcaagtgcctggaaaggatatgcaggacgaaaaggagtcgtgataggcatggaaggctttggtgcctctgcgccagcaccggaattattcaaacactttggtttttctgacgaaaatgcgatcgaaaaactaaaggcaatgattaacagataaa

SEQ ID NO: 231083 - DNA, 846 bp, Unknown
  Bacterial polypeptide expressing nucleotide sequence isolated from the Sargasso Sea
aaaaaaaggattaaagattgaacatttatggaataaaaattttagtaaacataaacaaaaatataataataatacaaaaaataaatttgcaagttcaattttaagacaaaaaaaagaagcgataaagaattcaaaaactttagcgacaagaaaattctctgaacaatttttatcaacaatattaaaagaaaaaaatactttaataggtggatcagcagatttggcaggatcaaataatacaaaaactaaattacataaagttattaattcaaataactttgatggtaattatattcattatggtgtgagggagcatgcaatgagtggtataatgaatggattggctcttcacagtaattttgttccttacggtggcacttttttgatattttcagactattgtaaaccttcaattagattgtctgctatcatgaaacagagagtgatctatgttatgacacatgattctattggtttaggagaggatggaccaacccatcaaccgatagaacaactttctggtttaagatcaattccaaatttaaacgtatttaggccagcagatcaaactgaaactatagaatgctgggatatagctttaaaaaataaaaagacacctagcgtattggctttaaccagacaaaacttaaaacctattagaaataattttacaaaaaaaaataaatgctccatgggagcttatgaagttttgagaactggaaaaaaaattaaattaactattctggcttctggatcagaagttaatcttgctatcgagactagtcataatttggccaaacaaaaaatctattcaaaagtaatttctatgccttgccaagaaatttt

SEQ ID NO: 231084 - DNA, 772 bp, Unknown
  Bacterial polypeptide expressing nucleotide sequence isolated from the Sargasso Sea
cggcgtgcgtgaattcggtatgaccgcgatcgccaacgggatctctctgcacggtggtttcctgccgtacacctccaccttcctgatgttcgtggaatatgcgcgtaacgcggtgcgtatggcggcgctgatgaaacaacgtcaggtgatggtctacacccacgactccatcggcctgggcgaagatggcccgacgcaccagccggtagagcaggtggcgtccctgcgcgtgaccccgaacatgtccacatggcgtccgtgtgaccaggtggaatcggcggtggcgtggaaatacggcgttgagcgtcatgacggcccgaccgcgctgatcctctcccgtcagaacctggcacagcaggatcgtacggcagagcagctggcgaacatcgcccgcggtggctacgtgctgaaagagtgcgccggtcagccggagcttatcttcatcgccaccggttctgaagtcgaactggcggtggccgcgtgggataaactgacggccgaaggggtgaaggcgcgcgtggtctctatgccgtccaccgacgcgttcgacaagcaggacgcggcgtaccgtgaatcggtgttgccgaaagcggtctctgctcgcgtggccgtcgaagccggcatcgccgactactggttcaaatacgtgggcctgaacggcgctatcgttggcatgaccaccttcggtgagtctgcgccggcagagcagctgttcgaagagttcggcttcaccgtcgacaacgtggttgcgaaggcaaaagcgctgctgtag

SEQ ID NO: 231085 - DNA, 939 bp, Unknown
  Bacterial polypeptide expressing nucleotide sequence isolated from the Sargasso Sea
acaactgacgctggagggatttggacctttattgccggaattaattggagggtcggcggatcttgcggggtccaatctaaccttgtggtcgggttcgaagggaatctctcgcgacgaggcggatggcaactatatttattttggagttcgtgaatttgcgatggcggcgttgggcaatgggctggcattgcacggtggattgattccgtacagtgcgacttttctggtgttctctgactacgcgcgcaacgccttgcggatggcggcgcttatgaagattcggcagatattcgttttcacgcacgactccattgggctcggtgaagatgggccaacgcatcagccggtagagcacactgcgagtctgcgtctgattcccggaatgtcgttgtggcgcccgtgtgacgcggtggagacggctgttgcctggcactgcgccattgaacgcaatgatggcccaaccagtcttgcattatcccgacagaacctgccgcatcaggtgcgtgactctgcgcaaattcgcaatatcgcccgaggcggttacacgctaatagattgtgagggggagcccgaagcgattatcatcgccaccggctctgaagtggctcttgcgacagatgcggtcacgcttttgaaggagaagggctgtcgggtgcgtgtggtttctatgcccagcacggacgtattcgactctcaggacgacagttaccgtcagtcagtactgccgagcacagtaaaggctcgggtagccgttgaagctggcgtaacggatggttggctaaagtacgttggatttgaaggcgctgtcgtaggacttgatcgatttggcgagtccgccccggccgacgaagcatttaaatatttttggcttcacagcagagaatgtcgcacagcaggtcgaatcgctgatttagatgagggagtgaaaatgcccctccg

SEQ ID NO: 231086 - DNA, 931 bp, Unknown
  Bacterial polypeptide expressing nucleotide sequence isolated from the Sargasso Sea
agtaatcaaattgctagatttaaagcatcaggttggcatactcaatcagtgatgggacacaactttgaccaaatatcaaaagcgattgaaaatgcaaaaaaaacaaataaaccatcatttattgcttgtaaaactataattggttttggttcaccaaatcttgcaggcactgaaaaaacacacggagcaccacttggggatgatgaagttaaaaaagtaaaagaagaattaaattggaaaaacaacccatttgaagttccaaaagacatacttaatagttggagatcttcagttgatagaggatcaaaaattagaaaggaatgggaagatagatttaataaaagtcctaaaaaaaataaatttattaaaaataattcaaactatttaccccaagtctttgataaaaatttaaaatctcatattcaaaaattaaaattagaaaaacctaaattagctacaagacaggcaagtttagaatttttaaaaattttgtcatctaatgtagataatattgctggtggatcggcggatttaacaggatcaaatttgacaaaaaccccagatatgaattctgtaaaaccaaaaaaatttaaagctaattatattcattatggaattagagaacatatgatgggggctgttatgaatggaatagcacttcataaaggttttgtaacatatggaggaacttttttagtttttagtgattatatgaggagttcaattaggctctcagctctaatgaaaactaaagtaatttatgtgctaactcatgattcaattggtctgggtgaagatggtccaactcatcaaccgatagaacatttagcaatgctgagagcaactcctaacctaaatgtatttcgtcctgctgatgcagttgaaacagcagaagcatgggaacttgcacttaaatatgatggaccatcta

SEQ ID NO: 231087 - DNA, 613 bp, Unknown
  Bacterial polypeptide expressing nucleotide sequence isolated from the Sargasso Sea
tttgagtaaacaatataaagaattagctgattgcattagatttttatctatagatgctgtacaaaaagctaattctggccatcctgggatgccgatgggaatggctgacgtcgcgactgttctctataaaaattttttaaacttcaatccaaaacaaccaaattggataaatagagatagatttgtactttcagcaggacatgggtctatgttactctactctattctttatcttactggttacaaaagtgtttcgataaatgacataaaaaattttagacaattagactcaatttgtgcaggtcatcctgagtatcatgcaaatacaggaatagagactaccaccggccctttaggacaaggagtatcaaatgcagttggctttgccatttctgaggaaattttgaaaaagaaatttggaaagagtaaaattaatcacaaaacttatgtcttagctggtgatgggtgtttaatggaagggataagtcatgaggccttaagtctagcgggacatttaaaacttaaaaatcttattcttctttttgataataattcaatatctattgatggtcctactagtcttgcggtttcagataatcatgaaaaaagatta

SEQ ID NO: 231088 - DNA, 708 bp, Unknown
  Bacterial polypeptide expressing nucleotide sequence isolated from the Sargasso Sea
ggaagtggaaggctggtttaccgacaatactccgcagcgttttgagtcctacggctggcaggtaattccggacgttgacggccacgatgccgacgccatccgcgcggctgttgaacaggcccgggccaacaccgagcaaccgacactgatctgctgcaagaccatcatcggctttggttcccccaacaagcagggtaaggaagattgccacggtgccccgctgggtgacgatgaaatcgccctgacccgtgaagccctgggctggcagcacggcccgttcgaggttccgtctgacatctacgccgcctgggatgccaaagaaaaaggcgccgccgccgagaaagcgtgggaagagaaattcgccgcctacgaaaaggccgagccggaactggcggccgagttcaaacgccgcatggcgggtgagctgccggcagacttctccgaaaaggcccaggcctacatccaggagtgccaggacaagggtgacaccatcgcctcccgtaaggcatcccagaacaccctgaacgcctacggcccgctgctgccggagctgatgggtggctctgctgacctggccggttccaacctgaccatctggtctggctgtaaaggtgtgagcaaggaagacgcttccggtaactacatttattacggcgttcgtgagttcggtatggctgcgatcatgaacggcatcgccctgcacggcgg

SEQ ID NO: 231089 - DNA, 445 bp, Unknown
  Bacterial polypeptide expressing nucleotide sequence isolated from the Sargasso Sea
ttgaataaactacataatgatttagcaaattgcattagatttttgtcaatagatgcagtccaaaaagctaattctggtcaccctggtatgcctatgggtatggcagatgttgcaaccgtgctttttaggagttttctaagatttaatcccaaaaatccagattggatgaatagagatagattcgttttatctgcagggcatggatcaatgcttctttactctttgctatttttaactggatataaaagtatttctctaaatagcataaaaaattttaggcaattaaactcaatatgtgccggtcatcctgagtaccatccaaattcaggtatagaaacaacaaccggtccactcggacaaggaatagcgaatgctgtaggtttcgcaatctcagaagaaattttaaaaaaaaaattaggaaataatttagttaatcacaaaactt

SEQ ID NO: 231090 - DNA, 829 bp, Unknown
  Bacterial polypeptide expressing nucleotide sequence isolated from the Sargasso Sea
cttgtctaacactatacgtgttctttcaatggatgctgtgcaaaaagctaattctggacacccgggtatgccaatgggtatggctgatgtatctacaatacttttcaaatattttctaaaatttaatcctaaaaatcctagctggataaacagagatagattcgttttatctgctggtcacggatccatgttgctttactctttgctttatttaacgggttataaaagtgttaaattaaatgatattaagaattttagacaattaaactctatttgtgcaggtcatcctgagtttgttgaaaactcaggaattgaaacaactacaggtcctttaggtcaaggaatttcaaacgcagttggctttgccttagcagaagaaattttaaaaaaaaaaattggtaaagacattattaatcataaaacttatgtgattgcaggagacggttgtttaatggaaggcataagtcacgaagccatgagtttagcaggacatttaaaacttaaaaatttaatcatgctatttgataataattcaatatctattgacgggccaacaagtttagcggtttcagataattttaagaaaagatttgaaagttatggctggaattacataaaaataaatggtcataatgaaaatgaaatatttaaagccctcaaaaaagttcaaaatgcaaaaaaaccctcagttatttcatgtaaaaccaaaattggttatggatcacctaataaagctgaaaaagcttcatcacatggaagtccattaggtgttgaggagattaaattagtgcgtaaagaattgggctggaattataaaccatttcaagtt

SEQ ID NO: 231091 - DNA, 760 bp, Unknown
  Bacterial polypeptide expressing nucleotide sequence isolated from the Sargasso Sea
gtacgcgaatttggtatggcgtccataatgaacggcatcacagcccacggtggtttccgctgttatggcgccactttcctgatgtttatggaatacgcccgtaatgcagtgcggatgtccgctttaatgaaactgccgactatttatgtctttacccatgactccataggtcagggtgaagacggcccaactcaccaaccgatagaacagctgaccaacttacgcactacgcccaatctggtgacctggcggcctgctgatttaactgaaaccgcagtagcctggaaatcggctttaaccagcacaagttcgccttcagctttagtctttagccgacaaaatctgcgtcaattccagcgcaacccagagcaaatcagcctgatcagcaaaggcggttatattttaaaagactgcggcggcgcgccagatatagtgctgatagccactggctctgaactgcaactggcctgtgatactgccgaacagctgagcgcagcaggtaaaaaagtcaatgtggtgtctatgccaagcactactttgtttgaccagcaatctgagttttaccgtgattcggtgctacctgatcaggcgaaacttgttgcgatagaagcagctcacccggatttctggtacaaatacgtcggtaaaaaaggcctgattattggtatcagcagttttggtgaatcagcacctggccctgccttgctggaatattttggctttaacgcagagatcatagcagctaagattctggcctgac

SEQ ID NO: 231092 - DNA, 886 bp, Unknown
  Bacterial polypeptide expressing nucleotide sequence isolated from the Sargasso Sea
attgttaaaaacaataatatactcattgggtggatcagcagatcttgctggatcaaataacaccaaaactaaaaatcataaaataattagaccggggaattttaacggaaattatattcattatggagtaagagaacatgccatgtgtggaataatgaatggattagctttgcacagtaaatttataccctatggaggaacttttttaattttttcagattactgcaaaccatcaataagattagcagcaatgatgaaacaacaggttatatatgtaatgacacatgactctataggacttggggaggatggaccaacacaccaacctattgaacagttatctggattaagatcaataccaaaccttaatgtttttagacctgcagatagattagaaactatagaatgttgggaacatgccttaaagagttctaaaacaccaagcattctatcgttaaccagacaaaaccttaatcccgtcagaaataaatattctaatattaacaagtgctcattaggagcatatgaaattttaaggacaaacaaaaatataaaattgactattttatccagtggttctgaggtaaacttagctatagagataagtcataaattagccaaagataagatatactcaaaagttatatcagtaccatgtatggagctttttaactcacaaccagataattataaaaataaaattttaaatgaaacaaaaatgaaaatatcaattgaagctggatcaagtgactgttggaaaaaatacctaggtaattttggaatgacttttggaattgatgtatttggaaaaagtgctccctataaagacatttataaatattttggcctaacatcttcaaacattgtaagggaattaaagaaagaa

SEQ ID NO: 231093 - DNA, 899 bp, Unknown
  Bacterial polypeptide expressing nucleotide sequence isolated from the Sargasso Sea
aatgacggttgcccatgcggacatggccaatgccatccgtttcctttccgccgatgctgttcaacaagctaattccggtcatccgggcatgcccatgggtatggccgatgtagctacggtgctttttaccaagtacttgaagttcgatgcttccgacccgaactggcctgatagggaccgctttgtcctatctgctggacatggctcgatgttgatttactccctactatatttgaccggatatgaagccatgactgttgatcagctgcggaattttcggcagctaggctctatcacagcggggcatcctgaatatggccacgcgccaggggtggagacgaccaccggcccgctcggtcaggggctaaccaccgctgtcggaatggcactcgccgagcgcatgatgaacgcgcgctttggtgacgacgcggtcgatcaccacacctacgtgatcgcgggcgacggttgcctcatggaagggattagccatgaggccgtttctttggccggggcgcttaaacttgccaagctgatcgttttgtttgacgataacgacatctgcatcgacggaccaaccaatatggcggtgatcgacgaccagccggcgcgttttgccgcatctggctggcatgtgcagtccatcgatggccacgacaaggatgccgttgctaccgccattgaggccgcgcaggccgatgatcggccttctatgatcgcttgcaagactgtgattgggagaggcgcacccaataaggaaggctctgcgtcaactcacggtgcgcctctgggggacgaagagatcacacttgcccgcaaagccatgggctggccgcatttgccatttgaagtaccccaagacgtgctgtccgcctggcgtcaagctggtgcgcgtggtggtg

SEQ ID NO: 231094 - DNA, 870 bp, Unknown
  Bacterial polypeptide expressing nucleotide sequence isolated from the Sargasso Sea
ttaggagaagatgaaatcaaattaacaagaagaaagctaaagtgggatcataaacccttcataatcccaaaaaggatattggatgagtggagaacttcaggacaaaggtctatagttgaatataaaaaatggaatagtaatcttaataaattagttttaaataaaaaaaatgaatttcttagaaggttaaatggaaaactacctaaagaattaaataaaattttctctgactttaaaaaagaatgtatcaacaatccttctgttattgcaactcgacaatcttctgaacttgtaattaatagaatatctccaaaactacctgagcttataggtggctcggcagacctaacaggatcaaataatactagatcaaaaaaaatgaaaacgctaaatgctgcaaactataaaggtgaatatatctattatggaatcagagaacatggtatggccgctgtcatgaatggacttgcacttcacaaaggaattattccttttggtggaacatttttaatattcgtggattattgtaagccttcattaagacttgccgcattaatgaagcaaagagcaatttacattctgacacatgactcaattggtttaggagaggatggaccaactcatcagcctattgaacaattagcatccttaagagcaacaccaaatgtaaaagtgttaaggccatctgatactgtagaaacaattgaagcgtggcaaatagctcttaacaataaagaagggcctaccgttatagctctaactagacaaaaacttgtccctgctaggaaaaaatatactagcaaaaacctttcagagtttggagcctacgaattaaaaaataattctaaaaaaccgcaggtttctatatat

SEQ ID NO: 231095 - DNA, 873 bp, Unknown
  Bacterial polypeptide expressing nucleotide sequence isolated from the Sargasso Sea
gaaagtttttcaaatttgggaaaattatgaaaaagatcaatttacgattgctgttcttaagggtttggttatggatgctacccgtaaggcaaatagtggtcatccaggagggccattgtcatgtgccgatttcgcgtatatactataccatgattatctaaaatttgatccaagaaatccagactggtttgatagagatagatttatcttatctggtggtcatatgtctatgatacaatattcaattttatcactgataggctggttgaatattgatgatatcaaaaactttagacaattaaatagtaaaacaccaggacaccccgaagtcgaaataccaggcgtggaatgcacaacaggtccccttgggcaagggtttgctatgggagctggtatggcacatgcagaagcttttttaagaaatctttttggaaaaaccaatcaaaaagcatttaatttagttgatcactacacttatgttcttgctagcgatggtgatctgcaagaaccagtctctttaggtacagcatctttagcaggacatcttggtttatcaaggctaattgttttttacgattcgaatgaggcgcaaatatcaggtaatactaatcgttcagattccacagactataaaatgatttttgaaggatttaaatggcatgtccaggagattgatggtcataatcatagtgaaattagagaagctattgaaaaagcaaaaaaaagtgaaaaacctagtgtgataattggaaaaactataatggctaaaggcacagctaatatggaaggagatcacaatacacatggcgctccgttgtcagaagaagagattgctgaaagtaacataaacttgattacaatgaaaatttatgt

SEQ ID NO: 231096 - DNA, 709 bp, Unknown
  Bacterial polypeptide expressing nucleotide sequence isolated from the Sargasso Sea
tttgaataaactacataatgatttagcaaattgcatcagatttttatcaatagatgcggttcaaaaagctaattctggacacccaggtatgcctatgggtatggcggatgttgtaacggtactttttaagaattttttaagatttaatcctaaaaatccaaattggatgaatagagatagattcgttttatctgcaggtcatggatcaatgcttttatactctttactatttttaactggatataagagtatttcattaaatagtataaaaaatttcagacagctaaactcaatatgtgccggtcatcctgagtatcatcctaattcaggaatagaaacaacaacaggacctcttggccaaggaatagcgaactcagtgggatttgcaattgcagaggaaattttaaaaaaaaaattaggaaatgatttaattaatcacaaaacttatgttttggctggagatggttgtttaatggaagggataagccatgaggcaatgagtttagcgggacatttgaagcttaaaaatttagtaatgctttttgataacaattcaatttcaattgacggtccaaccgatcttgctgtttcagacaattttaaaaaaagatttgagggttatggttggaattatattttaataaatggacatgatgaaaaagaaatatttaaagcattaaaaaatgtcaaaaagcaaaaaaaccaactg

SEQ ID NO: 231097 - DNA, 836 bp, Unknown
  Bacterial polypeptide expressing nucleotide sequence isolated from the Sargasso Sea
aataaggtttttgtctattgatgctgtccagaaagctaattctggtcatcctggtatgcctatgggtatggctgatgttgtcacggttcttttcaaaaactttttaaaatttaacccaaaagatcctgattggttaaatagagataggtttgtgttatctgctggtcatggttcaatgcttctatattctttattatacttaactgggtacaaaagtattaaactagatgacataaaaaactttaggcaacttaattctatatgtgcaggacatcctgagtatcacccaaaatctggaattgaaactaccacaggacctttgggtcaaggaatatcaaatgctgttggttttgctattgcagaggaaatacaaaaaaagaaaaatggaaaaaatatatttaaccataaaacctatgtgctggctggtgatgggtgtttaatggaaggaattagtcatgaggctttaagtcttgctggacacttaaaattaaaaaatcttattttactttacgataataattccatttctatagatggacctaccagtttggctatatcagataaccataaaaaaaggtttgatagttatggatggaatttttttgaaattgacggccacgatgaaaaacaaatttttaaagcattaaaaaaagctcaaaattctaaagttcctactgctatatcatgtaaaactattattggatatggttctccaaataaatcaggaaaagcatctgttcatggtagtcctttaggcaaggaggaagttgctttggtgagaaaaaaatttaaatggaattataaaccttttgaaattccaaaaaaatatttttaaa

SEQ ID NO: 231098 - DNA, 784 bp, Unknown
  Bacterial polypeptide expressing nucleotide sequence isolated from the Sargasso Sea
tcctgattggataaatagagatagatttgttttatctgcaggccacgggtctatgcttttatattctttactttatttaaccggttataaaagtattactttaaacgatattaagaattttagacaattaaattctatatgtgctggtcatcctgaatatcatccaaattctggaatagaaacaactacaggtcctcttggacaaggaatagcaaacgcagttggttttgctattgcagaagaaatattaaaaaaaaaactaggtaaaaaaataattaatcacaaaacttatgtcttagcaggagatggttgtttaatggaaggtataagccatgaagctttgagcttagccggtcatttaaaactaaaaaatttaattttattgtttgacaataattcaatatcgatagacgggcctactaatctaactgtatctgataactttaaaaaaagatttaatagttatggatggaattatattgaaatagatggtcataatgaaaaacaaatttttaatgctttaaaaaaggcacaaacatcaaaaattccttcagcaatttcatgcaaaacaattattggttatggttctccaaataaatctggaacggcctctgttcatgggagcccattaggaaaagatgagattgctttagtaagaaaaaaattaaaatggaattataaaccttttgaaatacccaaaaaaatactggatgaatggagaaagattggaaaacaagcttgcaaaagatttaagggtatgaaaattaaaaaaaataaaataatt

SEQ ID NO: 231099 - DNA, 826 bp, Unknown
  Bacterial polypeptide expressing nucleotide sequence isolated from the Sargasso Sea
ttacgatttaatcctaaggatcctagttggtttaatagagataggttcgttctttctgctggtcatgggtctatgcttctttactcacttttatatttaactggttacaaaagtgtttccatagatgacattaaaaactttagaaaacttgacagtatttgtgccgggcatccagaatatcatttaaattcaggtatagaaaccacaactggaccattaggacaaggtatatctaatgctgtaggttttgcgctcgcagaagaaatattaaaaaaaaagttaggaaaaaaaaagatagatcataaaacttatgtcttggcaggagatggatgtcttatggaaggaataagccatgaagctttaagttttgcgggtcatataaaattaaaaaatttgatactgctttttgataataattctatatcgattgatggccctactaatcttgccgtatccgataataccaaaaaaagatttgagagttatggttggagctatttagaaatagacggtcataatgataaacaaatttttaccgctttaaaaaaagctcaaaattcgaaaaaaccatttgctatttcttgtaagactacaattggttatggctcaccaaataaaagtgggaaagcatcatcgcatggaagcccgctaggtaccgatgaggtaaaactagtaagaaaaaaattaaaatggaattatgagccttttaagatccctgaaaaaattttaagtgagtggagaaaaataggggaaagcgcctcttcaaaagcagaaaaaaataaatcatacgaacctgaattcaatatctttaacgatgaagattaca

SEQ ID NO: 231100 - DNA, 424 bp, Unknown
  Bacterial polypeptide expressing nucleotide sequence isolated from the Sargasso Sea
atggtcgctgcgcccgcgtctctcgacacgctctgcatcaacagcatccggatgctggccgtcgatgccatcaacaagtccaagagcggccacccaggcctgccgatgggctgcgcacccatgggttacgcgctgtgggacaagttcctgaagcacaaccccaagaaccccaagtggttcaaccgcgaccgctttgtgctgtcggctggtcacggctgcatgctgctgtacgcgctactgcacctcaccggctacgactcggtgtcgatcgacgacatcaagcagttccgccagtggggctccaagacgcccggtcaccccgaaacgtttgaaacccctggtgttgaagtgaccaccggccccctgggcgctggcatctccaacgccgtgggtctggcgatcgctgaatcccacctggccgcca

SEQ ID NO: 231101 - DNA, 976 bp, Unknown
  Bacterial polypeptide expressing nucleotide sequence isolated from the Sargasso Sea
gcttcatcgcatggaagtccattaggtgaagaggaaataaaacttgtaagaaaaaaattaaaatggaaatatgagcctttcaaaattccagctgagttgttaagtgaatggagaaaaataggaaaaaaggcttcacaaaaagctcagaaaaataaaataaacttttcaaatctcaaaaatttagattcgtataaaaaattagttgtaaaagaaaaaattaaatattctaaaaatctaaaacctattgctacaagaaaatcatctgagatatttctaaacattatggcaaaatttcctaacttaattggtggctcagctgatttagctggatcaaacaatactaaaacaaaagatcataaaataatcaaaccaggtaatttttcaggaaattatattcattatggagttagagagcatgcgatgtgtggaataatgaatggtatagccttacacagtgaattaattccttatggtggaacctttctaatatttagtgactattgtaaaccatctatcagactagcagcaatgatgaaacaacaagtcatatatgtttttactcatgactctattggcttgggtgaggatggcccaactcatcagccaatagaacaattaacaagtttaagatctattccgaatttaaatgtttttagaccttcggataccattgaaacttttgagtgttgggaattagctcttgaaagtaaaaatactcccagtgtaatttcgctaaccagacaaagtgtcaatcccattagacttgaaaattttctcaaaaataaatcatctttgggtgcttatgaagttttgaggactggggataatataagtgtaacaattttagcaactggatctgaaacaggtttagcaaatgatgtgggtcataaattagccacagatggtatttattccaaaatcatatcaatgccttgtcaaaaaatatttgatcatcaaagtgaagaatacaaaaaaa

SEQ ID NO: 231102 - DNA, 865 bp, Unknown
  Bacterial polypeptide expressing nucleotide sequence isolated from the Sargasso Sea
aataattggatttgggtcaccaaataagtcgggcaaagcatcttctcatggcgctcctcttggtgatgatgaaattaaattagttagaaaaaaacttaattggaaacacgatcctttccaagtaccagttgaattattaaattcttggagagaaattggtaataggggcgagaaaatagaagatgagtggaatagcgccttaaaaaagaaaaataccaagattcaagatgaatataaacggttattaaaaggagatcttcccatatctttggataaaatattcggagacgaaaagctaaaatattttcaatcaaagcctaaaatggcaacgagacaatgctcatcttcggttattaatagtatatcaaatgatttaccagaacttattgggggatctgcagatcttagtggttctaataatacaaaaactgataaatctaaagttattacatctaaaaattttaacggaaattatattcattatggtgttagagaacacgcaatggcaggagttatgaatggacttgctttatacggaggtattataccttttggtggcacttttttgattttttcagattatcttaagccttcccttagattgtcagcaataatgaatttaagagtgatttatattttttcacatgactctattggtcttggtgaagatggcccaactcatcaacccattgagcagttagaacacttgagagcaataccaaatttaaatgtttttagacctgcagatataaatgaaactcttgaatgttgggaaattgctttgaaaagcaaaaataatccaagtgcaattgttttatctagacaaaaactaccttacgtaagtgagcacaagtcaggagaaaat

SEQ ID NO: 231103 - DNA, 822 bp, Unknown
  Bacterial polypeptide expressing nucleotide sequence isolated from the Sargasso Sea
tgaaaatatttctacaagagattcatcaggaatagttttaaacaagttaagcgaagattcaagtttatttattggtggttctgccgatttagctggatcaacaaaaacatacataaactcttcaacttctattaattcaagtgattattctggtgttaatatgcattatggagtcagagaacatgcaatgggtggcataagcaatggccttgcattgtcagggtttattccatttgcgggtactttcctaattttttctgactatatgaggaactcaattaggctatctgcattgagtgagctccaagttttatatattttaactcacgactcaattggattaggcgaagatggaccaactcatcagcctatttctcaattaatgtctctaagattgataccaaatttattagtatttaggcctgcagattactttgaaacaattaagtgctttgaggaatccttaaagaatactaacaagccttcggtatttgcgttaactagacaaggtgttcctgccctaaccaataatgctacctccgaatctaataaaggaggttacgtattatcaggaaatttagaagaaactcaagacattatccttataggaactggatctgaggttcagttatgcatagaagctcaaaaagagttaaataaaataaatatcacctctagggttgtttctatgccttgctgggaattatttgaaatgcaatcagatgaatataaaaacaaagtacttcctactgggatgaaaaaaagagtctcagttgaagccggagcaaccttgggctggcaaaaatatattggcgatcatgg

SEQ ID NO: 231104 - DNA, 517 bp, Unknown
  Bacterial polypeptide expressing nucleotide sequence isolated from the Sargasso Sea
aatggctacaaaaaacactgatttggctaatattctaagagtattggcaatggatgcggtagaggaagcgaaatgtggtcatccaggaatgcctatgggcatggctgatatagctgaagttctttggagaaatcacctaattcataaccccaataaccctaactggtctaatagagacaggtttgtattatctaatggtcatgggtccatgctcatatacgctttactgcatttatctggatacgaccttaatttagatgagataaagaactttagaaaattaggctctaaaacacccggtcatcctgaatatggaattacacctggtgttgaaaccactactggacctttgggtcagggtatttctaatgctgtaggaatggctatcgctgaaaaggttcttgcagataaatttaatacctcaaatcataatatcgtagatcacatgacctatgtatttacaggtgacggctgcttaatggaagggatatctcatgaagcttgttccttagctggc

SEQ ID NO: 231105 - DNA, 901 bp, Unknown
  Bacterial polypeptide expressing nucleotide sequence isolated from the Sargasso Sea
gttaaacagagatagatttgttttatctgcagggcatggctcaatgcttttatattctcttctttatttaactggatacaaaagtgtatctttaaaaaatattaaacaatttagacaattaaattctatatgcgcaggacatccggaatataagtcaaattcaggtatagaaactacaactggaccccttggtcaaggaatatctaatgccgttggttttgcaatcgctgaaaaagttttaaaagaaaagataggtaaagatttaattaatcataaaacttatgttttggctggagatggctgcctaatggaaggcataagtcatgaagcgatgagtcttgctggtcatttaaaattaaataatttggttatgttatttgataacaattctatatcaattgatggaccaacaagtttggctgtatcagataactttaaaaaaagatttgaaagttatggctgggaatattttctaatagacgggcataatgaaaaagatatttttaatgctttgaaaaaggcacaaatgtcaaaaaagccaactgtaatttcttgcaaaacaaaaataggttatggttctcctaataaatcaggaaaagcatccgctcatgggagtccattaggtgaagacgaaatccaattagtaagaaaaaaattaaaatggaaatataaaaagtttgaaataccaaataatattttaaatgaatggagaaaaattggaaataaaggtattaaaattgaaacaagatggaatagaatttataaaagaaaaaaaaataaaatagataaaatattaaaaaacaactttaacaaatcaattaaaactgaaaaaatcaaggctacaaaagagagaaatagtttagcaactagaaaatcatcagaattaactttaagtgctttg

SEQ ID NO: 231106 - DNA, 871 bp, Unknown
  Bacterial polypeptide expressing nucleotide sequence isolated from the Sargasso Sea
tgaggtaaaattagttagaaaaaaattaaaatggaaatttaaaccttttcaaattccaaaaaatttattagctgagtggagaaaaataggagagaaagctaataaaaattcaaaaaaaaaaaatattaaagtttataaagtaattaatgaaaatagaacttttaatagatttaataattcacttaatagagttaaacatgaatatttaaaaaatttaaaacctattgctacaagaaaaacttcggaaatgtttttagatgtagtttcaaagttgcctaatctaataggtggttcagctgacttagcgggttcaaataatacaaaaactaaaaatcacgaaattattaaaccgggaaatttttttggtaactatatacactatggtgttagagagcatgctatgtgtggcataatgaatggaatagcattacatagtaatttaattccatatggtggaacatttttaatatttagtgattattgtaaaccatcaattaggttagcggcaatgatgaaacaaagagtaatttatatttttacacacgactccataggtctaggagaagatggacctacccatcaaccaatagagcaattaactagccttagatcgattccaaacctaaatgtattcaggcctgcagatttattagagacttttgaatgttggacactagcaattcaaaataagaatacacctagtgtaatagctttaacgagacaaggagttgctcctgtaagatttaagaattctaatattaaccattctgcaaaaggtgggtatgaaattttaaggacaaaaaagaaaattgatttaactattttagcgtctggatccgaaactagtttggcatgtgatattagtcataaa

SEQ ID NO: 231107 - DNA, 903 bp, Unknown
  Bacterial polypeptide expressing nucleotide sequence isolated from the Sargasso Sea
tttgagtcttgatgcagtcaataatgcgaattctggacatccaggtgcgcctatggggatggctgatatagctacaatactgtggagagaatttctaaaacataacccgaacaaccctaactggtttaacagagataggtttgttttatctaatggacacggatcaatgcttttgtattctcttttacatttgactgggtataagttgtccattgatgatattaaaaattttcgtcaattggattcgatcacacccggccatccagagtgcgatattactgaaggtgttgagacaaccactggcccactaggtcagggactcgcgaatgctgttggaatggcgattgcagagaagagtctctctgcagaatataacaagaaaggtcatgagatagttgaccatcatacatatgtttttgctggtgatggatgtttaatggagggtatttcccatgaggcctgttcattagctgggacattgaaattaaataaattaataatgttttatgatatgaacaagatatcaattgatggggatgttaatgggtggtttacagaaaatgtgccatcaagattcaaaagttatggttggaatgtgataaaaggtattaacggacatgattttgtcagtatccgtaaggcaataaaacaagctaaactagagaaaaatagacctacaataatctgctgtcgcactgtaataggttacggttctcccaagtttcaaggaacaagccaagctcacggcgcaccactcggacatgatgaagctgaagtgattagaaaaaaattggagtggaaatataagccatttgaaataccgaaggatatttatatcaaatggaatgctaaagctaaggggaagaggtatgaagatgcatggacattaaaagtaaataaata

SEQ ID NO: 231108 - DNA, 802 bp, Unknown
  Bacterial polypeptide expressing nucleotide sequence isolated from the Sargasso Sea
aatgtcaaaaaatttagatcttttaactataaataccttaagatttttggctgttgatgcagtacaatctgcaaactcaggtcatccgggtcttcctctcggagcagcaccaatggcatatgtaatttggaaaaaacatttgaaacataatccaaaaaatccaaattggtatgatagagatagatttgtattgtccgctggacatggatcagcattattgtatgctctaatacatttgtctggttatgatttgtctttgaatgaattaagaaattttagacaatgggatagtaaaactcctggtcatccggaatatggtcatacacctggagtagaaactactactggacctctaggccaaggttttgcgaatggagtaggtatggcaatggctgaaagatttttatcaaaaaaatataataaacctgattttaatatcattgatcactatgtttatggaatagtgtctgatggagatttaatggaaggaattgcatctgaagctgcctcaatagcaggacatttaaatttaggcaaattgatttatctttatgatgacaataatattactattgatggttctactgatttagcttttacagaagatgtctctaagagatttgaatcatacaattggcatgttcaaagtgttgatgatgggaacaatattgatttaatagatgaggctataaaaaatgcaaaaagagatgataggccatcattaataaaagttaaaacaattattggttttggaagtccaaatgaaggaacttcatcagttcatggttctccgcttggtgag

SEQ ID NO: 231109 - DNA, 883 bp, Unknown
  Bacterial polypeptide expressing nucleotide sequence isolated from the Sargasso Sea
gtttctttcactgaagatgtcctaaaaagatacgaagcttatggatggcatgtacaacatgttaaagatggaaatcatgatgttaaaggaatcactgaagctatcgaaagagcaaaatcaattacagacaagccttcaattataaaaatttctacaattataggttatggctcgccaaataaatcagatactgctggaattcatggagcagctgttggagaagaagaagctacattaaccagagagtttctaaattgggaatatcctccatttgaaataccacaagaagtatatgcccattttagaaaatcaataaacaaaggagaaaatttagagaaagagtgggattctaaatttgaagaatatcaaaaaaaatatccctctgaaggagccgagttaaacagaatgttaaaaggccaattacctgaagattgggactcagatctcccctcctatacgcctgatgataaaggtttagccaccagaaagcattcacaaatatgtttaggtgctttaggacctaacctacctgaattaattggtggatctgcagatttaactcactctaattacacagatatcaagggagaaactggatcattccagcctcatagtcctgaaaaaagatatttacattttggtgtgcgtgagcatgctatggcagctgtactcaatggtattgcctatcacaatagtggtcttattccttatggtggaactttccttgttttcgctgattatatgaggggttcaatgaggctttcagcactaagcgaattaggagtgatctatgtattaacccatgattcaattggagtcggagaagacggcccaacacatcaacctattgaaactatcccttctcttcgtgccatgcctaaca

SEQ ID NO: 231110 - DNA, 729 bp, Unknown
  Bacterial polypeptide expressing nucleotide sequence isolated from the Sargasso Sea
agcagcttgaggagaaatggagaaagaaattcacacaatataaaaagttatatccaaaacttcataaagagttgagtaggaggattcagaataaattaccatcgggcatagatcgtacgttaactaagatgataaaaacaaataataagtctatggcgactagaaagtcttcacaagtaacattagaaaatattggtccgctcttaccagagttaattggtggttctgcagatttgaaagaatcaaatttagttttttggcaagaatctaaagctatatcaaaaaaagattttaccggaaaatatattcattatggtgtaagggaatttggaatgtctgccataagtaatggtatatctttacatggcggtttacgaccgtatgcaagtacatttctaatattctcagagtatgcaaaaaatgcaataagaatgtccgctataatgcatcaacctgtaatatatgtatttactcatgattccataggtctaggcgaagatggtccaacacatcaagcaatagaacagatggcaagtttgagattaatcccgggtatgagtgtttggaggccagcagacttatccgaaactgcagttgcttggaaatctggtttaattaaagataatggacctacctctttaattttgtctagacaaacacttcctgaaattaagagaagtgtacgacaattccgtgatatttcaaaaggtgggatatgttatttataat

SEQ ID NO: 231111 - DNA, 889 bp, Unknown
  Bacterial polypeptide expressing nucleotide sequence isolated from the Sargasso Sea
tataatctttctaaggatgctattaatgatacaattgaaaaagtaaaagcgaattatttaaaaactttggagcctctggcgaccagaaaatgttctgaaaaatttttagaaattgtttcaaaacttccaagcttgataggtggctcagcagacttagctggttctaacaatacaaaaactaaaaatcataaaattataaaaccaaacgatttttctggaaattatattcattatggagtccgtgagcatgcgatgtgtggaataatgaatggtattgcacttcacagtggattaataccatatggaggaacttttttaatttttagtgattattgtaaaccatcaatcagattagctgcgatgatgaagcaaaaagttatttatgtttttactcacgattcaattggcttaggagaagatggtcccactcatcaaccaattgaacaattaactagtttaagatcaattccaaatttaaacgtttttagaccagcagatttaattgaaacatttgagtgttggcaaaaagctcttgaaagtgaaaattctccaagtgttattgctctgactaggcaagcaatagatccaataagaattaaagatacttctgagaataagtcatcgtttggagcatatgaagttttaagatctggtaatgatataaaagcaacaataatagcgtctggatccgaaacaagtttagcctgtgatatttgtcataaattagccacagagaatatctattcaaaagtaatatcaatgccttgtcaggaattatttgatcaacaaagtgaaggctacaaaaacaaaatattaaatgaaactgaatttaatatttcaatagaggcttctgaaacccattactggaaaaagtacacaggagcaaaag

SEQ ID NO: 231112 - DNA, 893 bp, Unknown
  Bacterial polypeptide expressing nucleotide sequence isolated from the Sargasso Sea
ttctttaaatgatatcaaaaattttagacaattgttttccatatgcgctggacatcctgaatatcatccaaatactggtattgaaaccactacaggtccattaggacaaggaatctcaaatgcagttggatttgcaatatcagaagaaattttaaaaaaacaactagggaaaaaaaagatcaatcataagacttatgttctggctggagacggatgcttaatggaaggtattagtcacgagtcattgagcttagctggacatctaaaattaaagaatcttattttgttatttgataataattctatatcaatcgatggtcctactagcttagctgtttcagatgatcacgaaaaaagatttaagagctacggatgggacttcttaagaattaatggtcatgattttaaagaaatatctaaagctttaaaaaaagcacagaaatcaaaaaaacctattgcaatttcatgtaaaacaacaatcggttatggatctccaaacaaaggtggtaaggcttcatctcatggaagtccattaggtgatgaggaaataaaactggttagaaaaaaactaaaatggaaatatgagccattcaagattccgactgaattattaaatgaatggagaaaaattggagaaaaagcctcacaaaaagctcagaaaaataatgtaaacttttcaaattttaaaagtttaaattcattcaaaaaattaattgaaaaagtaaaagttgagtatactaaaaatactaaaccaatagctacaaggaaatcatctgaaatatttttgagcattatagcaaaatttccttacttaattggtggttcagctgatttagctggatcaaataatactaaaactaaagatcataaaataattaaaccaggggattttt

SEQ ID NO: 231113 - DNA, 821 bp, Unknown
  Bacterial polypeptide expressing nucleotide sequence isolated from the Sargasso Sea
tattaccgacctgcaagccaacccagccaaaatagccacccgtaaagcttcgcaaaataccctgaacgcctatgggccgatactgccagaactgctcggcggctcggcggatctggcacccagcaacctgaccatctggaaaggctcctcctctcttaaagaggatcatgcaggaaactacatccactacggcgtgcgggaatttggcatgaccgccattgccaatggtatcgcgcaccacgggggcttcgtaccttacactgccacgttcctgatgtttgttgaatatgctcgtaatgccgcgcgcatggcggcgctgatgaaagcccgacaaatcatggtttatacccacgactcgattggcctgggggaagatggtcccacgcaccaggccgtcgaacaactcgccagcctgcgcctgacgcctaatttcagtacctggcgaccatgcgatcaggttgaggcggcagtaggctggaagctggcggtcgaacgccatgacgggccaacggcgctgatcctctcgcggcagaatctggcgcaggttgagcgcacacctgagcaggtgcagcaaattgcccgcggcggctatgtgctgaaggacggcggcggtaagccggatgttatcctgattgctaccggttcagaaatggaaatcacactgctggcagcggaaaaactgaccggcgaaggccgtaacgtacgggtagtttctctgccttcaaccgatatcttcgacgcccaggatgagacgtaccgggagtcggtcctgccggcaaacgtcagcgcgcgcgtggcggtagaagccggtattgccgact

SEQ ID NO: 231114 - DNA, 819 bp, Unknown
  Bacterial polypeptide expressing nucleotide sequence isolated from the Sargasso Sea
ttaataggtggatcagctgacttagctggatcaaataatacaaaaactaaaaatcataaaattataaaacataatgatttttcaggaaattatattcattatggagtaagagagcatgcaatgtgtggaattatgaacggaatatcacttcatagtgacctaataccttatggtggaacttttttaatttttagtgattactgtaaaccttctataaggcttgcagctatgatgaaacaaaaaataatttacgtatttacacatgactctattggacttggtgaagatggtccaactcaccaacctattgaacatttggcaagtttaagatcaattccaaatttaaatgtttttagaccatcagatcttattgaaacttttgaatgttggcaattagcacttgaaagtaaaaattcaccaagtgttattgctttgactagacaaggaattaagcctgtcagaaaaaaaagttctatcaaaaatatgtcctctgccggtgcttacgaaattttgagaactggagataacataagtgttacaattatagcgactgggtctgaaactagtttggcatgtgatgttggtcataaattagccacagatggtatttattccaaaataatatcaatgccatgtcatgaattatttgatcaacagagtgaaagctataaaagtaaaattttagatgaaacaaatcttgttgtttctatagaagcctctgaaacagattattggaaaaaatacactggtaaaaatggaataaattttggaataaatgattatggaaaaagtgctccatataaaatgatatataatcac

SEQ ID NO: 231115 - DNA, 866 bp, Unknown
  Bacterial polypeptide expressing nucleotide sequence isolated from the Sargasso Sea
gattataaaaacagatttaaaagctatggatggaattatattttgatcaatgggtttaattacagagaaatttataatgctttaaaaaaagcacaaacatcaaaaaaaccgactgtgatttcgtgcaaaacaaaaataggatttggatctccaaataaaggtggaaaagcctcttctcatggaagtcctcttggaatagatgaaattaagttagtaagaaaaaaattagattgggactataaagaatttaaaatacctcaaaaaattttaactgattggagaaaaattggagaaaaaggtgtcaaaaaagaaaaaatatggaataaaacttttatcaaacaaaaacaaaaatttaaaagtattataaaaaataaattctcgcgttcaattataaaacaaaaaaaagattcaataaaaaattttaagactatagctacaagaaaatcctcagaagagtttttatcagctatattaaaagagagaaatactttaattggtggttctgctgatttagcaggatcaaacaatacaaaaactaagttacataaaattattaattcaagtaactttggtggtaattatattcattatggagttagggaacatgcaatgagtggaataatgaatggattagctcttcatagtaattttattccttacggaggtacttttttaatattttcagactattgcaaaccttcgataagactgtctgccatgatgaaacagaaggtaatttatataatgacacatgactccataggactaggagaagatggacctacgcatcaaccagtagagcaacttgctgctttaagatctattccaaacttaaatgttttaaggccagcagatcaaactgaaac

SEQ ID NO: 231116 - DNA, 613 bp, Unknown
  Bacterial polypeptide expressing nucleotide sequence isolated from the Sargasso Sea
attcattggtcttggggaagatggtccgacacatcagccggtcgagcaaattgcctccctgcgtgtaacgccgaatatgagcacctggcgcccatgtgaccaggtggaaactgctgtggcgtggaagtatgctgtagaacgccaggatgggccaaccgcactgatactttctcgccagaacctggcgcagcaagaacgcactgctgaacaactggcgaatattacccgggggggttatgtgctgaaagacagtcacgatcagccagaactgatcctgattgctaccggttcagaagtgtcgttagctgtagccgtatgggaaaaactgactgccgaagatatcaatgcgcgcgtcgtttccatgccttcgaccgatgtctttgattcgcaagatgcggcatatcgggagtctgtattaccggcagcggtattatcgcgtgtggcgattgaagcgggcattgccgatagttggtttaaatacgttggactgcgaggcgtaattgtcggtatgaccactttcggtgagtcggctccggcagaaacattgttcgagcgttatggatttacactcgcaaatgtgatggaaaaagcgaaagccgtcctcaatcaataa

SEQ ID NO: 231117 - DNA, 961 bp, Unknown
  Bacterial polypeptide expressing nucleotide sequence isolated from the Sargasso Sea
ttgtttacaggagggtataagtcatgaggcaattgaatttgcagggcatcttaaattgtcaaagttaattgttttatgggacgacaatgaaatttctattgatggtaaaacaaaactttcaacttctagcaatcaaatttctcgttttaaatcttgtggatgggacgcccaaaagattgatggacataattatgaagagatatttaacgctatagagaaggcacaaaagtcaaaaaaaccttctttaattgcttgtaaaacaataataggttttggttcacctaatttagctggaacagaaaaaacacatggtgctccattaggatcagaagaggttaaagaagttaaaaaacagcttaattggaattttcactcgttcgaagtgcctcaaagtatcattgatgattggaaagttgttaaaattaggggaaacaaaaaaagaatcgattggaataagagattagaatctgattcaaaaaaagaaaaatttaatagttttttaagtcaatctataaatgaaaagtttgaaaaaagtttcaaaacctatgttaaaaaattaaaaaaagagaaaccaaaattggcaacaaggcaggctagcatgaattttttagaaattttgaatagctctgttgaaaacacaattggtggatctgctgatttgactgggtcaaacttaacaaaaactcataaaatgaaaacagttagtgccggaagatataaaggtaattatattcattatggaattagagaacatatgatgggtgctgttatgaatggtatcgcattacacagagggtttattacatatggtggaacgtttttggtttttagtgattatatgagagcttcaatcagattatcagcattaatgaaaactaaagttgtttatgtattgactcatgattctataggcttgggtgaagatggaccaacacatcaaccaatagaacatcttgctatg

SEQ ID NO: 231118 - DNA, 451 bp, Unknown
  Bacterial polypeptide expressing nucleotide sequence isolated from the Sargasso Sea
tttgatcaaaaataataaagatttatccaatgcaataaggtttttgtctatggatgctgtgcaaaaagctaattctggtcatcctggaatgccaatgggaatggcagatgtagcaaccatattatttaaaaactttttaagatttgatccaaaagatcctggctggattaatagagacagattcgttctttcagcaggacatggatctatgcttctatattctttgctttatttaaccggatataaaagtatttcattaaatgatatcaaaaactttagacaactagactctatatgcgcaggacacccagaatatcatccaaactctggaatagaaactaccactggtcctttgggacaaggaatatcaaatgcagttggatttgcattatctgaagaaattttaaaaaaaaaagtaggaaaaaaaattatcaatcataaaacttatgtc

SEQ ID NO: 231119 - DNA, 973 bp, Unknown
  Bacterial polypeptide expressing nucleotide sequence isolated from the Sargasso Sea
aggcatttcgcatgaagcctgttcgcttgccggcacattaggcctaggtaagctggttgctttttgggatgacaacggtatttcaatcgatggtgaagttgaaggctggtttagcgatgacacaccagcacgttttaaagcgtacggctggcacgtaattagtgacgttgatggccacgatagcgatgcagtaagtgctgcaattagcgaagcaaaaagcgtgactgataaaccaaccctcatttgttgtaaaacaattattggttacggttcacctaataaatcgggtagccacgactgtcacggtgcaccacttggcgatgacgaaattaaagcatcgcgtgagtttttaggttggacgggcgatgcatttgaaatccctgaagacatttacgcacagtgggatggaaaagctaaaggccaagaacttgaatcaagctgggacgaaaagtttgcagcctatgcaaaagcattcccagagcttgcagctgagtacaaacgccgtacaaattcagatttacctgccgactgggctgaaaagtcacaagcgtatattgagcagttacaagcaaacccggcaaatccagcatctcgtaaagcgtcacaaaatgcattaaatgcatttggtccattattaccagaatttatgggtggctctgccgatttagcaggttcaaacttaacaatttgggaaggctctaaaggcctaacagcggacgatgcaagtggtaactacgtttactacggtgtgcgtgagtttggtatgtcggcaattatgaacggcattgcacttcataaaggctttattccttacggtgcaacgttcttaatgtttatggaatacgcacgcaatgcggttcgtatggctgcattaatgaagcaaccaagcatttttgtatacacgcacgattcaattggtttaggtgaagatggtccactcacaaccagtagagcaaatgccagcatgcgttaa

SEQ ID NO: 231120 - DNA, 784 bp, Unknown
  Bacterial polypeptide expressing nucleotide sequence isolated from the Sargasso Sea
ggaatccaatgaactggagagaagatttaattcagagatgactcatgaatttaatgaaagattcgttgaatttttaagagattgttcattacaagaagatccgatcgcaaccagaaaagcatctcaaatttgtcttgatcatttttgtgctgacttacctgagctaattggtggttctgccgatttaacaggatctaataatactttttctaaacataatactgaacttactcccgacaatcctagcggatcacatatttactatggcgtaagagagttcggcatggttactatcatgaatggaatgagtcttcatggaggtattaggccatatggaggaaccttcctagtttttatggattatgcaagaaatgcagtgcgtttatctgcaatgatgagtctgccaaatatatatgtctttactcatgattcaatcggcttaggtgaggatggtccaacacatcaacctatcgaacatttggttactctcagagcaacgccaaacttatataattggaggccagctgatcttaaagaaacagcagtagcatggaaagagtcaattttatcaaaatctccaagctgtcttatcctcagcaggcaaggtcttccgcaggtcaaaatgagtgaggacaagattattaatatctctaagggaggatatttagttcaaaaggacgaaaatgcagagctaaacattatatcctctggaagcgaactgcaattagccattcaagcagctaaagatcttgatcagttgggcataaaggtaaatgtggtttcg

SEQ ID NO: 231121 - DNA, 907 bp, Unknown
  Bacterial polypeptide expressing nucleotide sequence isolated from the Sargasso Sea
ttcgtcttcacatggatctcctcttggtgaagaagaaattgtattaacaagaaaaaatcttaattgggaaagcaagccttttgaaatcccagaaaaattattaaatgaatggagaaatttttatcttcgaaatctaagtgttaaaaaagaatggaatttaaaaaataaagacataattaattcagatagatacaaagaaatatttgatttaaatttaagtccggagacaataaactcaattaataaatttaaattaaaacattatgaagaacaaacttcttgtgcaacaagaaaggcaagtgagctgagtttagaagtttttaatgttcatattgataaccttattggaggatctgccgacttaacaggctcaaataatacaaaaactaaaaatatggaacaatttaacgcatcaaattacaacggtaattatatttattttggaatccgagaacatgcaatggctgctgtaatgaatggcatagcgctacatggaggtttacgaccttatggtggtacttttttagtttttacagattactgtcgtccatctataagattatctgccttaatgggattacctacaatttatataatgactcatgattcaattggactaggagaagatgggccaactcatcaacccgttgagcacttagcttctttaaggtctattccaaatttaaatgttattcgcccatgcgatataatagaaacaatagaagcgtggcaaattgcacttgagtcaagcaatccgagcataatagtgcttacaagacagaatttgcccttaatacgtaaagaaaagaccgatgaaaatttattaaaaaaaggggcatattgtataaaaaattatgacacatatcacgcaactattttggcaacaggttcagaggtagaaatagca

SEQ ID NO: 231122 - DNA, 625 bp, Unknown
  Bacterial polypeptide expressing nucleotide sequence isolated from the Sargasso Sea
tttgaacaaatttaacagaaccttagcaaacagtattcgtgctctttcaatggatgccgtccaaaaggctaattccggacatcctggaatgcctatgggaatggctgatgtctctacaatactttttaaatattttttaaaattcaaccccaagaatcctagttggataaacagagatagattcgttttatctgcaggacatggatcaatgttattatactctttgctatttttgacgggttacaaaagtattaagttaaatgaccttaaaaattttagacaactcgattcaatttgtgcaggacaccctgagtatgttcctaactctggaattgaaacaacaacagggccactaggacaaggaattgcaaatgcagttggttttgctcttgcagaggaaattttaaaaaaaaaatttggaaaagatattataaatcacaaaacgtatgtcattgctggagatggttgcttaatggagggtataagtcacgaggctatgagcttcgcgggtcatttaaaacttaaaaacctaattatgttatttgacaataattctatttcgatagatggaccaactagtttggctgtttcagataattttaaaaagagatttgaaagttatggt

SEQ ID NO: 231123 - DNA, 833 bp, Unknown
  Bacterial polypeptide expressing nucleotide sequence isolated from the Sargasso Sea
tattttatctgcaggacatggctctatgttactatatgcaataaattattttttaggttatcaagatatgaaaattgatgaaataaaaaattttcgtcaactaaattctattactgcaggtcaccctgagtatggacatgctaaaggaattgaaacaacaacaggtcctcttggacaaggtttagcaaatgctgttggaatggcgataagtcaaaaactgtttaataagagatttggaagtaaaatcatagatcattatacatatgtgatagttggtgatggatgtttgatggaagggatcagtcatgaagcaattgatttagccggtcacttaaaacttaataaattaattgtattttgggatgataatggaatctcaatagatggcgatactctacttgcaacctcaacaaatcaaattgaaagatttaagtcctgtggttgggaggtttttgcagttgatggacataattttgaacaaatagaaaacactatcaaactagcaagaaaaagtaattatcctagcttaattgcatgtaaaacaaaaataggatatggctctccaaattttcagggcactagtaaagttcacggagcgccattgggtgaaagtgaaataaagttaacacgaacaaatttaaattgggagtatgaaccatttttatatccaattgatgctttagatgcttggaaggctatttctgaaaactcaaaagaaatttataataattggaaggaaaacattaataaatctgatttaaagaaaaatttttatgatgcattaaatctctctttatcagaaaaattatatagtgagctcaaaaaattttagt

SEQ ID NO: 231124 - DNA, 340 bp, Unknown
  Bacterial polypeptide expressing nucleotide sequence isolated from the Sargasso Sea
tatgacccgtaaagagcttgccaatgccattcgtgcgctgagtatggatgccgtccaaaaagctaactccggccacccaggagcaccaatggggatggccgatatcgccgaagtgctgtggaacgattttctacgccataacccgaccgatcccacctggtacgatcgtgaccggtttattctgtccaacggccacgcctcaatgctgctttacagcctattgcatctttccggttacgacctgccgatcgaagaattaaagaacttccgtcagctccattcaaagacgccaggtcacccggaaattggctacacgccgggcgtgaaaccaccaccggac

SEQ ID NO: 231125 - DNA, 808 bp, Unknown
  Bacterial polypeptide expressing nucleotide sequence isolated from the Sargasso Sea
ttgaaaaataaagaaaaaaatttatcaaacgctattcgttttttatcaatagatgcagttcaaaaagctaattctggtcatcccggtatgccaatgggtatggcggacgttgtgacaattctatataaatatttcttaaaatttaatccaaaaaatccaacctggcttaatagagacagatttattttgtcagctggacacggatcaatgttgctttactcgcttttgtacctaactggatataaaagtgtatcacttaaagacattaaaaaatttagacaactgaattcaatttgtgctggacacccagaatatcaccccaactcgggtattgaaacaacaactggtcctttaggtcaaggaattgcaaattctgtaggttttgcaattgcaggagaaattttaaagaaaaaattaggaagtaaattaataaatcacaaaacctatgtcttggctggcgatgggtgccttatggaaggaattagccatgaagcaatgagtctagctggtcaccttaaattaaacaatcttataatgctttttgataacaattctatttcaatagatggtcccactagtttagcagtctcagataattataaaaatagatttgaaagctatggatggaattatattttgatcaatgggcataattatagagaaatttacaacgcgttaaaaaaagcgcaaacatcaaaaaaaccaacagtgatttcgtgtaaaacaaaaataggatttggatctccaaataaaagtggaaaggcctcttctcaaggaagtcctcttggaatagatgaaattaagttag

SEQ ID NO: 231126 - DNA, 985 bp, Unknown
  Bacterial polypeptide expressing nucleotide sequence isolated from the Sargasso Sea
agcagatttcagcgacaaagcagacgctatcatcgctgaacttcaagctaacccacaaaatatcgcgtcacgtaaagcgtcacaaaatgcactgaatgcgtttggtccgctacttcctgaactattaggcggctctgctgaccttgcaggttctaaccttaccatctgggaaggtagcaaaggcgttgaagcaaacgatgcatcaggtaactacatttattacggtgtacgtgagtttggtatgtcggccatgatgaacggtattgcccttcacggtggctttaaggcatacggtgcaaccttcctaatgtttatggaatatgcacgcaacgcggtacgtatggcagcgctaatgaagcagcctgcaatttttgtttacacccacgattcaattggtctaggtgaagacggcccaactcaccagccggtggagcaggcggttgcgctacgtgcaacgcctaaccttgataactggcgcccttgtgatcaggttgagtctgctgtgtcgtggaagtctgctattgagcgcactgacggcccaacaacactaatcttcacacgtcaaggcttagcgcagcaagagcgaacggctcaacaagttgctgatatcgcgaaaggtggttacgtacttaaagactgcgaaggtactccagagcttattcttattgctaccggttctgaggttcagctagccgttgaagccgcagcgaaactaaccgagcaaggtaaggccgttcgcgtagtgtctatgccatcaactgacgtattcgaccgtcagtctgctgattaccgtgaaagtgtactaccttctagcgttgttaaacgcgtagcggttgaagcgctgtctaaagatagctggtacaagtacgttggctttaatggcgctatcgtgggcatggacacctttggtgagtctgcgcctgctggcgacctgtttaagcacttcaacattaccactgacgctgtagtagaggctgcactgtct

SEQ ID NO: 231127 - DNA, 910 bp, Unknown
  Bacterial polypeptide expressing nucleotide sequence isolated from the Sargasso Sea
tctattgatggtgaaattgaaaattggtttacagatgattcagttaaaagatttgaaagttatggttggcatacaatttgtgtaaatggccataacatagaagaaattaataatgctatttctcaagctaaagaaacttctgacaaaccctcaatgattttttgtaaaacaacaattgggtttggctcacctaataaatccggaacagctgatgttcatggagcaccattaggcgaagatgaaataataaaaaccagggaagctttagattggaaatatgcagaatttgagctaactgatgaaatctataatttttgggatgctaaagaagctggtgttaatgtaaattcagattgggataatttgataaaaagttatcaagaaaagtatcctgaaaaatcaaaagagcttctaagaagaatagaaggcaatactccagagaattttgaaagcgacttcaatcaattccttaaagattgtgatatgagcaattctccaatggcaacaagaaaagcatcaaaggcttgtctcgatttctttgtcaaaacaatgccagaattaattggaggttctgcagatctgactccatctaataataccttttctgaatcaagctcaactttttctaatgaaaacccgtcagggaatcatataaactatggagtaagagagtttggaatgtctgccattatgaatggaatggtcctacatggagggataaagccatatggtgcaactttcctagtttttactgattatgcaagaaatgcagtaaggctctctgcacttatggggttacctaatatttttgtttacactcatgactcagtagcattaggcgaagatggaccaactcatcaaccgatagaacatatggtaaccttaagatcgacacctaattttaattaat

SEQ ID NO: 231128 - DNA, 937 bp, Unknown
  Bacterial polypeptide expressing nucleotide sequence isolated from the Sargasso Sea
aattagtcatgaagctatgagtttagctggacatttaaatttaaaaaatttgatcgtattcttcgacaataacagaatttcgattgatggagcaacttctctaagtgtttcagataattacaaaaaaagatttgaggggtacggctggtcttttcaagagattaatggtcataactttaagcaaatagataaagctataaaaaaagctaataattcaaaaaaaccaacaattatatcttgtaaaacaattattggatttggatctccaaataagtctgggaaggcatcttcacatggggctccattaggagaagatgaaataaagttagttagaaaaaaacttgggtggaaataccagccgtttgagattcctgaaaatattcttaattcatggagagaaataggtaataagggtgaagaattagaaaataaatggaaaaataatttggaaaaaaatcctaaaattaaaagtgagctagataaaatagccaaaggtgaattaagtttaaatttagataaaataatgggtgacgaaaaactgaagttttttcaaactaagcccaaaatggctacaagacaatgttcatcaacagttatagaaactctcaccaatgttttgccagagttaattgggggttctgcagatcttagtggatcaaacaataccaaaactgaaaaatcaaaaataataaatgcaaaaagttttgctggaaattatatccattatggtgtgagagaacatgcgatgggtgcggctatgaatggtttggccctttacggagggttaataccatttggaggaacttttttaattttttcggactacttgaaaccctctttgaggttatctgcaattatgaatttgcgagttatttatattttttctcatgactctataggtttaggtgaagatggaccaactcatcaaccgatagaa

SEQ ID NO: 231129 - DNA, 759 bp, Unknown
  Bacterial polypeptide expressing nucleotide sequence isolated from the Sargasso Sea
actgaacttactcccgacaatcctaggcggatcacatatttactatggcgtaagagagttcggcatggttactatcatgaatggaatgagtctccatggtggtattaggccatatggaggaaccttcctagtttttatggattatgcaagaaatgcagtgcgtttatctgcaatgatgagtctgccaaatatatatgtctttactcatgattcaatcggcttaggtgaggatggtccaacacatcaacctatcgaacatttggttactctcagagcaacgccaaacttatatagttggaggccagctgatcttaaagaaacagcagtagcatggaaagagtcaattttatcaaaatctccaagctgtcttatcctcagcagacaaggccttccgcaggtcaaaatgagtgaggacaagattagtaatatctctaagggaggatatttagttcaaaaggacgaagatgcagagctaaacattatatcctctggaagcgaactgcaattagccattcaagcagctaaagatcttgatcagtcgggtataaaggtgaatgttgtttcgatgccatgtttagatagatttcttgaggcggatttagaatatcaaaataaagtgatccaaaaagatttgccatccattgttgttgaggctgcccacccaaactcatggtatagaattttaggaagagatgaccttgtaattggtatgacaacatttggggagtctgcacctgcaaaaatgctctttgaggagtt

SEQ ID NO: 231130 - DNA, 635 bp, Unknown
  Bacterial polypeptide expressing nucleotide sequence isolated from the Sargasso Sea
tttgccaaatatatatgtctttactcatgattcaatcggcttaggtgaggatggtccaacacatcaacctatcgaacatttggttactctcagagcaacgccaaacttatacaattggaggccagctgatcttaaagaaacagcagtagcatggaaagagtcaattttatcaaaatctccaagctgtcttatcctcagcagacaaggtcttccgcaggtcaaaatgagtgaggacaagattagtaatatctctaagggaggatatttagttcaaaaggacgaagatgcagagctaaacattatatcctctggaagcgaactgcaattagccattcaagcagctaaagatcttgatcagtcgggtataaaggtaaatgtggtttcgatgccatgtttagataggtttcttgaggcggatttagaatatcaaaataaagtgatccaaaaagatttaccatccattgttgttgaggctgcccacccaaactcatggtataaaattttaggaagagatgaccttgtaattggaatgacaacatttggggagtctgcacctgcaaaaatgctctttgaggagttcggctttacagcagggaatattgtttcaaaggcaaaaaaacttttaaataaatgag

SEQ ID NO: 231131 - DNA, 889 bp, Unknown
  Bacterial polypeptide expressing nucleotide sequence isolated from the Sargasso Sea
aaaaacttaatggatcaatggagatctatcggtaaaaaagcatcaataaaagctagtaagaataaaaaaaaattttcactaaaattaaataaaaatactatcaatgcagaaatagaaaaagcaaaattagactacttaaaaaaattacaaccaatagctactagaaaatgttcagaaaaatttttggaaattgcatccaaacttccaaacttaattggaggatcagcagatttagcaggatccaataataccaaaaccaaaaatcataaaattattcaatcaaatgatttttccggaaattatatccattttggagttagagaacatgcgatgtgtggtattatgaatggtatctcacttcatagtgaacttgttccttatggtggaacttttttaatatttagcgactactgtaaaccatcaataagactagctgcaatgatgaaacaaaaagttatttatgtttttacacatgattcgattggtcttggagaagatggaccaacccatcaaccaatagaacaattgacaagtttacgatcaataccaaatttgaatatttttagaccctctgacttaatagaaacttttgagtgttggcaattggcattaaatagcaaaagttctccaagcgtaatagccctaacaagacaaagcttaaatccagttcgcacaaaaaaatcatcaaaaaatttgtctttagctggcgcttatgaagttttaagaacgagtaataaaataagtgtaactattatagcaacaggatctgaaactagtcttgcaatagacgttagtcataaattagccacagatggcatttactcaaaagtaatatcaatgccttgccaagaattatttgatcaacaaactgaaatctacaaaaataaaa

SEQ ID NO: 231132 - DNA, 799 bp, Unknown
  Bacterial polypeptide expressing nucleotide sequence isolated from the Sargasso Sea
catggggggtcaatatattcattatggtgtaagagaacatggaatggctgcaataatgaatggaattgcagctactaaaatttataaaacctattcagggacttttttaacttttgctgattacatgaagccgagtcttcgccttgctgctttaatgaaaattgaccctattcaagttttcacgcatgactctattggtttgggtgaagacggtcctactcatcaacctatagagcaaattaatatgttaagactaattccaaatagttatattttcagaccttgtgatctcaaagaaacaatagtgtgttggagagaggccttaaagatagatgatgctccatcatttatatgcctttcaaggcaaaatttgccgcagatttcttataaaaaattagtatcaaaaaacttcaagggggcttatgtaataagtggaccaaaaaaaaataatgatattacgattatagcgactggttcagaagtatctttagctgttcatattgctgaaattttgaaaaataataggattaatgcaaaagtaatatcaatgccatcttcatcaatttttgaaaaacaatcgagatcttttaaaattactctgttgaagtctaaattagatgaaacttttgtgattgaagctggctcaaccatgtactggaataaatttacaaattcggaaaatatttttggattagataattttggtgcaagtgctcctgggagtgatgtatttaaaaaatttgggttaacaacaaaaactatatcaactaaaatattaaggaaaattaaaacaaaatga

SEQ ID NO: 231133 - DNA, 837 bp, Unknown
  Bacterial polypeptide expressing nucleotide sequence isolated from the Sargasso Sea
ataaagcataaaaaagatgcaataaaaaattttaagactatagctacaagaaaatcctcagaagagtttttatcagcaatattaaaagaaagaaatactttaattggtggctctgctgatttagcgggatcaaacaatacaaaaactaaattacataaaattattaattcaagtaactttgatggtaattatattcactatggtgttagagagcacgcaatgagtggaataatgaatggattggctcttcatagtaattttattccttatggaggtacttttttaatattttcagactattgcaaaccttcaataagactgtctgctataatgaaacagaaggtaatttatataatgacacatgactcaataggactaggagaagatggacctacgcatcaacctatagagcaacttgctggtttgagatctattccaaatttaaatgttttaaggccagcggatcaaactgaaacaattgaatgttgggatattgctttaaaaagtaataaaactcctagcatattagccttaaccagacaaaacttaaaacccataagaaataagtttagcaaaaaaaatcaatgctctatgggagcttacgaggttttgaggactggaaaaaatataaatttaacaattttagcttcagggtcagaagtcaatcttgcaattgagacaagtcataaattggccaaacaaaaaatctattcaaaagtaatatcaatgccttgccaagaaatttttgacaaacaaaacaaaagctataaaaataaaatcttaaaagaaagcaaaaacacttttgcaattgaggcaggttcaaaaatgtcttgggaa

SEQ ID NO: 231134 - DNA, 872 bp, Unknown
  Bacterial polypeptide expressing nucleotide sequence isolated from the Sargasso Sea
gcaagagactcttgccgattttgaaaaaaaccattttgaagattccaaagaactgcatagactaatcaatggaagcttacctagtaattttgagcttaccttcgagaacttaatcaataatttttctgaagatggaaattcttatgccagtagaaagtgctctggtatgtgtttggatgccattggcccaattatgcccgagttgataggcggatcagcagatctctctccttcaaataatactgaatggaaaggaacctctcatcttgctgaagatggctcaggaaattatttgaattatggcgttagagaatttggtatgtcggcaatcatgaatggcatgatcttacatggtggcattagaccttatgcaggaacttttcttacttttctagattacgctagaaatgcagtaaggatgtcagctttaatgaaattgcctgtgatttatgtgtatacgcatgactctatcggggtcggtgaagatggcccaactcatcaaccagtggaacatatttcaatgctaagaattacgcctggaatttacacttggcgaccttgcgatggggtagaaactgcttgcgcatggaaatttgcgctggagtcaaaagctgcaccttcagcattgatattatccagacaatcattggatgctcaaaaaagggaaacgaactactcaatttttaaaggcggatacgaacttgcgtcagcccaaaatcccaaaataacattggttgcttcaggctcagaagtgggcctagccatgaaagttcgagatcagcttaatgaacaaaaaatttcatcaagagttgtctcaatgccatgtactgaaatatttgatgagcaatcatcagaatatcaaagagaaactt

SEQ ID NO: 231135 - DNA, 361 bp, Unknown
  Bacterial polypeptide expressing nucleotide sequence isolated from the Sargasso Sea
ttgaataaattatataaagaattagctaattgtattagatttctctcaattgatgctgttcaaaaagcaaactcaggtcaccctggaatgccgatggggatggcagatgttgccacagtactttttaaagattttttaaaatttaatccaaaaaatcctagctggattaatagagatagatttgttctttctgctgggcatgggtcaatgttactttactctcttctttatctaactggctacaaaagtgtttctttaaatgatattaaaaattttagacaattggaatccatttgtgctggacatcctgaatatcatccaaatacaggcattgaaactactacaggtccgttaggacaag

SEQ ID NO: 231136 - DNA, 865 bp, Unknown
  Bacterial polypeptide expressing nucleotide sequence isolated from the Sargasso Sea
gatgctccaacaattatattcttgtaaaactaaaattggtttcggttctcctaacaaagagggttcagcttcatcacatggctcacctcttggtgaagatgaaattagtttgaccagaaaaaaattagaatggaattatttgccgtttgaaattccagatgatttattacatgagtggagaaatttctacaaaaggaatgataaattaaaaaattcatggttatcaaaaaataaagaattaattaaaagcaaaaactttaaagatagtttttatcaaaagattgatccagaacttccagaaaaaattaaggatttaaaatttgagcattttaatgataaaacaaattgtgcatcaagaaaatcaagtgaactaacgttaaacttaatttcaaactatcaaaaaaatcttattggcggatctgctgatctaactggatcaaataacactaaagcaaaaaatatgaatgtaattacatctgataatttcaatggaaattatgttcattatggtatcagagaacatggaatggctggagtaatgaatggtatagctttgcataaaggtttaattccatatggaggaacgtttttggtatttacagattattgcaggccttcaattaggttgtcagctattatgaatataccagttatttatgtaatgacgcatgactcaataggattaggagaagatggaccaacccatcaaccagttgaacatcttgcatctttaagagctattccaaatttaacagtcattaggccttgcgatattattgaaactatagaagcatgggaatgtgcaataaacaatactggaccaacaatcttagttttaacaagacaaaatctaccaatgttacaa

SEQ ID NO: 231137 - DNA, 880 bp, Unknown
  Bacterial polypeptide expressing nucleotide sequence isolated from the Sargasso Sea
tcaaattttaaaaatttaaattcatttaaaaatttaattgaaaaaacaaaaaatgagtatctaaaaaattcaaaaccattagctacgagaaaatcatctgaaatgtttttaaacattatatctaaattaccaaatctaattggtggttcggctgatttagctggttcaaataatactaaaaccaaagatcatataataattaaaccaggtaatttttctggaaactatatccactatggagttagagagcatgcaatgtgtggaataatgaatggaattgcattacacagtaatttaattccttatggtggtacatttttaatatttagtgattattgcaaaccatcgattagattagcggcgatgatgaagcagaaagttatttatgtatttacacatgactcaattggtttaggagaagatggtccaactcatcaacctattgaacaattaacaagtttaagatctattccaaatttaaatgtttttagaccctcagacacaattgaaactttcgaatgctgggaattagcacttaaaagtcaagatacaccaagtgtaattgctttaactagacaaggaattaaccctgttagagttaaaagttcttccaaaaatgaatcttctgctggcgcttatgaaattttaagaactggagacaatattaatgtaacaattttagcaactggttcggaaactagtttagctagtgatgtaggtcataaattagccacagatggcatttattccaaaataatatcaatgccttgtcacaaattatttgatcaacaaagtgagggttataaaaagaaaattttaggtgaaactaaacttgttgtatctatagaggcctctgaaacagattttggaaaaagtatac

SEQ ID NO: 231138 - DNA, 781 bp, Unknown
  Bacterial polypeptide expressing nucleotide sequence isolated from the Sargasso Sea
ttgaataaaattaataaagaattagctaacgcaattagatttttatctattgatgctgtcgaaaaagcaaattcgggtcaccctggcatgccaatgggtatggctgatgttgctacaattctatttaaaaattttttaaaatttaatccaaaaaaccccagttggataaatagagatagatttgttttatcagccgggcacgggtccatgctactgtactcccttttatatctaactggttacaaaagcatctctttaaaagatattaaaaattttagacaacttaactctatatgcgctggccatccagaatatcatcctaactctggaatagaaacaacaactgggcctctaggccaaggaatagctaatgctgttggttttgctatagcagaagaaatattaaaaaaaaaacttggtaaaaaaattataaatcacaaaacatatgttttggctggtgatggttgtttaatggaaggaataagccatgaagctttaagtttagctggtcacttaaaattaaaaaacttaatcttattatttgataacaattcaatttccattgatgggcctacaagtcttgcagtatcagatgacttcaaaaaaagatttaatagttatggatggaattatattgaaatagatggtcataatgaaaaacaaatttttaatgctttaaaaaaagtgcaaaaatcaaaaattccttcggcaatttcatgcaaaacaacaataggttatggatcgccaaataagtctggaaaagagtccgtgcatggaagtc

SEQ ID NO: 231139 - DNA, 914 bp, Unknown
  Bacterial polypeptide expressing nucleotide sequence isolated from the Sargasso Sea
ctctatttcattgatggaccaactagccttgctgtatcagataactataaaaaaaggtttgaaagctatggttggaattatattgaaattgatggtcataatggaaaacaaatatatagtgcaattaacaaagcacaaaaagcgattaagccaacagttatttcctgtaagacaaaaattggatttggctcacccaataaaagtggcaaagcatcttctcatgggagtccccttggacttaaagagattgagttagtaagaaaaaaattaaactggccctataaaccttttgaaataccaaaaaatattttaaaagaatggagaaaaataggacttaaaggttctaagacagaagcaaaatggaaaaaaaatttttcaagaaataaaaataacttaaaaaatttatttagtaatagtttttcaaattcgtttataaaacaaaagaaagatgttattgaaaatttgaaaccattagcaacaaggaagtcttcggaaactgttttaaattcattatttaagttaaaaaataatttaattggaggctcagcggatctagcgggttcaaataatacaaaatccaaatttaacaaagttataaatgctaaaaatttcgatggtgactatattcattatggtgtgagagagcatgcaatgtgtggtattatgaatggtttggcattgcacagtaatttgattccgtatggaggaacttttttaatattttcagattattgtaaaccttcaattagactttctgcattaatgaaacaaagagtaatttatgtaatgacacatgactctattggattaggggaagatggcccaactcatcaacctattgaacaattatcaggcctaagatctataccaaatttaaatatacttagacctgctgatcaaatagagaccattga

SEQ ID NO: 231140 - DNA, 832 bp, Unknown
  Bacterial polypeptide expressing nucleotide sequence isolated from the Sargasso Sea
cctaaaaatattttaaatgaatggaaaaaaataggtattaaaggagcaaaacttgagtcaaattggaataaaatatataaaagaaaaaaaagtaaaatagataaaatttttaaaaatcaattcaataaagtacttaaatccgaaaaaaaaaatgcatttaaaaatataaaaagtctagcaaccagaaaaagctcagaattgattttaagtgctctgacttacggaaataatactttgattgggggctcagctgacttggctggttcaaataataccaaaactaaattccacaacataattaaagaaaataattttaatgggaactatatacattacggagtaagagaacatgctatgtgtggaataatgaatggccttgctctgcacagcaaacttattccgtatggaggaacttttctaatattttcagactactgtaaaccttcaattagattatctgctttaatgaaacaacgagttatatatgttatgacacatgactctattggcttgggtgaagatggtccaacacatcagccaattgaacaattgactgggctaagatcaattcctaatctaaatatctttagacctgctgatagaactgaaactattgaatgctgggatttagctttaaaaaattcaaaaactccaagtattttatcattaacaagacaaaaccttaatccagtaagaaaaaaatactctcataataataaatgttcttatggagcttatgaaatttttagatcaaataaaaaaattaaattaactatattagcaagtgggtctgaggttgatttggctattaaaactagccttaaatggccaa

SEQ ID NO: 231141 - DNA, 736 bp, Unknown
  Bacterial polypeptide expressing nucleotide sequence isolated from the Sargasso Sea
tctgggtttagaggaggttgaacttgtaagaaaaaccctaaattggaataataagccttttaatattccgaataaatttttaaaagagtggagaaaaattggtcaaagaggtgatgctcaagaaaaaaaatggaataaaatatttaaaaaaaataaaacaaaatttaaaaatacaataaaaaataactcaataagtgtattgagaaaagaaaaaagaaatgcaattttggagcctaaaaatttagctacaagaaaatcttctgagatgactcttaatgcattaacaaaccaaaataataacttaattggtggttctgctgacttagcaggatctaataacacaaaaacaaaacatcaaaaaataattaaacctggagattttagtggagattatattcactacggagtaagagagcatgcaatgagtgggataatgaatggtattgcactctatggtaatttaattccatatggtggaacttttttaatattttctgattattgcaaaccttcaattagattatcagcgttgatgcaaaaaagaataatatatgtgatgacgcatgactctatagggcttggagaggatgggccaactcatcagccaattgagcagctctcaggtttacgatcaattccaaatttaaatgtttttaggccagcagatagagttgaaacaattgaatgttgggaacatgctttaaaaagttcgaaacaccaagcattttatgtttaa

SEQ ID NO: 231142 - DNA, 757 bp, Unknown
  Bacterial polypeptide expressing nucleotide sequence isolated from the Sargasso Sea
agatttttgtctattgatgcggttcaaaaagcaaattctggtcatccaggaatgcctatgggtatggcagatgttgcaatggttctttttaaaaattttttaaattttgatccaaaaaatccgaactggataaatagagatagatttattttatcagctggccatggttcaatgttactatattcacttctttacttaacgggatatgaaagtattaatttaaacgatattaaaaacttcaggcaacttgattcaatttgtgcaggacatccagaatatcatccgaattcaggaatagaaactacaacgggtcccttgggacaaggtatttcaaatgcagtaggttttgctttagctgaagaaattttaaaaaagaaagttgggaagaatataattaatcacaaaacttatgttttagctggagatggctgtttgatggaaggaataagccacgaagcattgagccttgcaggtcatttgaaattaaaaaatcttattttattatttgacaataattcgatatcaattgatggtcctacaagtctagcagtatctgatgatcacagaaaaagatttaatagctatggatgggattttttagacattaatggacacaatgaaaaagagatatttaaagctttaaagaaagcacaaaacacaaaaaaaccaattgctatttcttgtaaaactacaattggatatggatccccacacaaatcaggtaaagcttctgctcatggaagtccattggggaaga

SEQ ID NO: 231143 - DNA, 697 bp, Unknown
  Bacterial polypeptide expressing nucleotide sequence isolated from the Sargasso Sea
tttgaataaacaaaacagagatttatcaaacgcaataaggtttttaagtatagatgctgtggaaaaagccaattcaggacaccctggattaccaatgggaatggcggatgttgccacaatattatttaaatattttttaaaatttaatccagaaaatccaagttggataaatagagacagatttgttctttctgcaggacatggatctatgcttttatattctttgctttatttgacaggatataaaagtatatcaataaatagtataaaaaattttagacaactaaactctatatgtgctggccatcctgaatatgaaaaaaatactggaatagagactacaactggaccattgggccagggtatagccaatgcggtaggttttgctatagccgaagagattttaaaaaaaaaacttagtaaaaatattataaaccacaaaacctatgtgctagcaggagatggttgcttaatggaaggaataagccacgaagcattaagtttagcaggccatctaaaattaaaaaatcttataatgttatttgacaacaactcaatttctatagatggacccacaagtcttgctacttctgataactttaaaaaaagatttaacagttacggctgggattatattgaaattgacggacataatgaaaaacaaattattaaagcattaaaaaagcacaaaaagcaa

SEQ ID NO: 231144 - DNA, 385 bp, Unknown
  Bacterial polypeptide expressing nucleotide sequence isolated from the Sargasso Sea
atgttcgacaaggtaactaaatcagtaagagttttatcagctgcagctgtggaaaaagctaattcaggacatccaggcatgccccttggaatggcagatgttggtgttgctttgtataaaaattttttaaaagtatcaaatgaaaaacctgattggatcaacagagataggtttgtactaagcgcaggtcatggttccatgcttttgtatagtcttcttcatctaaatgggtttcctttgagtatggatgaaattaaaaattttagacaacttaactcaaaaactgctggtcatcctgaagtcgatacttctataggcattgatacaacaactggcccattaggtcagggttttgctaatggtgtagggtttgcagtcgcagaaa

SEQ ID NO: 231145 - DNA, 930 bp, Unknown
  Bacterial polypeptide expressing nucleotide sequence isolated from the Sargasso Sea
tgatgcagttcagagggcaaattcaggtcatccaggcatgcctatgggtatggcagatgttgcaacagtgctatttaaaaattttttgagatttaatccaaagaatccagattggttaaatagagatagatttgttttgtctgctggtcatggttctatgctcctatattctttgctatacctgaccgggtataaaagtatatcgataaataatattaaaaaatttaggcagctaaattctatttgtgctggacatcctgaatatcatcctaaaacaggtattgaaactacaacaggtcctcttggacaaggtatatctaatgccgttggttttgcaattgctgaggaaattttaaaaaaaaaattaggtaaagatttaattaatcacaaaacttatgttttagctggagatggctgcttaatggaaggaataagtcatgaagcgatgagtttagcgggacatttgaaacttaaaaatttaattatgctatttgacaacaattccatttcaattgatggtccaacaaatcttgcagtttcagataattttaaaaaaagatttgaaggatatggttgggattatatttctatcaacggtcataatgaaaaagaaatttttaatgcattaaaaaaggtccagaacgcaaaaaaaccttctgtaatttcttgtaaaacaaaaattggatatggttcaccaaataaatcaggaaaagcatcatctcatggaagtccattaggagcagatgagatcaaacttgtaagaaaagtcttaaattggaaaagcaaaccttttgatatcccaaacaaaattttaaaagattggagaaaaattggccaaagaggtgaaatttttgaaaaaaaatggaacgaaatatttaaaagaaaaaaaataaaatttaatcaaactttaaaaaataagtttaccaaagt

SEQ ID NO: 231146 - DNA, 891 bp, Unknown
  Bacterial polypeptide expressing nucleotide sequence isolated from the Sargasso Sea
aacaaaaaaataatttaattggtggctctgctgatttagcgggatctaataatacaaaaactaaaaatcataaaataattaaacctggagattttaatggagactacattcactatggagtgagagaacacgcaatgagtggagttatgaatggtattgcacttcacagtaatctaattccttatggaggtacatttttaattttttctgattattgcaaaccttcgattagattgtcagcattaatgaaaaaaagagtcatttatgtaatgactcatgattctattgggcttggagaagatggccctactcatcaacccatagaacagctttcaggcttacgtgctatacctaacttaaatgtatttaggccttcagatagaattgaaactatcgaatgttgggaacatgccttaaaaagctcaaaaactcctagtgtgatatctttgacgagacaaaatttaaatccagtaagaaaaacacattcaaataaaaacttatgtacattaggtgcttacgagattttaagaacaaataaaaaaattaatctaacgatattagctagtggatctgaagttaatctagcaatggaggttagccataaattagccaaagaaaaaatatattccaaagtgatatcaatgccttgtatggaacttttcgaattacaatcaaaatcttataaaaataaaattttaaaagaaacaaaatttaaaatatcgattgaagctggatcaagtgattgttggaaaaaatatctaggtgataacggtattgcttttggaattgatgaattcggcaaaagtgcaccctataaagatatttataaatattttggactagagagcacaaacattaaaaatattactaaaaaattattaaaaaaataaa

SEQ ID NO: 231147 - DNA, 942 bp, Unknown
  Bacterial polypeptide expressing nucleotide sequence isolated from the Sargasso Sea
catgctggcggtcgatgcggtcaacaagtccaatagcggccaccccggtttgccgatgggctgtgcgcccatgggttacaccctctgggacaagtttctcaagcacaaccccaagaacccgaagtggttcaaccgcgatcgtttcgtgctctcagccggtcacggctgcatgctgctctacgccttgctgcacctgaccggctacgactcggtcacgatcgaagacatcaagcaattccgccagtggggttcgaaaacacctgggcaccccgagacttttgaaacccctggcatcgaggtaacaaccgggcctctgggcgctggcatctccaacgctgttggcctggcgattgctgaggctcacttggccgccaagttcaacaagcctgacgccaaggtcgttgatcactacacctacgtgatcatgggcgatggctgtaaccaagaaggtgtggcttctgaggcctgctccttagctggtcacctcaagctgggcaagctgattgccctctacgacgacaaccacatcaccattgatggacgcaccaacgtctccttcaccgaggacgtgctgaagcgctacgaggcctacggctggcatgttcagcacgtggctgacggcaacaccgatgtgaacgccatcgccaaggccatcgaagccgccaaggctgtcaccgacaagccttccatcatcaaggtgaccaccaccatcggctatggctcgcccaacaagagcgataccgccggtgtgcacggcgctcccctgggtgaagaggaagccactctgacccgccagcaactgggctgggattacggcccctttgaggtgccccaagaggcctatgaccaataccgtcaggccatcgagcgcggcgccagcctcgaagctgagtggaaccagccctggccggctaccgcagcaagtaccccagcgaagcggct

SEQ ID NO: 231148 - DNA, 867 bp, Unknown
  Bacterial polypeptide expressing nucleotide sequence isolated from the Sargasso Sea
aaaaactttagacaattaaattcaatttgcgcaggacaccctgaatacactcctaattcaggaatagagaccactactggacctttggggcaaggaatagcaaactcagtgggaatggcaattgcagaagaaattttaaaagaaaaaattggtaaaaatattataaatcacaaaacttatgttttagctggcgatggttgcctaatggaagggataagtcatgaagctttaagtttagctggtcatctaaaattaaaaaatttagtcatgttgtttgataataactctatttcaattgatgggcctactagtcttgctgtatctgataattttaaaaaaaggtttgaaagttatggttgggattatattttaattaatggtcacaacgaaaaacaaatatcaaaagcacttaagaaagcacaaaaagcaaaaaaacctaccgtgatatcttgcaaaactgttattggttttggttcacctaataaatcaggaaaagcatctgcacatggaagtcctcttggtgaagatgaaattaagttggtaagaaaaaaattaaaatggaatcatcccccttttcaagtaccaaaaaaaatattagacgagtggaaaaaaattggaattaaaggaactaaggaagaagaaaaatggaataaaaaaaatagaagaaattttaaaaaaattaataaattatttcaaccaataaacagaacatcaactggattggacatgtttagtttgaaattgggagatgattttcttaaagaaaaagaaaatattattaatgaaaatgaagctatagcaactagaaaatcatctgaaaaaatattaaatttctttgtaaaaaaaattcctattataataggtgga

SEQ ID NO: 231149 - DNA, 612 bp, Unknown
  Bacterial polypeptide expressing nucleotide sequence isolated from the Sargasso Sea
tttgagtaaattttataaagaattagctaattgtattagatttctctcaattgatgctgttcaaaaagcaaactcaggtcaccccggaatgccgatgggaatggcagatgttgctacagtactttttaaagattttttaaaatttaatccaaaaaatcctagctggattaatagagatagatttgttctttctgctgggcatggatcaatgttgctttattctcttctttatttaactggttacaaaagtgtttctctgaatgatattaaaaattttagacaattagagtccatatgtgctggtcatcctgaatatcatccaaataccggtattgaaactactacaggtccattgggacaaggagtctcaaacgcagttggctttgcaatatcagaagaaattttaaaaaaacaattagggaaaggaaagatcaatcataaaacttatgttctcgctggcgacggatgcttaatggaaggcattagtcacgagtcattgagtttagctggacatctaaaattaaagaatcttattttattatttgataataattctgtatcaattgatggtcccactaatttagctgtttcagatgatcacgaaaaaagatt

SEQ ID NO: 231150 - DNA, 790 bp, Unknown
  Bacterial polypeptide expressing nucleotide sequence isolated from the Sargasso Sea
tcacatggtagtcccttgggcgaagatgagattaaacttgtcagaaaaaaactaaaatggaattatgaacctttcaatataccaagtgaatttttaggtgagtggagaaaaattggagaaagcgcttcacaaaaagcaaaaaaacatgaaaaaaaatataaaaagaaaatattagattttaaaagtattgactcttttaaagattcaattgagaaatttaaaaatgattatctaaaagactcaaaaccaattgctacaagaaaatcttctgaaatgtttctaaatattgtaacaaaattaccaaatttaataggtggttctgctgatttagctggatcaaataatacaaagaccaaagaccataaaattataaaaccaggaaatttcttgggaaactacattcattatggagtaagagagcatgcaatgtgtggaataatgaacggaatagcgttacacagtaatctaattccttatggtggaacatttttaatatttagcgactattgtaaaccatcaataagattagcagcgatgatgaaacaaaaaattatttatgtttttacacatgactctattggacttggtgaagatggaccaactcatcagcctattgaacaattaacaagtttaagatctattccaaatttgaatgtttttagaccttctgatttgatcgaaacttttgaaagttggcaattagcgctcgagagcagaaatacaccaagcgttatagctttaactagacaggcaataagaccagtgagagtgaaaaattcgttaaaaaatg

SEQ ID NO: 231151 - DNA, 944 bp, Unknown
  Bacterial polypeptide expressing nucleotide sequence isolated from the Sargasso Sea
agaaattggagtggaaacacaacaggtcctttgggccaaggcattggaaatgcagtagggatggccctggctgagaaggtgctggcaagcaagtttaaccaaccagatggactccagccaattgatcactatacatatacctttctcggtgacggctgtttaatggagggagtctctcatgaggtatgttcttttgcaggcactcatagattgggcaagttaatttgtttctatgatcaaaatggaatctccattgatggggagataacgaactggtttacagacaatacggcccaaagatttgaaagttacgactggcaagtgcttgaagtagatggtcataatatagtacaaattttagaggcgataaaaaatgcacaagcagaatcaagtcgaccaaccttaatttgttgcaagactgaaattggatttggatcaccaaataaagcaggaacgtcaggcgttcatggctctcctttaggcgatgaggaaattgtaaaaacaagaaatcagttggagtgggagcatggtccttttgatattccagagaatatcaaatctgaatgggatgctatagaagatggctctaaagtaaactctgaatgggattcactaatgaatgaatactctaaaaaacatccagtgctttttaatgaactaaaacgattaattaataatgatttgccgaatgattttgaacaaaattatgaagactttattgagggattaattgccaccgatcaaaaagatatggcaacccgtaaagcctcagaggtttgtttgaatttcttttgtgaacaactgcctgagctcataggagggtcagctgatctgaccgggtcaaacaatactttttcttcagttagctctgaactacttcctgataatcctccaggaaatcatattttttatggggtaagagagtttggaatgacgaccatcat

SEQ ID NO: 231152 - DNA, 817 bp, Unknown
  Bacterial polypeptide expressing nucleotide sequence isolated from the Sargasso Sea
actacttccctagacacactttgcgtcaacagcatcaggatgctcgctgttgatgcaattaataaatccaaaagtggtcacccaggtttacctatgggttgtgcacctatgggttatgccttatgggacaagcacttacgacacaatccaaaaaacccgaaatggtttaatcgagacagatttgttctttcagcgggacatggatgcatgcttttgtatgctctcttgcatttgactggctatgactctgtcaccattgaagatataaaagaatttagacagtggggagctaaaactccagggcatccagaaacctttgaaactcctggagttgaagtaactgcaggacctttgggagcaggaatttcaaatgcagttggattagccattgcggaagctcaccttgctgcaaaattcaacaaacctgattcaacagttgtagaccattacacctatgtgatcatgggagatggatgtaatcaagaaggtatttcttcagaagcatgttctcttgctgggcatttaaaacttggaaaattaatagctctctatgacgataatcacataactattgatggaagaacagatgtctcatttactgaggatgtcttaaaaagatatgaagcatatggatggcatgtacaagaaatttctgaggggaatacagatattgaaggcatatctcaagcaatcgaaaaggcaaaatcagtcactgataagccatccatcatcaaagtaacaacaactatcggctacggttctccaaataaaagtgatactgcaggtattcacggcgccccattgggggaagaagagg

SEQ ID NO: 231153 - DNA, 945 bp, Unknown
  Bacterial polypeptide expressing nucleotide sequence isolated from the Sargasso Sea
gatgttgcccactgttcttttcactaaatttctaaagtttaattcttctgcccccaagtggcatgatagagacaggttcgtattgtctgctggccatggctcgatgcttttgtattctcttctgtacctcaccggttaccgtgatatgaccataaaggatatcaaaaaatttagacaacttgatagtaaatgtgcgggtcatcctgaatatgggcatgctcaaggtattgaaacaactactggtcctctaggacaaggaataggaaatgctgttggtatggcattagctgaaaaaatattgagtggccaatttggacagaagattatcgatcatcatacatatgttattgccagtgatggtgacttgatggaaggcatatctcatgaggttgcatcgtttgcaggtcatttgaagttaaataagctaattgttttttttgatgataatggaatttcaattgatggacctgttaaactctcaaattctgaaaatacaattgaccgctttaaggcctatggatggaacacgataaaaattaacggtcacaataaagatgaaattataaaagcgatctcaaaagctaaaaaatcaaaaaaacccactataatttcttgtaaaacaaaaattggtttcggctcacctaacaagcaaggtaaatcttcctctcatggcagtccacttggggaagaagaagtcagcttaactagatccaaactaaaatggccccacaagcctttttcggttccaacaaatatattaaatgaatggaaaaagtctggcaagagatcagctgatgtatataagaaatggaaaatagattttgaaaaactgtccaaaaagaaaaaagatgaatttgaaagaagaattagcggaaatattccaaagaaagttaaccagcttttaagcaagtttaaaaaagactcaataaagaaaccaattgatat

SEQ ID NO: 231154 - DNA, 730 bp, Unknown
  Bacterial polypeptide expressing nucleotide sequence isolated from the Sargasso Sea
ttgagtaaacaatacagagaattagcaaattgcatcagatttttatcaattgatgctgttcaaaaagcaaattcagggcaccctggaatgccaatgggtatgtctgatgttgctacagtactttttaaagattttttgaattttaatccaaagaacccaagttggattaatagggatagatttattctttcagctggtcatggatcgatgttgctttactcacttttatatttaactggatataaaagtgtttctttgaatgatataaaaaatttcagacaacttgattctatttgtgctggtcatccagaataccatccagacacaggaatagaaactacaacgggccccttaggtcaaggaattgcaaattcagttggttttgctttatctgaagaaattttaaagaaaaaatttggaaaaaataagattaaccataaaacttacgtacttgctggtgatggatgtttgatggagggtatcagccatgaggctcttagtttagcgggtcatcttaaacttaaaaatctaattttactttttgataataattcaatttcaattgatgggccaactaatttagcagtttcagatgataatgaaaaaagatttaaaagttatggttggaattatttaaaaatcaatggtcataattataaagaaatatcaaaagctcttaaaaaagctcaaaattcaaaaaaacccatagcaatttcttgtaaaacaacaa

SEQ ID NO: 231155 - DNA, 736 bp, Unknown
  Bacterial polypeptide expressing nucleotide sequence isolated from the Sargasso Sea
ttagaaattgcatccaaacttccaaacttaattggtggatcagcagatttagcaggatccaataatacgaaaaccaaaaatcataaaattattcactcaaatgatttttccggaaattatattcattttggggtaagagaacatgcgatgtgtggtattatgaatggtatctcacttcatagtgagcttattccttatggtggaacttttttaatatttagcgattactgtaaaccatcaataagactagcggccatgatgaaacaaaaagttatttatgtttttacacatgactcaattggtcttggagaagatggtccaacccatcaaccaatagaacaattgacaagtttaagatcaataccaaatttaaatgtttttagaccttctgacttaatagaaacttttgagtgctggcaattggcattaaatagcaaaagttctccaagcgtaatagcattaacaagacaaagcttaaatccagttcgtacaaaaaaatcatcaaaaaatttgtctttagttggtgcttatgaagttttaagaacgggtaatataataagtgcaactattatagcaacaggatccgaaactagtcttgcaatagacgttagtcataaattagccacagatggcatttactcaaaagtaatatcaatgccttgccaggaattatttgatcaacaaagtgaagtctacaaaaataaaattttaaatgaaactaagcttgtaatttcta

SEQ ID NO: 231156 - DNA, 847 bp, Unknown
  Bacterial polypeptide expressing nucleotide sequence isolated from the Sargasso Sea
agaaagtcatctgaaatatttttaaacattataactaaattgccaaatctaattggaggttcagctgatttagctggatcaaacaatactaaaactaaagatcataaaataattaaacctggtaatttttctggaaactatattcactatggagttagagagcatgctatgtgtggaataatgaatggtatagctctacatagtaatttgattccctatggaggaacatttttaatttttagtgattattgtaaaccatcaataagattagcagctatgatggaacaaagagttatatatgtgttaactcatgactctataggtttgggtgaagacggtccaactcatcagccaattgagcaattaacaagtttaagatctatcccaaacttaaatgtttttagaccttcagatacaattgaaacttttgaatgctggcaattagcacttgaaagtgaaaatactccaagtgttatagctttaactaggcaaggaattaatccagtcaggcttgaaaattcttctaaaaatatgtcttcattaggggcttatgaaattttaagaactggaaataatatcagcgtaacaattttggcaactggatcagaaactagtttagcaagtgaagtaggtcataaattagccacagatggtatttattcaaaaataatatcaatgccttgtcatgaattatttgatcaacaaaatgagggctataagaataaaattttaggtgaaacaagtcttattgtgtctatagaggcatctgaaacaaatctttggaaaaaatatactgggaataacggattaaattttggaataaacaattttggaaaaagtgctccat

SEQ ID NO: 231157 - DNA, 615 bp, Unknown
  Bacterial polypeptide expressing nucleotide sequence isolated from the Sargasso Sea
tttgaacaaaaaaaataaaattttagctaactcaataagatttctttcgatggatgccgtgcaaaaagccaattctggtcatccaggtatgccaatgggaatggcagatgttgttacaattttatttaaatattttttaaaatttaatccaaataatccgagttggcttaatagagatagattcgttttatctgctggacacggttctatgcttttatattcattattatacttgaccggttttaaaagtgtttctttaaaagatatcaaaaattttagacaattaaattccatttgtgcaggacatccagagtatattcctaatactggaatcgaaactacaactgggcctctaggacaaggaatatcaaatgccgttggatttgctttagctgaagagatgttaaaaaaaaaattaggtaaagatataattaatcataaaacttatgttgttgctggcgatggttgtttaatggaaggtataagtcatgaggcaatgagtttagcgggtcatttaaaacttaaaaatttggtaatgttgtttgataacaactcaatatctattgatggaccaactagtttaactgtttcagataattttaaaaaaagatttga

SEQ ID NO: 231158 - DNA, 727 bp, Unknown
  Bacterial polypeptide expressing nucleotide sequence isolated from the Sargasso Sea
ttgaataaactacataatgatttggcaaattgcatcagatttttatcaatagatgcggttcaaaaagctaattctggacacccaggtatgccaatgggtatggcggatgttgtgactgtactttttaagaattttttaagatttaatcctaaaaatccaaattggatgaacagagatagattcgttttatctgcaggtcatggatcaatgcttttatactctttactgtttttaaatggatataagagtatttcattaaatagtataaaaaattttagacagctaaactcaatatgtgccggtcaccccgaataccatccaaattcaggtatcgaaacaacaacaggacctcttggacaaggaatagcaaacgcagtgggatttgcaatcgcagaagaaattttaaaaaaaaaattaggaaatgatttaattaatcacaaaacttatgttttggctggagatgggtgtttaatggaaggaataagtcatgaggcaatgagtttagcaggacatttgaagcttaaaaatttagtaatgctttttgataacaattcaatttcaattgacggtccaactgatcttgctgtttcagacaattttaaaaaaagatttgagggttatggttgggattatattttaataaatggacataatgaaaaagaaatatttaaagcattaaaaaatgttcaaaaagcaaaaaaaccaactgttatttctgtaaaacaaa

SEQ ID NO: 231159 - DNA, 402 bp, Unknown
  Bacterial polypeptide expressing nucleotide sequence isolated from the Sargasso Sea
aatgaataaaatttcaagctcccaatcagcaaatgccctaagaatcttggcgcttgactctgtgaaacaggcgaattctggtcattccggtatgcctatgggaatggcagatatcgccgaagtgctttggcagaatcatttaatacataatcctggaaatcctgactggttcaatagagatagatttgtgttgtcgaatggtcatggttctatgcttatatacggacttttgcacctctcaggttatgatttatctatccaagatttaaaagattttagacagttgcattcaaaaactgctggccatccggaatttggaataacaccaggtatagagaccactactggaccattaggacaaggtattgcgaacgcagtaggaatggccattgcagaaaaaac

SEQ ID NO: 231160 - DNA, 484 bp, Unknown
  Bacterial polypeptide expressing nucleotide sequence isolated from the Sargasso Sea
ttgagtaaaatacataacgatttagcaaattgtatcagatttttatctatagatgcagttcaaaaagctaattctggtcaccctgggatgccaatgggtatggcagacgttgcaaccgtactttttaggtattttttaaaattcaatccacaaaatccaaattggataaatagagatagatttgttttatcagccgggcatggttcaatgcttctttattctttgttgtatttgactggttataaaagtatttcattaaattcaattaaaaattttagacaactaaactctatttgtgcaggtcatccagagtatcatccaaaaactggaattgagacaaccactggtccacttggacaaggaatagctaatgcagttggatttgcaatagctgaggaagtacttaaaaaaaaaattggtaaaaatctaattaatcacaaaacttatgttctagctggcgatggttgcttgatggaaggtatta

SEQ ID NO: 231161 - DNA, 583 bp, Unknown
  Bacterial polypeptide expressing nucleotide sequence isolated from the Sargasso Sea
tttgaataaactacataatgatttggcaaattgcatcagatttttatcaattgatgcggttcaaaaagctaattctggacacccaggtatgccaatgggtatggcggatgttgtaaccgtactttttaagaattttttaagatttaatcctaaaaatccaaattggatgaatagagatagattcgttttatctgcaggtcatggatcaatgcttttatactctttactatttttaactggatataagagtatttcattaaatagtataaaaaatttcagacagctaaactcaatatgtgccggtcatcctgaataccatcctaattcaggaatagaaacaacaacaggacctcttggacaaggaatagcgaactcagtgggatttgcaattgcagaggaaattttaaaaaaaaaattaggaaatgatttaattaatcacaaaacttatgttttagctggagatggttgtttaatggaagggataagccatgaggcaatgagtttagcgggacatttgaagcttaaaaatttagtaatgctttttgataacaattcaatttcaattgacggtccaaccgatctt

SEQ ID NO: 231162 - DNA, 370 bp, Unknown
  Bacterial polypeptide expressing nucleotide sequence isolated from the Sargasso Sea
ttgaataaagaaaacaaaatattagcaaacgcaatacgttttctttcaattgatgctgttcagaaagctaattctggacacccaggtatgccgatgggaatggcagatgttgttacgattttattcaaacattttttaaaatttaaccctaaaaaccctagttggctgaatagagataggtttgttttatccgccggtcatgggtcaatgcttttatattctttgctttatttaacaggatacaaaagtatatctttaaatagcatcaaaagctttagacaattaaattccatttgtgctggacaccctgaattcgaggcaaacaccgggatagaaacaacaactggtcctcttggacaaggaatatcta

SEQ ID NO: 231163 - DNA, 475 bp, Unknown
  Bacterial polypeptide expressing nucleotide sequence isolated from the Sargasso Sea
aatggctgatgcaataaggtttttatctatggatgcagttcaggctgctaattcaggtcatccaggaatgcccatgggtatggcagatgttgctactgttcttttcaaagattttattaatatttacccagataaaccagattggccagatagagatagatttgttttatctgctggtcatggatcaatgttattatattcacttcattatcttttaggctataaagatatgccaattgaaaacataaaaaatttcagacagttaaattataatacagcggggcatccagaatttggtcatgcaaatggtatagagactacaactggaccattaggacaaggtcttgcaactgcagttggaatggctttaagcgaaaagttaatggcatccagatttagtaataatttagttgatcatttcacttatgttatttgcggtgatggttgtctacaagaaggtattagtcatgaagca

SEQ ID NO: 231164 - DNA, 938 bp, Unknown
  Bacterial polypeptide expressing nucleotide sequence isolated from the Sargasso Sea
ccttctatacttgactggttataaaaagattcagttagaagatataaaaaattttagacaaataaattcaatatgcgctggtcaccctgaatatgagtttgactctggtatcgaaactacaactggtccattaggtcaaggtttaggcaactcagttggaatggctatcgctcaagaaattcttcaaaaaagacttggttcaaaaattataaacaataaaacttatgtaatcgctagtgatggagatcttatggaaggaattagtcatgaagcgatgagtttagctggacatttgaatttaaaaaatttaatcgtattcttcgacaataacaaaatttctattgatggagctacttctctaagtgtttcagataattacaaaaaaagatttgaagggtacggctggtcttttcaagaaattaatggtcataactacaagcaaatagataaagctataaaaaaagctaataattcaaaaaaaccaacaattatatcttgtaaaacaattattggatttggatctccaaataagtctggaaaggcatcttcgcatggggctccattaggagaagacgaaataaagttagttagaaaaaaacttggctggaaataccaaccgtttgagattcctgaaaatattcttaattcatggagagaaataggaaataagggtgaagaattagaaaaaaaatggaaaaataatttggaaaaaaatcccaaaacaaaaagtgatttagatagaataattaaaggtgagttaagtttaaatttagacaaaataatgggtgacgaaaaattgaagttttttcaaactaagcctaaaatggctacaagacaatgttcatccacagttatagaaactctcacaaacgttttaccagagttaattgggggttctgcagatcttagtggatcaaataataccaaaactgaaaaat

SEQ ID NO: 231165 - DNA, 844 bp, Unknown
  Bacterial polypeptide expressing nucleotide sequence isolated from the Sargasso Sea
acaaaatttaaaaaattaacaaaaaataatttaataaacgcgttaaaaaaagaaaaaagaaatgcaataaaagagcctaaaaaattagctacaagaaaatgctctgaaatgacattaaatgcgttaacaaaccaaaatcataacttaattggtggctctgctgatttagcaggatccaacaatacaaaaacaaaaaatcagaaaattattaaacctggagatttcagcggagattatattcactatggagtaagagagcatggcatgtgtgggataatgaatggtatttcactttatggtaatttaattccgtatggtggtacttttttaatattttctgattattgcaaacctgcaattagattatctgcattgatgcaaaaaagagtaatatatgtaatgacacatgactctatagggctaggagaggatggaccaacccatcaaccaatagaacaactctcaggtttgcgatcgattccaaatttatatgtttttcggccggcagatagagttgaaacaattgaatgttgggaacttgctttgaaaagttctaaaacaccaagtattttatctttaacaagacaaggcctaaatcccgtaagaaaatcatttacaaatataaataaatgttccttgggagcctatgaagttttgagaactaataataaaattaatttaacaatatttgcaagcggttcagaggttaatttggcaatcgaaattagtcataaattagccaaagataaaatatattgtaaagttgtatcaatgccgtctatggagcttttcgatctacaatcaaaattatataaaaataaaattctaaaagaaactaaatcta

SEQ ID NO: 231166 - DNA, 766 bp, Unknown
  Bacterial polypeptide expressing nucleotide sequence isolated from the Sargasso Sea
aatggtcgctgcatctgtttcattagaatcactttgtgtaaatagtataagaatgcttgctgtagatgcagtaaataaatctaatagtggacatcctggattgcccatgggatgtgctcctatgggttatgcattatggcaaaacattcttaatcacaaccccaataacccaaaatggttcaatagagaccgttttgtattatcagctggtcatggctgtatgctcttatattctttacttcatttaacaggatacaaatcagtttctatagaagatattaaagaatttagacaatggggatcaaaaactcctggacatccagaaacattcgaaactgagggtgtagaggttacagccggtcctcttggagctggaatttcaaatgcagttggtttagcaatagctgaaactcacttagcagctaaatttaataagcctgattgcaatattgttgatcactttacatacgtaataatgggtgacggttgtaatcaagaaggtattgcatcagaggcttgctcattagctggccacctcaagcttggaaaattaattgcgctctatgacgataatcaaattacaattgatggacgaaccgacgtttcttttaccgaagatgttttaaaaagatacgaagcttatggatggcatgttcaacatgttgaagatgggaatcatgatgtcaaaggaataactgaagctatcgaaaaagcaaaattagttacagacaaaccttcaattataaaaatttctacaacccatagg

SEQ ID NO: 231167 - DNA, 748 bp, Unknown
  Bacterial polypeptide expressing nucleotide sequence isolated from the Sargasso Sea
gcctcttcccatggagctccgttaggagaagaagaaatctcattggttagaaaaaaattaaagtggaaaagtgaaccttttgtagtacctgagcaaattttaaatacttggcgagaaataggaaaaaaaggagctaaattggaagatgactggcaaaaaaaattaagcaaaacaaatagcactataaaatctgatatggaaaatatacttctagataagaatattaataatcttgaagaattaattaattctgaaaaaactaaatactttgagtcaaagcctagcatggctacaagacaatgttctgcatcggttattgatagtattactaatgttttgccagaattaattggtggttctgcagatttgagtggatcaaataatactaaaactaatagttcaaaaattatttcctcaaaaaattttaaaggaaattatattcattacggggttagagaacatggtatggctgcgataatgaatggtttggctctgtataatggccttataccgtttggagggacttttttaattttttctgattattgtaaaccttctataaggttgtcggctttaatgggtttaagagttatatatattttttcacatgactcgattggtctaggggaagatggtccaacacatcagcccatcgaacaactttcagggcttagagctataccaaacttaaatgtttttcgtccagcagatatgaatgaaacacttgagtgttgggaaattgctttaa

SEQ ID NO: 231168 - DNA, 781 bp, Unknown
  Bacterial polypeptide expressing nucleotide sequence isolated from the Sargasso Sea
ttgtaaaactaaaattggatatggttcgcccaacaaatcaggaaaatcttcatctcatggtagccctttaggtttagatgaaattaagcttgtcagaaaaaaattaagatggaagtataaaccatttgaaattccaaagaaaattttaaaagaatggagagaaattggaaaaaagggtgagttgcttgaaaataaatggaaaaaaatctatactaaaaagaaaaataaaatagataaaattttaaaaaataattttgcaaaagttttaaaaaaacaaaaacaaatttctataaaagaaatcaaaagcttagctacaagaaaatcttctgaactcacactaaatgctcttaccaaagagagcaatactttaattggtggttccgctgatttagcaggatctaataatactaaaacaaaatttcataaaattataaaaccaggtgagtttaatagtgattatattcattatggtgtaagagagcacgcaatgtgtggaataatgaacggcctttctcttcatagcagtttaattccctatggtggaacatttctaatattttcagattattgtaaaccttcaataagattgtctgcactaatgaaacaaagagttatttacataatgacacatgactcaataggcttgggagaagatggaccaacccatcaaccaatcgaacagttatctggtttaagagcaattccaaatttaaatgtttttagacctgctgacagagtagaaaccattgagtgttggcaagaagcattaaaaaattctaat

SEQ ID NO: 231169 - DNA, 930 bp, Unknown
  Bacterial polypeptide expressing nucleotide sequence isolated from the Sargasso Sea
tatgtctgatgttgcaacattattattttctaagtttatcaaaatttatccaaaagatcctaaatggcctaaccgtgatagatttgtcttgtctgctggtcatgggtcaatgttactttatgctctaaattattttttaggctataaagatatgacaatcgatcaaataaaaaaatttcgacaaattaattcaattacagcaggtcatccggaatttggccatgctgatggtatagaaacgacaacaggtccattaggacaaggtttagcaaatgcagttggaatgtcaataagtgagcaaatatttaataaaaaatttggttctgaaattatagatcattttacctatgcaatagtaggtgatggttgtttaatggaaggtttaagtcatgaggctatagatattgccggtcacttaaaactaaaaaagcttatagttttatgggataataattctatttcaatcgatggaaatacctcacttgccacatcaattaatcaaattgataggtttaaagcatgtggatgggatgtccattatgttgacggtcataactttgatgatatagaaaaagtaattttaaaatctcaagtaagtgaacttccatctctgatctcatgtgaaacaaaaattggttttggtgcacctaaccttgaaagtacaaataaagttcatggcgcacctcttggtgaaagtgaaatagatttaactagaaaaaatttaaaatgggattatcccccttttgaatttccgaaagaggttatggatgcatggcatttagtttctaataagtcaaaatctgcttatgaagattggaacaatttaattaactcatccaattcaaaaaatgagttttataatagaataaattataattttcctgataaattatttaaaaaattaaatgaatattctaaaactcttataaa

SEQ ID NO: 231170 - DNA, 616 bp, Unknown
  Bacterial polypeptide expressing nucleotide sequence isolated from the Sargasso Sea
atggtcgctgcatctgtttcattagaatcactttgtgtaaatagtataagaatgcttgctgtagatgcagtaaataaatctaatagtggacatcctggattgccaatgggatgtgctcctatgggttatgcattatggcaaaacatacttaatcacaaccctaataacccaaaatggttcaatagagatcgttttgtattatcagctggtcatggctgtatgctgttatattccttgcttcatttgacaggatataaatcagtttccatagaagatattaaagaatttaggcagtggggatcaaaaacacctggacatccagaaacattcgaaactgaaggtgttgaagttacagctggacctcttggagccggaatttcaaatgcagttggtttagcaatagctgaaacacatttagcagctaaatttaataagcctgattgcgatatcgttgatcactatacttacgtaataatgggtgatggctgtaatcaagaaggtattgcatcagaggcctgttcattagctggtcaccttaaacttggaaaattaattgcactatatgacgataatcaaattacaattgatgggcgaaccgacggtttcttttaccgaa

SEQ ID NO: 231171 - DNA, 769 bp, Unknown
  Bacterial polypeptide expressing nucleotide sequence isolated from the Sargasso Sea
ggtgttgttttgggctttgccgatgtgttgactgttctctggagaaagcacatgcgctatgatctggctgatgcaagctggcaaaaccgagatcgttttgttctatccaatggacatgcttctgctttgtattatgctattttacattgctgtggttttgatttgactttggatgatttgaaatcttttcgtcaattgggtagtcgtacgccagggcatcctgaacgtgatccagaactggggattgatgtgtcaaccggccctttgggtcaaggtcttgccaatgcggtagggatgtccttggctcaaaagtatttagaatcggatgtgggagacaaatctcagaacgatttgattgattattatacctatgttgccgttggtgatggatgtcttatggagggcatttcgcatgaagcttgctccttggcagggcggttttctttggggcgtttgatcgtttgctgggatgacaatggtatttctattgacggtgaatgtgaaaactggtctgaaaaatctgttgctggccggtttttatcgtatggttggcaggtgattgatggtgttgatgggcatgatcctgatgccattgataaggccataattcaagcaaaagcgtgtttggataagccgacgctcatttgctttaaaactgtgattggtcatggaacagatcttgcaggtagtagtgtgtcacatggtaagcctttgggaagggcgcgtatagagggtttaaaaaaatctttgcagtggactttggatgatt

SEQ ID NO: 231172 - DNA, 828 bp, Unknown
  Bacterial polypeptide expressing nucleotide sequence isolated from the Sargasso Sea
attggttaatagagatagattcgttttgtctgctggacacggttcaatgcttctttattctcttttatatttaacaggctataaaagtatatctttatcaagcataaaaaattttagacaattaaattcaatttgtgctggtcaccctgaatatcatcctaaaactggaatagaaactacaactggtcctttgggacaaggaatatctaattcggtaggatttgctatttctgaagaaatattaaaaaaaaaatttggacaaaaaatttttaatcataaaacatatgtaatagcaggagatggttgtctaatggaaggagtaagtcacgaagcaatgagcttggctggtcatttaaaattaaaaaatttaattatgttgtttgataacaactccatatcaatagatgggccaacaaaacttgctgtatctgacaactataaaaaaagatttcaatcttacaactggaattatattgaaattgatggacataacgagaaacaaatatttagagctttaaagaatgctcaagcatcaaaaaaaccaacttgcatttcatgtaaaactaaaattggatatggatctccaaataaatcaggaacatcttcagctcatggaagtcctttgggaaaagaagaaataaagctagttagaaaaaaacttaaatggaattattcgccttttaatttacctaaaaatataattcaagagtggagaaacataggattaaaaggaaagaaattagaaaaaaaatggaataaaatttatttaaataataaaaaatcaattaataattatttcaattttaatccccagcccgcgctctcaaa

SEQ ID NO: 231173 - DNA, 899 bp, Unknown
  Bacterial polypeptide expressing nucleotide sequence isolated from the Sargasso Sea
tttgagtaaaatacataacgatttagcaaattgcatcaggtttttatcaattgatgcagttcaaaaagctaattctggtcaccctggtatgccaatgggtatggcagatgttgtaaccgtacttttcaagaattttttaaaatttaatccacaaaatccaaattggattaatagagatagatttgttttatctgccggacatggctcaatgcttctttattctttgttgtacttgactggttataaaagcatttcattgaattcgataaaaaaatttagacaactaaactctatatgtgcaggtcatccagagtatcatccaaaaactggtattgaaacaaccactggtccacttgggcaaggaatagctaatgcagtaggatttgcaatagctgaagaagtacttaaaaaaaaattaggtaaaaatctaattaatcacaaaacttatgttctagctggagatggttgtttgatggaaggtattagtcacgaagccatgagtttagctggtcacttaaaattaaaaaatttggtgatgcttttcgataataataatatttctatcgatggtccaacaagtcttgctgtatcagataattttaaaaaaagatttgaaagctatggatgggattacatattagttgacggccacaatgaaaatcaaatttatagagctttaaaaaaagttcaaaatgcaaaaaaaccaactgtaatttcttgtaaaacaaaaattggatatggctctcctaataaatctggtaaatcgtcttcacatggtagtcctttaggagtagatgaaatcaaattagtaagaaaagcactcaaatggaaatataaagcctttgaaattccaaataaagtaataaatgaatggagagctataggaagcaagggtcagt

SEQ ID NO: 231174 - DNA, 676 bp, Unknown
  Bacterial polypeptide expressing nucleotide sequence isolated from the Sargasso Sea
aaacttaagtcaaaaacaccaggtcaccccgagtatgatatcgatattggagttgaaacaaccactggcccacttggacaaggaattggaaatgctgtaggaatggctctagccgaaaagaatcttgcagcaacatttaacaaagaagatataaaaataatagaccattttacttatgcttttcttggcgacggctgtcttatggaaggtatctcacatgaggtttgctcttttgctggaacacataaactcggaaaactcatatgtttttatgatcaaaatggaatatccatagatggagaaattgatctatggtttaccgataatacaaaacaaaggtttgaaagctatggatggcatgtggttgaaattgatggccatgacatagatgaaattaataaagctactgaagaagccaagaaagaaactgaaagaccatcattaatttgctgtaagacaactatcggatttggctcgccaaataaatcaggaactgctggagttcatggaagtccattaggtgaggacgaaattgaaataactaggaaagagcttaactgggagcatggcccttttgaaatacctgaagatatttatgatgtctggaatgcaaaagatgagggtgccaaaaaagaaaaagcttgggaagatcttctaaaaacctatagacaaaaat

SEQ ID NO: 231175 - DNA, 871 bp, Unknown
  Bacterial polypeptide expressing nucleotide sequence isolated from the Sargasso Sea
tctgagatgacacttaatgcattaacaaaacaaaatcataacttaattggtggctcagctgatttagctggatctaacaatacaaaaacaaaacatcaaaaaataattaagcctggagattttagtggagattatattcattacggagtaagagagcatggaatgagtggaataatgaatggtattgcactctatggaaatttaattccatatggtggaacttttttaattttttctgattattgtaaaccttcaattaggttatctgcgttaatgcaaaaaagagtgatatatgtaatgacgcatgactctataggacttggagaggatgggccaacccatcagccaattgaacagctctcaggtttacgatcaattccaaatttaaatgtctttaggccagcagatagagttgaaacaattgaatgttgggaacatgctttaaaaagttcgaaaacaccaagtattttatctttaacaagacagggcctaaatcccataagaaaaacatttacaaatataaataaatgttctttgggagcctatgaagttttgagaaccaataataaaattaatttaacaatatttgcaagcggttccgaggttaatttggcaatcgaaactagtcataaattagccaaagataaaatatactgtaaggttatatcaatgccatctatggagcttttcgatcaacaatcaaaattatataaaaataaaattttaaacgaaactaaatttaaaatttcaatagaggctggatcaagcgattgttgggaaaaatatgtagggagttcaggtttaacatttggaatcaatgaatttggcaagagtgcaccctacaaagatatttttaaacacttggactaac

SEQ ID NO: 231176 - DNA, 454 bp, Unknown
  Bacterial polypeptide expressing nucleotide sequence isolated from the Sargasso Sea
tttgagcaaactacacaacgatttagctaattgcatcagatttttatcaattgatgctgttcaaaaggcaaattccggtcacccaggaatgcctatgggtatggcagatgttgcaacagtgttatttaaaaattttttgagatttaatccaaagaatccagattggttaaatagagatagatttgttttgtccgctggtcatggttctatgcttctatattctttgctttacctaactgggtataaaagcatatcaattaataaaattaaaaaatttaggcaactaaattctatttgtgcaggtcatcctgagtatcatccgaaaacaggtattgaaactacaacaggtcctcttggacaaggtatatctaatgcagttggttttgcaatcgctgaggaaattttaaaaaataaattaggtaaagatttaattaatcataaaacttatatttta

SEQ ID NO: 231177 - DNA, 754 bp, Unknown
  Bacterial polypeptide expressing nucleotide sequence isolated from the Sargasso Sea
aatgactgaacaaaatttagatatgctaagcataaacacgatcaaactgctatcagttgattctgtccaaaaagctaactcaggccaccctggtgctcctatgggagcggctactatggcgtatgtcctctggaaagatttcctaaaacataaccccgaaaatccccaatggattaaccgagacagatttattttatctcctggtcatgcctcagccctgctatatagtttacttcatcttactggctacgaagtcagtttagaagacctacaacaattcagacaactcgaaagcaaaaccccggggcatccagaatacggggtcactcctggagtagaagtaaccactggaccgcttgggcaaggatttgctaatggtgtgggcatggcaatagcagaagctaaactagcatccgattttaataccgaagaacatcaaataatagaccattacacatatgctattgtatctgacggagacctccaagaaggagtagcatccgaagcagcatctttagctgggaccctaaaattaaacaagcttatatatttatatgacagcaacaacatatctatagaaggggatacaaaattatcatttacagaaaatgtagctggcagatttaaggcctatgactggcaggttataggacctgttaatggttctgatattaatgagatccataacgctattagccaagctagaaatgaaacttctaaaccgtcacttatcatctgtgagactgtgataggt

SEQ ID NO: 231178 - DNA, 800 bp, Unknown
  Bacterial polypeptide expressing nucleotide sequence isolated from the Sargasso Sea
caaggacaaaccctcatttattgcctgcaaaacaaccataggttttggttctccaaataaagctggaactgcaacaacacatggagcgccacttggtgaagatgaaattgccgccacacgtgaaagtctgaattggcctcatccgcctttcgaaatccctcagacagtttcaagcgcctggcgtagaatcggcgaaatgcatactgaaaaagttgaagtatggaaaaatcgtttgaacgagtcaaagcaaaaagatgaatttgaacgtgttatgtccgggacattgccacagaaatgggaagatactcttctggaattcaaacgtaatcatacggaagagaaaacaaaaatggcttcacggaaagcgagtcaggaaactttgaatgttctgatcgaggttattcctgaattggctggtggttcggcagacttgacaggatcaaatctgacaaaagctaaatcacaaaaaacaatagttccaggggaatttggaggaagctacattcactatggagtcagggaacatggaatggctgcagccatgaacggtatcgcacttcatggaggtttcattccttatgggggcacttttttgatttttactgattattgcagaccttctattagactatcggccctgatggaacagcgtgttatttatgtgatgactcatgattcaatcggactgggagaagacggtcctacgcaccagcccgtggagcatctggcgagcttgagagcaattcccaacttaaatgtctacagaccctgtgatattgtagaaacagcagaatgctggg

SEQ ID NO: 231179 - DNA, 697 bp, Unknown
  Bacterial polypeptide expressing nucleotide sequence isolated from the Sargasso Sea
atgacttcttcacctagacatcaggaaatggcaaacgctatccgctttttatctgcagatgcagttcagaaagctaattcaggacatcccggaatgccaatgggaatggcagatgttgctactgttcttttatcaaggttcatgaatttcagtgcaagcaatcccgactggccggacagggaccgtttgatattatctgcaggacacgggtccatgcttctatactctctgcttcacctgaccggatacaaggatttcacaattgatgaaataaaaaattttcggcaactgggatcccgtaccgcaggtcatccggagtatggccatggtgctggtattgaaactacaacaggacctcttggacaaggtctggcgaatgcttcaggaatggcactggctgagcgcatgctctcagaaagattcggcagtgagatcgtagatcactacacttatgtgattgcaggagacggatgcctgatggaaggagtcagtcatgaagcagtatctttcgcaggatgtttgcgtctgggtaaacttatcgttatttttgacgataatggaatttccatagacggttcaacacaacttgctgtcaacgacaatcaactcacgcgttttgaatcttgtggctgggatgtttctgaatgcgatggacataatccgcatgcaatgaacaagtcattaagcaggcaagaga

SEQ ID NO: 231180 - DNA, 913 bp, Unknown
  Bacterial polypeptide expressing nucleotide sequence isolated from the Sargasso Sea
ttgagatttaatccaaaaaatccaaattggataaacagagatagatttattctttcagccggtcacggctcaatgttgctttattctattctatatttaaccggttataatagtgtttcaataaacgatatcaaaaattttagacaaataaactctatatgtgctggtcatcctgaatatcatgatagttctgggattgaaactacaacaggtcctttgggacagggaattgcgaatgcagttggtttagccttagcagaggaaattttaaaaaaaaaattaggaaagaaaacaattaatcataaaacttatgtaatagctggagatggatgtttgatggaaggcataagtcatgaagcgctgagttttgctggtcacttaaagttaaaaaatttaattttgttatttgataataattctatttctattgatggctccacaaaacttgcagtatctgatgatataaaaaaaagatttcaaagctacggatggaattatttagacataaacggtcataaagaaaaagaaattattatggcacttaaaaaagctcaaaattctaataagccttttgctatatcttgtaaaacaacaattggttttggatcaccaaataaaggtggtaaggcttcctcacatggaagccccttaggaaaagatgaaatagatctggttagaaaaaagttaaattggaaatttgatcctttcgtaattcccgaaaagattcttaatgcatggagagagattggtaacaaagctgcatcaaaagctgagatgaatgaaggtgctccaatcaaaaataatctaattccaagctcaatttattccaaaattgaacaattaaagagagattatttgaaatctcttgagcccttggcaactagaaaatcatctgaaaaatttttagaagttg

SEQ ID NO: 231181 - DNA, 709 bp, Unknown
  Bacterial polypeptide expressing nucleotide sequence isolated from the Sargasso Sea
ctctgcatcaacagcatccgcttcctggcggttgatgcagttaacaagtccaagagcggccaccccggcctgcccatgggctgtgcacccatgggttacaccctctgggacaagttccttaagcacaaccccaagaatcccaagtggttcaaccgcgaccgctttgtgctgtccgcaggccatggctgcatgttgatctatgccctgctgcacctgacgggctacgactcggtcacgatcgacgacatcaagcaattccgtcagtggggctccaaaacccctggccatccggagacctttgagacccctggcgtcgaagtgacgaccggacctcttggagctggcatttccaatgctgttggattggccatcgccgaatcccacctggccgccaagttcaacaaagcggacgccaagatcgtcgaccactacacctatgcggtgatgggtgacggctgcaaccaggagggcattgcctccgaggcctgctccctggccggtcacctgaagctgggcaaactgattgccctctacgacgacaaccacatcacgatcgacggtcgcacggatgtgtccttcaccgaggacgtgctgaagcgttatgaggcctacggctggcacgttcagcacgtcgcagacggcaacaccgatgtcgatgccatcgccaaggcgatcgaagcggcgaaagcggtcaccgacaagccttcga

SEQ ID NO: 231182 - DNA, 489 bp, Unknown
  Bacterial polypeptide expressing nucleotide sequence isolated from the Sargasso Sea
tatgtcagaacatcctattgaagaacgtgttttagcaaatgcaataagatttttatcaatggatgcaatagaaaaggcaaaatctggtcatcctggtttaccaatgggtttcgcggatgtcgcaactgtacttttcttaaatcatatgaaatttgatcccaaaaaacctcgctggccaaatagagataggtttgtattatccgccggacatggatcaatgcttttgtactcgcttctatatcttttgggatatgaagatatgactattgaggagttaaagtcatttcggatgctcgggagtaaaacacctggacaccctgaataccagatcacacctggcattgaaacgacaactggccctttgggtcaaggagtagctaatgctgttggaatggctatatccgaaagaatcttgaactcaagactaaatgactcagtagttaaccactttacatatgttgttgcaggagatggttgcttaatggaagg

SEQ ID NO: 231183 - DNA, 374 bp, Unknown
  Bacterial polypeptide expressing nucleotide sequence isolated from the Sargasso Sea
catgacgtcacaaactgaattggcaaacgccattcgtgtactcgctatggacgccgtgcaggctgcaaaatctggtcaccccggtgcccctatgggtatggcggatatttcagaggtcctctggaatcgcctgatgagacacaatccggcgaacccggattggcccaatcgtgaccggttcgtgctttccaatggccacggatcgatgctgatctatgctttgttgcacctcaccggttatgaactctcaattgaagacttgaaacagttccggcagctccacagcaagacgccgggtcaccctgaatatggctatacccctggcgttgagaccacgaccggggccgctgggggcagggcatcgcgaacgctgt

SEQ ID NO: 231184 - DNA, 818 bp, Unknown
  Bacterial polypeptide expressing nucleotide sequence isolated from the Sargasso Sea
agggatagatttgttttgtcagctggtcacggctctatgcttttgtatgctcttctttatttaactggatatgaaaaaattaaattggaagatataaaaaattttagacaactaaattcaatttgtgcaggccatccagagtacatttttaactcaggtattgaaacaactacaggtccgctaggtcagggtttggctaattcggtcgggttagctttgtctgcagaaatttataaaaaaaaattaaattccaaaataattaataacaaaacttacgttatagctagtgatggtgattttatggagggtataagtcacgaagctatgagtttagctggtcatttaaaattaaaagatttaatagttttttttgataataataaaatatcaattgatggttcaacttctttaagcgtttcagataattataagaaaaggtttgagtcatacggctggaattttattgaaataaatggtcatgatgaaaaaaaaataaattctgcgattataaaagctaaaaaatcaaataaaccgagtctaatttcctgtaaaacaataattggttatgggtcaccaaataaatctggaaaatcttcatcgcatggagctcctttaggggaagaagaaattaaactagcaagaaaaaaactaaagtggccttatcaagcttttgaaattccaaaagaaattttaagtgaatggagagaaattggagctaaaggtgaaaagcttgaaaaagaatggttgaatgaactaaataaaactaaagaagatacaaaaaaaatatttaataaattaaacaatagagtttttaaaat

SEQ ID NO: 231185 - DNA, 612 bp, Unknown
  Bacterial polypeptide expressing nucleotide sequence isolated from the Sargasso Sea
aatgatttcttcacctagccatcaggaaatggcaaacgctattcgttttttatctgcggatgcagttcagaaagctaattcaggacatccaggcatgccgatgggaatggcggatgtggctactgttctgttatcaaaattcatgaatttcagtgcgagcaatcctgactggccggacagggaccgtttgatattatctgcgggacacgggtccatgcttctatactctctgcttaacctgaccggctacaaggatttcccaatttatgaaatacaaaattttcgacaactgggatcccgtactgcaggtcatccagagttcggtcatggtgcaggtattgaaactacaacaggacctcttggacaaggtttggctaatgcatcaggaatggcacttgctgagcgcatgctttcagaaagattcggaagtgagatcgtagatcaccacacttatgtgattgcaggagacgggtgcctgatggaaggggtcagtcatgaagcagcatctttcgcaggacatttgcgtctgggtaaactaatcgttatttttgacgataatgaaatttccatagacggttcaacacaacttgcagtcaatgataatcaactcat

SEQ ID NO: 231186 - DNA, 602 bp, Unknown
  Bacterial polypeptide expressing nucleotide sequence isolated from the Sargasso Sea
tctggccaacgccatccgcgccctttcgatggacgccgtgcaggccgcgaactcaggccatcccggcgccccgatggggatggccgacatggcgaccgtactgttcacccgtcacctgaagttcgacgcgaccaatcccgaatggccggaccgtgaccgcttcgtcctgtcgaacggtcatgcgtcgatgctgctctactcgctgctgtatctcacgggctcacccgacatgacgctcgacgaagtccgcaacttccgccagcttggcagccgcacaccgggccatcccgaatacggccacgccgccggggtcgagacgacgaccggcccattgggccagggcatcgccaacgctgtcggcatggcgctcgccgaacgcatgatgaacgcgcgctacggcgacgacatcgtcgaccaccacacatatgtatttgtcggggatggctgcctgatggaaggcatcagccatgaggcgatctcgctggctggtcacctgggcctgtcgcgcctcatcgttctgttcgacgacaacgaaatcaccatcgacggcgacaccaatctatcggtgtcggacgaccagatggcgcgcttcgcggcgagcg

SEQ ID NO: 231187 - DNA, 881 bp, Unknown
  Bacterial polypeptide expressing nucleotide sequence isolated from the Sargasso Sea
actgacacaagaaattattaaatttaaaaataatcattttaaggaaaaaacaatctgtgctacaagaaaagcaagcgaattatcattaaatataatttcaaataatttagaaaatttaattggtggttcagctgacttgagcggatctaataatactaaagcaaataatatgcagattattactcctgaaagttttgatggaaattatattcactatggtgtcagagaacatgctatggctggtataatgaatggtatagcattacatggtggtttaaaaccatatggcggaacctttcttgttttttcagactattgtagaccttcaataagattatcggctcttatgaatattcccgtaatatatataatgacacacgattcaattggtttaggagaagatggtcctacacatcaaccagttgaacatctttcagctttgagagcaataccaaatttaacagtaattaggccttgtgatattatagaaacaattgaatcttgggaagtcgcattgcaaaatactggacccaccgtattagttctaacaagacaaaatctacctttaattcaaaataatgaacgtaaagataatttagtaaaaaaaggtgcttatgaaatcataaattatgaaaattatgacgcaacaattttagctactggttctgaagttgaaattgcttgcagtgcatcaatcaaattacaaaaacataataatttaaatattagagttgtgagcattccatcgtttgaactttttgatatcaatgaagaaaagtataagttagatattttaggagatcagccaatttttggaattgaagctggagttgttaatggttgggaaaagtatttggattctaaaaattttgttggtatga

SEQ ID NO: 231188 - DNA, 836 bp, Unknown
  Bacterial polypeptide expressing nucleotide sequence isolated from the Sargasso Sea
gttgggatggtcaatatcaagacattttaaaaataattacccacctggtttcaaaaatcataaagatcagattaatcaatcaattgaaaaaacaataaaaaattatttaaaaaaatcagatcctaatgcaacaagaaaatcatctgaaatgtttttggaattaatatcatctttaccaaacctaattgggggatctgctgatttggctggttcaaataacactaaaacaaaaaaacatgaaataattaaaccaggaaattttaaaggaaattatatacattatggagtaagagaacacgctatgtgcggtattatgaatggtttgtctttgcatagtggtttaataccttatggaggaacattcttaatctttagtgattattgtaaaccatcaattagattagccgcaatgatgaagcaaagagtgatttatattttcactcatgactcgatcggacttggagaagatggtccaactcatcaaccaattgaacaattagctagtttaagatcaattcctaatttaaatgtttttagacctgcagatacaattgaaacttttgagtgttggcaattagcgcttgaaaataaaaacgctccaagtgtaatagctttaactaggcagaaaattgatcctgtgagattagaatattcatctacaaacaaatcttctttcggtgcttatgaaattttaagaacaggagacgacttaagtgtaacgattttagcaactggatcagaaactagtttagcaatcaatataggtcataaattagccacagatggtatttattcaaaagtagtatcaatgccttgccaggaattatttgatcaac

SEQ ID NO: 231189 - DNA, 464 bp, Unknown
  Bacterial polypeptide expressing nucleotide sequence isolated from the Sargasso Sea
tttgagtaaaatacacaacgatttagcaaattgtatcagatttttatcaattgatgcagttcaaaaagctaattctggtcaccctggaatgccaatgggtatggcagacgttgcaaccgtactttttaaaaactttttaaaattcaacccacaaaatccaaattggataaatagagatagatttgttttatcagccggacatggctcaatgcttctttattctttgttatacctgactggatataaaagtatttcattaaattcgataaaaaaatttagacaacttaactctatatgtgctggtcatccagagtatcatccaaaaactggtattgaaacaaccacaggtcctcttggacaaggaatagctaatgcagttggatttgcaatagctgaagaagtgcttaaaaaaaaattaggagagaatttaattaatcacaaaacttatgttctagctggtgatg

SEQ ID NO: 231190 - DNA, 825 bp, Unknown
  Bacterial polypeptide expressing nucleotide sequence isolated from the Sargasso Sea
gtttaagtattataaattaaaaaaacaaaatataacaaatatattttctaataattttcataaagactttgaaaatgaaaaaaagaatattattaaaaatttagaatcaattgcgactagaaaatcttcagaaaaaatactaaatattttaataaagaataattctaatataattggtggatccgctgacttagctggatctaataatactaaaacacaaaaccataaaattattagtcctggaaattttaaaggaaattatattcattatggagtaagagaacacgcaatgtgtggaattatgaatggactagctttacatagcaatttaattccatatggcggtacatttttaatttttagtgattactgcaaaccatcaataagattatcagctctaatgaaaaaaagagtaatatatgttatgacgcatgactctatagggcttggcgaagatggtccaactcaccaacctatcgaacaattatctggtttaagagaaataccaaacctatatgtttttagaccagcagacacaacagaaactttagaatgttggcagattgcattagaaaaaataaactctccaagtattattgctttaacaagacaaaagctaaatccagtccgaaaagaatttgtaaaaaataataagtgctcatacggtgcatatgaagttttaagaaccaaaaatgagattaatgtaacaatatttgcaagtggttctgaggtaaatttagctattgaaatcagtcataaattggccacagaaaatatctattccaaagttatatcagtgcctagccaagaattattaaatgaaca

SEQ ID NO: 231191 - DNA, 862 bp, Unknown
  Bacterial polypeptide expressing nucleotide sequence isolated from the Sargasso Sea
gccattgggcaaagacgaaattgctttaacacgtgaagcattaggctggaaagaagacgcatttgttattcctgaagatgtttatgcagcttgggatgcaaaagcaaaaggtcaaacatctgaaacagcttggaatgaattatttgctcaataccaagcaaaatatccaactgaagcggctgaattgttacgtcgtatcaatggtgatttacctgctgaatttgcagcacaagccgatgcatttattgctgaaaccaatgcaaaagctgaaaccattgcaactcgtaaagccagccaaaatactttacaggcattcggtccattactccctgaattattaggtggttctgctgacttggctggctctaacttaacactttggaaaggttgccaaggcgtacaagaaaatccagcgggtaactacgtgtattacggtgttcgtgaattcggtatgactgcaattgcgaacggtgtggctttacacggtggttttgttccttatgttgcaacattcttaatgtttatggaatatgcacgtaatgcagtacgtatgtcagcattgatgaagcaacgtgtgattcatgtttatacacatgattcgatcggtttaggtgaagatggtcctacgcatcaaccaatcgaacaaattgcatcgttacgcggtacgccaaacttaaatacttggcgtccatgcgatacagttgaagctgcaatttcttggaaatctgcgctacaacgtaaagatggtccaaccgcattaattttctctcgtcaaaacttgccattccaagcacgtaatgaagctcaaattcaaaacgctgcaaaaggtggttatgtacttgcagaagaaaaggtgagttga

SEQ ID NO: 231192 - DNA, 772 bp, Unknown
  Bacterial polypeptide expressing nucleotide sequence isolated from the Sargasso Sea
tttgaacaaatttaataaaactttagctaacagtattcgtgctctttcaatggatgctgtgcaaaaggctaattctggacatcctggaatgccaatgggaatggctgatgtctcaacaatactttttaaatattttttaaaattcaatcctaaaaatcctagttggataaacagagatagattcgttttatctgcgggtcacggatcaatgttattatactctttattatttttgacgggttacaaaagtgttaagttaagtgatataaaaaattttagacaactagattcaatttgtgcaggacaccctgaatatattcctaactctggaattgaaacaacaacaggacctctaggacaaggaatttcaaatgcggttggttttgcgcttgctgaagaaattttgaaaaaaaaatttggaaaagatattataaatcacaaaacgtatgtcattgctggagatggttgcttaatggagggtataagtcacgaagctatgagcttggcgggacatctaaaacttaaaaacctaattatgttatttgacaataattctatttcgatagatggaccaactagtttggctgtttcagataattttaaaaagagatttgaaagttatggttgggattatatcgatattaatggtcataatgaaaaagagatttttaaagcattaaaaaaagtacaaaaagctaaaaagccaacagtgattacaggtaaaactaaaatcggatatgggtctccaaataaatctggaaaggcatcatca

SEQ ID NO: 231193 - DNA, 799 bp, Unknown
  Bacterial polypeptide expressing nucleotide sequence isolated from the Sargasso Sea
ttaattggcggatctgcagatttaactcactctaattacacagatataaaaggcgaaactggatcattccagccacatagccctgaaaaaagatatttacattttggtgtacgagagcatgcaatggcagctgtacttaatggtattgcttatcacaacagtggtcttatcccttatggtggaaccttccttgttttcgccgattatatgaggggctcaatgaggctttcagcactcagcgaattaggagtaatctatgtcttaacacacgattcaattggtgtaggggaagatggcccaacacatcaacctattgaaactatcccttctcttcgtgccatgcctaatatgcttgttttcagacctggagatggcaatgagacgagtggagcttataagcttgctattcaaaatcgaaaaaggccttctgctctttgtttaagtagacaaggtatgccaaatcaagaaaatacttcgatcgacaaagttgctttaggaggatatgtagtttctgattgtgaaggaacaccagatctaatatttattggtactggaagcgaacttaatctttgcattgaagcaagtaaggaaatttcaagcttaggaaaaaaaattagagttgtttctatgccttgtgtagaactttttgaagaacaagaagaatcttataaagaaagtgttttacctagtagtgtgaaaaaaagagttgtagtagaagctgcccattcatttggatggcataaatatacaggttttgagggaatttgtattactatggacagatttggtgcatcagcac

SEQ ID NO: 231194 - DNA, 824 bp, Unknown
  Bacterial polypeptide expressing nucleotide sequence isolated from the Sargasso Sea
tatgtcaaatgccattcgagcgttgacaatggacgctgtgcaagctgcaaattccggacatccgggcatgccgatgggaatggcagacgctgccaccacattattttgcgatcacctaaaattttctgcaagcgcgccttcctgggcagaccgtgaccgttttgtgttgtccgccgggcatggatcaatgttgctttatgcgctgctgcatttaactggctatgccgacatgacacttgaggaattgcgcaatttcagacagctcggcgcacgcaccgctgggcaccctgaatttggacatgcaagcggcattgaaaccacgaccggcccacttggccagggggttgccaacgccgttgggatggccatggctgagcgtcatttagcggcaaaatttggcgatgatcttgttgatcaccatacctatgtaatcgccggtgatggctgcttaatggagggcattagccatgaagcggcatcaatggcgggtcacatgcagctgtcacgtttgattgtgctatttgacgataatgggatctcaattgatggcagcaccaatttgaccgtatctgataatatcaccgaacggtttgagtcatacggatggcaggtgttagcgtgtgatggacatgatatggctgccgtgtctggggccatcactgcagctaaggccgataaacgaccaagcctaatccgctgcaaaacagttattggatttggatcaccagctaagcaaggcacatctggagttcatggcgccccacttggcgctgctgaaattacggcggcacgcgcggcgctcgattggccgcatgctgcgtttg

SEQ ID NO: 231195 - DNA, 823 bp, Unknown
  Bacterial polypeptide expressing nucleotide sequence isolated from the Sargasso Sea
atgtctgattgtattagagttttgtctgctgaagcggttcaaaatgctaattcaggacatcctggtatgccaatgggtatagctgatgttgcaacagtattatttacaaattttattaatattgatcctttaaaaacagattgggctgatagagatagattcatactatctgcaggtcacggttcaatgttaatatatgcattgaattttctgtctggatttaaagacatgtcattagaaagtattaaaaattttagacaattaaattcaaatactcctggtcacccagaatatggtcataccgagggagttgaaactacaaccgggccgttagggcagggtttagctaatgctgttggaatggcgttagcagaaaaaatgctaaatgctaggtttagtgatgaattagtaaatcactttacttatgtgattgttggagatggatgtttacaagaaggcataagtcatgaaagtgtagaatttgctggtcatcaaaatttatctaaactcatagttttttgggataataatagcatatctatagatggtgatacaaatttagctacctctagtaatcaaattaatcgatttaagtcatcaggatggcatactcaagaaataaatggacataactataatgaaattcaaactgctatcgaacaagctaaaaaaattgacaaaccttcatttattgcgtgtaaaacaattattggttttggatcgccaaatttatctggaaccgaaaaatcacatggttctcctttaggtgatgaagaagttaaaaacgtaaaaaataatttgaattggagtgaacaaaaattct

SEQ ID NO: 231196 - DNA, 478 bp, Unknown
  Bacterial polypeptide expressing nucleotide sequence isolated from the Sargasso Sea
ttgatcgaataccgagttatagctaatgctattcgatttttatcaatagatgctattgaaaaagcaaaatccggccatccaggaatgcccatgggttttgcagatgtagcaacagtattgttcctaaaacacttaaaatttgacccatcacagccagactggcctgatagagataggttcgtgctatctgcgggacacggctcaatgcttctttactctcttttatatttaactgggtatgaggaaatgacattagatgaaataaaatcttttaggcaattgggaagcaaaacaccagggcatcccgagttcacaataactccaggaatagagactactactggaccattggggcaaggtttggcgaatgctgtaggaatggcgatatctgaaaaaataatgaattcaaaactaagtgattcaattattgatcattatacctacgttgtagtaggagatgggtgcctaatggaaggaa

SEQ ID NO: 231197 - DNA, 867 bp, Unknown
  Bacterial polypeptide expressing nucleotide sequence isolated from the Sargasso Sea
cggcggatcggctgatcttactggatcaaataatacttattcttcagcaagttctgaaatgcttcctgataatcctcagggaaatcatatattttatggagttagagaatttggaatgactgccatgatgaatggaatgttgttgcatggtggaataaaaccatatggcggaacatttttagtatttatggattacgctaggaatgcagttcgtttggctgctcttatggaaatcccaaatatttttgtctatacccatgattcgataggcttaggagaagatgggccgactcatcaacctattgaacatcttgtgaccctgagggcaacaccaaatttaaataactggagaccagcagatatcatagagactgctgtaagttggaaagaggctattacttcctcagatactcctcacagcttaattttatcaaggcaaaatcttccatttgttcaaaggacaaaggagcaaataagtttaatacaaaaaggaggctatctgctttctcatgaagaggacgcagacattacactggttgcatcaggaagtgaggtgcagttaattcttgcagccgctaaatcaattaaaaatgatggatttaaagtaaacatagtgtccattccatgccttgataagttttacctgcaagatcagacttatagagatagcgtcgtagctccagagataccaaagttaatagttgaagcccttcacccagattcttggcatggtttagttaatctcaatgataaaattattggaattaagagttttggcgagagcgctccaggggatgagctgatggttaaatttggttttacagaagaaaacatagtttccgaagtcaaaaaactgcttacaaaatg

SEQ ID NO: 231198 - DNA, 950 bp, Unknown
  Bacterial polypeptide expressing nucleotide sequence isolated from the Sargasso Sea
tatgagtgatcgtcaacgttatgccaatgcactgcgtgtgcttgcaatggatgctgtgcaaaaagcaaactcgggacacccgggcatgccaatgggaatggctgacattgccgaggtattatggcgtgactatatcaaatgcaaccccacacaccccaattggtttgaccgtgatcgttttgttctttccaacggccatggcagtatgctgctatacgggctattacatttgaccggatacgatgtctcgttagatgacttacgccagtttcgccagttacattcaaaaacaccgggtcacccagagttacatgaagcacctggggttgagacaacaaccgggcctcttggtcagggtttagccaatgctgttggaatggcgttagcagagcataagtgtgcgcgacactttaatcgcccagattttaatattgttgatcattatacctatgtgtttgcgggtgatggctgcctgatggaaggtatttcacatgaggcttgctcattagcggggacttgggggctcgggaagctcatcgttttttgggatgataatggcatttcgattgatggcgatgtctcgggttggtttactgatgatacccccgctcggtttgaatcgtatcgttggcaggttattcgtgatgtcgatggccatgattcggcagccattgccgcagcgattgccagtgcccgtgccaatatcgatcagccaacattaatctgttgtaaaacgaaaattgggtttggttcacctaatatggtgggtacggcaaaaacccatggaagtcccttgggtgatgaagagattgctgcggtacggcaacagttgggatggtcggaaccggcgtttgaaattccttctgatatacagcaggcatggaatctgaccgaaaagggtaatgatgctgaattattgtggaatcatgtgttcactaaatatgaaacgg

SEQ ID NO: 231199 - DNA, 904 bp, Unknown
  Bacterial polypeptide expressing nucleotide sequence isolated from the Sargasso Sea
tttaatcctaaaaatccagattggattaatagagatagatttgttttatctgcaggtcatgggtcgatgttactttattctctactttatttaaacggctacaaaagtatttctattgaagatataaaaaattttagacaattaaattccatctgtgcaggacaccctgaatataaaaaaagcacaggaattgaaaccaccacaggaccattaggacaaggcttagctaatgcagttggtatggcagtagctgaagaaatatttagaaaaaaatttggctctgaatttattaataacaaaacatatgtaatcgctagtgatggtgatttgatggaaggaattagtcacgaggcaatgagtttggccggtcatcttaaattaaaaaacttaatagttttttttgataataataaaatttcaatagacggctcaacatctttaagtgtttcggataactataaaaaaagatttgagtcatatggttggagctttatggaggttaatggtcatgatgaaaaacaaatatcaaaagcgattaccaaagcatcaaaatcaaaaaaaccaacgatcatctcttgtaaaactatcataggatttggatcgcctaataaatctggtaaggcttcttctcacggttcccctttaggtaatgaagaaatagcgttagtaagaaaaaaattaaagtggaacagtgcgtcatttgaaatacctcagcaaattttagatgaatggagggaaataggaaataaaggtgagcaattagagaaaaactggttgcaaataattaataaaaaaaatccaaaaattaaaaatgaactaaacaaatttaaagaaaaattagacctctcaggtttagaaagtttaattcaaaaagagaaggaaaaatatttgaagttaaaccaag

SEQ ID NO: 231200 - DNA, 804 bp, Unknown
  Bacterial polypeptide expressing nucleotide sequence isolated from the Sargasso Sea
tactttcagcgggccatggatctatgttgctgtattctcttttgtatttaactggttataaaagtatttcaattaatgacattaaaaattttagacaactagattctatttgtgctggtcatccagaatatcatccaaatacaggaatagaaactactactggtcctttaggacaaggcatttcaaatgcagttggttttgcgatttctgaagaaattttaaaaaaaaaatatggaaaaaaaaaaattgatcataaaacttatgttctagcaggagatggttgtttaatggaaggaataagtcatgaagcactaagtctagctggtcatttaaaattaaaaaatttaatcttactatttgataacaactctatatcaattgatggccctacaagtttagctgtttctgacaatcatgaaaaaagatttcaaagttatggatggaattttataaaaataaatggtcataattataaagaaatttttaatgctttaaaaaaagctcaaaaatcaaaaaaacctgttgctatctcttgtaaaacaactattggatttggctcaccaaacaaaagtggtaaagcgtcatctcacgggagtccattgggtgaagatgagataaaattagtaagaaaaaaattaggttggaaatatgaaccttttcatatccctggtaatttatttgatgaatggaaaaagattggagagaaagcatacaagaatgctaaaaaacatgaaagtagattcaaaaaaatttttaaagataaaaaaaatctaaaatcattaaacacattaatgaaaaaataaa

SEQ ID NO: 231201 - DNA, 700 bp, Unknown
  Bacterial polypeptide expressing nucleotide sequence isolated from the Sargasso Sea
ttgaataaaattaacaaagaattagctaacgcaattagatttttatctattgatgcagttcagaaagcaaattcgggccatcccggtatgcctatgggaatggctaatgtagctacaattctatttaagtatttcttaagatttaatccaaaaaatcccaactggcttaatagagatagatttgttttgtctgctggacatgggtcaatgttattatattctttgttatacctaactgggtacaaaagcatcactttaaaggatattaaaagctttagacaaattgattctatttgtgctggacatcctgaatatcatccaaatactggaatagaaactacaactggtccattaggacagggtatatcaaatgctgtaggttttgctttagctgaagaaattttaaaaaaaaaagttggaaaaaaaataattaatcacaaaacttatgtcttggcaggtgatggatgtttaatggaaggtataagtcacgaagcattgagcctggcaggtcatttaaaattaaaaaatcttattcttctttttgataataattctatttcaatagatgggccaactagcttaacagtttcggatgatcataaaaaaagatttaatagttatggttgggattttttagaaataaatggtcataatgataaagaaatcttcaaggctttaaaaaaatcacaaaattctaaaa

SEQ ID NO: 231202 - DNA, 614 bp, Unknown
  Bacterial polypeptide expressing nucleotide sequence isolated from the Sargasso Sea
tttgagcaaacaaaatagagatttagcaaatgcaattagatttttgtctattgatgctgttgaaaaagctaactctggccatcctggtttgcctatgggaatggctgatgtagttaccatactatttaaatactaccttaagtttaatccacaaaatccaaactggataaatagagatagattcgttttatcggctggccatggatcaatgctactatattctttgctttatcttactggatacaaaagtatttccatcgatagtataaaaaattttagacaattaaattctatttgtgcgggtcatccagaatatgagccctatactggtatagaaacaacaactggtccactgggtcaaggaattgcaaatgcagttgggtttgctttggctgaagaaattttgaaaaaaaaatttggaaaaaaaactataaatcataaaacctatgtcttagcaggtgatggttgtttaatggagggaataagtcatgaagctttaagtttggctggccatttaaaacttaaaaatcttgtaatgttatttgataataactcaatttcaattgacggtccaacaagtctctcggtgtcagataattataaaaaaagattta

SEQ ID NO: 231203 - DNA, 429 bp, Unknown
  Bacterial polypeptide expressing nucleotide sequence isolated from the Sargasso Sea
tttgagcaaactacacaatgatttagctaattgcatcagatttttatcaattgatgctgttcaaaaggcaaattcaggtcacccaggaatgcctatgggtatggcagatgttgcaacagtgctatttaaaaaatttttaagatttaatccaaagaatcctgattggttaaatagagatagatttgttttgtctgctggccatggttctatgcttctatattctttactttacctaacgggatataaaagcatatcaattaataatattaaaaaatttagacagctaaattctatttgtgccggacatcctgaatatcatccaaaaacaggtattgaaactacaacaggtcctcttggacaaggtatatctaatggagttggttttgctatagcggaagaaattttaaaaaataaattaggaaaagattt

SEQ ID NO: 231204 - DNA, 589 bp, Unknown
  Bacterial polypeptide expressing nucleotide sequence isolated from the Sargasso Sea
ttgaataaactaaataaaactttatctaacgcaatacgtgttctttctatggacgctgttcaaaaagctaattcagggcatccagggatgccaatgggtatggctgatgttgttactattttatacaaatattttttaagatttaatccaaaaaatcctgattggttaaatagagatagatttgtattatcagcaggacatggttcaatgcttctatattctcttttgtatctaacaggttacaaaagtatttctataaatgatattaaaaaatttagacaaataaattcaatttgtgcaggtcatccagaatatcatccaaattcaggtattgagacaacaactggacctttgggccaaggcatatcaagtgctgttggatttgctattgctgaagaaattttaaaaaaaaaaattggcaaaaatattattaatcataaaacatatgtattagctggagacggatgcttgatggaaggaataagtcatgaggcaatgagtctagcaggacatttaaaattaaaaaatttaattatgctatttgacaataattcaatatcaattgatggacctacaaatttagctgttt

SEQ ID NO: 231205 - DNA, 865 bp, Unknown
  Bacterial polypeptide expressing nucleotide sequence isolated from the Sargasso Sea
tatcgatggacacgaccccgatgcaattgcctctgcaatcgatatagctaaagttgatgaccgaccttccatgatcgcctgtaagacaataatcggacgtggtgctccaaacaaggagggtagcgccgcgacgcacggggcccctctcggtgatgctgagatagcggccgctcgcgaagctatgggctggccgcacccgccattcgaagtgcctgacgatgttttgtctgcttggcgcgaagcaggaatgcgtggttctgacgcttatgcagcgtgggttaagcgcacgtcaagcgctgacgacagtttctggcgcgcccttgatggcggactaaaggatgggtggctagacgcacttaactctcacaaagcagtatgctcgaaggagcaaccgaattgggcaacacgtaaggcttccggagaagccttgggtgtgcttacggaagctatcccagagatggtcggtgggtcggcagatctaacaggatctgtcaatacgaaaactgccagtatgttgccggtgtttgctgaagaatttggtggccgttatatccactatggggttcgtgaacacgctatggctgcaatcatgaacggcattgcactgcatggtgggttcatcccttatggtggtacgtttttggtctttgccgattatatgaagggggctatgcgtctgtccgcgctgatggagcagcgggttatatatgtgttgacccatgattctattggtcttggcgaggatggaccaacacatcaggccgtagagaccctggctatgctccgcgctctacctaatcttaaagtttaccgtccttgtgatcccgtcgagacggcggaatgctgggctctagccttgcaggat

SEQ ID NO: 231206 - DNA, 541 bp, Unknown
  Bacterial polypeptide expressing nucleotide sequence isolated from the Sargasso Sea
atgagtacgacaacttcaggcgctaccagatcggtcgatcgacagaccaaggcaaacgctatccgtgctctcagcatggacgcggtgcaaaaagcaaaaagcggccaccccggtatgccgatggggatggctgacatctcagaggtgctttggtgcgatttcttgaagcataacccttcgaatcccgcgtggccggatagggaccggtttattctctccaacggtcatggctcaatgctgcattacgctctgctgcatcttgcaggctatgacctgcctataaccgagctgcagaatttccgtcagctgcactctagaacgcctggccatcccgaatacggttatgccccaggcgtggaaaccacaacaggccctctcggacagggcatcaccaatggtgtgggcatggcgcttgccgaaaaagtcctggcggcgcaattcaatcgtgacgaacatgtggttgttgatcactacacctatgttttcctgggcgagggttgcatgatggaaggcatctcccacgaggcctgctctcttgcag

SEQ ID NO: 231207 - DNA, 688 bp, Unknown
  Bacterial polypeptide expressing nucleotide sequence isolated from the Sargasso Sea
tttgaataaactacataatgatttagcaaattgtatcagatttttatcaattgatgcagttcaaaaggctaattcaggtcacccaggcatgccaatgggtatggctgatgttgtaactgtactatttaagagttttttaaaatttaatcctaaaaatccaaattggatgaatagagatagattcgttttatctgcaggtcacggatcaatgctattgtactctttactgtttttaactggatataaaagtatttcattaaatggtataaaaaattttagacagctaaattcaatttgtgctggtcaccctgaatatcacgcaaattctggtatagaaacaacaacaggacctcttgggcaaggaattgccaacgcagtaggatttgcaatcgcagaagaaattttaaaaaaaaaattaggaaatgaattaattaatcacaaaacttacgttttagctggagatggttgtttaatggaaggaataagtcatgaggcgatgagcttagcgggtcacttaaagcttaaaaatttagtaatgcttttcgacaacaattcaatttcaattgatgggcctactgatcttgctgtgtctgataattttaaaaaaagatttgagagctatggttgggattatattttaataaatggacataatgaaaaagaaatatttaaagcattaaaaaatgtg

SEQ ID NO: 231208 - DNA, 931 bp, Unknown
  Bacterial polypeptide expressing nucleotide sequence isolated from the Sargasso Sea
aggactaaacgaaattaaattagtaagaaaagcactaaaatggaaatataaacccttcgaagtcccaaataagttattgaaagaatggagagctataggaaacaagggtcaattaattgaaaaaaaatggaacaagctaattaaaaaacaaagtaaaaaattcagtctgatcaaaaaaaataactttaaaaatgcattaaatttgcaaaagaaacttgcaataaaagagcctaaaagcttagcaacaagaaagtgttctgagttaactttaaatgcattaaccaattcaaataataatattattggaggttctgcagatttagctggatccaacaatactaaaacaaaaaaacataaaattattacaccaggaaattttgatggaaattatattcattatggtgtcagagagcatgcaatgagtggggttatgaatggaatcgcactccatagtaattttattccttatggtggaacttttttaatattttctgattactgtaaaccttcaataagattatcagctctaatgcaacaaagagttatttatgtaatgacacatgattctattggcttaggcgaagatgggccaacacatcaaccaattgagcaattatctggtttaagatcaattccaaacctaaatgtttttagacctgcagatagaattgaaacaattgaatgctgggagcatgcattaaaaactgcaaagactccaagtgttttgtctctaacaagacaaaatttagacccgattagaaaaaaatattcctcaaacaataaatgttcacttggtgcttacgaagttctcagaacgaataaaaaaattaaacttacaattttagcaagtggttcagaggtaaatcttgcaatcgaagcgtgtcataaacttgccagagataaaatttattctaaagttatttcagtacct

SEQ ID NO: 231209 - DNA, 912 bp, Unknown
  Bacterial polypeptide expressing nucleotide sequence isolated from the Sargasso Sea
ttggctgagagccattttggcatcaaaatataacaaagacggtcattcaattgttgatcattatacttacgtctttctcggtgatggatgtttaatggagggtatttctcacgaagcttgttcacttgctggaacactcaatttaagcaaattaatttgcgtttatgacgataatggaatttcaattgatggcgaggtagatggttggtttgacgaggatgtatgtgctcgatttaagtcatacgattggcatgtcattgagaatgttgatggccacaatgccgaagccatctcaaaagcgatttctgaggccaaagcgtccaatcaaccttcactgattgattgcaagacagtgattggtttcgggtctccgaacaaagcaggaactgccgatacacatggtgcagctcttggggatgatgaaattgcaaatcttagagaatcattgggttgggagcatgacccgtttattgttcctgacgaaatcaagaatgcctgggattgcaaagaaaaaggacaattgcaggaaaatgattggaatcaaagatttgaagagtataaatcccagcatccagaactggcagatgaattcttaaattgcatcaacgaaaatatagccgatgatgaaatggttaatctcgatgcacttattgatcaattaagagaaaatgccgatgtagttgccacaagaaaatcatcgctcattgctctcaatgcgctcaaagaagattgctcgaatatgataggcggatcagctgatttgacgggttcggtttgtacttatcacgagtcttcaaaaccaatcaccaaaaatgaccacgacggcaattatattttttatggcgtgagagagtttggcatgtccgcaatcatgaatggcatagaccttcatgggggattgattccttattc

SEQ ID NO: 231210 - DNA, 826 bp, Unknown
  Bacterial polypeptide expressing nucleotide sequence isolated from the Sargasso Sea
agatgtagcacagtgctatttacaaagtttttgagatttaatccaaaaaatcctgattggttaaatagagatagatttgttttgtctgctggtcatggttctatgcttctgtattctttgctgtatctaacgggttataaaagtatatcaattaataacataaaaaaatttaggcagcttaattcgatttgtgctggacatcctgaatatcatccaaaaacaggtattgaaacaacgacaggtccacttggacaaggtatatctaatgcagttggttttgctatagctgaagaaattttaaaaaataaattaggaaaagatttaattaaccacaaaacctacgttttagctggagatggatgtttaatggaaggaataagtcatgaagccatgagtttagcaggacatttaaaacttaaaaatttagtcatgctatttgacaacaattcaatttcaattgatggtccaacaaatcttgcagtttcagataattttaaaaaaagatttgaaggttatggttgggattatatttctatcaacggtcataatgaaaaagaaatttttagggcactaaaaaaagctcagaaagctaaaaaacctactgttatttcttgtaaaacaaaaattggatatggttcacctaataaatctggaaaagcatcatctcatggaagtcctttgggattagatgaaataaaacttgtaagaaaagccttaaactggaaaaacaaaccctttgatattccaaacaaaattttaaaaaattggagaaaaattggtcagcgaggtgaaaatatagaaaaaaaatggaacagaatattaaata

SEQ ID NO: 231211 - DNA, 506 bp, Unknown
  Bacterial polypeptide expressing nucleotide sequence isolated from the Sargasso Sea
aatggtcgctgcatctgtttcattagaatcactttgtgtaaatagtataagaatgcttgctgtagatgcagtaaataaatctaatagtggacatcctggattaccaatgggatgtgctcctatgggttatgcattatggcaaaacattcttaatcacaaccctaataacccaaaatggttcaatagagaccgttttgtattgtcagctggtcatggctgtatgttgttatattccttgcttcatttgacaggatataaatcagtttccatagaagatatcaaagaatttaggcaatggggttcaaaaactcctggacatccagaaacattcgaaactgaaggtgttgaagttacagctgggcctcttggagccggaatttcaaatgcagttggtttagcaatagctgaaacacatttagcagccaaatttaataagcctgattgcaatatcgttgatcactatacttatgtaataatgggtgatggctgtaatcaagaaggtattg

SEQ ID NO: 231212 - DNA, 766 bp, Unknown
  Bacterial polypeptide expressing nucleotide sequence isolated from the Sargasso Sea
gagtagagagcatgcaatggcagcaatacttaatggtattgcctatcacaatagtggtcttattccttatggtggaaccttccttgttttcgctgattacatgagaggttcaatgagactatcagcacttagcgaattaggagttatctatgtgttaacacacgattcaattggagtaggcgaagatggtccaacacatcaacctattgaaactatcccttctcttcgtgccatgcctaacatgctagttttcagaccaggagatgggaatgagactagtggagcttataagcttgctatacaaaatcgaaaaagaccttctgcactttgtttaagtagacaaggtatgcctaatcaagaaaatacttcaattgacaaagttgcattaggaggatacatagtttctgattgcgaaggaacaccagatttaatatttattggcactggaagtgagctaaatctttgtattgaagcaagtaaggagattgcaaacttaggtaaaaaaactagagttgtctctatgccttgcgtagaacttttcgaagaacaagaagagtcctacaaagaaagtgttttacctagtagtgttactaagagagttgtagtagaagctgcccattcatttggttggcataaatatacaggttttgatgggatttgtattactatggacagatttggcgcatcagcacctggaggcgagtgtatgaaaaattttggatttacagttgaaaacgttgttaataagacaaaggaaattctctaa

SEQ ID NO: 231213 - DNA, 871 bp, Unknown
  Bacterial polypeptide expressing nucleotide sequence isolated from the Sargasso Sea
cgttttgttctatctaatggccacgggtctatgcttatctacgcccttagtcacctgactggatatgatctttcgatagaagatataaaaaactttcgccaactgcatagtcgaacgcctggtcatccagaattaggctatgctcctggggttgagactacaactggccctcttggccaagggattacgaatgccgtgggtatggcgatcgcggaaaaaagtctggcggctcagtttaataagccagaacacgaaattattaaccattattcttacgtttttctgggcgatggttgtttgatggagggtatttctcacgaagcatgctcgctcgctggcactctaggactggggaagctgatagcattttatgacgataatggaatttctatagatggacatgtcgagggctggttcaccgatgatacgcctggaagatttgaagcctacggttggcaggtcattccggctatcgatggccatgactcagttgctattaagcaggcgatcggaagtgcgcgcctaaacaaagaaaaaccgactctgatttgttgtaaaactatcattggcaagggtgctcccaataagcagggcggcgaagcatgccatggtagcccattgggagaggctgaaattattcaggcaagagaacttttaaattggccgcataaagcttttcatgtgcctgaggaagtttacgaaagttggagtgcaaaggtctcaggtgccgagttggagagtcagtggaaccagttattcgacagatacgctaagtcatatcctgagctttctaaagagctaaagcgccgccttagtggggagctgcctgaaggatttgccgaagcctgtaaagaatatgttaaggcgtgcc

SEQ ID NO: 231214 - DNA, 853 bp, Unknown
  Bacterial polypeptide expressing nucleotide sequence isolated from the Sargasso Sea
gcaacgatactttttaaaaattttttgagatttaatccaaataatccaaattggtttaatagagatagatttgttttatccgctggtcatggttctatgcttctatattctttactgtacctaaccggatataaaagcatatcaattaataatatcaaaaaatttaggcaacttaattcaatttgtgctggacatcctgaatatcatccaaaatcaggtattgaaacaacaacaggcccccttggacagggtatatctaatgccgttggttttgctatcgctgaagaaattttaaaaaataagttaggaaaagatttaattaatcacaaaacttatgttgtagctggagacggatgtttaatggaaggaataagccatgaagcaatgagtttagcaggacatttaaaacttaaaaatttagtcatgctatttgataacaactcaatttcaattgatggtccaacaaatcttgcggtttcagataattttaaaaaaaggtttgagggatatggttgggattatatttctatcaacggtcataatgaaaaagaaatttttaaagcactaaaaaaagttcagaaagctaaaaaacctactgttatttcttgtaaaacgaaaattggatatggttcaccaaataaatcgggaaaggcatcatcccacgggagtccattgggattagatgaaatcaaactagtaagaaatgccttaaactggaaaaacaaaccttttaacatcccaaataaaattttaaaaagttggagaaaaattggtcaaaaaggtgaggctacagaaaaaaaatggaaaaaaatatttaagagaaaaaaaataaaatttaatctaatttttaaaa

SEQ ID NO: 231215 - DNA, 869 bp, Unknown
  Bacterial polypeptide expressing nucleotide sequence isolated from the Sargasso Sea
tttaaaaaaagataagattctcgcttcaagaaaatcctcagagttaattattagctctcttgtaaaaaaaaataatatacttataggtggatcggcagaccttgctggttcaaataacaccaaaacaaaaaatcatgaaataattacacctggaaattttaacggaaattatatccattatggagtaagagaacatgccatgtgtggaattatgaatggattagccttacatagtaaaataataccttacggaggaacttttttaattttttcagattattgcaaaccatcaataagattggcggctatgatggaacaacaggttatatatgtaatgacacatgactctattggtcttggagaggatgggccaacacaccaacctatcgaacaattatctggattaaggtcaatacccaaccttaatatttttagaccttcagatagattagaaaccattgaatgttgggagcatgctttagagagttttaaaacaccaagcattctatgcctaactagacaaaaccttaatcccattagaagtaaatactcaaaaaccaataaatgctcattgggagcttacgaggttttaagaacgaacaaaaaagttaaactaacaattttagcaagtggttctgaagtaaacttagctttggagaccagtcataaattagccaaagataagatatattcaaaagttatatcagtgccttgtatggagctttttgacttacaatcaaataaatataaagataaaattttaaaagaaactagattgaaaatttcaattgaagctggatcaagtgattgctggaaaaaatatgtaggtgataatggaatgacttttggaataaaacaattttgggaaa

SEQ ID NO: 231216 - DNA, 819 bp, Unknown
  Bacterial polypeptide expressing nucleotide sequence isolated from the Sargasso Sea
gatcagctgatctaagtggatcaaacaacactaaaactaaaaatatgctaacaataaagaaaaatttttttaaaggctcatatatttattatggagttagggagcatggtatggctgctataatgaatggaattgcattacacggtggtctaatcccctatggaggtacctttttagttttcacagattattgcagaccttctattaggttagctgcgataatgaaattgcctgtaatatatgttatgacgcatgactcaattggtttaggagaagacggaccaacgcatcaacctgttgaacatttatcatctttaagagcaattcctggtcttacagtcatcagaccttgtgatcttatagaaacaattgaggcctgggaatatgctctgcaatcaaattcaccaacagtaatagttttgactagacaaggattgccgatgcttagaaagaaaaaatcttccaatatgctaaaaaaaggtgcatatccagttattgacccaaaaaattatcatgcaacaattttggcaacaggttctgaagttgaaatagcttgtgaaagttcaaaagaattacaaaaaaaaggaatctttgttagagttttatcttttccaagttgggaattatttgataaattatcagataaagaaaaaaataaaatactaggaaaaaaaccaatttttgcaattgaagcagctataattaatggctgggaaaaatatgttacaaataaaaattttataggaatgaaatcttttggtgctagtggtccttataaaaaattatatgatcactttggaataaattccaaagcttgac

SEQ ID NO: 231217 - DNA, 910 bp, Unknown
  Bacterial polypeptide expressing nucleotide sequence isolated from the Sargasso Sea
gcatgtaaaacaaaaataggttttggttctcctaataaagagtctaagtcttcttcacatggttcacctctaggagaagatgaaattaaattaactagaaaaaacttagattgggattatgatagttttgaaattccagatgatatactttcgaaatggagaagttttcccaaaaaaaataaaacaattagacaaaattggatagaaaaaaacgcaaatataatttcttcaaaaaaatataaagattttttttcaaaaaatttgtcagatgaaataattgacaaattaaaagtatttaaaaataaacattttaaagaaaaaaccaattgcgcttcaagaaaagcaagtgagacagcaatagaatttttttcatctgaactagaaaatttagtaggaggatcagctgatttaactggatctaataatactaagactaaaaatatgacccacatcagtaaaaatgattttaacggatcatatatctattatggaattagagaacatggtatggcagccataatgaatggtttggctttacatggaggcttaagaccatatggtggaacttttttagtttttactgattattgtagaccctctattcgattggcagctttaatgaatttacctataatttatataatgactcatgattccataggtcttggtgaagatggtcctactcatcaacctattgagcatttagcttcacttagagcaatacctaatttaacagtgattaggccctcagatattattgaaactattgaagcttggcaatatgctctggaatcccaatctccctgtgtaattgtcttaactagacaaaacctcccaatgcttagaataaataataatattaatgtagttgaaaatggagcataccctattatcgattttgaaaatacca

SEQ ID NO: 231218 - DNA, 640 bp, Unknown
  Bacterial polypeptide expressing nucleotide sequence isolated from the Sargasso Sea
ttgaataaactacacaatgatttagctaattgtatcagatttttatctattgatgctgttcaaaaagctaattctggtcatccaggaatgcccatgggcatggctgatgtagcaacagttttatttaaaaattttttaaggtttaatcctaaaaacccagactggttaaatagagacagatttgttttatcagcaggtcatggttccatgcttctatattctttattacacttaactggatataaaagtatttcactcaatagtataaaaaaattcagacaactaaactctatatgtgctggacaccctgagtatcacccaaaaactggtatagaaactactacaggtccacttggccaaggaattgcgaatgcagttggctttgcaattgcagaagaaattttaaaacaaaaaataggtaaagaaattataaatcataaaacttatgttttagccggagatggttgtttaatggaaggaataagtcatgaggcgatgagtttagctggacatttaaagcttaaaaatttgataatgctatttgataacaattcaatatctatagatgggccaactaatttagcagtgtcagataattttaaaaaaagatttgaaagttacggttgggaatacattctca

SEQ ID NO: 231219 - DNA, 841 bp, Unknown
  Bacterial polypeptide expressing nucleotide sequence isolated from the Sargasso Sea
atggcagatgtggcaacgatattgttcaaaaactttataaaatttaatccaaaaaatccaaattggctcaatagagatagatttgttttatcggctggtcacggttctatgctgctttactctttattgtatttaactggatataaaagtatttcattaaaagatataaaaaattttagacaattaaattcaatttgtgcaggacatccagaatacgttcctaattcaggaatagaaactactactgggcctttgggacaaggaatagcaaatgcagtgggaatggcaattgcggaagaaattttaaaagaaaaaattggtaaaaatataataaatcacaaaacttatgtattggctggagatggctgcctaatggaaggtataagtcatgaggccttaagtctagctggtcatctaaagttaaaaaatttaataatgttgtttgataataactctatatcaattgatggaccaaccagtcttgctgtatctgataattttaaaaaaagatttgaaagttatggttgggattatattttaattaacggtcataacgaaaaacaaatatcaaaagcacttaggaaagtacagaatgcaaagaaaccaactgtgatatcttgtaaaactgttattggatttggttcaccaaataaatcaggaaaagaaacttctcacggaagtcctcttggtgaagatgaaataaaattagtaagaaaaaaattaaaatggaatcatcctccttttgaagttccaaaaaaaataatagatgagtggaggaaaattggaagtaaagggattaaagaggcagaaaagtggtataaaaaaaatagaaataaaaaaa

SEQ ID NO: 231220 - DNA, 569 bp, Unknown
  Bacterial polypeptide expressing nucleotide sequence isolated from the Sargasso Sea
aatgccaactaatcttgacctagccaatgccatccgcgctctttcaatggatgcggttgagactgcttcatgcggacatccgggcatgccaatgggaatggctgatatagcagaagttctttggagaaaacacctaaaacataacccaaacaatccaaactggcctgatagagatagatttgttttatcaaatggacatggctctatgcttatctattctcttctttatcttacgggctatgacttatcaattgatgatctaaagaatttcagacaattaggttcaaaaacacccggacatcctgagcatggaataacaccaggcgtagaaacaactaccggaccactaggacaagggctagcaaatgctgttggcatggctttatctgaaagaatgcttgctgaaagatttaacaaagatgagttagaagtagtagatcacatgacttatgtctttgccggggatggttgcttaatggaaggtatttctcatgaagcttgttctttggcaggcactttaggtctgggcaaacttattgttatttatgacgataatgagatatcaatag

SEQ ID NO: 231221 - DNA, 712 bp, Unknown
  Bacterial polypeptide expressing nucleotide sequence isolated from the Sargasso Sea
gtgcttaagaaagaaaagaagaatgcaataaaggaaccaaaaagtttagctactaggaaatgttcagaaatgacattgaatgcattaacaaaacaaaaaaataatttaattggtggctctgctgatttagcaggatcaaataatacaaaaactaaaaaccataaaataattaaacctggaaattttactggtgactacattcactacggagtgagagaacacgcaatgagcggggttatgaatggtattgcacttcacagtaatctaattccttatggaggtacttttttaattttttctgattattgcaaaccttcgatcagattgtctgccttaatgaaaaaaagagtcatttatgtaatgactcatgactctattgggctcggagaagacggccctacccatcaacctatagaacagctttcgggcttacgtgctatacctaacctaaatgtattcagacctgcagatagaattgaaactatcgagtgttgggaacatgcattaaaaagctcaaagacacctagcgtgctatctttaacaagacaaaatttaaatccagtaagaaaaacatacctaaatagaaacttatgctcattaggtgcttatgaagttttaagaacaaataaaaaaattaatctaacaatattagcgagtggatctgaagttaatctagcttcagaggttagccataaattagccaaaagataaa

SEQ ID NO: 231222 - DNA, 398 bp, Unknown
  Bacterial polypeptide expressing nucleotide sequence isolated from the Sargasso Sea
tttgaataaacaaaacaaaattttagcaaacgcagtgcgttttctttctatagatgctgttcaaaaagctaattctggccatccgggtatgccaatggggatggccgatgttgttactattttattcaaatattttttaagatttaattctaaaaaccctagttggctaaatagagataggtttgttttgtctgcaggacatggctcaatgcttttgtactctttactttatttaaatggttacaaaagtatatcattaaaaagtataaaaaattttagaaaattaaattcaatttgtgcaggacatcctgaatttaaagcaaatactgggatagaaacaacaacagggccacttggtcaaggaatatccaatgctgttggttttgcaatagctgaca

SEQ ID NO: 231223 - DNA, 876 bp, Unknown
  Bacterial polypeptide expressing nucleotide sequence isolated from the Sargasso Sea
cgatataaaaaactttagacaactgaattctatttgtgctggacatcctgagtatgaaaaaaactctggaatagaaacgacaactggaccactagggcaagggatcgcaaatgcagttggttttgcaattgctgaagaagttttaaaaaagaaattgggaagtaaaataattaaccataaaacctatgttctagcaggtgatggatgtttaatggaaggcataagtcacgagacaatgagtttagcgggccatctaaaacttaaaaatttaattatgttatttgataacaactctatttcaattgatggaccaactaatcttgccgtatcagataactataaaaaaaggtttgaaagctatggctggaattatattgatattgacggtcacaatgaaagacaaatatttagcgcgattaataaggcgcaaaaagcgattaagccaacggttatttcctgtaaaacagaaattggatttggttcacccaataaaagcggtaaagcatcttcgcatggaagtcctcttggacctgaagagattgagttagtaagaaaaaaattaaactggccttataaaccgtttgaaataccaaacagtattttaaaagaatggagaaaaataggattaaaaggttctaagacagaggtaaaatggaagaaatatttttctagaaataaaaataacttaaaagatttatttaataataatttttatcattcaattttaaaacaaaagaaagatgttattgcaaatttaaagccattggcaacaaggaagtcttccgaagctgttttaaactcattatttaaattaaaaaataatttaattggagggtctgcagatctagcgggttcaaataatactaaatctaaatt

SEQ ID NO: 231224 - DNA, 550 bp, Unknown
  Bacterial polypeptide expressing nucleotide sequence isolated from the Sargasso Sea
ttgagcttacaaaataaagatttatctaatgcaattagatttctatcaattgatgctgtggaaaaagctaattctggccaccctggtatgccaatgggtatggctgatgtggcaactgtcctatttaaacactttttaaaatttaacccaaaagacccagattgggttaatcgtgatagattcgtattatcggctggtcacggttcaatgcttctttactctctgctatatttaactggctataaaagtatttctataaacgatattaaaaattttagacaattaaattctatttgtgcaggacatccagaatattacccaagtactggaatagaaactacaacaggtcctttgggacaaggtatagcaaatgcagttggttttgccttatcagaagaaattttaaaaaaaaaaattagtaaaaaaattataaaccataaaacctatgttcttgcaggagatggttgcttaatggaggggataagccatgaagcattaagccttgctggacatttaaaattaaaaaatcttataatgttattcgataaaa

SEQ ID NO: 231225 - DNA, 814 bp, Unknown
  Bacterial polypeptide expressing nucleotide sequence isolated from the Sargasso Sea
agaaggaaccgccgcgactcacggagccccattaggagtcgaggaaattgcagaagccaggaagaaattggattggccacatcctgaatttatgatccctgagcctataaaacaagcttgggattctaataaaaagggattcgcagctgaatcggcgtggaaagaaaaattagtggcctatgaagaagagtaccctgaacttgctatggagcttgtgaggcgaattaaaggccaacttcctggacatttcttaaaaaaggctgatcagttcattagggagtgtcagcagaatagaaacaccattgcgactcgcaaggcttcacaaaactgtttggaggcatacgcgtcactgttgccggaggtgataggtggaagcgctgacctcgccggttcaaatctgacgttatggtctggaagcaccccaattagcgaaaagaccgatggaaattacatttattatggggttagagaatttggtatgacggccatatcttcaggaattgctttgcatggtggctttattccctattccgctacttttctcatattcatggaatacgctcgaaacgcggccagaatggcggcgttaatgaggcaaagaagtattcttgtctacacccatgactccataggtcagggtgaagatggtccaacgcatcaacctgtagagcaattaactgcgttgcgagtaactccaaatatgtctgtatggcgaccttgtgatagcgtcgaaacagctgttgcatggaaagctgcaattcagcggtcagatgggccaacagctcttgtcttatcgagacaaggagtgccgcat

SEQ ID NO: 231226 - DNA, 910 bp, Unknown
  Bacterial polypeptide expressing nucleotide sequence isolated from the Sargasso Sea
aacataaataaaattttctcatcaaatttttctaacatttttaagaaggaaaaacaaaatgcgattaaaaaacttgaaactttagcaactagaaaatcatcagaaaaaattttaactgcactaaatgagaaaaaaaatatgataattggaggttctgccgatctggcagggtcaaataatacaaaaactaaaaatcatataccaattagtaaaaataattttaaaggaaattatatccattatggagtacgtgagcatgctatgtgtggtattatgaatggtctatctttgcatagtaaattaattccttatggtggaacatttttaatttttagtgattactgcaaacctgcaataagactttcagcgcttatgaagttgaatgtcgtttatgtaatgacacacgattctattggtcttggtgaagatggtccaacacaccaacctatagaacaattaacaggattaagatcaattcctaatttaaatgtttttagaccagctgatactacagaaacgattgaatgctgggaattggcgttaaaaaacttggctactcctagtgtacttgctctaagtagacaaaacttatctccaataagaaagtcttatgaaagtcaaaataaatgttctctaggtgcctacgaaatttatagatctagcgataaagttgatttgactatatatgccagtggatcagaagtaaatttagcaattgaggtaagtcataaattggccacagtaaatatctacacaaaagttatatcagtaccgtgccaagaaatattttttaaacaaaataaaaattataaaaataatatattgaacgaaactaattataaaatatctattgaagctggaagatcagatacctggtcaaaatttgtggagaaaatgggatatctttgga

SEQ ID NO: 231227 - DNA, 628 bp, Unknown
  Bacterial polypeptide expressing nucleotide sequence isolated from the Sargasso Sea
atggtcgctgcatctgtttcattagaatcactttgtgtaaatagtataagaatgcttgctgtagatgcagtaaataaatctaatagtggacatcctggattgcctatgggatgtgcccctatgggttatgcattatggcaaaacatacttaatcacaatcctaataatccaaaatggttcaatagagaccgttttgtattatcagctggtcatggctgtatgcttttatattccttgcttcatttgacaggatataaatcagtttccatagaagatattaaagaatttaggcaatggggatcaaaaacacctggacatccagaaacattcgaaactgaaggtgttgaagttacggctgggcctcttggagccggaatttcaaatgcagttggtttagcaatagctgaaacacacttagcagctaaatttaataagcctgattgcaatatcgttgatcactacacttacgtaataatgggtgatggatgtaatcaagaaggtattgcatcagaggcctgctcattagctggtcatcttaagcttggaaaattaattgcactctatgacgataatcaaataacaattgatgggcgaaccgacgtttcttttacagaagatgtcttaaaaa

SEQ ID NO: 231228 - DNA, 649 bp, Unknown
  Bacterial polypeptide expressing nucleotide sequence isolated from the Sargasso Sea
ctatcagcactcagcgaattaggagtgatttatgtattaacacatgattcaattggagtaggcgaagatggtccaacacatcaacctattgaaactataccttctcttcgcgccatgcctaatatgctagttttcaggccaggagatgggaatgagactagtggggcttataaacttgctattcaaaatcgcaaaagaccttctgccctttgtttaagtagacaaggtatgccaaatcaagaaaatacttcgattgacaaagttgcattaggaggatacatagtttctgattgcgagggaacaccagatttaatatttattggtactggaagcgaactaaatctttgcattgaagcaagtaagcaaatttcaaacttaggtaaaaaaactagagttgtctctatgccttgcgtagaactattcgaagaacaagaaaaatcgtataaagaaagtgttttacctagtagtgtgactaagagagttgtagtagaagctgcccattcatttggttggcataaatatacaggttttgatgggatttgtattactatggatagttttggtgcatcagcaccaggtggagaatgtatgaagaattttggatttacagtcgaaaacgttgttgataagacaaaggaaattctataag

SEQ ID NO: 231229 - DNA, 754 bp, Unknown
  Bacterial polypeptide expressing nucleotide sequence isolated from the Sargasso Sea
tgccaacggtatcgccctgcacggcggtttcctgccgtacacctccaccttcctgatgtttgtggaatatgcgcgtaatgcggtacgaatggctgcgctgatgaaacagcgtcacataatggtctatacccacgactccattgggctgggcgaagatggtccgactcatcagccggtagaacagttggcgtccctgcgcgtcaccccaaatgtgagcacctggcgtccatgcgatcaggtagagacggcagtggcgtggaggtatggagtcgagcgtcacgatggccctaccgcgctgatcctttcccgccagaacctagtacagcaggagcgtagcgaacagcaactggcagacatagcccgtggcgcttacgtactgaaggactgtgttggtcagccacagctgattctgatcgcgaccggctctgaggtggaactggctttagcggcaagggataggctgactgccgaaggtgtcagggcgcgcgtggtttccatgccctctaccgacgcgtttgacaagcaggatgtggcttaccgcgaagccgtattgccgaaaaccgtcactgcgcgtattgccatcgaagcaggtatcgccgacggctggtacaaatatatcggtctgaacggcgcggttgttggcatgacaaccttcggtgaatccgcgccagcggaggcgttgtttgttaaatttggtttcactgtggataacgtagtgatgcaggcaaaaagaatactcaataacgggatctaa

SEQ ID NO: 231230 - DNA, 729 bp, Unknown
  Bacterial polypeptide expressing nucleotide sequence isolated from the Sargasso Sea
tttgaacaaattatatagtgaattagctaattgtataagatttctgtctattgatgctgttcaaaaagctaattcagggcacccaggcatgccaatgggaatggctgatgttgcgactgttctattcaaagattttttaaattttaatccacaaaatccaaattggataaatagagatagatttgttctttctgctggtcacggctcgatgttactttatgcccttttatatttaacaggctataaaagcgtttcattaaaggacattaaaaattttagacagctgaattctatttgtgcaggtcatccagaatatcatccaaatagtggaatagaaactactaccggccctttaggccaaggcatatctaatgctgttggctttgctatttcagaagaaattttaaaaaaaaaattaagaaaaaataaaattaatcataaaacttatgtaattgcaggtgacggttgtttaatggaaggaataagtcatgaagctttgagtcttgctggtcatctaaaactaaaaaaccttattttactttttgataataattctatttcaattgatggtcccactaatctgtctgtttcagataatcatgaaaaaagattcaaaagttatggttgggaatatttaaaaattgatggtcataatcataaagaaatatttaaagctttaaaaaaagctcaaaaatcaaaaaaacctattgctatttcctgcaaaaacac

SEQ ID NO: 231231 - DNA, 600 bp, Unknown
  Bacterial polypeptide expressing nucleotide sequence isolated from the Sargasso Sea
tttgaccaatgcaattaggtttttgtctatggatgctgtacaaaaagctaagtctggtcaccccggtatgcctatgggaatggccgatgtagcaacagtattgtttaaacattttcttaaatataacccaaaaaatccaaattggcttaatagagatagattcattttatctgcaggtcatggttccatgctactttactctttattatatttgaccggatacaaaagtatttcattaaataatattaaaaaatttagacagttaaattctatttgtgctggtcatcctgagtatcatcctggaacaggaatcgaaacaacaactggtccacttggtcagggaattgcaaactcagttggctttgcaatagccgaggaaattttaagaaaaaaaattggtaaagagataattaatcacaaaacatatgttttagccggtgatggatgcttgatggagggtattagtcacgaagcgatgagtttagcgggtcatttaaaactaaaaaatttagtaatgttatttgataataactcaatctcaattgatgggccaactagtttggctgtttcagataattttaagaaaagatttgaaagtta

SEQ ID NO: 231232 - DNA, 937 bp, Unknown
  Bacterial polypeptide expressing nucleotide sequence isolated from the Sargasso Sea
ttttacttactgctttttaggtgatggatgtcttatggaagggatttcacatgaagctatgtcttttgctggggttcatgagcttaataaattaatttgcttttatgattcaaatggaatttctatagatggtgaaataagtgattggtacaaagataacatttcattaaggtgtaaggcatatggatggaatgttattgataatatagatggacataatagagaagaaattgatgaagcaatttttgttgcaaagaagtcaaaaaaaccaactatgattgtatgtaaaacacatattggttatggtgcaggcaacaaacaagattctgaattatctcatggagctgcacttggatctgagatcgtaaaagagttaagggaaaatcttgattggccatattctgaatttgaaattcctcatgaaatttatgcagactgggatgcctctgacataggtcaaaaatatgaagacgattggaatgaaaaagtacaaatcctcaaatcagaaaatcctgagaaaggagagcttctagagaggttgttaaacgaagagctgcctgagaaatttgattctaattttagtgcctttttagaagaaattttaaagcacaatgaaccaatagcaactagaaaagcttctcagaaagttcttgaattcttgaaaaaaaacctgccagaattgataggcggctcagctgatttaagtggctcaaataataccaatacaagtatttcaaacccaattaccagctcccaaaatggaaactatatttattacggcgtcagagaatttggcatgaatgcaattatgaatggcatttctcttcatggaggtcttattccttatgcaggtacatttttagtattcatggattacggaagaaatgcagtaagaatggctgcattgatggggataaaagtaatttttgtatattct

SEQ ID NO: 231233 - DNA, 817 bp, Unknown
  Bacterial polypeptide expressing nucleotide sequence isolated from the Sargasso Sea
attggccaattgtatcagatttttgtctatcgacgcggttcaaaaagctaattcaggacatccgggtatgcctatggggatggctgatgttgcgacagttcttttcaaagattatttaaaatttaatccaaaaaatccaagttggataaatagagataggttcgtgctgtctgctggtcatggatcaatgttactttactctattttatatttgactggatataaaagtgtttctttaaatgatattaaaaattttagacaactagattgtatctgtgctggacatccagagtatcatccaaatactggaatagaaactactactggacctctaggacagggaatatcaaatgctgttggctttgctattgcagaagaaattttaaaaaaaaaagttggaaaaaataaaattgatcacaaaacttatgtattagctggtgatggttgtttaatggaaggaataagtcatgaggcattaagtcttgcaggacatttaaaactaaaaaatcttattttactttttgataataattctatatcgattgatggacctactagtttagcagtctcagataatcatgaaaaaagatttcaaagttatggttgggattatataaaaattaatggtcacaattttaaagaaatatctaaagcttttaaaaaagctcaaaaagctaaaaaacctattgctatatcttgtaagaccgtaataggttatggttcaccaaataaaagtggaaaagcatcatctcatgggagtcctttaggagaagatgaagttaaattagtaagaaaaaaattaaattggaattacgag

SEQ ID NO: 231234 - DNA, 526 bp, Unknown
  Bacterial polypeptide expressing nucleotide sequence isolated from the Sargasso Sea
ttgagcaaactacacaatgatttagcaaattgcataagatttttgtcaatcgatgcagtgcaaaaagctaactctggacacccaggaatgcctatgggcatggctgatgtagccacagtgctttttaaagattttttaaattttaatcctaaagatccaagttggataaatagagatagatttgtactctcagctggacatggctctatgttactatattccctgctttatttaactggatataaaagtatatcactaaataatattaaaaatttcagacaattagactcaatttgtgcaggacacccagagtatcatgaaaacagtggaatagaaactaccacaggtcctttggggcaaggaatatctaatgcagttggttttgcaatatctgaggaaattttaaaaaaaaaagttggaaaaaaaataattgatcacaaaacttatgttcttgcgggtgatggctgtctaatggaaggaattagtcatgaggcattaagtttggctggacatttaaaattaaaaa

SEQ ID NO: 231235 - DNA, 925 bp, Unknown
  Bacterial polypeptide expressing nucleotide sequence isolated from the Sargasso Sea
aaattctggtaaatcatcatctcatggtagccccttaggtgttgatgagattaaacttgtaagaaaaactttaaaatggagtcataaaccttttcaaattcctaataaaattttaaatgaatggaaaaagatcggcaaaaaaggtgaaaaaaatgaaaaaaaatggaataaaatttataaaacaaaaaagaaattaattaaaaaattttttcaaaataattttacgaaagtactaaaggaagaaaaacaaaatgcttgtaaagaaattaaaagtttggctactagaaaatgttcagaattaacacttaatttgttaactaaaaataataatacattaattggaggttctgcagacttagcgggatctaataacactaaaacaaaaaatcacaaaataattaaaccaggtagctttgatggcaattacattcactatggtgtaagagagcacgcaatgagtggaataatgaatgggcttgctcttcatagcaactttattccttatggaggtacatttttaatattttcagactattgtagaccctcaataagactatccgcattaatgaaacaaagagttatttatgtaatgactcacgactctataggtcttggagaagatggccctactcaccagcctatagaacaattatctggactaagatcaattcctaatttaaatgtttttagacctgcagatagaatggaaactattgaatgttgggaacaagcattaaaaaattcaaaaacacctagtattttatctcttactagacaaaatctaaatccaataagaaaaaaatattcaaatattaataaatgctcttttggagcttatgaagttttaagaacaaatcaaaagatccatataactatacttgcaagcgggtctgaagttagtttggcaatcgaaattagcccataa

SEQ ID NO: 231236 - DNA, 796 bp, Unknown
  Bacterial polypeptide expressing nucleotide sequence isolated from the Sargasso Sea
aatgaaagattcgatgactttttaagagattgttcattacaagaagatccgatcgcaactagaaaagcatctcaaatttgtcttgatcatttttgtgctgacttacctgagctaattggtggttctgccgatttaacaggatctaataatactttttctaaacataatactgaacttactcccgacaatcctagcggatcacatatttactatggtgtaagagagttcggcatggttactatcatgaatggaatgagtcttcatggtggcattaggccatatggaggaaccttcctagtttttatggattatgcaagaaatgcagtgcgtttatctgcaatgatgagtctgccaaatatatatgtctttacccatgattcaatcggcttaggtgaggatggtccaacacatcaacctatcgaacatttggttactcttagagcaacgccaaacttatacaattggaggccagctgatcttaaagaaacagctgtagcatggaaagagtcaattttatcaaaatctccaagctgtcttatcctcagcagacaaggccttccgcaggtcaaaatgagtgaggacaagattagtaatatctctaagggaggatatttagttcaaaaggatgaagatgcagagctaaacattatatcctctggaagcgaactgcaattagccattcaagcagctaaagatcttgatcagtcgggtataaaggtaaatgttgtttcgatgccatgtttagatagatttcttcaggcggatttagaatatcaaaataaagtgatccaaaaag

SEQ ID NO: 231237 - DNA, 914 bp, Unknown
  Bacterial polypeptide expressing nucleotide sequence isolated from the Sargasso Sea
aggcctgtcggccgtgctgccggaactgctcggcggctccgccgacctgaccggttcgaacctgaccaactggaaggccgccaagccggtgcgcgtgaacgccgaaggcaaggccgccggcaactacgtgaactacggcgtgcgcgagttcggcatgagcgccgcgatcaacggcatcgcgctgcatggtggcttcaaggccttcggcggcacgttcctgacgttctcggactacagtcgcaacgcgctgcgtgttgccgctttgatgaaggcgccgtcgattttcgtgttcacgcacgattcgatcggtcttggcgaagacggtccgacccaccagtcgatcgaacatgtcgcaagcctgcgtctgattccgaacctacaagtgtggcgtccggctgatacggtcgaaacggcggtggcctggactcacgcggtcgagcatcatggcccatcgtgcctgatcttcagccgtcagaacctgccgttctcggagcgtaccgacgcgcagatcgccaatatcgagaagggcggttacgtgctgcgcgactggaacgacgaaattgtcgcgcgcaagaccatcctgatcgccaccggttcggaagtcgaactggcgttgaatgctgtcgagccgctggctcgcgaaggcatcgcggcacgtgtcgtgtcgatgccgtcgaccacggtgttcgacaagcaggacgccgagtaccgtgaacgcgtgctgccgcaaggcgtgcgccgcgtcgcgatcgaagcgggcgttacggatttctggcgcaagtacgtgggtctggaaggcggcgtggtcggcatcgacacgttcggcgaatcggccccggctggcgtgctgttcaagcatttcggcttcaccgtcgagcacgtcgtagagacggccaaagccgcactcggctgat

SEQ ID NO: 231238 - DNA, 538 bp, Unknown
  Bacterial polypeptide expressing nucleotide sequence isolated from the Sargasso Sea
tttgagtaaactttataaagaattagctaattgtataagatttttgtctattgatgctgttcaaaaagcaaattcaggacatcctgggatgcctatgggcatggcagatgtggcaacagtcctatttaaagattttattaaatttaatccaaaagatcctagctgggtaaacagagatagatttgttctttcagcaggccatggctctatgctactttattcacttctttatctcacaggttataaaagtgttactttaaaagatataaaaaattttagacaaatacactccatttgtgctggtcaccctgaatatcatcctaaaactggtattgaaacaacaactggcccattagggcaaggtatatctaatgcagtaggctttgcaatctcagaagaaatattaaaaaagaaattaggaaaaaaaattattgatcacaaaacttatgtattagccggtgatggttgtcttatggagggtatcagtcatgaagctttaagtttagctggtcatctaaaacttaaaaatctaatttta

SEQ ID NO: 231239 - DNA, 736 bp, Unknown
  Bacterial polypeptide expressing nucleotide sequence isolated from the Sargasso Sea
actgtgatttcttgtaaaacaaaaattggatatggttcaccgaataaatcaggaaaggcatcatcccatggaagtccattaggagcagatgaaatcaagcttgtaagaaaggtcttaaattggaaaagtaaaccatttgatattccaaaaaaaattttaaaagattggagaaaaattggccaaagaggtgaaattttagaaaaaaaatggaacaaaatattaaaaagaaaaaaaataaaatttaaacaaactttaaaaaataactttaccacggcgattaagaaagaaaaagaaaatgcaataaaagagccaaaaagtttagctactagaaaatgttcagaaatgacattgagtgcattaacaaaagaaaaaaataatttaattggtggctccgctgatttagcaggatcaaataatacaaaaactaaaaaccataatataattaaaccaggagattttactggaaactacattcattacggagtaagggaacacgcaatgagtggaattatgaatggtattgcacttcacagcaatctaattccttatgggggtacttttttaatattttctgattattgtaagccttcgattaggttgtcggcattaatgaaaaaaagagtcatttatataatgactcatgattctataggtcttggagaagatggtccaactcatcaacctatagaacagctctcgggcttacgtgctatacctaacttaaaatgtatttagg

SEQ ID NO: 231240 - DNA, 714 bp, Unknown
  Bacterial polypeptide expressing nucleotide sequence isolated from the Sargasso Sea
gtattaggccatatggaggaaccttcctagtttttatggattatgcaagaaatgcagtgcgtttatctgcaatgatgagtctgccaaatatatatgtctttactcatgattcaatcggcttaggtgaggatggtccaacacatcaacctatcgaacatttggttactctcagagcaacgccaaacttatataattggaggccagctgatcttaaagaaacagcagtagcatggaaagagtcaattttatcaaaatctccaagctgtcttatcctcagcaggcaaggtcttccgcaggtcaaaatgagtgaggacaagattattaatatctctaagggaggatatttagttcaaaaggacgaaaatgcagagctaaacattatatcctctggaagcgaactgcaattagccattcaagcagctaaagatcttgatcagttgggcataaaggtaaatgtggtttcgatgccgtgtttagataggtttcttgaggcggatttagaatatcaaaataaagtgatccaaaaagatttgccttccattgttgttgaggctgcccacccaaactcatggtataaaattttaggaagagatgaccttgtaattgggatgacaacatttggggagtctgcacctgcaaaaatgctttttgaagagttcggctttacagcagggaatattgtttcaaaggcaaaaaaacttttaaataaatgag

SEQ ID NO: 231241 - DNA, 855 bp, Unknown
  Bacterial polypeptide expressing nucleotide sequence isolated from the Sargasso Sea
catgtgattgagaatgttgatggacacgacgctgaagccatctcaaaagcgatttctgaggccaaagcgtccaatcaaccttcactgattgattgcaagacagtcattggttatgggtctccgaataaagcaggaactgccgatacacatggcgcagctcttggggatgatgaaattgcaaatcttagagaatcattgggttgggaatatgacccgtttattgttcctgatgaaatcaagaatgcctgggattgcaaagaaaaaggacaattacaggaaaatgattggaatcgaagatttgaagagtataaatcccagaacccggaactggcagatgaattcttaaattgcatcaatggagaaatagccgataatgaaatggttaatctcgatacgcttattgatcaattgagagaaaatgccgatgtagttgccacaagaaaatcatcgcttattgctctcaatgcgcttaaagaagattgctcgaatatgataggtggctctgctgacttgacgggttcggtttgcacttatcacgagtcttcaaagccaattaccaaaaatgatcaccacggaaattatatctattatggcgtgagagagtttggtatgtccgcaatcatgaatggcatagatcttcatggaggattgattccttattctggtacatttttaacattcagcgattattcgagaaatgccattcgcatggctgccatgatggagttgggcgtcatacatgtattgacccatgactcaataggtcttggcgaagatggaccaacgcatcagcccatagaacatgtacccagcttgagattgattccaggccttgatgtatggagaccttgcgac

SEQ ID NO: 231242 - DNA, 770 bp, Unknown
  Bacterial polypeptide expressing nucleotide sequence isolated from the Sargasso Sea
atgtgaaactcaagaaaaaaaatggattaagatatttaacaaaaacaaaacaaaatttaaaaatttaacaaaaaatagttcaataagtattttaaaaagagaaaaaagaaatgcaattctggagcctaaaaatttggctacaagaaaatgttctgagatgacacttaatgcattaacaaaccaaaatcataacttaattggtggctctgctgatttagcaggatctaataatacaaaaacaaaatatcaaaaaataattaaacctggagattttagtggagattatattcactacggagtaagagagcatggaatgagtggaataatgaatggtattgcactctatggaaatttaattccatatggtggaacttttttaattttttctgattattgtaaaccttcaataaggttatctgcgttaatgcaaaaaagagtgatatatgtaatgacgcatgactctataggattgggagaggatgggccaacccatcagccaattgaacagctctcaggtttgcgatcaattccaaatttaaatgtctttaggccagcagatagagttgaaacaattgaatgttgggaacatgctttaaaaagttcgaaaacaccaagtattttatctttaacaagacagggcctaaatcccataagaaaatcatttacaaatataaataaatgttctttgggagcctatgaagttttgagaaccgataataaaattaatttaacaatatttgcaagcggttcggaggttaatttggcaatcg

SEQ ID NO: 231243 - DNA, 859 bp, Unknown
  Bacterial polypeptide expressing nucleotide sequence isolated from the Sargasso Sea
tttggcggtttcagacaattttaaaaaaagatttgaaagttatggttgggattacattttaataaacggacataatgaaaaagaaatttataaagcattaaaaaaagtccaaaaagcaaaaaaaccaactgttatttcttgtaaaacaaaaattggttatggttccccaaataaatctggaaaagcttcctcgcatggtagccctcttgggatagaagagattaaacttgtaagaaaaaatttaaaatgggcaagtaaaccatttgaaattccaaaagatatattaaatcaatggaaaaaaattggatatagaggcgtaaaacttgagtcaaaatggaataaaatatatcaaagaaaaaaaaataaaataaataaattattagaaaataaattttcaaaatcaattaaatttgaaaagaagaaggctgcaaaagaaattaaaagtttggcaagtagaaaatcttctgaattagttttaaattcaatcataaaagatagtaatactttattaggtggttctgcagatctggctggctcaaacaatactaaaaccaaatatcataaaataattaagtcaggtgattttgtgggaaattatattcattatggtgttagggagcatgctatgtgtggcataatgaatggtctagcgcttcatagtaaatttattccatatggaggaacttttttgattttttcagattattgcaaaccatcaataagattggctgcaattatgaaacaaagagttatttatgtaatgacacatgattcaattggcctaggagaagatgggcctacccaccaaccaatagaacaattggccggtttaagagccataccaaatttaaatgttttt

SEQ ID NO: 231244 - DNA, 760 bp, Unknown
  Bacterial polypeptide expressing nucleotide sequence isolated from the Sargasso Sea
ggcgttgagacaaccacgggccctttaggacagggtcttgccaatgcggtgggcatggcagtggctgagaaaactcttgctgcccagtttaaccggcagggtcatgacatcgttgatcactatacatatgtgtttgtgggagacggctgcttgatggagggtatttctcatgaggtatgctctttagctgggacgttggggctgggtaaattaatagtggtttatgatgataatgggatctcgatcgatggagaagtagaccagtggttttcggatgatacaaataaacggtttgaggcttatggttggcaagtgctttcagcagacgggcacaatgctgaggagaccagtgaggcattaaagaaagcacgctcggaaaaaaataggccaagtattattagctgtcaaacaattattgggtttggggctccgagcaaagagggtactgcggcgactcatggagcgccattgggtgaagaggaaataacagcagctcgtaagaaattggggtggccccatgatgacttcgtaattccaaagagtgttaaagatgcctggaatgccattgaaaaagggttttcagcggagtcggcttggaaagaaaaattggtcgcttatgaggaagaacatccggatctagcgatggagtttgtgcggcgtataaaagggcaactttcggaacatttcggacagaaagctgatgagtttataaggcaatgccaagaaaacggaaacgatattgcgactcggaaagcctcgc

SEQ ID NO: 231245 - DNA, 809 bp, Unknown
  Bacterial polypeptide expressing nucleotide sequence isolated from the Sargasso Sea
aaaaaacagtgatttagctaatattctaagagtattatcaatggatgcggtagaagaagctaaaagtggccatcctgggatgcctatgggtatggctgatatagccgaagtcctttggagaaaacacctaattcataatcccaataatcctgactggcctaatagagataggtttgtattgtctaatggtcatgggtcaatgctcatatacgctttgcttcatttatcaggatatgatctaagtttagatgagttaaggaactttagacaattagggtcaaaaactcctggccatcctgaatacggaattacacccggtgttgaaaccactactggacctttaggccaaggtatttctaatgcagttggaatggctatttctgaaaagatacttgcagagaaatttaatacctcagaacataatctggtagaccacatgacctacgtatttacaggcgatggttgtttaatggaaggaatatctcatgaagcttgctctttggcgggcactttgggcttaggaaagttaatccttatttatgacgataacggtatttctatagacggtaatgtaaagggctggtttaccgaagacatccctgagagatttaaatcttacggatggcaagttataccagcagttgatggtcacaatgccgatgatattgataaggcaataaaaactgctaaagcagatgccgacaagccaaccataatttgttgtaaaactattattggcaaggggtcacctaaaaaagaagggtcagcttctgttcatggatctgctttgggtgaggaagaaattaaaa

SEQ ID NO: 231246 - DNA, 424 bp, Unknown
  Bacterial polypeptide expressing nucleotide sequence isolated from the Sargasso Sea
caaggattggcgaatgctactggaatggctcttgctgaaagaatgctctcagaacgattcggtagtgagatagtagatcattacacttatgttattgcaggagatgggtgtcttatggaagggatcagtcacgaagcagcatcttttgctggaaatttgggtctgagtaaactcattgtcctttttgacgataatggaatttctatagacggatgtactgaactagctgttaacgacaatcaactattgcgctttgaagcttgtgcttggcatgtatcagaatgtgacggacatgaccctgatgcaattgagcaagccattaggcaggcaaaggaaaaccaagaaaaaccttcttttattgcatgtaaaacagtaataggttttggttctcctaataaagctggaactgccgcatcgcatgggg

SEQ ID NO: 231247 - DNA, 671 bp, Unknown
  Bacterial polypeptide expressing nucleotide sequence isolated from the Sargasso Sea
attggctaattgcattagatttttgtcaattgatgctgttcaaaaagctaattcgggtcatcctggaatgccaatgggaatgtcagacgtagctacggttctttttaaagattttttaaattttaatccaaaaaatccaagctggataaatagagatagatttgttctttctgccggccatggttctatgttgctttattctcttctatttctaactggttataagagtatttcgttaaatgatttaaaaaactttagacaactagattctatttgtgcaggccacccagagtatcacccaaactctggaattgaaactaccactggtcctttagggcaaggaatatctaatgctgttggttttgcaatatctgaggagattttaaaaaaaaaatttggaaaaaataaaattaatcataaaacttatgtattagctggagatgggtgtctgatggaaggaataagtcacgaagctttaagtttagctggtcatcttaaactaaagaatctaatattactttttgataacaattctatatctattgacggacctacaagcttagcagtttctgacgaccacgaaaaaagatttaaaagttatggttggaattatttaaaaattaatggtcataattataaagaaatatttaaagctttaaaaaatgctcaaa

SEQ ID NO: 231248 - DNA, 433 bp, Unknown
  Bacterial polypeptide expressing nucleotide sequence isolated from the Sargasso Sea
tttgactaaaaattataaaaatttatccaatgctatcagatttttatctgttgatgctgtgcaaaaagctaattctggtcatcccggaatgccaatgggaatggctgatgtagcaacagttctctttaaggactttttaaattttaatccaaaaaatccaagttggataaatagagatagatttgtactttctgcaggccatggatctatgttgttatactctctattgtatttaactggttacaaaagtgtttcacttaatgatattaaaaattttaggcaattagactctatttgtgcaggtcatcctgaatatcatataaatagtggaattgaaactacgactggtccattaggacaaggcatatcaaatgcagttggatttgctatagctgaagaaatattaaaaaaaaagatggaaaaaataaaatca

SEQ ID NO: 231249 - DNA, 443 bp, Unknown
  Bacterial polypeptide expressing nucleotide sequence isolated from the Sargasso Sea
aatggtcgctgcatctgtttcattagaatcactttgtgtaaatagtataagaatgcttgctgtagatgcagtaaataaatctaatagtggtcatcctggattgccaatgggatgtgcacctatgggttatgcattatggcaaaacatacttaatcacaaccctaacaacccaaaatggtttaatagagaccgttttgtattatcagctggtcatggctgtatgctgttgtattccttgcttcatttaacaggatataaatcagtttccatagaagatattaaagaatttaggcaatggggatcaaaaactcctggacatccagaaacattcgaaactgaaggtgttgaagttacagctgggcctcttggagcaggaatttcaaatgcagttggtttagcaatagctgaaacacacttagcagctaaatttaataagcctgatt

SEQ ID NO: 231250 - DNA, 817 bp, Unknown
  Bacterial polypeptide expressing nucleotide sequence isolated from the Sargasso Sea
tgaatatattcctaactcgggtattgaaacaactacaggaccacttggtcagggcatagcgaattcgataggttttgctatagctgaagaaattctaaaaaatagatttggaaaaaagaaaataaatcataaaacctacgtattggcgggggatggatgtttaatggaaggcatcagtcatgaagctttaagtttagctggacacttaaaattaaaaaatttaattttattatttgatgacaataatatatcaatagatggtccaacaaatcttactgtctctgacgataatagaaaaagatttaaaagttatggatggaattatcttcaagttaacggacatgatgtaaaacaaatttatagagctataaaaaaagtacaaaattctaaaaagcctacttgtatatcttgtaaaacagtcattggttatggttctccaaataaatcaaatacctcatccgtacacggaagtcctttaggcaaaagtgagataaatttagttagaaagagattaaaatgggcatataaaccattcgaaattccaaaaaatattttgagcgcatggagaaatgttggaattgttgcttctaaaaatgcaaaaaaacaaaaatttttactcaaaaacaataattattcaaaaagaatatctaaaatagtaaaatctgagaaagaaaaattttttaaaaatccagaaaatattgcaacaagaaaatcatctgaaaaaatattaaatgtattaacaaaatctattaaagaacttattggggggtcagcagacttagctggatcaaataatacaaaaactaaaagtcataga

SEQ ID NO: 231251 - DNA, 496 bp, Unknown
  Bacterial polypeptide expressing nucleotide sequence isolated from the Sargasso Sea
gatgggatcaaacctttgccccgccctgccctccactgtagatcgccaccccagggagaacggttttatgaatcacgttgccactgctgccgacacccaatgcatcaataccctacgcaccctggccatggatgccgtgcagaaggccaattcgggtcaccctggcacgcccatgggcctggcgcccgtggggtacacactgtggagtcgcttcctgcgttatcaccccgaacaccccgactggcccaaccgtgaccgttttgtgttgtcggtggggcatgcctcgatgttgctgtattcgctattgcacctggccggcgtggtagagatcgacgcccacggcaagcgctccggccaaccggccgtcagcctcgaggatatcaagcagttccggcagatgggctccaagacccctggccaccccgagtaccgcatgaccacaggcgtagaaaccaccacgggcccgttgggccagggctgcgccaacagcgtgggc

SEQ ID NO: 231252 - DNA, 730 bp, Unknown
  Bacterial polypeptide expressing nucleotide sequence isolated from the Sargasso Sea
tctggtcatcccggtatgccaatgggtatggcggacgttgtgacaattctatataaatatttcttaaaatttaatccaaaaaatccaacctggcttaatagagacagatttattttgtcagctggacacggatcaatgttgctttactcgcttttgtacctaactggatataaaagtgtatcacttaaagacattaaaaaatttagacaactgaattcaatttgtgctggacacccagaatatcaccccaactcgggtattgaaacaacaactggtcctttaggtcaaggaattgcaaattctgtaggttttgcaattgcaggagaaattttaaagaaaaaattaggaagtaaattaataaatcacaaaacctatgtcttggctggcgatgggtgccttatggaaggaattagccatgaagcaatgagtctagctggtcaccttaaattaaacaatcttataatgctttttgataacaattctatttcaatagatggtcccactagtttagcagtctcagataattataaaaatagatttgaaagctatggatggaattatattttgatcaatgggcataattatagagaaatttacaacgcgttaaaaaaagcgcaaacatcaaaaaaaccaacagtgatttcgtgtaaaacaaaaataggatttggatctccaaataaaagtggaaaggcctcttctcatggaagtcctcttggaatagatgaaatta

SEQ ID NO: 231253 - DNA, 730 bp, Unknown
  Bacterial polypeptide expressing nucleotide sequence isolated from the Sargasso Sea
acttgttagaaaaaaactaaaatggaattatgaaccttttaagataccaggtgaatttttaaatgagtggagaaaaattgggaataatgcttcacgaaaagcagaaaaatatgatgttaaattcaaaaaaaaattctcaaattttaaaaatttaaatacctttaaaaattcaattgaaaaaataaaaaatgattatctaaaagattctaaaccccttgctactagaaaatcatcagaaatgtttttaaacataatatccaaactaccaaatctaattggtggttcagctgatttagctggatcaaataacaccaaaactaaagatcataaaattataaaaccaggtaacttttctggtaattacattcactatggagttagagaacatgcgatgtgtggcgtaatgaatggaattgcattacacagtaatttaattccatatggtggtacatttttgatatttagcgactattgtaaaccatcaataagattagcggcaatgatgaaacagaaagttatatatgtatttactcatgactcgattggattaggtgaagatggtccaactcatcaaccaattgaacaactgacaagtttaagatctattccaaatttaaatgtatttagaccttctgatctaattgaaacttttgaatgttggcaattagcaattgaaagtaagaactcgccaagtgtgattgctttaactaggcaaagtgtaaatcctgtt

SEQ ID NO: 231254 - DNA, 794 bp, Unknown
  Bacterial polypeptide expressing nucleotide sequence isolated from the Sargasso Sea
atataaaagaaataagcaaaaaataaataagatattaaaaaataactttgcaaaagttcttaaagaagaaaaacaaaacacaattaaagatttaaaaagtttagcaactagaaaatcttcagaaaaaactcttgaagccataataagaaataacaacttattaattggaggctcagcagatctagcaggatcaaataatactaaaaccaaacatcataaggttattaaaccaggggattttaatgggaactatatacattatggagtaagggaacatgcaatgagtgggataatgaacggcctagctcttcatagtaaatttattccatatgggggaacttttttaattttttcagattactgcaaaccctcaatcagattatctgcgcttatgaaacaaaaagttatttacgtaatgacacatgactccatagggctaggggaagatggaccaactcatcaacctatcgaacaattatcaggtttacgatcaatcccaaacttaaatgtttttaggcctgctgataggatagagaccattgagtgttgggaaaaagcattaaatactccaaaaactcctagtattatgtctttaaccagacaaaaccttgagcctgttcgaaagaaatactctcatattaataaatgctctcttggggcatatgaaatactaagaacgaacaaaaagataagtttaacaattattgctagtggatcagaagtaaacttagcaattaaaactagccttaaattagccaaagataaaatatatagtaaagtaatctcaatgcctt

SEQ ID NO: 231255 - DNA, 868 bp, Unknown
  Bacterial polypeptide expressing nucleotide sequence isolated from the Sargasso Sea
tttgaatataaaaaacaaagatttatcaaatgccataaggtttttatcgattgacgctgttcaaaaagcaaactcaggtcatcctgggatgcctatgggaatggctgatgttgcaacagttttatttaaaaactatctaaaatttgacccaaaaaatcctagctgggttaatagagataggttcgttctctcggcaggacatggatctatgctactgtattctttgctttatttaacaggatacaaaagtgtaactttaaaagatataaaaaatttcagacaattaaattccatatgtgctggacaccctgaatatgaaaaaaatagcggaatagaaacaactaccggtccattaggacagggaatttctaacgcagtaggttttgctttagctgaagaaatattaaagtctcaatatggtaaaaaaataataaaccataaaacttatgttttagcaggcgatggatgtttaatggaaggtataagccacgaggctttaagtcttgcaggacatttaaagctaaaaaatttgattttgttatttgataataattctatttcgattgatggtcccactagtttagcagtatctgataattataggaaaagatttaatagttatggatgggactatttgaatattaatggtcacaactttaaagaaataaataatgctttaagagtagcacaaaattcaaaaaaaccttttgcgatttcatgtaaaacaaaaattggttttggatctccaaataaaagtggaaaagccgaagcacatggaagtccactaggtaaagatgaggttaaattagttagaaaaaatttagaatggaattatgatagttttgaagttccaaagtataattctcga

SEQ ID NO: 231256 - DNA, 682 bp, Unknown
  Bacterial polypeptide expressing nucleotide sequence isolated from the Sargasso Sea
aaatttaaaaatattataaaaaataaattctcgagttcaattataaaacaaaaaaaagatgctataaaaaattttaagactatagctacaagaaaatcttcagaagagtttttatcagctatattaaaagagagaaatactttaattggtggctctgctgatttagcgggatcaaacaatacaaaaactacgttacataaaattattaattcaagtaactttggtggtaattatattcactatggtgttagggaacacgcaatgagtgggataatgaatggattagctctacatagtaattttattccttatggaggtacttttttaatattttcagactattgcaaaccttcaataagactgtctgctataatgaagcagaaggtaatttatataatgacacatgactcaataggacttggagaagatggacctacacatcaaccagtagagcaacttgctgctttaagatctattccaaacttaaatgttttaaggccagcagatcaaactgaaacaattgaatgttgggatattgctttaaacagtaacaaaacacctagtatattagctttaactagacaaaacttaaaacccataagaaagaattttagcaaaaaaaatcaatgttctatgggagcttacgaagttataaggactggaaaaaatataaatttaacta

SEQ ID NO: 231257 - DNA, 958 bp, Unknown
  Bacterial polypeptide expressing nucleotide sequence isolated from the Sargasso Sea
ttgacaataattttattttcaatagatggtccaactagtttagcagtatcagatgactacgaaaatagatttaaaagctatggttggaattatattttaatagacggacataataatagacaaatatttaatgcattaaaaaaagctcaaaattcaaaaaaaccaacaattatttcttgtaaaacaaagataggatttggatctccaaataaaggtggaaaatcttcctcccacggaagtccgcttggtatagatgaaattaaattagtaagaagaaatttagattgggagcacaaaccttttaatatacctcagaaaatcttaaacgaatggagaaagataggaaaaaaaggtttaaaaattcaaaaaagatggaataaaaatttcaataaacacaaactaaaatttagacatactacaaaaaataatttttcgatttcaattataaagcaaaaaaaagaagcaataaaaaatttaaaaacgttagcaacgagaaaatcttcagagcaatttttatcagaaattttaaaagaaaaaaatactttaataggtgggtctgcggatttagcaggatcaaataatacaaaaactaatttacataaaattattaattcaaatagttttgagggtaattatattcattatggcgtaagagagcatgctatgagcgggataatgaatggattagctcttcatagtaattttattccttatggaggtacttttttgatattttcagactattgtaagccttccataagattgtctgccatcatgaaacaaagggtaatttatgttatgacacatgactctataggcttaggagaagatgggccaactcatcaaccaatagaacaacttgccggattaagatcaattccaaatttatacgttttaaggccagcagatcaaactgaaacaatagaatgttgggatatagcattaagaaatataaaaa

SEQ ID NO: 231258 - DNA, 800 bp, Unknown
  Bacterial polypeptide expressing nucleotide sequence isolated from the Sargasso Sea
attgcagcaatcagatcatattaacgtactaagattcttgtctgctgatgctgtacaaaaagctaattcaggtcatcctggtatgccaatggggatggcagaaatcgccaccgcgctttggagtagacacttaagacataatcctaacaatccaacttggttcaatagagatagatttgtactttcaaatgggcatggctcaatgcttttatacagcttactgcacctgactggttatgatctctcagttgatgatatcaaggacttcaggaagctcaaatcaaaaacacctggacatcccgaatatgatattgatattggtgttgagacaacaaccggcccattaggacagggaattgcaaatgcagtaggaatggcagttgcagaaaaaatcttagcagcagaatttaataaggatgatattaagcctattgatcatttcacttatgtttttcttggagatggatgtttgatggaaggaatttctcatgaagcttgttcatttgctggaactcataatcttggcaaattaatatgtttttatgatcaaaatggaatttctatcgatggagagattgaacattggtttacagacgattctgtaaaaagatttgaaagttatggttggcaaacgatatgtgtagatggccatgatattgaagaaattgatggagcaatacataaagcaaaagaggaagtgaataaaccaacaatgatattttgtaaaacaactattggctatggttcgccaaataagtcaggtacagcagatgttcatggagcgcctcttggcgatgatg

SEQ ID NO: 231259 - DNA, 448 bp, Unknown
  Bacterial polypeptide expressing nucleotide sequence isolated from the Sargasso Sea
attgaataataataataaaattctatctaatgcaatacgttttctatctatagatgctgtacaaaaggcaaattctggtcatcctggaatgccaatgggaatggctgatgtggtgactattttgtttaaatactttctaaaatttaatcctaaaaacccaagttggctaaatagagataggtttgttttatcggcaggtcatggttcaatgcttttatattctcttctatacttaacaggatataaaagcatatctttaaaaaatattaagaattttagacaattaaattctatatgcgcaggtcatcctgaatatcatccaaataccggaatagaaacgactaccggacctttgggacaaggaatttcaaatgcagtcggatttgctatagcggaagaaatattaaaaaaaaaaataggaaaaaatattattaatcacaaaacttat

SEQ ID NO: 231260 - DNA, 292 bp, Unknown
  Bacterial polypeptide expressing nucleotide sequence isolated from the Sargasso Sea
atggccgatgctattagatttttatctatggacgcagtgcaagcagcaaattcaggtcaccctggaatgcctatgggtatggcagatgttgctaccgtactttttaaagatttcataaatgtttatcctaaagaaccagattggccggatagagatagatttgttttatctgcaggtcatggatcaatgttactttacgcacttcattatcttttaggatatgatgatatgccgatagagagtattaaaaatttcagacaattaaattataacacaggcaggtcaccctgag

SEQ ID NO: 231261 - DNA, 961 bp, Unknown
  Bacterial polypeptide expressing nucleotide sequence isolated from the Sargasso Sea
gtgtgccccgatgggctacaccctgtgggacaagttcctcaagcacaaccccaagaaccccaagtggttcaaccgcgaccgcttcgtgctgtccgccggccacggctgcatgctgatctacgcgctgctgcacctcaccggctacgactcggtcaccatcgaggacatcaagcagttccgccagtggggctcgaaaaccccgggccatcccgagaccttcgagacccccggcgttgaggtaaccaccggtcccctgggtgccggcatctccaacgctgtgggtctggcgatcgctgaatcccatctggccgccaagttcaacaaggctgacgccgagatcgtcgatcactacacgtacgtggtgatgggtgatggctgcaaccaggagggcatcgcttcggaagcctgctccctggccggccacctgaaactgggcaagctgatcgccctttacgacgacaaccacatcaccatcgacggccgcaccgatgtgtccttcaccgaggacgtgctgaagcgttacgaggcctacggctggcacgtgcagcatgtagcggacggcaacaccgacgtggatgccatcgccaaggcgatcgaggccgccaaggccgtcaccgacaagccttcgatcatcaaggtgaccaccaccatcggctacggctcccccaacaagggcgacaccgccggtgtgcacggcgcaccgctgggcgaggaagaggctgagctcacccgcaagcagctgggctggaactacggccccttcgaggtgccccaggaggcctacgaccagtaccgccaggccatcgaccgtggcgccagcctcgaagccgagtggaaccagtccctggcggcgtaccgcaccaagtaccccagcgaagccgctgaattcgagcggatgctgcgcggcgaactgcccgagggctgggacaaggatcttcccaccgccggccctgaagaaaag

SEQ ID NO: 231262 - DNA, 732 bp, Unknown
  Bacterial polypeptide expressing nucleotide sequence isolated from the Sargasso Sea
tttgaataaactttataaagaattagctaattgtataagatttctctcgattgatgctgttcaaaaagcaaactcaggacaccctgggatgccaatgggaatggctgatgttgctacagtgctttttaaagattttttaaaatttgatccaaaaaatcctagctggattaacagagatagatttgttctttctgctggccatggatcaatgttgctttactcgcttctatatttaactggttacaaaagtatatctttaaatgatattaaaaattttagacaactagagtccatatgtgctggtcatcctgaatatcatcctaatacgggtattgaaaccactacaggtccattaggacaaggaatttcaaatgcggttgggtttgcaatttcagaggaaattctaaaaaaaaatttgagaaaaaaaaagattaatcataaaacttatgtccttgctggagatggatgtttgatggaaggaattagtcacgaggcattgagcctcgctggacatttgaaattaaaaaatcttattttattattcgacaataattctatatcaattgatggtccaactaacctgtctgtttcagacaatcatgaaaaaagatttaagagctacggttggaactacttaaaaattgatggtcatgatttcaagcaaatatctatagctctaaaaaaagcacaaaatcaaaaaaacccattgcaatttcatgtaaaactacaatc

SEQ ID NO: 231263 - DNA, 682 bp, Unknown
  Bacterial polypeptide expressing nucleotide sequence isolated from the Sargasso Sea
tttgaataaagaaaacaaaatattagcaaacgcagtacgttttctttcaattgatgctgttcagagagctaattccgggcatccgggcatgcctatgggaatggcagatgttgttacaattttatttaaatattttttaaaatttaatcctaaaaatccaagttggttaaatagagatagatttgttttgtccgcaggacatggttcgatgcttttatattctttgctttatttaactggttacaaaagtatatctttaaaaaatatcaaaaactttagaaaactaagctctatttgtgcggggcatcctgaatatgaaaaaaatactggaatagaaaccacaacaggccctcttggacaaggaatatctaatgccgttggttttgctattgcagaaaaagtattaaaaaaaaaaattggaaaagatataattaatcataaaacttttgttttagctggagatggttgtttaatggaaggtataagtcatgaagcaatgagtcttgctggtcacttaaaattaaataatttagtaatgttatttgataataactctatatcaattgatggacccacaagtttggcggtatcggataattttaaaaaaagatttgaaagttatggttggaattatgtatcaatagacgggcataatgaaaaagaaatttttaatgcattaaaa

SEQ ID NO: 231264 - DNA, 415 bp, Unknown
  Bacterial polypeptide expressing nucleotide sequence isolated from the Sargasso Sea
caacgtcgcccgtggtggttacgtactgaaggactgtgatggcgagcccgagctgatcctgattgccaccggctccgaagttggtctggcggttaacgcctggaccgcgctgaacgagcagggccacaaggtgcgcgtggtgtccatgccgtctaccagcgtgttcgaccagcaggacgcagcctacaagcagtcggttctgccgctggaagtgggtgcgcgtattgccatcgaagcctcccacgccgacttctggtacaagtacgtcggcctcgacggccgtatcatcggtatgcagagctttggtgaatccgccccggccgcagcgctgttcgaggagtttggtttcactctcgacaacgtcctcgccgccgctcaagagttgttggaagaactgacgggggctggaggctga

SEQ ID NO: 231265 - DNA, 646 bp, Unknown
  Bacterial polypeptide expressing nucleotide sequence isolated from the Sargasso Sea
ttcggtgtgcgcgagcacgccatggccgccatcctcaacggcatcgcgtatcacaacagtggcctgatcccctacggcggcaccttcctggtgttcgccgattacatgcgcggttccatgcgcctgtcggccctgagtgagctgggcgtgatctatgtactcacccacgactccatcggcgtcggtgaagacggccccacccaccagccgatcgagaccatcccctccctgcgggcgatgccgaacatgctcgtgttccgtcctggcgacggcaacgagaccagcggcgcctataaggtggcgatccaaaaccgaaagcgccccagctccctctgcctcagccgccaggggatggccaaccaggccaactcctcgatcgacaaggtcgccttgggtggttacgtgctcgaagactgtgctggaactcccgatctgatcctgatcggcaccggcaccgaactggacctctgcgtacaggccgccaagcagctcaccgctgaaggcaagaaggtgcgcgtggtctccatgccctgcgtcgagctgttcgacgagcagagcgatgcttacaaggaggaagtgctccccaacgctgtgcgcaagcgcatggtggtggaagccgctgagtccttcggctggcaccgcttca

SEQ ID NO: 231266 - DNA, 451 bp, Unknown
  Bacterial polypeptide expressing nucleotide sequence isolated from the Sargasso Sea
ttgaataaacagtacaaagaattagccaattgtataagatttttatcaattgatgctgtccaaaaagctaattccgggcacccaggtatgcctatgggtatggctgatgttgcgactgttctgtttaaagattttctaaatttcaatccgaaaaatccaaattggataaatagagacaggtttgttctttctgctggccatggttcaatgttgctttattctattctatatttaactggctataaaagcgtttcgttaaatgatctaaaaaattttagacaaattgactctatttgtgctggccatccagaatatcatccaaataccggtatagaaacaactactggtccattaggacagggaatatctaatgcagttggctttgcactagcagaggaaatattaaaaaaaaaattaggaaaaaaaattattgatcataaaacatatgtgc

SEQ ID NO: 231267 - DNA, 853 bp, Unknown
  Bacterial polypeptide expressing nucleotide sequence isolated from the Sargasso Sea
aaagaattaggttggaattataaaccatttgaagttcccaaaaatatattgaagatttggcgagatattgggggaaagggagaaaaaattgaaaacagatggaataaaatttataggaagaagaaaagtaaaataaataatttttttaaaaatgatttcttaaagtctgcagtaaatgaaaaaaaaatagcgttaaaagaaaagaaaagtcttgcttccagaaaatcctctgagtcaattatttgctctcttgttaaaaataataatacacttattggtggatcagcagatcttgcaggatcaaataataccaaaactaacaatcataaaataattaaaccaggaaattttaacggaaattatattcattatggagtaagagaacatgcgatgtgtggaataatgaatgggttagctttacacagtaaattcataccttatggaggaacttttttaattttttcagattactgcaaaccatcaataagattagcagcaatgatgaaacaacaggttatatatgtaatgacacatgactctattggcctcggggaggatggaccaacacaccaacctattgaacaattatctggattaagatcaataccaaatcttaatgtttttagacctgcagatagattagaaactattgaatgttgggagcatgctttaaagagcgctaaaacaccaagtattttatctttaaccagacaaaaccttgatcccataagagataaatattcaaatatgaataagtgctcattaggagcatatgaagttttaaggacaaacaaaaaaataaaattgactattttagcgagtggttctgaggtaaacttggctataaaggcca

SEQ ID NO: 231268 - DNA, 588 bp, Unknown
  Bacterial polypeptide expressing nucleotide sequence isolated from the Sargasso Sea
ggagaaagattgggaaaaaaggctcaaaaatagagtctagatggaataaaatttataaaagaaaaaaaaacaaaattgataaaatattaaaaaataattttaataattcaattaaatctgaaaaaatcaatgcaataaaagaatttaaaagtgaggcatctagaaaatcatcagaattatttttaaatactttaacaaagaataaaaatacactaataggaggatctgctgatttagcaggttctaacaatactaaaacaaaatatcaaaaaataattaagccaaatgattttttagggagttatattcattacggggtaagagagcatgctatgtgtggaataatgaatggcttagcgcttcatagtaaattaattccttatggaggaacttttttaattttctctgactactgtaaaccgtcaataagattgtctgcaatgatgaagcaaagagtaatatatgtaatgactcatgattcaattggtctaggtgaagatggccctactcatcaaccaattgaacaattgtcaggcttaagggctataccaaatttaaatgttttaagacctagcagacagaactgag

SEQ ID NO: 231269 - DNA, 705 bp, Unknown
  Bacterial polypeptide expressing nucleotide sequence isolated from the Sargasso Sea
tttgaataatttaaataatatcaaaaatcttagacaattatcaaattgtattagatttttatcaatggatgcagtcgaaaaggcaaaatctggtcatccaggaatgcctatgggtatggcagacatcgcaacagttctttataaaaatcacttaaagtttgatcctaatgatccaacttggattgatagagatagattaattatttcaaatggacatgggtcaatgcttttatactcttgtttgtatctgacaggatataaagatattgacataaatcaaattaaaaattttagacaattacataataaaactgcaggtcatccagaatatggaagtgcagaaggaattgaaacaactactgggcctttgtctcaaggtttagcaaatgcagttggaatggcattagcagaaaaaaaattatcaaatgattatggaaaagaattagtcgatcattacacttatgtttttgctggggatggatgcttaatggaaggtttgagtcatgaagcatgtagtctagcgggacatttgaaattaaataagcttattatgtttttcgataataattctatttctatagatggatcaacagatctttcagtttcagacaatgtaaaaaaaagatttgaagcttacaattggaatataattgaaatagatggtcataactatgaaaaaaatgatcaagctataattcaagcaaa

SEQ ID NO: 231270 - DNA, 369 bp, Unknown
  Bacterial polypeptide expressing nucleotide sequence isolated from the Sargasso Sea
aatggctaatgcaattagatttttatcaatggacgctgtacaagcagctaattctgggcaccctggaatgccaatgggtatggcagatgttgctacagtactttttaaagattttattaacatttatccagagaagccggattggccagatagagataggttcgttttatctgctggtcatggctctatgttagtatatgctcttcattatctcttagggtataaagatatgacgatagagaatatcaaaaatttcagacagttaaattataatacagcgggtcatccagagtttgggcacgcaaaagggatagaaacaacaacaggtcctttagggcaaggattagctacggcagtttggaatggctc

SEQ ID NO: 231271 - DNA, 823 bp, Unknown
  Bacterial polypeptide expressing nucleotide sequence isolated from the Sargasso Sea
taatagagacagatttgttttatctgctggacatggttcaatgcttttatattctttactttatttgacaggctacaagagtatatctttagaaaatattaaaaattttagacagttaaattcaatttgtgcaggacatccagaatatattgcaaatactggtatagaaactacaaccggtcctctcggacaagggatatctaacgcagtaggttttgcaattgctgaaaaaattttaaaaaaaaaaattggtaaagaagtaattaaccacaaaacatatgttttagctggagacggttgtatgatggaaggtataagtcatgagtcaatgagtctagcgggtcatttaaaattaaacaacttagttgtgttgtttgataataattctatatctattgatggaccaacaagcttggctgtttcagataactacaaaaaaagatttgaaagctacggatggaattatttgttaattgatggacataatcaaaaggaaattatttatgctttaaaaaaatcacaagtttcaaaaaaaccaactgtaatttcatgtaaaacaaaaataggatatggttcacctaataaatcaggaaaagcttctgctcatggaagtccattaggtgaagatgagataaagttagtaagaaaaaaattaaattggaaatataaaaaatttgaaataccaaaatatattttaaaagaatggagaaaaataggaagctcaggcataaaaactgagtcaaaatggaataaaatttataaaagaaaaaaaagtaaaataaataaaatattaaataataattttcacaaatcaatcggaact

SEQ ID NO: 231272 - DNA, 694 bp, Unknown
  Bacterial polypeptide expressing nucleotide sequence isolated from the Sargasso Sea
aatggtcgctgcatctgtttcattagaatcactttgtgtaaatagtataagaatgcttgctgtagatgcagtaaataaatctaacagtggacatcctggattaccaatggggtgtgctcctatggggtatgcattatggcaaaacatacttaaccataaccccaataacccaaaatggttcaatagagaccgttttgtattatcagctggtcatggttgtatgctgttatattcattactgcatttgacaggatacaaatcagtttctatagaagacataaaagaatttagacaatgggggtccaaaactcctggacatccagaaacattcgaaactgaaggggttgaagttacagctggtcctctaggagctggaatttctaatgctgttggtctggcaatagctgaaactcacttagcagctaaattcaataagccagattgcaatattgttgatcactatacttacgtgatcatgggagatggctgtaatcaagaaggtatcgcatcagaggcttgctccctagctggtcatcttaagcttggaaaattaattgcactttatgacgataatcaaattacaattgatgggcgaaccgatgtttccttcactgaagatgttttaaaagatacgaagcttatggatggcatatacaacatgtcgaagatggcaatcatgatgtcaaaggaataa

SEQ ID NO: 231273 - DNA, 745 bp, Unknown
  Bacterial polypeptide expressing nucleotide sequence isolated from the Sargasso Sea
ttgaataaacaaaacaaaaatttagcaaacgcaatacgttttctttcaatggatgctgttcaaaaggctaattctggacatccaggtatgccgatgggaatggctgatgttgttacagttttatttaaatatttcttaaaatttaatccacaaaacccaagttggttaaatagagatagatttattttgtctgctggacatggctcaatgcttttatattctctgctatatttgactggctacaaaagtatatctttaaataatattaaaaaatttagacagttaaattctatatgtgcagggcatcctgagtacgaacctaatacaggcatagaaacaacaacaggacctcttgggcaaggaatatctaatgccgttggctttgctattgctgaaaaaattttaaaaaaaaaaataggaaaagaagtaattaatcataaaacatatgttttagctggggatggttgtctgatggaaggcataagtcatgaagcaatgagccttgccggtcatttaaagttaaataacttggttatgttatttgataataattctatatcaattgatggacctacaagtttagcggtatctgacaacttcaaaaaaagatttgaaagttatggatggaattatttattaatagacggtcacaacgaaaaagaaattattaaagctttgaaaaaagctcaattatcaaaaaaaccaatggtaatttcatgtaaaacaataataggttacggtcacc

SEQ ID NO: 231274 - DNA, 1141 bp, Unknown
  Bacterial polypeptide expressing nucleotide sequence isolated from the Sargasso Sea
ttgaaaaattatactaaattagcgaattgtatcagatttttatcaattgatgcggtagaaaaagcaaaatctggtcatcctggtatgccaatgggaatggccgacattgccacagtgctctttctggattttcttgttcataatcccaaagatccaaactggttactcagagatcgattcgttttatctaatggacatggttcgatgttgctttactcacttttatacctcaccggctacaaaaaaatgacaatttctcaaattaaaaattttagacaattgggctacatcacagcgggacatcctgaatatgaaccagatgctggtatagaaataacgaccggtcctctcggacaaggaatttcgaatgcggtaggaatggccatagcccttaaaaagctctcaaaagagaaaaaattgtctaaagccccaaaggtatatgttttttgtggtgatggctgtttaatggagggaattagccaagaggcaataagtctagctgggcacttaaaacttaataatttgatactaatatacgataataacaatattagtatcgatggatctacagacttagcttttagtgataacacaaaccttagatttaaatcagtaaattgggaggtacatagcggaagaggtcatgatcataaaaatatttataaacttttaaaaaaagcacaagtatcaaaagtcccttgtttgctaaattttaaaacaacaattggatttggttctccaaataagtctgcaaaagcatcatcacacggctcacccttaggttcagaggaagtgaaattaactagaagtaaattatcttggaatgaaaaaccttttcaaattccagataaacttttaaagatttggcgaaattcatccactaaaaatttacaaatatacaaaaaaactaaatcaatatctcacacaaatctatcaaataaagacatagataatttatttaataaaatagaaacagatttcaaagattttaagtctgatcaggctacaagaaaatcctctgaagcaatattacactatttcaaaaaagatcatccgatactcggaggttctgcagacttaactggctccaataataccaaaggtaaagaaatgtctattctggatagcatgaacacaacgg

SEQ ID NO: 231275 - DNA, 835 bp, Unknown
  Bacterial polypeptide expressing nucleotide sequence isolated from the Sargasso Sea
ctgaccatgtggtccggttccaagtccctgaccaacgacgatgcctccggcaactacatccactatggtgtacgcgagttcggcatgtccgccatcatgaacggtatcgccctgcacggtggtttcatcccctacggcgccaccttcctgatgttcatggaatacgcccgcaacgccctgcgcatggccgccctgatgaagcagcgtgccatcttcgtttatacccacgactccatcggtctgggtgaagatggcccgactcaccagccggtcgagcagatcgcctccctgcgtctgaccccgaacatgagcacctggcgtccgtgtgaccaggttgaatccgccatcgcctggaagcacgccatcgagcgtaccgacggcccgactgcgctgatcttctctcgtcagaacctggcccagatggaccgcagcgcccagcaactggccgataccgccaagggtggctacgtgctgaaggattgcgccggcaagcctgagctgatcctgatcgccaccggttccgaagtggaactggccgttgccgcctatgagcagctgactgccaagggccgtgccgtgcgcgtggtctccatgccggccaccgacgtgttcgatgcccagtctgccgagtacaaagagtccgtcctgccggcctccgtcaccaagcgtgtggccatcgaagccggcatcgccgactactggtacaagtacgtcggtttcggcggcaagatcatcggtatgaccaccttcggtgagtccgcaccggccgagctgctgttcaaggaattcggctttaccgtggaaaacgtggttgcgactgctgaatccctgtaat

SEQ ID NO: 231276 - DNA, 727 bp, Unknown
  Bacterial polypeptide expressing nucleotide sequence isolated from the Sargasso Sea
ctgttagaatgtcacgctttcagccttgtccgtttgctctgcccgtttcgcgtctcctggcgccgcaccgtgcgccgaagtggactggcattcgagcatccgggcctcaagcgcgcaccgctttctgactctgtctccggactcgacatgacgaccccgtctcccgcacccacctccctgatggctaacgcaatccgtgcgttgtccatggatgccgttcaaaaagcgaattccggccaccccggcatgccgatgggcatggccgaaatcggcgtagccttgtggtcgcgtcatttgcgccacaacccgaagaatccgcagtgggccgatcgcgaccgtttcattctatcgaacggccacggctcgatgctgctgtactcgctcctgcacctgaccggctatgacctgccgatggaagagctgaagaacttccgccagatgcattcgaagacgccgggccacccggaatacggcatcacgccgggcgtcgaaacgaccaccggcccgctcggccagggtctcgcgaacgcagtcggcatggcgctcgccgaatcgctgctcgccaccgaattcaacaagcccgacgcgaagatcgtcgaccaccacacgtacgtgttcgtgggcgatggctgcctgatggaaggcatctcgcacgaagcctgctcgctcgcgggcgtgctgaagctgaacaagctgatcgcgttctacgacgacaacggcatctcga

SEQ ID NO: 231277 - DNA, 1015 bp, Unknown
  Bacterial polypeptide expressing nucleotide sequence isolated from the Sargasso Sea
tttgagcaatgcgattagatttttatcgattgatgcggttgaaaaggctaattctggccacccaggaatgccaatgggaatggctgatgttgcaaccgtactttttaaagattttttaaaatataatccaaagaacccagattggttgaatagagatagatttattttatctgcaggtcatggttctatgcttctatattctctgctttacttaactggctataaaagtatttctttaaatgaaataaaaaatttcagacaacttaattctatttgcgctggccatccagaataccaccctggtagtggtatagaaactactacaggacctttgggccagggaattgcaaatggggttggtatcgcaatagcagaagaaattttgaaaaataaaattggcaagaatattattaatcataagacatatgttttagctggagatggttgtttgatggaaggtataagccatgaagcgctaagtctggctggtcatctcaaattaaaaaatcttatacttttatttgataataattctatctcaatagatggtccaacaagtttagctgtatcagataattacaaaaaaagattaaatagttatggatgggattatattgatatagatggtcacaatgaaaaacaaatttttaaagctttaaaaaaagtacaaaatgctaaaaaaccaacggtaatatcttgcaaaactaaaataggatatggatcaccaaataaatctggtactgcttctgtgcatggcagccccttaggagaaggagaggtaagtttagttagaaaaaaactaaaatggaaacataatccttttatgatacctaaagagatactaaatgaatggaaaaaaattggtgaaaaaggtattaaaaaagagaatagttggctgaagctttataaattaaaaaaacaaactataaaaaatatcttttctaataattttcaaagcgattttgaaaatgaaaaaaaaaatattattaaaaatttggaagcaattgcgactaga

SEQ ID NO: 231278 - DNA, 1498 bp, Unknown
  Bacterial polypeptide expressing nucleotide sequence isolated from the Sargasso Sea
aatgtttgacaatgtaacaaagtctgtgagagtcctttctgctgcagcagtagaaaaagcaaattcaggtcatcccggcatgccgttaggaatggctgatgttggtgttgcaatttataaaaatgcattgaaagcttcaaacaaaaatccagattggataaacagagatagatttgtattaagcgcaggacatggatctatgcttttatatagccttctgcacttcaatggttttgatatttcaatggatgacataaaaaattttcgtcaactaggatctgtcactgcaggacatcctgaaaaagattttcaacttggtattgacactacaacaggtccccttggtcaaggctttgcgaatggtgttggcttagctgtagctgaaagatatctttccagtgttcttggagaagatattatcgatcactatatttatggaattgtctctgatggagatttgatggagggaatatcaacagaagctgcagagcttgcaggtctatggaaacttggaaaaataatttatttttttgatgataacaatatttccatagatggaaacgtaacaaacgtttcaattacaaatcaaaaaaacaagtttttgtccttgggctgggatgttctcgaaatagatggacatcaagaatcagaaataattgatgcaatcaaacatggacaaaagatcactgataagccatcgttagtgattgcaaaatcaacgattggaaaattctctcccaataaagcaaattcaagtggtgttcatggctcacctttaggggagaaggaatttgagctatttttagataatattggttattctggtgacccgtttgctcatagctcagatatatacgattactttaacaatgaaagagaaagagataataagacatttcaggaatggaaagccaatttagacaaaaaaattagcaatgatgaaaattttaaaactctgtgggaggaatttagtaataatgattttcaatctttatcacttgcatggtctgacgatcaagcttcgagagtggttggcggaaaaattttaaataaaataggaaaatcaaataaatttatcattggtggatcagctgatctcgcagcttcaacaaagcaaattgtgagtgatgaagtttttggatctcaaaactatagtggaaaaactattgagtttggtattagagagcatgccatgggcggaatcgttaatggtattgccttacatagcaacttaattccctatggatctacatttttagtattttctgattacatgagaccgagcataaggcttgcctcactgatgaagacaaattcggtgtttatatttacacacgattcaatttttttaggtgaagatggcccaacacaccagccaatagaacatcttatgtccttaaggcttataccaggcctcgaggtagttagaccagcaaataataatgagattctttatgcatataggtatgcttttgaaaataaaaataatccaacagca

SEQ ID NO: 231279 - DNA, 784 bp, Unknown
  Bacterial polypeptide expressing nucleotide sequence isolated from the Sargasso Sea
ttgagtaaattttataaagaattagcgaattgtattagatttctctcaattgatgctattcaaaaagcaaactcaggtcaccctgggatgccaatgggaatggcagatgttgctacagtactttttaaagattttttaaaatttaatccaaaaaatcctagctggattaatagagatagatttgttctttctgctgggcatggatcaatgttgctttactctctcctttatttaactggttacaaaagtgtttctttaaatgatattaaaaattttagacaattggaatccatatgcgctggacatcctgaatatcatccaaatactggtattgaaaccactacaggtccattgggacaaggagtctcaaacgcagttgggtttgcaatatcagaggaaattttaaaaaaacaattaggaaaaaaaaaaatcaatcataaaacttatgttcttgctggtgacggatgcttaatggaaggtattagtcacgaggcattaagcttagctggacatttaaaattaaagaatcttattttattatttgataataattctatatcaattgatggtcccactaatttagctgtttcagacgaccacgaaaaaagatttaagagctacggatgggactacttaagaattaatggtcatgatttcaaagaaatatctaaagctttaaaaaaagcacagaaatcaaaaaaacctatcgcaatttcatgtaaaacaacaatcggttatggatctccaaacaaaagtggtaaggcttcatctcatggaagtccat

SEQ ID NO: 231280 - DNA, 1651 bp, Unknown
  Bacterial polypeptide expressing nucleotide sequence isolated from the Sargasso Sea
tttcctttgagtatggatgaaattaaaaattttagacaacttaactcaaaaactgctggacatcctgaagttgatacttccataggcattgatacaacaactggcccattaggtcagggttttgctaatggtgttgggtttgcaatcgcggaaagatatttagcatccttattaggagaagatgttattaaccactttacatttggaattgtatctgatggagacttaatggaaggaatctcatttgaagctgcagaacttgcagcagtctggaagttaggaaaaataatttacttttttgataataataatatctcaatagacggttccgttgacaaagtttctatcacaaatcaaaaagagaagtttgaatcaataggttggcatgttttagaaattgatggacacaatgagaaagaaataattaaatcagttgaaaaagggagaaaagtagaagataagccgactttaattattgcaaaatctacaattgggaaatttgcaccgaataaagaaaacacgagtggagtacatggctcacccttagggagtgatgagatgaataaatttcttatgaatttagattggagcggagatccatttctacatggtgatgatatttatgattattttaaagaaaagagagagaaagataatgaagaacttaggaaatgggaagaaaattttaaaaacaaatatcaagaagattcatcatttaaagataattgggatttgttaacttctaaagactttcctactttagatgggctcaacggggaaaagtatgcatcaagaattttaggttcaaaaatactagaaaatttatcagaatctactaattccataattggaggttcagcagatttagctgcctctacgaagcaaataattgatgaaagctacttttcatccactaattataaaggcaggagtctcgagtttggaattagagaacacgcaatgggtgcaattacaaatggtataactttacatagtaatttgataggctatgcttcaacttttttggttttctcagactatatgaggccaagtattcgtttagcatctttaatgcatattaattctgtatttattttcacacatgattcgatatatcttggtgaagacggaccaactcatcaacccatagagcatttaatgtctctaagacttattccaaatgtagatgttataagaccttctaatagcattgagatagaacattcttataggtatgcattttctgattctaaaaatccaaaagtactttcattaacaagacaagatttagattatttagattttgatgttaaatatgaagaatttattaaaggaggatatgtggtttctgatggagatgattttacacttgtagcttcaggatccgaattggaaatagcttttaagattaaagcagctcttcttgaatactcggtaaggattatcagtgttcctatcttaaataaactttcaaacatgcaaaatgaagaaattaatgaactcttaaaaaataaacacgtttttccaatcgaacttggtagatcaattggttgggagagttatttagggagaataacaaagactttttctattgatagttttggtgagtcagctcctatagaagatcttgaaaaaaactttgggatttgac

SEQ ID NO: 231281 - DNA, 1366 bp, Unknown
  Bacterial polypeptide expressing nucleotide sequence isolated from the Sargasso Sea
gtaatcagagatgttaacgggcatgattttgttaacatccgatatgcaataaataaagccaaattagagaaaaatagaccaacaataatctgttgcaagaccgtaataggttacggttctcctaagtttcaaggaacaagccaagcccatggtgcacctcttgggaatgatgaagccgaagtagttagaaaaaaattagagtggaaatacaaaccttttgaaataccacggcagatttatcgcgagtggaatgctgaagctaagggtaagaagtatgaaggtacatggacattaaaagtgaataaatacaaaaaattatatagaagggagttcgctgagttagaaagaagaattaagagaaagataccaaaaaatgttattgcaaaacttaataattttatgtcgaaaaatcatatgccaatggcaacaaggaaatcatcacaaattgttatgacggaatttggtaagtcaatgccggaacttattgggggatcagcggatcttaaggggtcaaacctatcgtattatgataatatggattcattttcacattcaaatccctcaggaaaatatatttattacggtgtcagagaattcggtatgtcagccatatcaaatggtattttcttgcatggcgcttcaaggccatttgcaagtactttcctaatattttctgagtacgccaaaaatgcaattcgaatgtcagctctaatgaaattaccaattatttatatatttactcatgattcaataggattaggtgaagatggccctactcaccaggcagtcgagcaattatcttcacttagacttgtcccaggattggatgtttggcgaccagctgatactcaagaaacagctgttgcatggagagaggcaatattatcacaagagaggccaacagccttcgcgttatctcgacaaactcttaaagagatacctaaaactaagaaacaaataagcaatatctcaagaggagggtatgtggtttatggcgatagctctaatcctgatgcaattatcatcgctacaggttcagaggtttcaatttcagtaggtgctgcagagcaactcagaatcaagggagtaactgtacgtgtaatttctatgccttgtcaggaggtttacgagagacagactcttgcttataaaaataaatgtatccctaaaaactttgacaatatacttgctattgaatcagggattggtgacagttggcataagtttgttgggaataaaggcgcaatgatatcaatggaatcttttgggttatcaggtacaggtagtgatgtcatgaaccactttggattcagtgtcagcaatattaaaaaaaatataaacaaattaatcaagaaaaataggtgat

SEQ ID NO: 231282 - DNA, 1693 bp, Unknown
  Bacterial polypeptide expressing nucleotide sequence isolated from the Sargasso Sea
ggttacaccccgggtgtcgagaccaccaccggcccgctcggccagggcatcgccaacgccgtcggcttcgccatcgccgagaaggtgctgggcgcgcagttcaaccgtgaaggccacaacatcgtcgaccacaacacctacgtgttcctcggcgatggctgcatgatggaaggcatttcccacgaagtctgctcgctggccggcaccctgggcctgggcaaactgatcgccttctacgacgacaacggcatctccatcgacggtgaagtcgagggctggttcaccgacgacacgccgaagcgcttcgaagcctacggctggcaggtgattcgcaatgtcgacggccacgacgccgaagagatcaagatggccatcgagaccgcgcgcaagagcgtggaccagccgaccctgatctgctgcaagaccaccatcggcttcggttcgccgaacaagcagggcaaggaagagtgccacggtgcgccgctgggcaacgatgaaatcgccctgacccgcgccgcgctgggctggaaccatggcccgttcgaaatcccggccgagatctacgccgaatgggacgccaaggaagccggcgctgctgccgaagccgcctggaatgacaagtttgccgcctacgccgctgcccatcccgagctggctgccgagttcaagcgccgtattaccggtgagctgccggccgatttcgccgagaaggccgctgcctatatcaaggacgtggccgagaagggcgagaccatcgccagccgtaaggccagccagaacgcgctgaatgccttcggcccgctgctgccggaattccttggcggttcggccgacctggccggctccaacctgaccctgtggaagggctgcaagggcgtctccgctgaagacgcgtccggcaactacatgttctacggcgtgcgcgagttcggcatgagcgcgatcatgaacggtatcgccctgcacggcggtttcgtgccgtacggcgcgaccttcctgatcttcatggagtacgcgcgcaacgctgtgcgcatgtccgcgctgatgaagaagcgcgtgctgtacgtgttcacccacgactccatcggtctcggcgaagacggcccgacccaccagccgatcgagcaactggccagcctgcgtggcacgccgaacctcgacacctggcgcccggccgatgccgtggagtccgccgtggcctggaaatacgccatcgagcgcgccgacggcccgagcgctctggtgttcagccgtcagaacctgccgcaccagccgcgcgatgcccagcagctgagtgatattgaacgtggtggctacgtactgaaagacagcgctggcgagccggagctgatcctgatcgccactggttcggaagtcggtctggccatggccgcctacgacaaactgaccgccgccgggcgcaaggtgcgtgtggtgtcgatgccgtccaccagtgtgttcgacgctcaggacgccggctacaagcaggacgtgctgccgctgcaggtcggtgcgcgcatcgccatcgaggcctcgcacgccgactactggtacaagtacgtgggcctggaaggtcgcatcatcggcatgaccagcttcggcgagtcggccccggctccggccctgttcgagcacttcggcttcaccgtcgacaacgtcgtcgccactgccgaagaactgctggacgcctgag

SEQ ID NO: 231283 - DNA, 1618 bp, Unknown
  Bacterial polypeptide expressing nucleotide sequence isolated from the Sargasso Sea
tatgcaaaccactcagcacactgatcataaaacccgcgccaacgccatccgggctttagccatggatgcagtacaaaaagccaattcaggccaccctggtgcacctatgggcatggccgatattgccgaagtactctggctacaattcttaaagcataacccggctaatccgtctttcagcaacagagaccgttttgttttgagtaacggccatgcttctatgttgttgtattccttgctgcacttaacaggttatgacttatctattgaggatttaaagtctttccgtcagttgcattcaaaaactcctggtcaccctgaattgggttacaccccaggtgtcgaaacaaccactggtcctttgggtgctggtattgccaatgctgtggggatggcaatcgccgaaaaaacgttggcggcacaatttaaccgacctgattaccctgtagtggatcactttacttattgtttcctcggtgacggctgcctgatggaaggtttatcccatgaagcctgttcgctggctggcactttaggcttgggtaaactgatcgccttttgggatgacaacggtatttctattgatggtcatgttgaaggctggtttaccgacgacacgcccgctcgttttcactcttatggctggcaagtgatccgggtggatggccataacccagctcaaattgcagatgcgatcacacaagctcaggcagaaacagacagacccacgctgatttgctgtaaaactattataggttttggtagcccgaataaatccggctctcatgactctcatggctcgccactaggcgacagcgaaatagctaaaacccgtgaattcctgttgtggtcgcatcttccttttgaaattccggccgacatttatgcagcctgggacagcaaaaccaaaggcgcagcgcttgaacaacactggacagaactatttgccgcatacaaaaacgagtacccggagctggccgctgaataccaacgccgtgtgatagatcgggtgttaccagccaactttgaagctgccactcaaagctttatcgaccattgccaaaaccaacaacaggatattgccagccgtaaagcctcgcagctttgtatcgcccactttgcagcattagttcctgaagttttaggtggctcagccgatttggcaggttctaacctgaccttatggtcgggcagtaaaggcctgaccaaagacgatagctccggcaactatatttattacggtgtacgcgaatttggtatggtcgccataatgaacggcattacagcccacggtggtttccgctgttacggcgctactttcctgatgtttatggaatacgcccgcaatgcggtgcggatgtcggccttaatgaagctacccaatatttatgtctttactcacgactccataggtcagggcgaagatggcccaacgcaccagccgatagaacagctgacgaacttacggaccacgccaaatctggtgacctggcggcctgctgatttaactgaaaccgcagtagcctggaaaacggcgttaacgaccacaacctcaccttcagctttggttttcagtcggcaaaatctgcgccagtaccaacgtaatccagagcaaatc

SEQ ID NO: 231284 - DNA, 2011 bp, Unknown
  Bacterial polypeptide expressing nucleotide sequence isolated from the Sargasso Sea
atgctggaaaagcataatttagcaaatgcaattcgtgccttaagcatggatgcggtgcaacgtgccaattcaggtcatccaggggcgccaatgggtatggcagatattgcggaagtgctttggaatgattttttaaaacataaccctaataatccaaattgggataaccgtgatcgctttgttatgtcaaacggtcatggctctatgctcatttatgccttacttcatctgagtggttatgatttgccgatggaggagatcaaaaactttagacagttacactcgaagacacctggtcatccagagtatggttatgcacctggtatagaaacgacaacaggaccgcttggtcaggggctagcaaatgcagtaggtatggcactagctgaatctgtactttctgcaaaatttaatagggatgacctcgatattattaaccaccatacctatgtcaccgttggtgatggctgtttaatggagggcgtttcacatgagtcgtgttcattggcgggaacgcttggtttaggtaaattagttgcgatttacgatagcaatcaaatctcgatagatggtgatgttgctggttggtttaccgaggacattccaaaacggtttgaatcatatggttggcatgttgttcgtgatattgatggacataagccaaaagaaatcaaaagggcactagaaagcgcgattaagaatacatcgcaacctagcattctttattgtaatactgtaattggctggggatctccaaataaagcaggcaaagaatcaagtcatggtgctccgctcggtgatgaagaaattcaacttacaagaaaagagcttggctgggagcatgagcccttcgatatacctgatgaatattatgctgcatgggatgcaaagccaaatggtgagaaattggaaagtgcgtggcaaaaaaaactttcatcgtatgaaaaaaaatatcctgaactggctgctgagtacaaacgtagaatgcaaaatgaattgccctctaattggtctgatgtcgttgatagatatttaaattcaacagtagaaaaagctgaatcactagccacacgaaaagcatcacaaaatgcaattgaagcctatgcgaaacatctgcccgaaatgattggtggatctgctgatcttactggatctaatttaacaaattggtcgggttcaatcatgattgatagaaaaaataaagatggtaattatatatcatatggtgtgcgtgaattcgcaatggctgcaattaataatggaatttctctgcataaaggattcattccgtattctggtacttttctcatgttttctgaatacgcaagaaatgcactgcgtatggcagcactaatgaaaattcaaaatattttcgtatttacacatgactcaatcggcctaggtgaggatgggccaacacatcaagcggtggaacaagcctcaacattaagattaatgcctaatatgtcattatggagaccttgtgatgcagtggagtcagcgatagcttggcaagcagcaattgaacgtgataatggcccaacaagcttattgctttcgagacaaaatctagcacatctaaaaagaacagaatcacaacttcaaaatataaaacgtggtggatatacactaatcgagggaagccaaaaacctgaagctattattatagcgacgggttcagaagttgaaatggctcttaacgtagccacaagattaaatgcaaataataaaaatattagagttgtttctatgccaagtgctgatgtctttgatgctcaggaggagggttataaagaaactgtcctgcctttttcttgtcgaaatcgtattgcaatagaagctggggtaacagattactggaaaaagtataccggcttagatggtttggctttaggtgtagatacttttggagaatcagccccagctaaaaaagtatttgaacattttggattgacagaaaacagtctcgagaaaacaattattaattttttagagcaaaagaaaaaataac

SEQ ID NO: 231285 - DNA, 1990 bp, Unknown
  Bacterial polypeptide expressing nucleotide sequence isolated from the Sargasso Sea
tttgcaaaaatcagaaccaataaatgctctaagatttttatctgctgatgctgttcaaaaagcaaattctggtcaccctggaatgccaatggggatggcagaaatcgctaccgctttatggagcaaacatttaaaacacaacccttcaaatccaacttggtttgatagagatagatttgtgctttcaaatggtcacggctctatgcttttgtatagcttgttgcatttgactggttatgatctctcaattgaagatattaaagactttagacaacttaaatcaaatacaccaggacatcctgaatacgatatagatattggtgttgaaacaactacaggtccacttggtcaggggattgcaaatgctgttggtatggcaatctcagaaaagattttagcagcagaatttaataaagatgacataaaacccattgatcattacacatatgtttttttgggagatggttgtctaatggaaggtgtttctcatgaagcatgctcttttgcagcaactcacaatcttgggaaattgatttgtttttatgatcaaaatggaatttcaattgatggagaaatagataattggttcacagatgactctgttaagaggtttgatagttatggttggcaaacaatttgcgtagatggtcataatgttgaagaggtcagcgatgctatttctaaagcaaaagaagaacctaataaaccaacaatgattttttgcaagacgacaattggttttggttcgccaaataaatccggaacagctgacgttcatggagcacctctaggaggtgaagaaatcgaaaaaacaagagaggctctaggttggaattattcggcttttgaagttccaaaagaggtatatgatttttgggactctaaaaagtcaggagctggtataaattctatttgggatgatttaataaaaaattataaagaaaaatatcctaacgagtcattggaattagaaagaagaataaaaggtgatttaccagaaaattttcaacaaagcttccttaattttcttaatgattgcaactcaaataattcacctatggcaacaagaaaggcttctaaagcttgtttagatttttttgtaaaagagatgcctgagcttgttggcggctcagctgatctaactccttctaacaataccttttcagcttcaagttcaacattttctaatgagaatccatcaggaaatcatattaattatggtgttagagaatttggaatgtcagcaattatgaatggcatggttcttcatggaggcattaagccttacggggcaactttcttagtttttactgactatgcaaggaatgcagtcagattatcagcgctaatgggtttgccaaatatatttgtttacacacatgactcagtagctttgggcgaagatgggccaactcatcaacctattgaacatttagttactttaagatcaactcctaacttgaatagttggagacctgctgatctcgttgagacagctgttgcttggaataatgctgtgagttcagcaacaacccccacgtgtcttatttttagcagacagggaacctcagcaatagagcgaacgcctgaacaactttcttctattaatataggcggatatcttcttgaagaacatgaagacccaaatataactatagttgcttctggaagtgaggttcagctagctatagatgctgcgaaagagttaaagaatgaatcaattaatgccaatgttgtttcaatgccatgtttggatgtctttttaaaacaaagtaatcaattacaagataaagttattaaccctaacaaaccagtccttgttatagaatgtgcgcatcctaactcttggtataagattttaaatagaagcgataaagtaatcggtatggaaacatttggagaatctgcgccaggaagtgaattgcttgaacactttggatttaataaagacaatgtaattcaggcagctagatcactaatcaatgattaa

SEQ ID NO: 231286 - DNA, 1246 bp, Unknown
  Bacterial polypeptide expressing nucleotide sequence isolated from the Sargasso Sea
ttgaataaacttaataaagatttatcaaacgcaataagatttttatcaattgacgctgttgaaaaagccaattctggacacccagggttgccaatgggtatggcagatgtagtaacgattctttataaaaattttctaaaatttaatccaaaagatccaaattggataaatagagatagattcgttctatctgctggacatggatctatgttattatattctttattatatctcactggctacaaaagcatttctttaaatgatattaaaaattttaggcaattaaattcaatttgcgcaggacatccagaatactctccaaattctggtattgaaacgactactggacctctcggtcaaggaatatcaaatgctgttggatttgcaattgcagaagaaattttgaaaagaaaattaggaaataaagttatcaatcataaaacatatgttttagctggcgatggttgcttaatggaaggtattagtcatgaagctttaagtttagctggtcacttaaaattaaaaaacttaattttactatttgacaataactctatttcaatagatggcccaactagtcttgccgtatctgataatttcaaaaaaaggttcaatagctatgggtggaattacatagaaatagatggtcataatgaaaaacaaatttttaatgcattgaaaaaagttcaaaaatctaaaatccccacagcaatttcatgtaaaacaattattggttttggttctccaaataaatctggcacagcatctgtacatggaagcccattgggaaaagatgaggtgtctcttgtaagaaaaaaattgaaatggagctataagccatttgaaattccaaaaagaatatttgatgagtggagaagaattggagaaaaagcatctaaaaaagctaaaacaaaagaaattaagaatagttatttaacactaactaaaaacaattcttcatttacaaataaaatccaaaaaattattagtgaagagaaaaaaaaatatttaaaatcgatagagccaatggctacaagaaaatcttcacaaaaaattttaaatgaactggcaaaaaaaatcccacaacttattggaggatctgctgatttagcaggatcaaataatacgaaaactgataatcataaaataattaaacctggaatgtttgatggaaattatattcattatggtgttagagaacacgcgatgagcggtattatgaatggtatagcgctgcatagcaact

SEQ ID NO: 231287 - DNA, 1595 bp, Unknown
  Bacterial polypeptide expressing nucleotide sequence isolated from the Sargasso Sea
tgctgaagaaatactaagaaagaaattaggatcaaatttaatcaacaacaaaacttacgtgatagcaagtgatggagatttgatggaaggcatcagtcacgaagctctgagtttagcaggtcacctgaagcttaaaaacttaatagttttttttgacaacaataaaatctcgattgatggttctacttctttaagtgtatcagatgattataaaaaaagatttgaaggctatggatggaattttttggagattaatggtcataatgaaaaacaaatttctaaagcgattactaaagcatctaaagcgagtaaacctactttaatatcatgcaaaactataattggatttggatcaccaaataaatctggaaaagcttcttctcatgggtcaccacttggtgatgaagaaatttctttagttcgaaaaaaacttaaatgggacagtggcccctttgaagtgcctatggatattttaaatgcttggagaaaaattggtgaaaaaggagctaagttagaagaagaatggttagaaactttaaacaaaaaaaaatctaatattaaatcagagttgaaaaatacttatatagagtcaaatttaaaaaatcttgaagaattaatgataaaagaaaaaacaaaatattttgagtcaaaaccaagtatggctactagacaatgttcgtcagccgctatagatatcatttcgagtatcttaccccaattaattggaggttctgcagacctcagtggatcaaacaataccaaaacaaaaaattcaaaagtaattaattcaaaaaattttgatggaaattatattcattacggtgttagagaacacgggatggctgcgatcatgaatggattagcattacatagtggattaatcccttttggtggaacttttttaattttttctgattattgtaaaccatcaataagacttgctgctttaatggggttaagagtaatttatattttttctcatgactctattggacttggtgaagacggtcctactcatcagcctatagaacaattaactggcttaagagcaattcctaatcttaatgtttttcgtcctgcggacataaatgaaactctagaatgttgggaaatagctttgaaaagtaaaaatactccaagtgcaatagctttatcaagacaaaaattaccgtacattaatcctaaattttctgaaaagaatgaatgtgaaaatggagcctacatagtaaagatgtcttcacataataacaaggttacattagttgcatctggatcagaagttgagctggctttaaatgtacacgaagaattgaaaaaaaataatattctttcaaaagtagtttctatgccatgccaagagttatttgataaacaatctgtagattttaaaaagcaaatattagatgaagaatctttgattgtaactattgaagctggcaatgtctcttcgtggaaaaaatatttagggcaacgaggaatctctttgggaattgatagatttggtgaaagcgctccatataaaaaagtatatgaacatctcaatttatctgtagaaaaaatagttcttactattcaagataatcttagaaaataac

SEQ ID NO: 231288 - DNA, 1309 bp, Unknown
  Bacterial polypeptide expressing nucleotide sequence isolated from the Sargasso Sea
gctatcgaaaaagcaaaattaattacagacaagccttcaattataaaaatttctacaaccataggttatggttctcctaataaatcagatactgctggaattcatggagcagctgttggagaagaagaagctgctttaactagagagtttctaaattgggaataccctccatttgaaatacccactgaagtatattcgcattttagaaaatcaataaacaaaggtgaaaatttagagaaagaatggaattctaaatttgaaggataccaaaaaaattatccctctgaaggagccgagttaaaaagaatgttagagggtaaattacctgagaattgggactcagatctcccctcttattcacctgatgataaagggttagccactagaaagcattcacaaatatgtttgggtgctttaggacctaacatacctgaattaattggcggatctgcagatttaactcactctaattacacagatataaaaggagaaactggatcatttcaatcgcatagccctgaaaaaagatatttacattttggtgtacgagagcatgcaatggcagctgtactaaatggcattgcctatcataatagtggtctcattccttatggtggaaccttccttgttttcgctgattatatgagaggatcaatgaggctttcagcacttagcgaattaggagtaatctatgtcttaactcacgattcaattggtgtaggagaagatggtccaacacatcaacctattgaaactataccttctcttcgcgctatgcctaacatgctagttttcagaccaggtgatggcaatgagacgagtggggcttataagcttgctattcaaaatcgaaaaagaccttctgccctttgtttaagtagacaagctatgccaaatcaagaaaatacttcgatcgacaaagttgctctaggaggatatgtagtttccgattgcgaaggggcaccagatctaatatttattggtaccgggagtgaactgaatctttgcattgaagcaagtaaggaaatttcaagcttaggtaaaaaaattagagttgtttctatgccttgtgtagaacttttcgaagagcaagaagaatcatataaggaaagtgttttacctagtagtgtgaaaaagagagttgtagtagaagctgcccattcatttggctggcataaatatactggttttgaaggaatatgtattactatggatagatttggtgcatcagcaccaggtggagaatgtatgaaaaattttgggtttactgttgaaaacgtagttaataagactaaggaaattctataaa

SEQ ID NO: 231289 - DNA, 911 bp, Unknown
  Bacterial polypeptide expressing nucleotide sequence isolated from the Sargasso Sea
ttctgaaatgtttttaaatgttgcatctaaattacctaatcttattggaggttctgctgacttagcgggttcaaacaatactaaaactaaaaaccacaaaataataaaaccaggtgatttttctgggaactacattcactacggagtaagggaacatgccatgtgtggtgtgatgaatggtatttctttacatagcaaccttattccatatggaggaacttttttaatttttagtgattattgcaaaccatcaataagacttgctgctatgatgaagcaaagagtaatttatatttttactcatgactctattggcttaggagaggatggtcctactcatcaaccaattgagcaattaacaagtttaagatcaattccaaatctatatgtttttagaccagcagatttaatagaaacttttgagtgttgggatattgcaattaaaagcaaagatacaccgagtgtaattgctttaacaagacaaggaataaatcctgttaggagaaaaatttcttataaaaataagtcagagagaggtggatacgaaatattaagaacaaaagacaaaattgatataactataatatcatccgggtcagagaccagtttagcatgtgaaatttgtcataaattagccacagagaatatttattctaaagttatctcaatgccttgtcaggaattatttgatctacaaagtactgattataaaaataaaattttaaaagaaacacctatggtagtatctatagaggcctcagaaacaaattactggaaaaagtatacgggtatgaatggattaaattttgggatagatgagtttggtaaaagcgcaccgtatcaaaaaatatatgatcattttaagttaaattcaaaaagtataattgaaagtataaaaaagagattatgaa

SEQ ID NO: 231290 - DNA, 1630 bp, Unknown
  Bacterial polypeptide expressing nucleotide sequence isolated from the Sargasso Sea
cttaatgcagttggtttagcaatagctgaaactcacttagcagctaaatttaataagcctgattgcaatatcgttgatcactatacttacgtaataatgggtgatggctgtaatcaagaaggtatcgcatctgaagcctgctcattagctggtcaccttaagcttggcaaattaattgcactatatgacgataatcaaattacaattgatgggcgaaccgatgtttctttcaccgaagatgttttaaaaagatacgaagcttatggatggcatgtacaacatgttgaagatggaaatcatgatattaatggaataactgaagctattgaaaaagcaaaatcaattaaagacaaaccttcaattataaaaatttctacaaccataggttatggttcgcccaataaatcagatactgctggaattcatggagcagctgttggagaagaagaagctgcattgactagggagtttctaaattgggaataccctccatttgaaataccaaatgaagtgtatgagcattttagaaaatcaataaacaaaggtgaaaacttagagaaagaatgggattctaaatttgaagaatatcaaaaaaaatatccctccgaaggagccgagttaagtagaatgttaaagggccaattacctgagaattgggacttagatctcccctcttatacgcctgatgataatggtttagccaccagaaagcattcacaaatatgtttaggtgctctaggacctaacttacctgaactaattggtggatccgcagatttaactcactctaactacacagacatcaaaggagaaactggatcattccagccacacagtcctgaaaaaagatatttacattttggtgtacgagagcatgcaatggcagctgtacttaatggtattgcctatcacaatagtggtcttattccttatggtggaacctttcttgtttttgctgattatatgagaggttcaatgaggctttcagcactcagcgaattaggagtgatctatgtattaacacatgattcaattggtgtaggagaagacggtccaacacatcaacctattgaaactattccttctcttcgtgccatgcctaacatgctagttttcagaccaggagatgggaatgagacaagtggagcttataagcttgctattcaaaatcgaaagagaccttctgctctttgtttaagtcgacaaggtatgccaaatcaagaaaatacttcgatcgacaaagttgctctaggaggatatgtagtttccgattgcgaaggaacaccagatttaatatttattggtactggaagcgaacttaatctttgcattgaagcaagtaaagagatttcaaacttaggtaaaaaaattagagttgtgtctatgccttgtgtagaacttttcgaagagcaagaagaatcttacaaagaaagtgttttaccaagtagtgtgaaaaagagagttgtagtagaagctgcccattcatttggttggcataaatatacaggttttgatgggatttgtattactatggataggtttggtgcatcagcaccaggtggagaatgtatgaaaaattttggatttacagttgaaaatgtagttaaaaagacgaaggaaattctataac

SEQ ID NO: 231291 - DNA, 931 bp, Unknown
  Bacterial polypeptide expressing nucleotide sequence isolated from the Sargasso Sea
tttgagcaaacaacacagagaattagcaaatagcatcaggtttttgtcgatggatgctgttcaaaaagcaaattctggtcatccaggaatgcctatgggaatggctgatgtagtaacggtcctatttaaagattttttgaaatttaatccaaaaaaaccggattggctaaatagagatagatttgttttatcggctggacacggatcaatgttactttactctctgctttatctaacaggttataaaagtgtttctatagaagatataaaaaattttagacaactagactctatttgtgcgggacatcctgaatatcacgaagggtcaggaattgaaacaacgaccggcccactaggtcaaggcatagcaaatgccgtcggttttgcattagcagaggaaattttaaaaaaaaaagtaggtaaaaaaattataaatcataagacttatgttttagctggagatggatgtttaatggaaggtattagccatgaagcattaagttttgcaggtcatctaaaattaaaaaatcttattttattatttgataataattcaatatcaattgatggacctacaaatttagcagtatcggataacacaaaaaaaagatttgaaagttatggttgggactatgtggatataaatggtcacgatgaaaaacaaatctttaaagctctaaaaaaagcacaaaaagcaaaaaaaccttttgctatctcatgtaaaacaacaattggttatggttctcctaacaaaggtggaaaggcatcatctcacggaagtccgcttgggcaggaagaaattaatttggttagaaaaaaattaaattggaattataaacccttcgaaataccagatgaaatcaaaaaagaatggaaaaaaattggagaaaaagcatctgcatatgctgaaaaaaatgaagcaaaatatcaa

SEQ ID NO: 231292 - DNA, 1063 bp, Unknown
  Bacterial polypeptide expressing nucleotide sequence isolated from the Sargasso Sea
catggatctatgcttttgtattctttgctttatttaactggatataaaagtgtctctttagatgacataaaaaattttaggaagctagattctatatgtgctggacatccagagtatcattcaaactctggtattgagacaactacaggtccacttggtcagggaatttcaaatgctgtgggttttgctttagccgaagagattttaaaaagtaaaattggtaagaaatttataggtcataaaacttatgttctagctggagatggctgtttaatggaaggtataagtcatgaggctttgagtctggcaggtcatttaaaattaaaaaatcttattttattgtttgataataactctgtatcgatagatggcccgactaacttagcagtatcagacaatacaaaaaaaaggtttgagagttacggttggaattatttagatataaacggacatagcgaaaaacaaatttttagtgcattaaaaaaagctcaaaattctaaaaaacctattgctatatcttgcaaaactacgataggttttggctctcctaataaaggtggtaaagcggcttcccatggaagtcctttaggtcaagatgaaattgcgttagttagaaaaaaattaaattggaagtataagcctttcgaaattccagatagaatattaaatgcatggagagatattggcaataaagcgtctttagcagcagaaaaacttaattctaaaaacaacataaaaaaagggaacctaattccagtttctttaagtgaagaaattgaggaatttaagaaaagttatataaaaactttagatccgatggcgacaagaaaatcttcagaaaaatttcttgagattgcgtcaaagttaacaaatcttattgggggatctgccgacctagccggctcaaataacacaaaaactaaaaatcacaaaattattaaaccgggagaatttgatggtaattatattcattatggagttagagaacatgctatgtgtggaataatgaatggaatttccttacatagtaatttaataccttacggaggaacttttttaatat

SEQ ID NO: 231293 - DNA, 2074 bp, Unknown
  Bacterial polypeptide expressing nucleotide sequence isolated from the Sargasso Sea
gatgccgccgtgcccccgtttcctcgactcgttctccggactcgacatgacgacttcgtctcccgcctccaccaccctgatggccaacgcgatccgtgcgctcgcgatggacgccgtccagcaagcgaactccggccaccccggcatgccgatgggcatggccgaaatcggcgtcgcgctctggtcgcgccatctgaagcacaacccgacgaacccgcactgggcagaccgcgaccgcttcgtgctgtcgaacggccatggctcgatgctgctgtactcgctgctgcacctgaccggctacgacctgccgatcgaagagctgaagaacttccgccagctgcactcgaagacgccgggccacccggaatacggcatcacgccgggcgtcgagacgaccaccggcccgctcggccagggtctcgcgaacgcggtcggcatggcgctcggcgaagcgctgatggccgacgagttcaaccgtgacggcgcgaagatcgtcgatcaccacacgtacgtgttcctcggcgacggctgcctgatggaaggcatctcgcacgaagcctgctcgctcgccggcacgctgaagctgaacaagctgatcgcgctgtacgacgacaacggcatctcgatcgacggcgacgtcgtgaactggttccacgacgacacgccgaagcgcttcgaagcgtacggctggaacgtgatcccgaacgtgaacggccatgacgtcgacgcggtcgacgcagccatcgcgaaggcgaagctgtcggacaagccgacgctgatctgctgcaagacggtgatcggccagggcgcggcgaccaaggccggcggccacgacgtgcacggcgcggcgctcggcgcggaagaaatcgcgaagacgcgcgaagcgctcggctggacctgggcgccgttcgtgattccgcaggaagtctatgcggcatgggatgcgaaggaagccggcaagcgcgcggaaaccgaatggaatgcgacgttcgccgcgtatcgcgcgaagttcccggcagaagccgctgaattcgagcgccggatggccaaccagctgccggccgactgggccgaaaaggctgcggcgatcatcgccggcgcgaacgagcgcgccgagacggtcgcgacccgcaaggcgtcgcagcaggcgatcgaaggcctggctgccgcgctgcccgagctgctcggcggctcggccgacctgaccggctcgaacctgaccaactggaaggcatcgaaggccgtccgcgcgaatccggaaggcccgggcgtccagctgggcaaccacatcaactacggcgtgcgcgaattcggcatgagcgccgcgatcaacggcctcgcgctgcatggcggccacaagccgttcggcggcaccttcctgacgttctccgactacagccgcaacgcgctgcgcgtggccgcgctgatgaaggtgccgtcgatcttcgtgttcacgcacgactcgatcggcctcggcgaagacggcccgacgcaccagtcgatcgagcacgtgtcgagcctgcgcctgatcccgaaccacgacgtatggcgtccggccgacacggtcgagacggccgtggcctggacgcacgcggtcgccgccgaccgtccgtcgagcctgatcttcagccgccagaacctggcgttcaacccgcgtaccgatgcgcagatcgcgaacatcgagaagggcggttacgtgctgaaggactgggacgacgaaatcgtcgcgcgcaagatcatcctgatcgcgacgggctcggaagtcgaactcgcgatgaaggccgtcgagccgctcgcgcagcagggcatcgcggcacgcgtcgtgtcgatgccgtcgaccaacgtgttcgaccgccaggacgccgaataccgtgaacgcgtgctgccgcacggcgtgcgccgcgtcgcgatcgaagcgggcgtgacgtcgttctggcacaagtacgtcggcctcgaaggcggcgtcgtcgggatcgacacgttcggcgaatcggcgccggccggcgtgctgttcaagtacttcggcttcaccgtcgagcacgtcgtcgagaccgccaaggccgtgctggcctaa

SEQ ID NO: 231294 - DNA, 802 bp, Unknown
  Bacterial polypeptide expressing nucleotide sequence isolated from the Sargasso Sea
ttgagcaaacaacatagagaattagctaacagtataaggtttttatctattgatgctgtgcaaaaggcaagttctggtcacccaggtatgccaatgggaatggcagatgtggtaacagttttatacaaagattttttaagatttaatcctaaaaatccaaattggattaatagagatagatttgttttgtcagcaggacatggatctatgttactttattctctactctacttaactggttataaaagtatttctttagatgatattaaaaattttagacaattagattgtatttgtgctggacatcccgagtatcattcgagctcaggcatagaaactactacaggaccacttggccaaggtatagcaaatgcagttggttttgctttagcagaagaaatcttaaaaagtaaagctggaaaagaaataataaatcacaagacttatgtattggcgggtgatggatgtcttatggaaggaataagccacgaagcacttagcttagctggtcatttaaaattaaaaaatcttattttattattcgataataattccatatctatagatggaccaacaaatttagcagtttctgataatataaaaaaaagatttgaaagctatggttgggattatctagatataaatggtcatgatgaaaaacaaatttctaaagcacttagaaaagcacaaaaagcaaaaagaccttttgccatttcatgcaaaacaacaattggctatggttctcctaataaaggtggaaaaaaatcatctcacggaagtccccttggggaagaagaaatta

SEQ ID NO: 231295 - DNA, 644 bp, Unknown
  Bacterial polypeptide expressing nucleotide sequence isolated from the Sargasso Sea
gatgggtaatcaagcggtttctagacgagactgtgctaatgccataagagctttaaccatggatgctgtacaaaaagctaattccggtcatccgggagcaccgatgggtatggctgacatagctgaggttttgtggcgagattttatggtacataaccctgggaacccaaattggtggaatcgagatcgttttattctctctaatgggcatggatcgatgcttatctattctttgttgcacttgactggttacgatttatcaatagaggagataaaaaacttcagacaacttcattctaaaacgcctgggcatccagagtatagttacacacccggtgttgaaacaaccacgggacctttaggacagggtctagcaaacgccgtaggtatggcggtagcagaaaaaacccttgctgcgcagtttaatcgtgaaggacataatatcgtagatcatttcacgtatgtctttgcaggagatggatgcttgatggagggaatctctcatgaagtatgttcactagcggggacgctaggtctgggcaaattagttgtgatatacgacgataatggtatttcaattgatggtgaagtagagcaatggttctcagacaatacgaatacacggtttgagggtacggtggcag

SEQ ID NO: 231296 - DNA, 1429 bp, Unknown
  Bacterial polypeptide expressing nucleotide sequence isolated from the Sargasso Sea
atgctactttactctttattatacttaactggttacaaaagtatttccttaaaagatataaaaaactttagacaattaaattcaatttgtgcaggacatccggaatacattcctaattcaggaatagagaccactactggacctttggggcaaggaatagcaaactcagtgggaatggcaattgcagaagaaattttaaaagaaaaaattggtaaaaatattataaatcataaaacttatgtactagctggagatggctgtctaatggaaggtataagtcatgaagctttaagtctagctggtcatctaaaattaaaaaatttaatcatgttgtttgataataattctatatcaattgatgggcctacaagtcttgccgtatccgataattttaaaaaaagatttgaaagttatggttgggattatattctaattaatggtcataacgaaaaacaaatatcaaatgcacttaaaaaagtacaaaaagcaaaaaaacctactgtgatatcttgcaaaactattatcggttttggttcgcctaataaatcaggaaaagaaacctcccatggaagtcctcttggtgaagatgaaataaaattagtaagaaaaaaattaaaatggagtcatccccctttcgaggttccaaaaaaaatattagatgagtggagaaaaattggaagtagaggaattaaagaagcagaaaagtgggttaaaaaaaataaatataaaaaaattagctacacttcttttttaaaagattttctaaaagaaaaacaaaatgtaattaataaacctgaggctattgctactagaaaatcttccgaaaaaataatcagtttcttaacaaaaaaaaatcctactataataggaggttctgcagatctatcaggttcaaataataccaaaacaaaaaatcaccaaataattaagcctggaaattttaaaggaaactatattcattatggagttagagagcatgctatgtgtggaataatgaatggtttagcgttacatagtgaattaattccatatggtggaacttttttaatctttagtgattattgtaaaccatcgataagattggcttcaataatgaaacaaagagtaatttatgtaatgagtcatgactcaattggacttggagaagatggtccaactcatcaaccaatcgaacaattagctggactaagatctattccaaatttaaatgtttttagacctgcggatactgccgaaacttttgaatgttgggatcttgctgcaatatccggtaaagatcaacctagtataattgctgtgagcagacaaaaaattaatcaaattagaaaagaatttacgaacgaaaacaaatgttctgctggtgcctatgaagtatcaagaacaaaaagtgaaattaacttgactatactggctactggctctgaagttg

SEQ ID NO: 231297 - DNA, 1132 bp, Unknown
  Bacterial polypeptide expressing nucleotide sequence isolated from the Sargasso Sea
atgtgggacggctcaaaaaaaggtgaaaagctcgaaaaatcatggatagacttattcaataattattcaaagcagtaccctgatctcgcagaggaatttaaaagaagaataaacagaaatcttccagaaaattgggaagagatatcaaaaaatgcaattaatgaaatcaatcatcaagccatcgatttagcgacaagacaatcttctcatctgtctctcaacaagttgggagattttttaccagagatgataggtggctctgcagatcttaccggatcaaatcttactaagcatgatgcctcagtcgtaatagatgagactaactcggacggcaactacatatattatggtgttagagaatttggaatggcagcaattggtaacggaatgatattgcatggtggggtaattccttattcaggaacatttttaacattttcagattattcacgaaatgcccttagaatggcagcgcttatggaaatacaaaacatttttgtatttacacatgactctattggtttgggtgaagatggcccaacacatcaaccaatcgaacatgttagtagcttgagaattatacctaatatgaatgtttggaggccatgcgatgcagtcgaaactataacatcgtggtgtcatgccatagaaaatcaaagtggacccacaagcctgattctcacgcgtcaaaaactgcatcatcagctaagaactgaggaacaagttcagttaataaagaaaggcggatacattcttaaggaaagtaaaaatactccagagattattcttatagctactggttcggaagtatcagttgcaatggagtcagcaaaagtacttgactccgatggaattgatgtcagggttgtttcgatgccatgtaacaatatatttaatcagcagactgaaagttatagatcagcggtccttccagagtcagtaaaatctagattagcgatagaggcgggcattacaaatttttggtggcaatatgttgggtcagaaggagatgtaatcggaatagacgaatttgggttatcggctcctgcaagtgagttatttgaatattttgggttcacagtaaagaacattacagaaagagcgagattgctcattgaaaaaaacagttaat

SEQ ID NO: 231298 - DNA, 505 bp, Unknown
  Bacterial polypeptide expressing nucleotide sequence isolated from the Sargasso Sea
ttgtctaatgccataagatttttatctatagatgctgtagaaaaagcgaattctggtcatccaggtatgccaatgggaatggcagatgtagctactgttctttttaaaaattttttaaattttaatccaagaaatccagattggttaaatagagatagatttgtactttcagcgggacatgggtctatgttgctttattctcttttgtacttaactggttattcaagtattggtatcaaagatataaaaaattttaggcaattaaattctatttgtgctggtcatccagaatttcatccaggttctggaattgaaactactacgggacccttgggtcaaggggttgcgaatgcagttggtttcgcaattgctgaagaaatattaagagaaagatttggctcaaaaattttcaatcacaaaacttatgtattagcgggagatggatgcttaatggaaggaattagtcacgaagcactaagtcttgcgggtcatttatgtctaaaaa

SEQ ID NO: 231299 - DNA, 1234 bp, Unknown
  Bacterial polypeptide expressing nucleotide sequence isolated from the Sargasso Sea
tttgcagcatatagttcctactaacgcattaagatttttatctattgatgctgttcaaaaagctaattctggtcatcctggcatgcctatggggatggcagaaatagcaacttcgttatggggcaaacacttaaatcacaacccactaaatcctcattggtttgatagggatagatttgttctttctaatgggcatggatcgatgcttttgtatagcttacttcatctaactgggtacgatatatcaatagatgatcttaaagattttaggaagttacattctaaaactcctggacatcccgaatacgatatagacattggaattgaaacaaccacaggtccattaggccaaggtattgcaaatgctattggcatggcagtttcagaaaaaataatggcagccgaatttaatgaagatgatattaaaccaattaaccattatacatatgtttttttaggtgatggctgtcttatggaaggaatctcgcatgaggtatgttcatttgctggaactcataaactaggaaaactaatttgtttttacgaccaaaatggaatttcaattgatggagaaattgaaaattggtttacagatgactctataaaaagatttgatagttatggttggcaaactatatgtgtagatggccataatattgaagaaatcgataaagctatagtcgatgcaaaaaatgagacaaataaaccaacaatgattttttgtaagacaataattggttttggttctccaaataagtcaggaactgctgatgttcacggagcagctttgggagaggaagaagtaataaaaacccgaaaagctctaaattgggatcatgatgcatttaaagttcctcaagaggcatatgatttttgggattcaaccaaaaaaggctctgaattaaatttggattgggataatttgattaaaacctacgacgaaaaatatcctgataaatcagcagaacttaaaagaagaattaaaggcgacttacctgatgattttgagaatagttttaaaatcttcttgtcagaatgtgataaaaataatatgccaatggcaacaagaaagtgctcaaaagcatgccttgatttttttgtaaaagaattaccagaattaattggcggatcagctgatttaactccatcaaataatactttttcatcatcaagttctactttctcaaatgaaaacccttcaggtaatcatattaactatggagtaagagagttt

SEQ ID NO: 231300 - DNA, 1969 bp, Unknown
  Bacterial polypeptide expressing nucleotide sequence isolated from the Sargasso Sea
attgagcacactacataaagatttatctaatgcgatcaggttcctttctattgatgcagttgaaagagcaaattctggtcatccaggaatgccgatgggcatggctgatgttgtaactgttttgtttaaaaattttctcaaatttaatccaaaaaatcctaactggctgaatagagacaggtttgtcctttcagcaggacatggttctatgctactttactctttgctataccttactggatataaaagtatttcattagacaatataaaaaattttagacaacttaactccatatgtgcaggtcatccagaatatcacgcgggaacaggtatagaaactacaaccggacctttgggtcaaggaatagcaaatgcagttggatttgctttagcagaagaaatcttaaaagaaaaatttggtaaaaaaatttttgatcataaaacttatgttttagctggtgatggatgtttaatggagggaattagtcatgaagcattaagtattgctggtcacttaaatttaaaaaatttagttatgctttttgataataattcaatatctattgatggaccaacaaacttagcagtatctgataattataaaaaaagatttaattcttatggttgggattatataaaaatagatgggcataatgaaaggcaaatatataaagctttaaaaaaagtccaaaaagctaaaagacccactgtaatttcatgcgtaacaaaaataggatatggttctccaaacaaatcaggaagtgaaagcgctcatggtagcccactagggaaagatgaaattaaattagttagaaaaaaattaaaatggaattatgaacctttcgaaattccaaaaaaaattttaaatatttggagagaaacgggaacaaaaggagaaaaaatagaagaaaaatggaaaaaaatttacaataaaaaaaaagaagaaatagataaagttttttctgtaaattttgcaaacacttttaaaaatgaaaaagaaaaaactattaaaaatttagaagctttagctactagaaaatcatcagaaaaaattctaactgctctatatgagaaaaaaaatattttaataggtggatctgctgatttggcaggttcaaacaatactaagactaaatatcataaagctgttaaaaaaaataatttcaaaggtaattatattcactatggcgttagagagcatgcaatgtgtggaataatgaatggtctggctttacacagcaagattattccatacggaggaacttttttaatttttagtgactattgtaaaccttcaattcgtctttcagcattaatgaaattaaaagttatatacgttatgacacatgactctatcggattaggagaagatggccccactcatcaaccaattgaacaattaaccggtcttagatctataccaaacttaaatgtttttagacctgcagatacaacagaaacaatagaatgttgggaaatagctttaaaaaatttaaatacacctagtgtcttggctcttacacgacaaaaacttaaccctgtaagaaaaaaatttgataaagaaaataaatgttccttaggtgcatacgaagttttaagaactaatgaaaatgtagagttaacaatatttgccagtggttcagaagtaaatctagcaatagaagtcagtcataaattggccacagaaaacacttattcaaaagttatctcagtgccatgtcaagaaattttcgataaacaaaaagaaaattataaaagtaaaatattagatgaaggtgagcacaaaatatctatcgaagctggtacaacagatatttggaaaaaatatgttggaaaaaaaggtatatcatttggtttaaatgattttggaaaaagtgctccttataaagatatttataaaaactttaaattaacaacagatgacattgttaaattaactagagaaatgataacaaataataaaaattaa

SEQ ID NO: 231301 - DNA, 1433 bp, Unknown
  Bacterial polypeptide expressing nucleotide sequence isolated from the Sargasso Sea
aatgttcgacaaggtagctaaatcagtaagagttttatcagcagcagctgtggaaaaagctaattctgggcatccaggcatgccccttggaatggcagatgttggtgttgctttgtataaaaattttttaaaagtttcaaatgaaaaacctgattggattaatagagataggtttgttttaagcgcaggtcatggctctatgcttttgtatagccttcttcacctaaatgggtttcctttgagtatggatgaaattaaaaattttagacaacttaactcaaaaactgctggacatcctgaagttgatacttctataggcattgatacaacaactggtccactaggtcagggttttgctaatggtgtagggtttgcagttgcagaaagatatttgggatctttattaggagaagatgttattaaccactttacatatggaattgtatcagatggagacttgatggaaggaatctcatttgaagctgcagaacttgcagcagtctggaagttaggaaaaataatttacttttttgatgataataatatctcaatagacggttctgttgacaaagtttctatcacaaatcaaaaagagaagtttgaatcaataggttggcatgttttagaaattgatggccacaatgagaaagaaataattaaatcagttgaaaagggtagaaaagaagaagataagccaactttaattattgcaaaatctacaattggtaaatttgcccctaataaagaaaacacgagtggagtccatggctcacccttagggagtgatgagatgaataaatttcttatgaatttagattggagcggagatccatttctacatagtgatgatatttatgattactttaaagaaaagagagagaaagataatgaagaacttaggaaatgggaagaaaattttaaaaacaaatatcaagaagattcatcatttaaagataattgggatttattaacttctgaagactttcctagttttgatggagtcagtggggaaaagtatgcatcaagaattttaggttcaaaaatactagaaaatttatcagagtctactaattcgataattggaggttcagcagatttagctgcttctacgaagcaaataattgatgaaagctacttttcatctactaattacaaaggcaggagcctggagtttggaattagagaacatgcaatgggagcaattacaaatggtataactttacatagtaatttgataggttatgcttcaacttttttggttttctcagactatatgaggccaagtattcgtttagcatctttaatggatattaattctgtatttatttttacacatgattcaatatatcttggtgaagacggaccgactcatcaacctgtagaacatttaatgtctctaaggcttattccaaatgtagatgtcataaggcctt

SEQ ID NO: 231302 - DNA, 1327 bp, Unknown
  Bacterial polypeptide expressing nucleotide sequence isolated from the Sargasso Sea
aatgcttgattccgaattacgaaaaagctgtgtcaatatcatccgttttctggcggcggatgcagtagaaaaagcgaaatctggtcaccccggtgctccgatgggaatggctgatatggcctttgtgttgtggaatcaattccttcgctatgatcccgatgatcccgactggaaaaatcgtgatcgtttcgtcctctcggcaggtcatgcttcgatgctgctttattccctgcttcacctggcaggttacaagctgagcatggatgaactgaaaaacttcaggcaatggaacagcctcactccaggacatcccgaatatggtttaacccctggagtggaatgtactaccggtccgctaggctccgggttcagcaatgctgcaggcatggcgctcggagcaaaaatgatgggctcacgattcaacagcagcgatataagcctaatcgattccaggatttttgtcctttgcagtgatggagatatgcaggaggggattgcttccgaaacggcttcatgggcagggcatcttggactcggaaatctgattgctctttacgacagtaacgatatcaccattgctggagatgcatgtttggcgatgagcgaggatgttggtaaacgatttgaggcttatgggtggcatgttcagcattgtgatgggcacaatcacgatgaaattgcagcttgtcttgatgaatccctgtcggtagtgaaaaagcccagtttgattgttgcaaaaaccgttatcggaaaaggagcacccaccaaagaaggtactgccggatctcacggagccccactaggtcaagaggaaatcgaggcggccaaattggcttcgggatggaatgataagccaaattttcatgtgcctgatgaagtaagagaagtttttgcagaaagaaaaaaagaactgaaacttcaacatcagcaatgggaagaaaaacttgctggttggaaacagtctgatccagaacaggcaaaattatgggatagtcactgggaaaaaaagcttcctgatgacttgctcaatcagttgattgattcgatttccggagaggaagatgcaacccgaaatctttccggaaaggtcattcagaaaatggcagacctgattccttctcttgtaggaggttccgcagatcttgagccaagcaacaagaccctgatcaaaaatgctgaaagcattcgggcttcttctatgggttcggactctgctccagatccatcctttaacgggaggaacattcatttcggtatcagggagcatgccatgggaggaatcaccaatggcctggccctttttggctcatggcgtcccttttgcgga

SEQ ID NO: 231303 - DNA, 1765 bp, Unknown
  Bacterial polypeptide expressing nucleotide sequence isolated from the Sargasso Sea
atgccatctcgtaaacaactcgctaatgccattcgtgcattgagtatggatgcagtgcaaaaagcgaaatcaggtcacccgggcgcccctatgggcatggcagacattgctgaagtattgtggcgcgattatctgattcacaatccacaagacccaagctgggccaatcgtgaccgctttgtgttgtctaatggccatggttctatgctgttgtattctctgttgcatctctctggctatgatttaggcattgaagatttaaagcaattccgtcaattacactcccgtactcctggtcaccctgaatatggttacgcacctggtgtggaaaccacaaccggacctttagggcagggcattaccaatgctgtaggcatggcgattgctgagaaagccttagcggctcagtttaataagcctggccacgatgtggttgatcactacacctacgcctttttaggtgacggctgcttgatggagggggtatcgcacgaagcctgttcattggccggtactttaggtttaggtaaactgattgcgttttgggatgacaacggtatttctatagatggtcatgttgaaggctggttcactgacaatacacctgcgcgctttgaagcttacggctggcatgtgattgcaggtgtcgatggtcacgactcttctgctattgctgctgccattgaacagggcaagtctgttacagacaaacctactttaatttgctgcaaaaccattatcggttatggttcaccgaataaatcgggttcacacgactgccacggcgcgcctttaggtgatgctgaaattgcggctgcgcgtgaatatttaggctgggagcatgctccttttgtcattccacaagatatctatcaagagtgggatggcaaaaccaaaggtgcatcggctcagcaaagctggaatgaaaaatttgcggcttatgccaaagcttaccctgaactggcggctgaatttaaacgccgtatggccggtgatttacccgcagactgggcagaaaaatcagcagcttacattcagcatttgcaggataaccctcaatctatcgccacccgtaaagcgtctcagaacagcttaaatgcttttggtcctttgttgcctgagttattaggtggttcagctgacttggcaggctcgaacctgacgatttggtctggttctaaaggcgtgactgcagaagatgccagcggtaactacctgtattacggtgtgcgcgagtttggtatgtctgcgatgatgaacggtatagccctacacggtggttttatcccgtacggcgcgactttcctgatgtttatggaatacgcccgcaacgcagtgcgtatggccgctctgatgaaacaacgggttattttcgtttacacccacgattctattggtttgggtgaagatggcccaacgcatcaacctgttgagcaactcgcttcgctgcgtgtgaccccaaatctgatgaactggcgtccttgtgatgcagttgaatcggctgtggcatggcaggccgctattgaacggactgaaggtccaagtaccttaattttcacccgtcagaatttggtgcaacagcctcgtacagcgcagcaactggctgatgtgcgtaaaggcggttatgtattgttagattctgctggcacgccagaacttattctgatcgctacgggttctgaagtagagctggccgtgcaggcttatcatcagttaactgctgcagggcgtaaagttagggttgtgtctgtgccttcccactgat

SEQ ID NO: 231304 - DNA, 1960 bp, Unknown
  Bacterial polypeptide expressing nucleotide sequence isolated from the Sargasso Sea
tttgagcaaactacacaatgatttagctaattgcatcagatttttatcaattgatgctgttcaaaaagcaaattcaggtcacccaggaatgccaatgggtatggcagatgttgcaacagtactatttaaaaattttttgagatttaatccaaagaatccagattggttaaatagagatagatttgttttatctgctggtcatggttctatgcttttatattctttgctttacctaactggatataaaagcatatcgataaataatattaaaaaatttaggcagctaaattctatttgtgctggacatcctgaatatcatccgaaaacaggtattgaaaccacaacaggtcctctaggacagggtatatctaatgccgttggttttgcaatcgctgaggaaattttaaaaaataaattaggtaaagatttaattaatcacaaaacttatgttttaactggagatgggtgcttaatggaaggaataagtcatgaagcgatgagtctagcgggacatttaaaacttaaaaatttagttatgctatttgataacaattcaatttcaattgatggtccgacaaatctcgcggtttcagataattttaaaaaaagatttgaaggatatggttgggattatatttctatcaacggtcataatgaaaaagaaatttttaaagcaataaaaaaagttcaaaaagctaaaaaacctactgtgatttcttgtaaaacaaaaattggatatggttcaccgaataaatcaggaaaagcatcgtcccatggaagtccattgggagtagatgaaatcaagcttgtaagaaaagccttaaattggaaaacgaagccttttgatatcccaaataaaattttaaatgaatggagaaaaataggccaaagaggtgaaattttgcaaaaaaaatggaacaaggcattaaaaagaaaaaaaataaaatttaatcaaactttaaaaaataactttactacggtgcttaagaaagaaaaagagaatgcaataaaggagccaaaaagtttagctactagaaaatgttcagaaatgacattgaatgcattaacaaaacaaaaacataatttaattggtggttctgctgatttagcgggatcaaataatacaaaaactaaaaaccataaaataattaaacctggagattttagtggtgactatattcactacggagtgagagaacacgcaatgagtggtgttatgaatggtatcgcgcttcacagtaatctaattccttatggaggtacttttttaatattttctgattattgcaaaccttcgatcagattgtctgccttaatgaaaaaaagagtcatttatgtaatgactcatgactctgtcgggctcggagaagatggccctacccatcaacctatagaacagctttcgagcttacgtgctatacctaacctaaatgtattaagacctgcagacagaattgaaactatcgagtgttgggaacatgcattaaaaagctcaaaaacacctagcgtgctatgtttaaccagacaaaatttaaatccagtaagaaaaatatactcaaataaaaacttatgctcattaggtgcttatgaggttttaagaacaaataaaaaaattaatcttacaatattagcgagtggatctgaagttaatctagctttagaggttagccataaattagccaaagataaaatatactccaaagtgatatcaatgccttgtatggaactttttgaattacaatcaaaatcttataaaaataaaattttagaagaaacaaaatttaaaatatctattgaagctggatcaagcgattgttggaaaaaatatgtaggtggtaacggtattgcttttggaattgatgaattcggaaaaagtgcaccctataaagatatttataaatattttggactagagagtacaaacattaaaaatatcactaaaaaattactaaataaataa

SEQ ID NO: 231305 - DNA, 979 bp, Unknown
  Bacterial polypeptide expressing nucleotide sequence isolated from the Sargasso Sea
ttgaataatttaaataatatcaacaatctaagacaattatcaaattgtattagatttttatcaatggatgcagtggaaaaagcaaaatctggtcatcctggtatgcctatgggtatggcagacatcgcaacaattctttataaaaatcatttaaagtttaatccgaatgatccggagtggattgatagagatagattaattatttcaaatgggcatggctcaatgctattatattcttgtttgtatctaacaggatataaagacattgacataaatcaaattaaaaattttagacaattacataataaaactgcaggtcacccagaatacggaagtgcagaaggtatagaaacaactactgggcctttgtctcaaggtttagcaaatgcagttggaatggcactagcggaaaaaaaattatcaaataattatggaaaagaattattcgatcattacacttatgtttttgctggagatggatgcttaatggaaggtttaagtcatgaggcgtgtagtctcgcaggacatttgaaattaaataagcttattatgtttttcgataataattctatttccatagatggatcaacagatctttcagtttcagacaatgtgaaaaaaagatttgaagcttataattggaatataattgaaatagatggtcataaatataaggaaattgatcaagctataattcaagcaaaaaaaaatgatgctccaacaattatatcttgtaaaactaaaattggttttggctctccaaacaaagagggttcagcttcatcacatggttcacctcttggtgaagatgaaattagtttaacaagaaaaaaattagaatggaattattcgccgtttgaaattccagatgatttattacgtgagtggagaagtttctataaaagaaatgaagaatcaagaaattcatggctatcaaaaaataaagaattaattgaaagtaaaaattttaaaagatagt

SEQ ID NO: 231306 - DNA, 1993 bp, Unknown
  Bacterial polypeptide expressing nucleotide sequence isolated from the Sargasso Sea
atgccctctcgtcgtgaactcgccaatgcaatccgtgcattaagcatggatgccgttcaacaagctaaatctggtcacccaggtgccccaatggggatggctgatatcgcacaggtactatggggtgatttcttatcacacaaccctgcaaacccatcttgggctaaccgcgatcgctttgtgctttcaaatggtcacggctcgatgctgttgtactctcttcttcacctatcaggctacgaactgccaattgaagagttaaagaacttccgccaattgcattcaaaaacgccaggtcacccagagtacggttatgcgccaggtgttgaaacgaccactggcccactaggccaaggtatcagtaatgctgtgggtatggcgcttgccgagaaagtgctagcggcacaattcaacaaagatggtcacactattgttgaccaccacacctacgcattcctaggcgacggctgcttaatggaaggtatctcacacgagacatgttcattagccggtacactaggccttggtaagcttatcgcgttttgggatgacaacggcatttcaattgatggtgaagtggaaggttggttcaccgacgatacacctgcacgctttaagagctacggttgggaagtgatcgatggcgttgacggtcacgatgcagagcaagtgaaagccgccattgaaaaggcacaggcgaatactgcgcagcctacgcttatttgttgtaaaaccaccattggtttcggttcgcctaataaagaaggtaccgagtcttgtcacggtgcaccactaggtgaagatgaaattgtcgctactcgcgagaagcttggctggagccatggcgcgttcgaaattcctgacgatatttacgcgggttgggatggaaaagagaaaggctcaaaagcggaaagcgcgtggaatgacgctttcgcagcatacgaagccgcctacccagagcttgcagcagaattcaaacgccgtgtaaatggcgaactgccagcagatttcagcgacaaagcagacgctatcattgctgaacttcaagctaacccacaaaatatcgcgtcacgtaaagcgtcacaaaatgcactgaatgcgtttggtccgctacttcctgaactattaggcggctctgctgaccttgcaggttctaaccttactatttgggaaggcagcaaaggcgttgaagcgaacgatgcgtcaggtaactacatttattacggtgtacgtgaatttggtatgtctgccatgatgaatggtattgcccttcacggtggctttaaggcatacggtgcaaccttcctaatgtttatggaatatgcacgcaacgcggtacgtatggcagcgctaatgaagcagcctgcaattttcgtttacacccacgattcaattggtctaggtgaagacggcccaactcaccagccagtagagcaggtggtagcgctacgagcaacgcctaaccttgataactggcgtccttgtgatcaggttgagtctgctgtgtcgtggaagtctgctattgagcgcactgacggcccaacaacgctgatcttcacacgtcaaggcttagcgcagcaagagcgaacggctgaccaagtggctaacattgccaaaggcggttacgtacttaaagactgtgaaggtacgccagagcttattcttatcggtaccggttctgaggttcagctagccgttgaagccgcagcgaaactaaccgagcaaggcaaagccgttcgcgtagtgtctatgccatcaactgacgtattcgaccgtcagtctgctgattaccgtgaaagcgtactgccttctagcgtagttaaacgcgtagcggttgaagccttgtctaaagacagctggtacaagtacgttggctttaatggcgctatcgtaggcatggacacctttggtgaatctgcacctgctggcgacctgtttaatcacttcaacattaccactgacgctgtagtagaggctgcactgtctctgtaag

SEQ ID NO: 231307 - DNA, 1345 bp, Unknown
  Bacterial polypeptide expressing nucleotide sequence isolated from the Sargasso Sea
aatggtcgctgcatctgtttcattagaatcactttgtgtaaatagtataagaatgcttgctgtagatgcagtaaataaatctaatagtggacatcctggactaccaatgggatgtgctcctatgggttatgcattatggcaaaacattcttaatcacaaccccaataacccaaaatggttcaatagagaccgttttgtattatcggctggtcatggctgtatgcttttatattctttgcttcatttgacaggatataaatcagtttctatagaagatattaaagaatttagacaatggggatcaaaaactcctggacatccagaaacattcgaaactgaaggtgttgaggttacagctggtcctcttggagctgggatttcaaatgcagttggtttagcaatagctgaaactcacttagcagctaaatttaataagcctgattgcaatatagttgatcactatacatacgtaataatgggtgatggctgtaatcaggaaggtatcgcatcagaggcctgctcattagctggtcatcttaagcttggaaaattaattgctctctatgacgataatcaaattacaattgatggacgaaccgacgtttcttttacagaagatgtcttaaaaagatatgaagcttatggatggcatgtacaacatgttgaagatgggaatcatgatgttaaaggaatcactgaagctatcgaaaaagcaaaattaattacagacaagccttcaattattaaaatttctacaaccataggttatggttctcccaataaatcagatactgctggaattcatggagcagctgtcggagaagaagaagctacattaactagagagtttctaaattgggaatatcctccatttgaaatacccgatgaagtttatacacattttagaaaatcaataaacaaaggtgaaaatttagagaaagaatgggattctaaatttgaagaatatcaaaaaaaatatccctctgaaggaaccgagtttaaaagaatgttagagggtcaattacctgagaattgggactcagatctaccctcttattcacctaatgataaaggtttagcaacaagaaagcattcacaaatatgtttgggtgctctaggtcctaacctgcctgaattaattggcggatcagcagatttaactcactctaattacacagatataaaaggagaaactggatcattccagccacatagccctgaaaaaagatatttacattttggtgtacgagagcatgcaatggcagctgtacttaatggtattgcctatcacaatagtggtcttatcccttatggtggaaccttccttgttttcgccgattatatg

SEQ ID NO: 231308 - DNA, 1252 bp, Unknown
  Bacterial polypeptide expressing nucleotide sequence isolated from the Sargasso Sea
tatgctctcagatatagagtgtttcggccaattgggctcaaaaaccgccggacacccagagtacggtcatatagagggaatagaaacgaccactggcccacttggacaaggcctatccaatgcggttggatttgcgttggctgaagaatctgtaagagcaaggtggggaagtgaaatttgttgccataaaacttatgtaattgtgggagacggttgcctgatggaaggcatcagtcaggagtcaatatcatttgcgggcaaacagaaattaaagaacttaattgttctttgggatgacaacggcataactatagatggagaagtatcaaaatcttgcataactgatcaaatagcacgattcacggcatcaggatggtccgtattcgagtgtgatgggcataaccctaagtctatcgatgaagtgcttaatctagccaaagctagcgatttaccagcctttattaaatgtaaaacaaatatagggtttggctcaccaaacaaagaaggtaaagcatcgtctcacggtgcaccactcggagaagatgaaatcgtaaaagtgcgtgaggcttacaattggcattatccagcctttgtaattccagatcagataagcagtgtatggaaaaaaattggaacccaatcaaaagaaatttttgacaaatgggaatatagattcgaaaatctatcaaaaacaaaacgtcataggttttcaacagaattgaaaggcgaccctcccaaaaaactggttcgagagataagagcgctcaagaaaatgatctctgctgagagaccaaacatcgctacacgaaagtcaagcgagcacgcgctgacgttaataaacaaagtaatgcgaaatactataggagggtctgctgatttaactgggtctaataatactttaaccactgatttaggtgtattcgaacctaaaaatagattgggacggtatatctattatggtataagagaacacgcgatgtcagcaattatgaatggtatggcgttgcatggaggaatggtcccatacggcggtacgtttatggcttttgctgactatgcccgcggaggaatgcgattatcctctctgatgggcctcggtgtaatatatgttatgacacatgactccattggattgggagaggatgggccaacgcaccagcccgttgaacatctttcaatgcttagggcaacgcccaacatgctcgttttcaggcctgccgataccgtggaaaccattgaagcgtgggagata

SEQ ID NO: 231309 - DNA, 1654 bp, Unknown
  Bacterial polypeptide expressing nucleotide sequence isolated from the Sargasso Sea
tttgagaatacaaaataaagatttatcaaacgcgattcgtgttctttcaatggatgctgttgaaaaagctaattcaggccaccctgggatgcctatgggaatggcagatgttgcaactgtcctatttaaaaactttctaaaatttaatccatccaatccaagttggatcaatagagacaggtttgttttatctgctggtcatggatcgatgttattatattctttgttgtatttaactggatataaaagcatcagcatttctgatattaaaaactttagacaactgaattctatttgtgctggacatcctgagtatgaaaaaaactctggaatagagacaacaacaggaccactagggcaagggattgcaaatgcagttggttttgcaattgctgaagaagttttaaaaaagaaatttggaagtaaaataattaatcataaaacttatgttctcgcaggtgatggatgtttaatggagggcataagtcacgaggcaatgagtttagcgggccatctaaaacttaaaaatttaattatgttatttgataacaactctatttcaattgatggaccaactactcttgccgtatcagataactataaaaaaaggtttgaaagctatggctggaattatattgatattgacggtcacaatgaaagacaaatattaagagcgattaataaggcacaaaaagcgattaagccaacggttatttcttgtagaacaaaaattggatttggttcgcccaataaaagtggcaaagcatcttctcatgggagtcctcttggacctaaagagatagagttagtaagagaaaaattaaattggccttttaaaccgtttgaaataccaaaaaatattttaaaagaatggagaaaaataggagttaaaggttctaagacagaagcaaaatggaataaagatttttcaagaaccaaaaatagtttaaaagaattgtttaataaaaatttttctaattcaattataaaacaaaagaaagaggtcattgcaaatttaaaaccattagcaacaagaaagtcttctgaggctgttttaaactcattatttaaattaaaaaataatttaataggagggtctgcggatctagcaggttcgaataatacaaaatctaaatttaataaagttataaatgctaaaaattttgatggtgactatattcattatggggtaagagaacatgcaatgtgcggtattatgaatggtttagcgttgcacagcaatttaattccatatggaggaacttttttaatattttcagattattgtaaaccttcaattagactttctgcattaatgaagcaaagagtaatatacgtaatgacacatgactctattggattgggggaagatggtccaactcatcaacctattgaacaattatcaggcctaagatctataccaaatttaaatatatttagacctgctgatcagacagaaaccattgaatgctgggatatggctctaaaaaactcaaaaactccaagtgttctttcattaactaggcaaaacttagatccaataagaaaacgtttcacatctacgaataaatcctcttttggcgcttatgaggtaatgagaacaaataaaaaaataaagataactatactagctactggctctgaggtaatctag

SEQ ID NO: 231310 - DNA, 1987 bp, Unknown
  Bacterial polypeptide expressing nucleotide sequence isolated from the Sargasso Sea
attggaaaatcataagctagcaaatgcaattcgctttctctctatcgatgctgtccaagcagcaaaatctggacatcctggcatgccaatgggcatggctgatatagctgtatctctctggaaaaataacttaaagcataatccctctaatcctaaatggattaatagagacaggtttgttctttcaaatggccatggctcgatgttgctttatagtcttttacacttaacaggatatgaccttaacatcaatgatttaaaagacttcagaaaacttaaatcaaaaacacctgggcaccccgagtatgatatcgatattggagttgaaacaaccactggtccacttggacaaggaattgggaatgctgttggaatggctctagccgaaaagaatcttgctgcaacatttaataaagaagatataaaattaatagatcactatacctatgcttttcttggggatggttgcttaatggaaggtatctctcatgaagtttgttcattcgcaggtactcacaaacttggaaaacttatatgtttttatgatcaaaatggaatatctatagatggagaaattgatctatggttcaccgataacacaaaacaaagatttgaaagctatggatggcaggtaattgagattgatggccacaacatagacgaagttaataaagctactgaaaaggctcagcaggaaactgaaaaaccatcaatgatttgctgcaagacaactattggatttggctcgccaaataaatcaggaactgctggagttcatggaagtccattaggtgacgatgaaattggaataacaaggaaagagcttaactgggagcatggcccttttgaaatacccgaagatatttatgatgcctggaatgcaaaagatgagggtgccaaaaaagaaaaagcctgggaagatcttctgaaaacttatagacaaaaatatccagaggaatccaatgaactggagagaagatttaattcagagacacctcatgaatttaatgaaagattcgatggctttttaagagattgtttgttacaagaagatccagtcgcaaccagaaaagcatctcaaatttgtcttgatcatttttgtgctgacttgccagagctaattggtggttctgccgatttaacaggatctaataatactttttctaaacataacactgaacttactcctgataatcctgatggatcacatatttactatggggtaagagagtttggcatggttactattatgaacggaatgagtcttcatggcggtattaggccatatggaggaaccttcctagttttcatggattatgctagaaatgcagtgcgcttatctgcaatgatgagtctcccaaatatatatgtctttacacatgactcaatcggcttaggtgaggatggcccaacacatcaacctatcgaacatttggttactctaagagcaacgccaaatttatataattggagaccagctgatcttaaagaaacagcagtggcatggaaagagtcaattttatcaaaatcaccaagttgccttattctcagcagacaaggtcttccgcagatcaaaataagtgaggacaagattagtaatatctctaagggaggatatttagttcaaaaggatgaagatgcagagctaaacattatatcctctggaagcgaactgcaattagctattcaagcagctaaagatcttgatcaggcaggcataaaaacaaatgtggtttcgatgccatgtttagataggtttcttgaggcggatttagaatatcaaaataaagtgatccaaaaagatttgccttcaattgttgttgaggctgcccacccaaactcatggtataaaattttaggaagagatgaccttgtaattggtatgacaacatttggtgagtctgcacctgcaaaaatgctctttgaggagttcggatttacagcagggaatattgtttcaaaggcaaaaaaacttttaaataaatga

SEQ ID NO: 231311 - DNA, 1367 bp, Unknown
  Bacterial polypeptide expressing nucleotide sequence isolated from the Sargasso Sea
acgacaggcccacttggtcaaggctttgcaaatggtgttggcttagcggtagctgaaagatatctttctagtgttcttggagaagatattatcgatcattatatttatggaattatctccgatggtgatttgatggagggaatatctacagaagctgcagagcttgcaggcctatggaaacttggaaaaataatttatttttttgatgataacaatatttccatagatggaaacgtaacgaaagtttcaattacaaatcaaaaaaacaagtttttgtccatgggttgggatgttctcgaaatagatggacatcaagaatcagaaataattgatgcaattaaacatgcacaaaagatcactgacaagccatcattaattattgcaaaatcaacgattggaaaatactcacccaataaagcaaattctagtggtgttcatggttctcctttaggggaggaggaatttgaactatttttagaaaatattggtcattctggtgacccatttactcatagctcagatatatacgattactttaacaatgaaagagaaagagataataagacatttcaggaatggaaatcaaatttagacaaaaaaataagcgatgatgaaaattttaaaattctgtgggaggagtttaataatattgattttcaatctatatcacttgaatggtctgacgaccaagcttcacgagtggttggcggaaaaattttaaatgaaataggaaaatcgaataaatttatcactggtgggtcagctgatctcgcagcttcaacaaagcaaattgtgagtgatgaagtttttggatctcaaaattatagtggaaaaactcttgagtttggtattagagaacatgccatgggtggaatcgttaatggtattgctctacatagtaacttgatgccctatggatctacatttttagtattttcagattacatgagaccgagcataagacttgcttcattgatgaagataaattccgtatttatatttacacacgattcaatctttttaggtgaagatggcccaacacaccagccaatagaacatcttatgtccttaaggctcataccaggcctcgaggtgattagacctgcaaataataatgagatactttatgcgtataggtatgcttttcaaaataaaaataatcccacagcaattgttctttcacgacaagatatgcaatatttagaaaacaacttacaatacgaagagtttattaagggagcatatgagttttctccagggaaagatataactatatttgcaacaggatctgaattagaaattgctaaagaagtcagtaatctcctagatgatctatcaattcagattatcagtgtgccgatactcga

SEQ ID NO: 231312 - DNA, 802 bp, Unknown
  Bacterial polypeptide expressing nucleotide sequence isolated from the Sargasso Sea
ttgtctaatgcgattaggttcctttctattgatgcagttgaaagagcaaactctggtcatccaggaatgccgatgggtatggctgatgttgttactgttctgtttaaaaattttcttaaatttaatccaaaaaaccctaactggttaaatagagataggtttgtgctttcagcaggacatggttctatgctactttattctttgctataccttactggatataaaagtatttctttaaacgatataaaaaattttagacaactaaactccatatgtgcaggtcatccggaatatcatgcgggaacaggtatagaaactacaactggacctttgggtcaaggaatagcaaatgcagttggatttgctttagcagaagaaatattaaaagaaaaatttggtaaaaaaatttttgatcataaaacttatgttttagctggtgatggatgtttaatggaaggaattagtcatgaagcattaagtattgctggtcacttaaatttaaaaaatttagttatgctttttgataacaattcaatatctattgatggaccaacaaacttagctgtatctgataattataaaaaaagacttaattcttatggatgggattatataaaaatagatggacataatgaaagacaaatatataaagctttaaaaaaagtccaaaaagctaaaagacccactgtcatttcatgcataacaaaaatagggtatggttctccaaacaaatctggaagtgaaagcgcccatggtagcccgctaggcaaaaatgaaattaaattagttagaaaaaaattaa

SEQ ID NO: 231313 - DNA, 2002 bp, Unknown
  Bacterial polypeptide expressing nucleotide sequence isolated from the Sargasso Sea
ttgaacaaaaaagataaaaaaaatcctaacaatgaagtcagtctaaatgacatggctaatgctataagatttcttgctgctgacgcagtagaaaaagctaattgtggtcatccaggaatgcctatgggcgctgctgattttacaactgttttatattctaaatttttgaaaattgatcctcaaaaacctgattggcctgatagagacagagtaatattatcagctgggcatggttcaatgctcttatacgctgttaatcatttagtcggtttttcagatatgaccatagaagaaatcaaaaattttagacaacttggttcaaaaacacctggtcatcctgaatatggtcatacacttggagttgaaactactactggtccacttggtcaaggaatatcaactgctgttggcatggctattgctgaaaaaatacaaaatgcgaaatatggtgatgcaatagtcgatcacaaaacttatgtaatagcatcagatggtgatttaatggaaggaattagccaggaagcaatcagtcttgctggtcatctaaagctttcaaaattaattgtattattcgatgataataatatttcaattgatggggctatagatctatcagattcaactgatcaacttatgcgttttgaagcctcaggatggaatgttaacagagttgatgggcataatcatgatgacattgaaaaagcaatccaagaagctattgaatcaaataaaccatcattaattgcctgtaaaacaaaaatagggtttggttcaccttccaaagaaggaaaatcatcatcacatggcgctccattaggcgcagaagatatcgcacaaatgaaaaaaaaccttaattgggattatgaagaatttgaaattccatctgatattaaggatgcttggagacttgttggtttaaaaaattcttctaaaagacaagagtgggaagaaagattattagataataaagataaggaaatagagttcttaaaggatattgatggtcaaatttctgaagaacttgacaaagaaataaatgagatcaaaaaagttttctctgaggaaaaacctggctgggcgacaagaaaatcttctcaggaagttttagaaacaattaataaagttataccaaatacaattggcggttcagcagaccttacgggatcaaacaataccaaaacaaaaaatattaacattattgatagcaataattttgcaggaagatttattcattatggaattagagagcatggtatggcagcagcaatgaatggaattgctcttcataaaggtttaataccttattcaggaacctttttggtattttctgattattgtcgtccctctattagattagcggccttaatggatattaaggttatacatgtcatgacgcatgactcaattggtcttggagaagacggcccaacacatcaacctgttgagcatttgcctagcctaagagctataccaaatctaaatgtatttcgaccagcagatactactgaaactgcggagtgttggtctttagcaatcaaaagtaaaggtccaagtattattgcacttagtagacagggatgccctcatttaagaaatacattcgaagaaaagaataaatcttcacttggtgcttatgaaataaaaagttcagatggagaagcccaggttaacttaattgcaactggttcagaagtttctttagctgtcgaagtacatgaagaattaaaaaatgatggaattaattctcgagtggtttcagcaccttcttttgaactgcttaacaaacaggacaatgactatatcgacaaaactcttggacaaagcggtttaagagtaggtattgaggcttctactgggcttggttggtgtaattatcttggtgatcaaggtttatttattggaatgaatagctttggagcaagcgcaccggcagaccaattatataaaaactttggtattgataaagaaaatataattaataagattaaagagaaattataaa

SEQ ID NO: 231314 - DNA, 2080 bp, Unknown
  Bacterial polypeptide expressing nucleotide sequence isolated from the Sargasso Sea
atggacaataatacttgtttcggtaaacaagaaaatcaacaacaaattagagaatattttcaaagcaatcccactatcactatcgagaagaaaaaattagcagattgcataagagttttgtcggcagatgctgttcaagctgcaaattctggacatccaggcatgccaatggggatggcagacattgctgaagtgctttggaatgatcacttaaaacataatccttcaaatccaaaatgggcagatcgcgatcgatttgtactttcaaatggtcacggttcaatgttgctttattcgcttttgcacctgaccggttatccattgagcattgaggatataaaaaagtttagacaatttggatcacacactgctggccatccagaacttgatccagatcttgggattgaaaccacaacagggcctcttgggcaagggataacaaatgcggttggcatggctctggctgagagcattttggcatcaagatttaatagagacggccattccattgttgatcattatacttatgtctttctcggtgacggatgtttaatggagggcatttctcacgaagcttgctcactcgctggaacactcaatttaagcaaattaatttgcgtttatgatgacaacggtatttcaattgatggagaggtagacggttggtttgacgaggatgtgtgtgctcgattcaagtcatacggttggcatgtcattgagaatgttgatggccacgatgccgaagccatctcaaaagcaatttctgaagccaaagcgtccaatcaaccttcactgattgattgcaagacagtcattggttatgggtctccgaacaaagcaggaactgccgatacacacggagctccccttggggatgatgaaatttcaaatctcagagaatcattgggttgggagcacggtccgtttatcgttcctgacgaaatcaagaatgcctgggattgcaaagaaaaaggacaattgcaggaaaatgattggaatcaaagatttgaagagtataaatcccagaacccagagctggcagatgaattcttgaattgcatcaacggaaacataaccaacaatgaaatggttaatctcgatgcactgattaatcaattaagagaaaatgccgatgtagttgccacaagaaaatcatcgctcatagctctcaatgcgctcaaggaagattgctcgaatatgataggcggatcagctgatttgacgggttcggtttgcacctatcacgagtcttcaaaaccaatcaccaaaaatgatcacgacggaaattatatttattatggcgtgagagagtttggcatgtccgcaatcatgaatggcatagaccttcatgggggattgattccttattctggtacatttttaacattcagcgattattcaagaaatgccattcgcatggctgccatgatggagttgggcgtcatacatgtattgacccatgactcaataggtcttggcgaagacggaccaacgcatcagcccgtagagcacgtaccgagcttgagattgattccaggccttgatgtatggagaccttgcgacacacttgaaactgcgattgcttggaaagttgcagttcaaaaaagaaacagcccatcggcactgattctgacgagacaatcattgcctcaatacgatcgatccgaagaagttacgaacgatatccttaaaggcggttatgtcttaagaggagatagggattcaaatccggatgcaatcattattgccactggctctgaggttcaatacgcaatgaatgcatcgaatgaacttgaatctgaaggcttgtcaataagagtagtttccatgccatgcgttgagatttttgaacaacaatcggatgaatacaaaaattcagtcattcctttaggttttgaaaaaattatggtgattgaagcatcaatggccagtgcctggagaggttatgccggacccaaaggagttgtgataggaatggagggttttggagcctctgccccagcgcctgaattatttaaacactacggtttctcggatgagaatgtcacagagaaattgaaagcaatgataaatcgataaa

SEQ ID NO: 231315 - DNA, 859 bp, Unknown
  Bacterial polypeptide expressing nucleotide sequence isolated from the Sargasso Sea
attgagtaaactacataaagatttatcaaatgccattagatttttatctattgatgcggtagaaaaagcaaattctggacatcctggaatgccgatggggatggcggatgtcgcaacagtcttatttaaaaattttttaaattttaatccaaaaaatccaaactggatgaacagagatagattcgtcctttcagcaggtcacggatcaatgttgctatattcccttttatacctaactggatattcaagtgtaaatcttaaagatattaaaaattttagacagcttaattccatttgcgctgggcatccagaatttcatccaggcactggaatagaaacaacaacaggacccttgggtcaaggaattgcgaatggagtaggatttgcaattggagaggagatattaagagaaagatttggaaggaaaatttttgatcataaaacttatgttttggcaggtgacggatgtctaatggaaggaattagtcatgaggcattaagtcttgctggccatttgtgtttaaaaaacttggtaatgttgtttgataataactcaatatcgattgatggaccaacaaatttaactgtttctgataattataaaaaaagattcaattcctatggatgggattatattgaaattgatggtcataatgaaaagaaaatctttaatgcattaaaaaaagttcaaaaagcaaaaaaaccaactgtaatatcatgtaaaacaaaaattggatttggatcacctaacaaatcaggaagtgaaaaagcacatggaagtccacttggtgaaagtgaagttaaattggtcagaaaaaagttaaaatggacacacgagcctttcgttattcctaaaaaa

SEQ ID NO: 231316 - DNA, 1854 bp, Unknown
  Bacterial polypeptide expressing nucleotide sequence isolated from the Sargasso Sea
tgatgtatctacaatacttttcagatatttctaaaattaatccgaaaaatcctagttggattaatagagacagattcgttttatctgctggtcacggatctatgttgctatactctttgctttatttaacaggttacaagagcattaaactagatgatataaagaattttagacaaattaattctatttgcgcgggtcaccctgaatatattcaaaactctggcattgaaactacaactggtcctttggggcagggaatttctaatgcagttggttttgcattagcagaagaaattttaaaaaagaaaattggtaatgatattataaatcataaaacttatgtaattgcaggagatggctgtctaatggagggtataagccacgaagctatgagcttagctggacatctaaagctcaaaaatttaattatgttatttgataataattctatatctatcgatggcccgacaactctagcagtctcagataattttagaaaaagatttgaaagttatggttgggattacatagaaattaatggtcataaagaaaatgaaatttttaaagctctcaaaaaagttcaaaatgctaaaaagccaactgttatttcttgcaagactaaaattggttatggatcacctaataaatctggaaaagcttcttcacatggaagtccgctaggtaccggggagattgcattggttaggaaaaagttaggatggaattataaaccatttgaaattcccgaaaatatattggctgcttggagagggattggaaaaaagggagaaaaaactgaatataaatggaataaaatttataagatgaaaaaaagtaaaataaataaattttttaaaaatgattttataaatcctataataaatgagaaaaaaatagcagtaaaaaacaataatagtattgcatctaggaaatcctctgagtcaattattggctctattgttaaaaacagttgtacacttatcggtggatctgctgatcttgctggatcaaataatactaaaacaaattaccatgaaataattaaaccaggaaattttaacggaaattacattcattatggagtaagagaacatgcaatgtgtggaataatgaatggactggctttgcatagtaaatttataccttatgggggaacttttttaatcttttcagattattgtaaaccatcaattagattagcggcaatgatgaaacaacaaattatttacgtaatgactcatgactcaattggacttggggaggatgggccaacacatcagcctatcgaacaactatctggattaaggtcaattcccaaccttaatgtttttagacctgcagatagattggaaaccattgaatgttgggagcatgctttaaatagctctaaaacaccaagcattctatctttaactagacaaaacctaaatcccattagaaataaatactcaacaactaacaaatgttcattaggagcatatgaagttttaagaacaagcaaaaaaattaaattaacaattttagctagtgggtctgaggtaaacctagctgttgatacaagccacaaattagccaaagataagatatattcaaaagttatatcagtaccgtgtatggaactttttgacttacaatcaaagagatatagagataaaattttgaatgaaactaaattaaaaatatcaattgaagcaggatctagcgcctgttggaaaaaatatgtgggtgattctggaatgacatttggaattgatgtatttggtaaaagtgccccatataaagatatttataaatattttggattaacatctttaaatattgcaaataaattaaaaaaattttcaaataactaaa

SEQ ID NO: 231317 - DNA, 643 bp, Unknown
  Bacterial polypeptide expressing nucleotide sequence isolated from the Sargasso Sea
attgcagcaatcagatcatattaacgtacttagatttttgtctgctgatgctgtacaaaaagcaaattcaggtcatccaggaatgccaatgggtatggcagaaatcgctactgcgctttggagtaaacacctaagacataatccgaataatccaacttggttcaatagagataggtttgtactatcaaatgggcatggctccatgcttttatacagcctattgcacctaactggttatgatttgtcaattaatgacattaaggactttaggaagcttaaatcaaaaactcctgggcatcctgaatatgatattgataatggtattgaaacaacaactggtccattaggacagggaattgcaaatgcagtaggaatcgcagttgcagaaaaaatcttagcagcagaatttaataaggatgatataaagcctattgatcattttacttatgtttttcttggagatggctgtttgatggaaggaatttctcatgaagcttgttcatttgctggaactcataatcttggcaaattaatatgtttttatgatcaaaatggaatttcaattgatggagagattgaacattggttcacagatgattctgttacaagatttgaaaagtatggttggcaaaccatatgtgta

SEQ ID NO: 231318 - DNA, 707 bp, Unknown
  Bacterial polypeptide expressing nucleotide sequence isolated from the Sargasso Sea
tttgagcaaactacacaatgatttagctaattgcatcagatttttatcaattgatgctgttcaaaaagcaaattcaggtcacccaggaatgccaatgggtatggcagatgttgcaacagtgttattcaaaaattttttaagatttaatccaaagaatccagattggttaaatagagatagatttgttttgtctgctggtcatggttctatgcttttatattctttgctttacctaactggatataaaagcatatcaattaataatattaaaaaatttaggcagcttaattctatttgtgctggacatcctgaatatcatccgaaaacaggtattgaaactacaacaggtccccttggacaaggtatatctaatgcagttggttttgcaatagctgaagaaattttaaaaaataaattaggtaaagatttaattaatcacaaaacttatgttttagctggagatggatgcttaatggaaggaataagtcatgaagcgatgagtttagcgggacatttaaaacttaaaaatttggttatgctatttgataacaattcaatttcaattgatggtccgacaaatctcgcggtttcagataattttaaaaaaagatttgaaggatatggttgggattatatttctatcaacggtcataatgaaaaagaaatttttaaagcactgaaaaaagttcaaaaagctaaaaaaccta

SEQ ID NO: 231319 - DNA, 1912 bp, Unknown
  Bacterial polypeptide expressing nucleotide sequence isolated from the Sargasso Sea
atgcagtgggaaaaagcaaaatccggtcatcctggtatgcctatgggtatggcggacatagcaaccgttctttacaaaaatcatttaaagtttgatccgaatcacccaggttggattgatagagatagattaattatttcaaatggacatggatcaatgcttttatactcttgtttgtatctaacaggatataaagacattgacataaatcaaattaaaaattttagacaattacataataaaactgcaggtcacccagaatacggaagtgcagaagggatagaaacaactactgggcctttgtctcaaggtttagcaaatgcagttggaatggcgctagcggaaaaaaaattatcaaataattatggaaaagaattattcgatcattacacttatgtttttgctggagatggatgcttaatggaaggtttaagtcatgaagtgtgtagtctcgcaggacatttaaaattaaataagcttattatgttttttgataataattctatttccatagatggatcaacagatctttcagtttcagacaatgtgaaaaaaagatttgaagcttataattggaatataattgaaatagatggtcataaatatgaggaaattgatcaagctataattcaagcaaaaaaaaatgatgctccaacaattatatcttgtaaaactaaaattggttttggctctccaaacaaagagggttcagcttcatcacatggttcacctcttggtgaagatgaaattagtttaacaagaaaaaaattagaatggaattattcgccgtttgaaattccagatgatttattacgtgagtggagaagtttctataaaagaaatgaagaatcaagaaattcatggttatcaaaaaacaaagaattaattgaaagtaaaaattttaaagatagtttttatcaaaaaattgatcatcaaattccagaaaaacttagtgaattaaaatctgagcattttaatgataaaacaaattgtgcttcaagaaaatcgagtgagctaacgctaaatttaatttcaaactatcaaaaaaatcttattggtggatctgctgatcttactggatcaaataacactaaggcaaaagatatgaatgtaattacatctaataattttaatggaaattatattcattacggcatcagagaacatggaatggctggagtaatgaatggcattgctttgcataaaggtttaattccatatggaggaacgtttttggtatttaccgattattgcagaccttcaattaggttatcagctattatgaatataccagttatttatgtaatgacgcatgactcaataggattaggagaagatggaccaacccatcaacctgttgaacatcttgcatctttaagatctataccaaatttaacagtcattaggccttgtgatattattgaaactatagaagcatgggaatgtgcaatcaacaatactggaccaacaatcttagttttaacaagacaaaatctaccgatgttacaaaaagataatcgaaaagaaaatcttgtaaataaaggtgcttataaaataagagattttaaagaatatgatgcaacaattttatcttctggttctgaagttgagattgcttgctctgcatcaaataaactttttgaaaacaataatttaaagataagagttgtaagcatgtcttcatttgaattgtttgagaaaaatgatgatggttataaaaatgaaattttaggaaataaacctatttttgctattgaggctggagtaataaatggttgggaaaaatatattaaaaatgaaaattttgttggtatgtcaacttttggtgaaagtggtccatacaaagatttatataagcactttaagataacagatgattacttaattgaaaaaataattaaaactttataaa

SEQ ID NO: 231320 - DNA, 1803 bp, Unknown
  Bacterial polypeptide expressing nucleotide sequence isolated from the Sargasso Sea
attgataaagaacgaaacagtaaacgctcttagatttttgtctgcagatagtgtagaaagggctcagtctggccatccaggcatgcctcttggcatggcagatattgcagaagttctttggagagatcactttaaccattcacccacaaattctaattggtttaatagagataggtttgttctatcaaatggccatggatcaatgctgctttatagccttttacatttaacgggctacaaactatctcttgatgacttaaaagattttagacaattacattctaagactcctggccatccagaatatggcatcaccgatggagttgaaacaacaacaggaccacttggacaaggactagctaatgctataggtatggcaatagcagaaaaaattcttgcttcaaaaattaatactgaaaaaataaagccagttgatcatagaacttactgctttgttggagatggctgtttaatggaaggcatttctcatgaagtcatgtctcttgccggtgttttagaattaaataaattgatctgtttttatgatagtaatggcatttctattgatggtgaaattaaagattggtacaaggacgacattaagcttagatgtgagtcatatggttggaatgtaattggagagatagatggacacaatagagatgaaattaatcaagctatagtcgcagccaaagaatcaaataagccaacaatgatagtatgcaaaacatctattggttatggcgctggaagcaaacaagacagtgaatcctctcatggagctcctttaggagaagaagtgctcgccgaattaagaaaaaacctagattgggaatacaagccttttgaaatacctgaatctgtttatgcggattgggatttcaaagaaaaaggaaaaaatcttgaagaaaattggagagcaatttgtgcagatcatgaaaaaaatgatccagaaaaggcaacccttcttaaaagattagtatctggagatcttcctgaaaatttcatggaagcttttgataatcatattgaagtcttaaaggaaaataatgactctattgcaactagaaagtgttcccaaatgatccttgaatttctaaaagaacacttacctgaactaataggaggctctgctgatttaagtggctcaaacaacacaattacaaaagcatctttatcagttaactccaattcatctggtaactatatctattatggcgtaagagagtttgggatgaatgcaattatgaatggaatgtctttgcatggcggcattattccatacggtgggacattcttggtttttatggattatggcagaaatgctgttcgtatgtctgctttaatgggaatcagaacaatttatgttttttcacatgattctgtcgctcttggtgaggatgggccaacacaccagccaatagaacatttaacgacattaagatctactccaaacatgcatacttggagacctgcttctttgattgagaccgcagttgcttggaaaaaagctctaacaaacaaggatggaccaacatcaattattttatcaaggcaaaatcttaataatttttcaattgaaaatatctcagatgttgaaagaggtggttattttataaaacattctccagattcaacaattaatttaattgccacaggatctgaagtcgatactgtattagaagcagcaaaaattttagaagagagtgggacaaagaccaatatagtcagtgttccatgtttagaggagatagaaaaagatcaatctatttatcagaaaatattctctcaaaacaccagcaa

SEQ ID NO: 231321 - DNA, 1342 bp, Unknown
  Bacterial polypeptide expressing nucleotide sequence isolated from the Sargasso Sea
ttgcaacaaaataactcaataaacgcccttagattcctatcagctgatgctgttcaaaaagcaaattctggacatccaggcatgccaatgggtatggctgagattgcaacagcgctttggagcaagcatttaaagcacaatccttcaaatccgcgttggtttaatagggatagatttgttttatcaaatggacatgggtcaatgctgttatatagtttgcttcatttaactggctacgatctatctattgatgatttgaaagattttagacagttaaaatcaaaaactcccggacatccagaatacgatattgatattggcgttgaaaccacaacaggccctctagggcaaggcattgcaaatgctgttggtatggctatttcagagaaaatacttgcagctgaatttaatgaggaggacattaaaccaattgatcactatacatatgtttttcttggggatggctgtttgatggaaggagtttctcatgaggcatgttcatttgcaggcacacataatcttggaaaattaatatgtttttatgatcaaaacggaatttcaattgatggcgagatagaacattggtttactgatgattcaattaaaagatttaacagttatggatggcacacaataagtgttgatggtcacaatgttgaagaaattgaaaaagctatagaagaggcaaagagagaatctgataagccctctatgattttttgcaaaaccacaattggttttggttctccaaataaatcaggaacagctgatgttcatggggcgcctcttggagaagaggaaattaacaaaactagagaggccttgggatggacatatgagccatttgaattgcctgaggatgtatataagttttggaatgcaactgaacatggctcatctttaaatttagattgggataatttgatgtcttcatatgaagaaaaatatccagaaaagtcaaaagaattaaacagaagaattaatgcagatcttcctcagagttttgagaatgattttgacaaatttctagctgaatgtgacaaaaataatagtgcaatggctacaagaaaagcttcaaaagcttgcttagacttttttgtgaaagaaatgccagaattaataggaggttcagcagacttaacgccttccaataatactttttctgcatcaagctcaactttttcaaatgaaaacccatcaggaaatcatataaattatggagtaagagagtttggaatgtcagctatcatgaatggaatggttcttcatggtggcattaaaccatatggagcaaccttccttgtattcacagattatgccagaaatgccgttaggctttctg

SEQ ID NO: 231322 - DNA, 1519 bp, Unknown
  Bacterial polypeptide expressing nucleotide sequence isolated from the Sargasso Sea
aatggccaatgcaatccgttttctctcaattgacgcagttcaaaaagcaaactctggtcatcctggcttaccaatgggtatggcagacgtatcgacagtattattttgtaaatatttaaagtttaatccaaaagatcctgattgggatgatagagataggtttgttttatcagctggtcacggctcaatgttgctttactcgctcctctatttaactgggtataagggcagctctctaaaagacatcataaactttcgacaattaaatagcaggtgcgcaggtcatcctgaatatggtcatctgaaggggattgaaactaccaccggacctcttggccaaggttttgcgaatgcggttggaatggctattgcagagagaaaactctcaaaagattttggatcaaaaatatgtgaccattttacttatgttattgctagtgatggtgatttgatggaaggaatcagtcatgaagctgcatcgctcgcaggtcacctaaaattaaaaaaattaatagtttttttcgacgataatggaatttcaattgatgggccggtgagcttatcaaactcagagaatacagttaatcgctttaaagcatatcaatggaacacaatatcaattaacgggcatgatcaaaatcaaatatcaaaagcaatttctgaagctcaaaaatccaataagcctacattaatcgcttgtaaaactaagattggttttggttcaccaaataaacaaggtaagtcgtcggctcatggtgctcctttaggcctcgatgagattgagctcacgaaagctaaattaaattgggaatataagccatttgaaataccagataatataaaaagtgagtggttaattgctggcactcgctcaatagttaagtataaaaaatggaaatctaatgccaataaaatgaaaagtaattctaaaaaagagtatgcaagaagaataaatggaaaattgccatcaaatattaataaaattctaaacgacttcaaaaaagattgctcaaataagaagattgctaaagcaacccgtcaatcttctgaaatggttattaaccaaatttcttctcatatgcctgaattaattggaggttcagcagatctcaccggatcaaataataccaaagcatctgatatgaaaatattagatgccaataattactctggcaattatatatattacggaatcagagagcatggaatggcagctataatgaatggcatagcacttcacaaaggtgttataccatttagtggtacgttcttaattttttctgactattgtaagccgtcaattagactctcagctcttatgaaacagagagttatatacgtctttactcatgactctattggcctcggagaagatgggcctacacatcagcctatagaacagcttgcaggattaagatctataccaaacttaaatgtatttagacctgctgattcagtagaaacagccgaagcttggcaaatttctttacaatcaaatgatactccatcagcgatagct

SEQ ID NO: 231323 - DNA, 2008 bp, Unknown
  Bacterial polypeptide expressing nucleotide sequence isolated from the Sargasso Sea
atggtcgctgcatctgtttcattagaatcactttgtgtaaatagtataagaatgcttgctgtagatgcagtaaataaatctaatagtggacatcctggattgccaatgggatgtgctcctatgggttatgcattatggcaaaacatacttaatcacaaccctaataacccaaaatggttcaatagagatcgttttgtattatcagctggtcatggctgtatgctgttatattccttgcttcatttgacaggatataaatcagtttccatagaagatattaaagaatttaggcaatggggatcaaaaacacctggacatccagaaacattcgaaactgaaggtgttgaagttacagctggtcctcttggagccggaatttcaaatgcagttggtttagcaatagctgaaacacatttagcagctaaatttaataagcctgattgcgatatcgttgatcactatacttacgtaataatgggtgacggctgtaaccaagagggcattgcatcagaggcctgctcattagctggtcaccttaaacttggaaaattaatagcactctatgacgataatcaaattacaattgatgggcgaacagacgtttcttttactgaagatgtcttaaaaagatacgaagcttatgggtggcatgtacaacatgttgaagatgggaatcatgatattaaaggaattactgaggctatagaaaaagctaaattagttgctgacaagccttcaattataaaaatttctacaaccataggttatggttctccaaataaatcagatacggccggaattcatggagcagctgttggagaagaagaagcggcattaactagagagtttctaaattgggaataccctccatttgaaatacccgatgaagtatatgcgcattttagaaattcaataaacaaaggtgaaaatttagagaaggaatgggatactaaatttgaagaatatcaaaaaaaatatccctctgaaggagcagagttaaaaagaatgttagagggtcaattacctgaggattgggactcggatctcccctcttattcgcctgatgataaagggttagccaccagaaagcattcacaaatatgtttgggtgctctaggtcctaatttacctgaattaattggcggatctgcagatttaactcactctaattacacagatataaaaggagaaactggatcattccagccacatagccctgaaaaaagatatttacattttggtgtacgagagcatgcaatggcagctgtacttaatggtattgcctatcacaatagtgggcttatcccttatggtggaaccttccttgttttcgccgattatatgaggggatcaatgaggctttcagcacttagcgaattaggagtgatctatgtcttaactcacgattcaattggagtaggagaagatggcccaacacatcaacctattgaaactatcccttctcttcgcgccatgcctaacatgctagtttttaggcctggagatggtaatgagacaagtggagcttataagcttgctattcaaaatcgaaaaagaccttccgccctttgtttaagtagacaaggtatgccaaatcaagaaaatacttctatcgacaaagttgctctaggaggatatgtagtttcagattgtgaaggaacaccagacttaatatttattggtactggaagcgaactgaatctttgcattgaagcaagtaaagaaatttcaagcttaggtaaaaaaattagagttgtttctatgccttgtgtagaactttttgaagagcaagaagaatcttataaagaaagtgttttacctagtagtgtgaaaaagagagttgtagtagaagctgcccattcatttggttggcataaatatacaggttttgatggaatttgtattactatggataggtttggtgcatcagcaccaggtggagaatgtatgaaaaattttggatttacggtcgaaaacgtagttaataagacgaaagaaattctataac

SEQ ID NO: 231324 - DNA, 908 bp, Unknown
  Bacterial polypeptide expressing nucleotide sequence isolated from the Sargasso Sea
cttgcagcaaaaagatcctataaacgccttaagatttctttctattgatgcagttcaaaaggctaattcagggcatccaggaatgccaatgggcatggcagagatagccactgctttatggagtaatcatttaaaacataatccattaaatccacattggttcaatagagacagatttgtactatccaatggacatggatcgatgcttttgtatagcttacttcacttgactggatacaatctatcaatagatgatcttaaagattttagaaaacttaaatcaaaaactcctggacatccggaatatgatttagatattggtgttgagactaccacaggacccttgggtcaaggcattgctaatgctgtaggtatggcaatatcagaaaagatattagccgctgaatttaatgaagaagatattaaacctattgatcactatacctatgcctttcttggtgatggctgtctaatggaaggaatatcacatgaggcttgttcatttgcaggaactcataatttaggaaaattgatttgcttttacgacgaaaatggaatttcaattgatggtgaaatcaaaaattggtttacagatgattctgttcaaagatttgatagttatggctggcaaacaatatgtgtagatggccacaattcagatgaaattaataaagctatttcaaaagcaaaaaatgaagttagtaagccctcaatgattttttgtaaaacaactattggttttggatctccaaataaatctggtacagctgatgttcatggagcaccattaggtgcggaagaggtaataaaaacaagagaagcattaaattggcattatggtgaatttgaaatacctcaagaaatttatgatttttggaactttactgaaaaaggtgccacacttaatt

SEQ ID NO: 231325 - DNA, 1795 bp, Unknown
  Bacterial polypeptide expressing nucleotide sequence isolated from the Sargasso Sea
ttgcatactgttaatgcaattaaaggattggttatggatggagttagtaaagccaattcaggtcatcctggcggtccaatgtcccttgcagattttacttacattctctactcagaatttttatcctttgatccagagaatccggattgggaaaacagagatagggttgttttatcagttggtcatacatgtatgcttttatattcaatttttttcctatgtggatatttaaaaaaagaagatcttagaaaatttagacaactcggaagtttaacgcctggtcatccagaaattcataccccaggaattgacgcgaatactggtccacttggacaaggagtaggaatgggaattggtatggctttagctgaaaaagcttcaactaattcagataaaaagagatttacttatattttagctggagatggggatttgcaagagccaatagctattggtgcaagtacacttgctggtcattggaaattatcaaaccttataatgttctatgataaaaatgatattcaaatagcaggtaaaacatcaagagtagattcaaccaactatgctaaacttttcgaagctatggattggcatgtacaagaaattgatgggcatgatcatcaagaaattagagaagctttaaataatgcccaattaaatgaaaagcctagtataattattggtcaaactacaatagcaaaaggcagtcatagtctagaaaataatccaaaagctcacggtgcaccttttagcgatgatgaaatctttaaaacaaaagataaattgggattgcctcaagaatcattttattgttcagaagaaattattaatcattttcaaagaaattttaaatctttaaaggaaaacgttattgaaactaataaatcttttaaaacagaacttttggattatcatcaaatgctcaaatctttgaaagtaccagattttggagacgatcttatggcaacaagacaagcttttggaattactcttgatgaatttgctaataaatttccgaacatcattggtggttcggcggatttagatggatcgaactgtacaacaaactttgctaacacttatgatgatttttcagcaacaaatcctaaaggaagaaatattgcttttggtgttagagagtttccaatgggtgctataatgaacggaattgctctatatggaaaacaccttccttttggtggaacatttttagtgtttagcgattatgtaagatctgcagttagattatctgcaattcaaaaattacaagtcttatatgagtttacacatgattcaatttttgttggagaggatggtccaactcatcaacctgttgagcatgcaatgtccttaagaaatattccaaatcttttagtatttagaccttcagattcttttgaaacatattgctgttttaaagaagttataaaaaacaccgaatctcctagtgctatgcttcttacaagacagaaattgccaaaattaaatcttgatcaagattatattgaacaaggtgtaagcaaaggtgcatatattttgaaaaaacaagataatcctgaagccatcttatttacaactggatccgaagctcatttagccttagatatatgcaattctttagataaaaaaattcaaataataactattccatgttgggagctatttaataaacaggataaaaattatatttcatctataatgttaaaagattgtaaaaagagaatttcgcttgaagcaggtattacattaggttgggaaaagtttacaggaatcaatggtcttagtattggaatta

SEQ ID NO: 231326 - DNA, 1987 bp, Unknown
  Bacterial polypeptide expressing nucleotide sequence isolated from the Sargasso Sea
atggctacaaaaaacactgatatagctaatattctaagagtattggcaatggatgcggtagaggaagcgaaatgtggtcatccaggaatgcccatgggaatggctgacatagctgaagtcctgtggagaaaacatctaattcacaatcccaaaaatcctaattggcctaatagagacagatttgtgttatcaaatggtcatggatcaatgcttatgtatgctttgctgcatttatcaggatatgaccttagtttagatgagataaagaactttaggcagttaggttctaaaacaccgggtcatcccgaatacggaataacacctggcgttgaaacaactacaggacctttaggtcagggtatttctaatgctgtaggaatggcaatagccgaaaagattctttcagataaatttaatacttcaactcataatatagtaaatcatatgacctatgtttttacaggtgatggttgtttaatggaaggcatatctcatgaagcttgttccttggcaggtactttaggcctaggaaagttaatagttatttacgatgacaatggcatttcaatagacggtaatgttgagggttggtttacagaagatattcctgaaagatttaaatcttacggttggcaagtgatatcagcggttgatggtcataatgcagatgaaattgataaggcaataaatattgctaaagcagatactgagaagccaagcataatttgctgtaaaacaattattggaaagggatctcctgaaaaggagggttctgcatcttctcatggatctgctttaggcgaggaagagattaaaaacacgagagctaatttgggttggaatcatgaagctttcgatatacccaaagatatttattctgaatgggatgcatctgatcaaggacaagcgatagaagatgagtggaatgaaatatttacagactataagtctaagaatcctgccttagctgaggaattttcaagaagaatgacttcagatttacctaatggtatcgaagaagctatctacaagtacattgaagatgtgcagaaagaagagcctaatattgcaacaagaacatcttctcagcgagtaattaatgttttaggtccacttattccagaattagttggaggttcggctgatcttacaggttcaaataacactaattgggaaggtacgcatgagattaaatatggggatttttctggaaattacataaattatggtgttagagagttcgccatgacaggaataatgaatggtttagttctacatggcggaattaagccttatagtggtactttcttgacctttcttgattatgcaagaaatgctgtcaggatggctgcactgatggaaatacctacagtattagtctactcacacgactccataggagttggggaagacggaccaactcaccaaccagttgagcacctaacaagcctaaggactaccccaaatttggaaacttggaggccttgtgacacttctgaaacagccatctcttggttatcagcgataaccaatacttctaagcctacagcattgatactttcaaggcagaaacttccaacattttctagaaacgaatcgcaaataaactcaatttctaaaggcgcttatgttctctatgaacctgagtctaaagcagaattagttttaattgctaccggttcagaagttaaacttgccatggaagttgcagaagaacttaaaggtaaaaaaaatataagagtggtttctatgccttgttcagaaaggtttgatgagcagtcagatgaatacaagacttcggtattaggaaatggcattaaaagggttgccattgaagcctctcatgaagattggtggagaaaatatgtaggccttgaaggagaggttattggcatgacttcctttggggagtccgcccccggcgatgatctatttgagcattttggatttaccaaagaaaagatcataaaaactttaggtttataaa

SEQ ID NO: 231327 - DNA, 1258 bp, Unknown
  Bacterial polypeptide expressing nucleotide sequence isolated from the Sargasso Sea
ttgataaagaacgaaacagtaaatgctcttagatttttgtctgcagacagtgtagaaagggctcagtcaggccatccaggcatgcctcttggcatggcagatattgcagaagttctttggagagatcactttaaccattcacctacaaattctaattggtttaatagagatagatttgttttatcaaatggccatggatcaatgctgctttatagccttttacatttaacgggctacaaattatctcttgatgacttaaaagattttagacaattacattctaagactcctggccatccagaatatggcattaccgatggagttgaaacaacaacaggaccacttggacaaggactagctaatgctataggtatggcaatagcagaaaaaattctcgcttcaaaaattaatactgaaaaaataaagccagttgatcatagaacttactgctttgttggagatggctgtttaatggaaggcatttctcatgaagtcatgtctcttgctggtgttttagaattaaataaattgatctgtttctatgatagtaatggcatttctattgatggtgaaattaaagattggtacaaggacgacattaagcttagatgtgaatcatatggttggaatgtaattggagagatagatggacacaatagagatgaaattaatcaagctatagtcgcagccaaagaatcaaataaaccaacaatgatagtatgcaaaacatctattggttatggcgctggaagcaaacaagatagtgaatcttctcatggagctcctttaggagaagaagtgcttgccgaattaagaaaaaacttagattgggaatacaagccttttgaaatacctgaatctgtttattcagattgggatttcaaagaaaaaggaaaaaatcttgaagaaaattggaaagcaatttgtgtagatcatgcaaaaaataacccagaaaaggcaacccttcttaaaagattagtatctggagatcttcctgaaaatttcatggaagcttttgataatcatattgaagtcttaaaagaaaataatgactctattgcaactagaaagtgttcccaaatgacccttgaatttctaaaagaacacttacctgaactaataggaggctctgctgatttaagcggctcgaataacacaattacaaaagcatctttatcagttaactccaattcatctggtaactatatctattatggcgtaagagagtttggaatgaatgcaattatgaatggaatgt

SEQ ID NO: 231328 - DNA, 1679 bp, Unknown
  Bacterial polypeptide expressing nucleotide sequence isolated from the Sargasso Sea
tttgaataaacataataaaatattggctaacgctatacgtgttctttcaatggatgctgttcaaaaggctaattctggtcatccaggaatgcctatgggaatggcggatgttgcaaccattctatttaaatattttttaaaatttaacccaagaaatccaagttggctaaatagagatagatttgttttgtctgcaggtcatggttcaatgcttttatactctttactttatttgaccggttacaaaagtatttctttaaaaagtattaaaaattttagacaattaaattctatatgtgcaggtcatcccgaatataaacctaacagcggtattgaaacaaccactgggccattgggtcaaggtatttcgaatgcggtaggttttgcaattggtgaagaaattttaaaaaaaaaaatcggaaaaaattttattaaccataaaacctatgttttagcaggagatggatgtctaatggaaggaattagtcatgaagcaatgagtcttgccggtcatttaaaactaaaaaatttgattatgctatttgataacaattcaatatcaatagatggacctacaacattagcggtatctgataattacaaaaaaagatttgaaagttatggttggaattatattttagtaaatggtcataatgaaaatgaaatttttaaagctttaaaaaaagcacaatcatctattaaaccaactgtaatttcttgtaaaacagaaataggctacggttctcctaataaatctgggaaagcatcagcacacggaagtcctcttggagataaagaaatagaattagtaagaaaaaaattggactggaaatatagtccatttgaaatacctaaatatatattaaatgaatggagaaaaataggactaaagggaagtaaatctgaaaaaacttggaacaaaaattataaaaaaataaagatgaggtttgaaaaaaaattaaaaaataaatttttaaattcaataaaaaaagaaataataaatgcaactaaagaaataaaaagtgtagctactagaaaatcatcagaattattattagccgccatagttaacaattgtaatacactaataggaggttctgctgatttagctggatcaaataatactaaaacaaagtatcataaaattattaagccaaatgattttagtggaaactatattcattatggtgttagagaacatgcgatgtgtggaataatgaatggcctatctctgcatagtaattttattccttacggaggaacattcttgattttttctgactattgtaaaccatcaattagattggcggcaatgatgaaacaaagagttatttacgtaatgacacatgattcaatcgggttgggtgaagatggaccaacacatcagcctgttgaacagttaactggcttgagagcaattccaaatttaaatgttttaagacccgcggatagagttgaaaccatagaatgttgggagttggcactaaaaaatcccaatactcctagcgtcctttctttaacaagacaaaatcttaatcctgttagaacaaaatattcaaagtacaataaatgtgctcttggcgcatatgaaatattaagaaccaataaaaaaattgatttaactataatcgctagtggttcagaagttaacttagctatagaaactggccataaattag

SEQ ID NO: 231329 - DNA, 1402 bp, Unknown
  Bacterial polypeptide expressing nucleotide sequence isolated from the Sargasso Sea
attggaaaatcataagctagcaaatgcaattcgctttctctctattgatgctgtccaagcagcaaaatgtggacatcccggcatgccaatgggcatggctgatattgccgtatctctttggaaaaataacttaaagcataatccttctaatcctaaatggattaatagagacaggtttgttctttcaaatggtcatggttcgatgttgctttatagtcttttacatttaacaggatatgaccttaacatcaatgacttaaaagacttcagaaaacttaaatcaaaaacacctggccaccccgagtatgatatcgatattggagttgaaacaaccactggaccacttggacaaggaattggaaatgctgttggaatggctctagctgaaaagaatcttgctgctacatttaataaagaagatataaaaataatagaccattttacttacgcttttcttggcgatggctgtctaatggaaggtatttctcatgaggtttgctcttttgcaggaacacacaaactcggaaaactcatatgtttttatgatcaaaatggaatatccatagatggagaaattgatctatggtttaccgataatacaaaacaaaggtttgaaagctatgggtggcatgtagttgaaattgatggccatgatatagatgaaattaataaagctactgaagaagctaagaaagaaactgaaagaccatcaatgatttgctgtaagacaactattggttttggctcgccaaataaatcaggaactgctggagttcacggaagtccattaggcgacgacgaaattgaaataaccaggaaagagcttaattgggagcatgccccttttgaaatacctgaagatatttacgatgcctggaatgcaaaagatgagggcgctaaaaaagaaaaagcctgggaagatcttctggaaacttataaacaaaaatatccagaggaatccaatgaactggagagaagatttaattcagagatgactcacgaatttaatgaaagattcgatgactttttaagagattgttcattacaagaagatccgatcgcaaccagaaaagcatctcaaatttgtcttgatcatttttgtgctgacttacctgagctaattggtggatctgccgatttaacaggatctaataatactttttctaaacataatactgaacttactcccgacaatcctagcggatcacatatttactatggcgtaagagagttcggcatggttactatcatgaatggaatgagtctccatggtggtattaggccatatggaggaaccttcctagtttttatggattatgcaagaaatgcagtgcgtttatctgcaatgatgagtctgccaaatatatatgtctttacccatgattcaaatcggcttaggtga

SEQ ID NO: 231330 - DNA, 1108 bp, Unknown
  Bacterial polypeptide expressing nucleotide sequence isolated from the Sargasso Sea
aatggtcgctgcatctgtttcattagaatcactttgtgtaaatagtataagaatgcttgctgtagatgcagtaaataaatctaatagtggacatcctggtttgccaatggggtgtgctccaatgggttatgcactatggcaaaacatacttaatcacaatcccaataatccaaaatggtttaatagagatcgttttgtattatcagctggtcatggctgtatgttgttatattctttactgcatctgacaggatacaaatcagtttccatagaagatattaaagaatttagacagtggggatcgaaaaccccgggtcatccagaaacattcgaaactgaaggtgttgaagttacagccgggcctctcggagcaggaatttctaatgcagttggtttagcaatagctgaaactcacttagcggctaaatttaataagcctgatagcaatattgttgaccattatacttacgtaattatgggagacggatgtaatcaagaaggtattgcatccgaagcttgttcattagcaggccatctcaaacttggaaaattaattgcactctacgacgataatcaaattacaattgatgggcgaaccgatgtttcttttactgaagatgttttaaaaagatatgaagcttatggatggcatgttcaacatgttgaagatgggaatcatgatgttaaagggataactgaagctatcgaaaaagcaaaattaattacagacaaaccctcaataataaaaatttctacaaccattggttatggttcgcctaataaatcagatactgctgggattcatggggcagctgttggagaagaagaagcttcattaaccagagagtttttaaattgggaatatcctccatttgaaataccagatgaagtatataaacattttagaaaatcaataaataaaggagaaaacctagagaaagaatgggattctaaatttgaagaatatcagaaaaaatatccctcagaaggagccgagttaaaaagaatgttaaaaggccaattacctgagaattgggactcagatctcccctcttatacacctgaggataaaggtttggcaactagaaagcattcacaaatatgtcta

SEQ ID NO: 231331 - DNA, 468 bp, Unknown
  Bacterial polypeptide expressing nucleotide sequence isolated from the Sargasso Sea
catgcatactgatcaccaaacccgcgccaacgccatccgcgctttaactatggatgcagtacaaaaagccaattcaggccacccgggtgcgcctatgggtatggcggatattgccgaagtactctggctgcaatttttaaaacataacccggctaatccgtcattcagcaacagagaccgttttgtgctgagtaatggccatggctctatgttgttgtattccttactacatctgacgggttatgaattatctatcgaagacttgaagtcctttcgtcagctgcattccaaaaccccgggccaccctgaattgggttacaccccaggtgtcgaaaccaccacaggtcctttaggtgcaggtatcgccaatgcggtggggatggccatcgccgaaaaaacgctggcggcgcaatttaaccggcctgattacccggtagtggatcattttacctactgctttttaggtga

SEQ ID NO: 231332 - DNA, 1993 bp, Unknown
  Bacterial polypeptide expressing nucleotide sequence isolated from the Sargasso Sea
aatgcacaaagaacttgctaacgctataaggtttctatcaattgatgctgttgaagcagccaaatctggtcatccaggaatgccaatgggaatggccgatattgcagtagctttatggaaatacaacttaaaacataatcctcaaaatccaacttggtttaatcgagataggtttgtcctttcaaacggtcacgggtcaatgttgttatatagcttgcttcatttaactggatatgaactttcaattgaagacttgaagaactttagacaattaggctctaaaacacctggtcatccagaatttgacatagatattggcgttgaaactactactggcccattaggccaaggtattggcaacgctgtgggaatggctctagcagaaaaaatgttagcaagcagatttaatcaagatgatggactaaaaccaattgatcatttcacctatacgtttttgggagacggttgtttgatggagggagtctcacatgaagcctgttcatttgcaggaactcatggtttaggaaaattaatatgtttttatgatcaaaatggaatttcaattgatggtgagataactaattggttcacagataatactttacaaagatttgaaagttatggatggcaagtgcttgaggtagatgggcataatgttgaggaaaccttagaagcaattcgaacagctcaacaagatgtagagcgtccaactttaatatgttgtaaaacaattattggctttggatcgccaaataaatcaggaacatctggtgttcatggcgctgcattaggagaggatgaagttaaaaaaactcgggacgagcttggatgggagcatgaaccatttcatataccagatgacataaagtctgagtgggactgcaaagatgaggggactaagctcaatgcatcatgggatcaattaatgatggagtattctaaaaagcatccaaagtcttttgatgaattgacaagggtaattaacaatgaacttccaataaacttcgaaaacagttatagagattttataaatgaattatctgcaggcgatcaaaaagatctggctactcgcaaggcatctgagttatgtttaaattatttttgtgaaaaatttcccgagttaattggtggatctgctgatttaactggctcaaataatactttttcatcagtaagcactgaaatgcttcctgataatccaaagggcaatcatatattttacggagtcagagagtttgggatgaccgccatgacaaatggaatggttttgcatggcggaataaaaccttatagcggaacttttttagtttttatggattacgctagaaatgctgtccggcttgctgcgcttatgaaaataccaaatatctttgtttatacccacgactcaattggccttggtgaagatgggccaacgcatcagccaattgagcaccttgttacattgagagctactcctaatttaaataattggagacctgctgacattatagagactgccgtaagttggaaagaagcaatttgctctaaagatactcctcacagcttaatattatccagacaaaaccttccctttattgagagatcaaaagaacaaatagagatgattgagaaaggaggttatttattatcttctgatgataaagctcatattacattgattagttcagggagtgaggttaagttaattattgaggcagctaaaacaatttcaaaagaagggttaaaagccaatgttgtttctatgccttgtcttgataaatttgtctcacaagataaagtttacagagacagcattattaatcctgaaataccaaaactcgtagttgaggctcttcatccaaattcttggcattgtttgataaatctaaatgatactgtaattggaatggaaacatttggagaaagtgctccaggagatgagttaatgaatgagtttggcttcacagtcaacaatattgttactcaagccaagaaactaattgcaaaatga

SEQ ID NO: 231333 - DNA, 1477 bp, Unknown
  Bacterial polypeptide expressing nucleotide sequence isolated from the Sargasso Sea
ggcaaacctctgctggatttacgatgacaataaaataacaatcgagggtgaaaccgaccttgcgttcagtgaggacgttgggcgtcgattcgaaggatttggatggcgaatcgaatatgtcgacgatgcaaacgatgcctcgtctttgagtcgtgcacttgaagcctttaaggcagaaactcataaacctactttgattgtcgtcaaaagcataatcggctttggtgctccaacaaaagctggttctcattcatctcatggtgctccgcttggaccagatgagatcgctggggcaaaagaagcatatgattggcccacccgtgaggccttccacgttccgaacggagttggcaagcatttccaagacacaatgggtgaacgtgggcaaaaagcaaatgcattatggcagacagctcatcaaacattagcctctgctgaaccgcaggtcgcgaagaaacttgagtgcttgcttgctggagagctaccggagggctgggcggatgcaatcccagactttccggctgatgcaaagggactggctagtcgtgtttcatctggaaaagtccttcaaagccttagtgctactatcccatggttcttgggtggctcagctgaccttgcgccatcaacgatgactcttatccctgatgcaggtgacttcggacccgaaaacctcagcggacgcaactttcactttggtatccgagagcatgccatggcagctgcctgtaatggtatggccttgtgcggcttgcggccatatgccgcaaccttctttgtattctttgactacctcaaaccagcccttcgactttctgctttaggggaacttggtgtcatttatgttcttacgcatgattcaattggtcttggtgaggacggtcccactcatcagcctattgaacatcttgcgagtgcccgagctgtccctgggttaaatgtttttcggccggccgatgccaacgaagttgcagaggcgtatcggagtgcattactgaacccgaaacagccagccgtcatggtactttcgcgacaaaatctcccaacactcgaccgaacaaatcttggaccagcgaatggtgttgccaaggggggctacatattgaaagaagctcgagggggcgaggctgaatgcattctcatcggaactggcagtgagattccactttgtcttgatgcagctgatattctcgactcagatggtattcgaactcgagttgtaagccttccgtgctgggaactctttgctgagcaagacgatgagtaccgggaacacgttcttccttcgaatattccatcgcgagtagcatgtgaagctgcgtcaggatttggctgggaaagatggctcggccagaaaggcacattcatcgggatgaatggatttggcgcttctggtccggcaaagaaattgttcgaacactttggcattactgctgaagctgttgtcgctgcagcacgaactctggttggtaaatag

SEQ ID NO: 231334 - DNA, 1576 bp, Unknown
  Bacterial polypeptide expressing nucleotide sequence isolated from the Sargasso Sea
atgcttatttacgcgcttaattatttgctaggctatgaggacatgccgatagaaagtataaaaaactttagacagctgaattttaatactcctggccatcccgagtttggacataccaaaggtgttgaaacaacaactggtccccttggacaaggatttgctacatctgtgggaatggctctagctgaaaaattgttaaatgctagatttaaaaatgaacttgtcgatcattttacatatacaattgtaggagatggatgtttacaagagggaattagtcatgaggcaatagagtttgcaggtcatttgaagttatctaaattaattgttctttgggataacaataaaatttctattgacggagaaacaaatttatcaacttctagtaatcaacttgctcgttttaaagcgagtggttgggatgctcaaattattgacggacataattttgaagaaataactaatgctattgataaggctaaaaagtcaaacaagccatctttaatagcatgtaagacaattattggttatggttctcctaatttagctggaacagaaaaaacacatggcgctcctcttggtaaagatgaggttgaagaagtaaaaaaacatttaaattggaattatgaaccatttgaagttcctaatgaacttatagaggaatggaaaaaagtaggattaagaggtaatacaaaaagaaaagattggcttttaaaattagagtccagttctaagaaacagaaatttgctaactttcataatacagacataaataaaaagtttgaaaaaaaatttagaagttatttaaaaaaacttaagacagataaacctaaaatagcaaccagacaagcaagtcttaattttttagaagtaatcaacagctctattgaaaacacaattggtggttcggctgatttaaccggttcaaatcttacaaaaactaaaaatatgaaaccaattatgcctagaaagtttaaaggaaattatattcattatgggataagagaacatatgatgggtgctgttatgaatgggatagcattgcataaggggtttttgccgtatggtggaacttttttagtattcagtgattatatgagagcgtcaatgagattatcatctattatgaaagcgaaagttgtttatgtgcttactcatgactctattggtttaggtgaagacggacctactcatcagccgattgaacatttagctatgttaagagctacaccaaatttaaatgtctttagaccagcagatgcagtagagacagcagaagcttggcgcttagctctctctcataatggtccatctgtgcttgctttatctcgacaaggactgcctgcaattagagatgaaaaaaaatttgaaaacctaacagagaaaggtggatatattataaaggatgtaaaaggcaatagagatgttacaataatagcatcaggttcagaagttaatattgcattacaagtttcagacttattgtcaaaacataaagtaaatgctgcagttatatctatgccgtgctgggaattatttgaaaatcaaaataatgattacaaatcaaatgtcatag

SEQ ID NO: 231335 - DNA, 597 bp, Unknown
  Bacterial polypeptide expressing nucleotide sequence isolated from the Sargasso Sea
attgagtaagctacataaagatttatctaacgccattagatttttatctattgatgcagtagaaaaagctaattcgggacatcctggaatgccaatggggatggcagatgtagcaactgtgctttttaaaaattttctgaattttaacccaaataatccaaattggttaaatagagatagatttgttctttctgcaggtcatggatcaatgttactttattctcttttatatcttactggttatagaagtatcagtctcaaagatataaaaaattttaggcagttaaattctatttgtgctggacatccagaatttcatccaggaagtggaattgaaactacgacaggacccttgggtcaaggagttgcgaacgctgttggttttgcagttgctgaagaagttttaagagagagatttggaccaaaaatttttaatcacaaaacttatgtgttggcaggagatggatgtttaatggaaggaattagtcatgaagcactgagtcttgccggtcatcttggtttaaaaaacttagttatgttatttgataataactcaatatctattgatggaccaactaacttagctgtctctgataa

SEQ ID NO: 231336 - DNA, 1694 bp, Unknown
  Bacterial polypeptide expressing nucleotide sequence isolated from the Sargasso Sea
gatttgcgcaggtcatccagaatacgaaaaagattctggtattgaaacgacaacaggtcctttgggtcagggcttagccaattcagtaggaatggcaattgcatctgaagttttaaaaaaaagatttgggtcagacctgattaataacaaaacttatgtaatcgcaagtgatggagatttaatggaaggtattagccatgaagctatgagtttagccgggcatttaaatttgaaaaatttaatagttttttttgataataataaaatttccattgatggtgccacatcactgagtgtttcggacaattataaaaaaagatttgagagttatggttggtcttttcaagagatcaatggtcataacaataagcaaatatttaatgctattaagaaagcaactaaatcaaaaaagccatcaataatttcatgtaaaacaataataggatttggatcaccaaataaatcaggaaaggcaacatctcatggttctccccttggagatgatgaaattaaattagttaggaaaaaactaggttggaaacatgctccttttgaaattccggaaaaaataatagaagcctggagagaaataggtaaaaagggtcaaaaaatcgaagaaagttggaatagtatattatcctcaaaaaattctaaagttaaagaagaatatgaaaggcttacgaaaggtgagcttccaatatcgatagataaaatacttggtgatgaaaaattaaaattttttcaaacaaaacctaaaatggctacaagacaatgctcttcctctgttattaaatgtatgtctgaagttctacctgaactaataggtggatctgctgatttaagtggatcaaataatacgaaaactgaaatctctaaagtaattaactcaaaaaatttttctggcaattatattcattttggagtcagagaacatgcaatggctggggtaatgaacggtttggctttgtatggttgtctaataccttttggtggaacatttttaattttttcggattatttgaaaccctctatgagattatcggctcttatgaaattgagagtaatttatattttttctcacgactctatcggactcggggaagatggaccaactcatcagccgatagagcaattagagcatttaagggcaattcctaatttaaatgtatttagacctgcagatattaatgagacaattgaatgttgggagattgctttgaaaagcaaaaataatccgagtgctatagctttatctagacaaaaattatcgtatgtatctgaacataatgctggtgaaaataaatgctctaaaggaggatatgttttaaaaaaaacttctgacaatcccgaagtatctattatagcatcaggatcagaagtagaaatagcattagaggcacaagaaaaacttaaaaatcaaaatattttttcaaaagttatatctgttccatgttacgatctttttcaaaatcaaactgaaatttataaaaatgaggttctcggtaaagatacttttaagatttcaatcgaagcttcaagtcaatcttgttggaagagtatagttggaaaaaaaggtattacacttgggctgtctacatttggaaaaagtgctccgtataaagatatctataaattatttaatttaacaagtgatgaaatagtaaagaatgtaaaagaacaggttaaaaagtaat

SEQ ID NO: 231337 - DNA, 981 bp, Unknown
  Bacterial polypeptide expressing nucleotide sequence isolated from the Sargasso Sea
catggtcgctgcgcccgcctctctcgacacgctctgcatcaacagcatccggatgctggccgtcgatgcaattaacaagtcaaagagcggccaccccggcctgccgatgggctgcgcacccatgggttacgcgctgtgggacaagttcctgaagcacaaccccaagaaccccaagtggttcaaccgcgaccgcttcgtgctttccgccggtcacggctgcatgctgctgtacgcgctgctgcacctcaccggctacgactccgtgtcgattgaggacatcaagcagttccgccagtggggctccaaaacccctggccaccccgagacctttgaaaccccaggtgttgaggtgaccaccggccctctgggtgccggcatttccaacgccgtgggtctggcgatcgcggaatcgcacctcgccgccaagttcaacaagcccggcgccacccttgtggatcactacacctatgtggtgatgggtgatggctgcaaccaggaaggcatcgcctcggaagcctgctccctggccggtcacctgaagctgggcaagctgatcgccctttacgacgacaatcacatcaccatcgacggccgcacggacgtgtccttcaccgaggacgtgctgaagcgctacgaggcctacggctggcatgtgcagcacgtggccgacggcaacaccgacgtggatgccatcgccaaggcaatcgaggccgccaaagcggtgaccgacaagccgtcgatcatcaaggtgaccaccaccatcggctatggctcccccaataagggagacaccgctggcgtgcacggcgctcccctgggtgaagacgagaccgctctgacccgtcagcagctgggttgggagtacggccccttcgaagtgccccaggaggcctacgaccagttccgccaggccatcgatcgtggcgccagcctcgaggcggagtggaaccagaccctggccagctaccgcacccagttccc

SEQ ID NO: 231338 - DNA, 723 bp, Unknown
  Bacterial polypeptide expressing nucleotide sequence isolated from the Sargasso Sea
gttggacaataaagacctagcaaacgcaataagattcctttcaattgatgctgttcaagcagcgaattctggtcatcctggcatgccaatgggaatggctgacatagctgtttccttgtggaaaaacaacctaaaacataatccaaataatccgagatggattaatagagatagatttgtcttatcaaacggccacggctctatgcttctatatagcttactacacctaactggctacgatttatcaattgatgatctaaaagattttagaaaacttaaatcaaaaacaccgggtcatcctgaatatgatattgatgtaggcgttgaaacaacaacaggtccattgggtcaaggcattgggaatgctgttggtttggctttagctgaaaagaatcttgcagccacatttaacaaagatgatataaaaataatagatcattttacttatgcttttcttggcgatggctgtctaatggaaggtgtctctcatgaggtttgctcttttgctggaacacataaactcggaaaactgatatgtttttatgatcaaaatggaatatctatagatggagagattgatctatggtttaccgataatacaaaacaaaggtttaaaagctatggatggcatgtagttgaaattgatggccatgatatagatgaaattaataaagccactgaagaagctaagaaagaaactgaaagaccatcaatgatttgctg

SEQ ID NO: 231339 - DNA, 679 bp, Unknown
  Bacterial polypeptide expressing nucleotide sequence isolated from the Sargasso Sea
ttgaataaaaataacagagatttatccaacgccataaggtttttatctatagatgctgttcaaaaagctaattctggacatcctggtatgcctatgggaatggctgatgttgccacagttcttttcaaaaactttttaaaatttaacccaaaagatcctgattggttaaatagagacaggtttgtattatctgctggtcatggttcaatgcttttatattctttgttatacttaactggatacaaaagtattaaattagatgacataaaaaactttagacaaattaattcaatttgtgcaggacatcctgagtaccaccctaactctggaattgaaactaccacaggacctttgggccaaggaatatcaaattctgttggcttcgctattgcagaggaaatacaaaaaaagaaaaatggaaaaaatataattaaccacaaaacctatgtgctggctggtgatggttgtttaatggaaggaattagtcatgaggctttaagtcttgctggacacttaaaattaaaaaatcttattttactttttgataataattccatttctatagatggacctactagtttggccgtatcagatgatcataaaaaaagattcaatagttacggatggaattttcttgagattgatggccacgatgaaaaacaaattttaaagcattaaa

SEQ ID NO: 231340 - DNA, 484 bp, Unknown
  Bacterial polypeptide expressing nucleotide sequence isolated from the Sargasso Sea
atggcggtaagtagaaagaaactagcggacgcaattcgtgttttatcaatggactcagtgcagcgcgctaattctggtcatcctggtggacccatgggcttggcggatgtcatggaggttctttggagagactttgttaagcagaacccgactgatcctaactggttagatcgagatcgctttgtcctatctaatggccattgttcgatgcttttatacagcgctctgcatctgagtggttttgatgtaagcatttcagatctgaaagattttcgacagttaggttcaaagacggccggacatccagaatttggtgaatgcccggggattgaaactaccacaggtccattaggccagggtttggccaatgctgtcgggatggccttggctgagcagaagcttgccgcagaatttaacgagcctaactatgaaatagttgatcatcgaacctgggtggttgtaggtgatggttgcctgatggagg

SEQ ID NO: 231341 - DNA, 1540 bp, Unknown
  Bacterial polypeptide expressing nucleotide sequence isolated from the Sargasso Sea
aatgagtaaaaattcaagctcccaatcagcaaacgcacttcgaatactcgcagcagatgcagtgcagcaggccaattcaggtcaccctggcatgccaatgggaatggcagaaattgcagaggtcctatggcgacgccacttattacataatccttctaaccctaattggttcaatagagataggttcgtactttctaatggtcatggttcaatgctcatatactctcttttgcacttgagtggctatgatctaactattcaagatcttaaagattttagacagcttcactcaaaaacagctggtcacccagagtatggaatcactccaggagttgaaactactactggacctctcggacagggaatatccaatgctgtcggaatggctatagctgagaaagttctagctaccaagttcaatactaaaatacataaagttattgatcacatgacttatgttttcactggtgatgggtgtttgatggaaggaatctctcatgaggcctgctctttggcaggcactcttggattgggaaaattagttgttttgtacgacgacaataatatttcgattgatggagaggttgatggatggtttacggaggatattcctgcaaggtttcgatcttatggttgggaggttatttctgatataaacggccacgatcctgaagagattgatacggccataaataaagctaaaaccagtcaaaataagccaaccttaatttgctgcaaaacactaataggcaaaggttctccaaataaagaaggaacggcatcgacacacggtaatcctcacggtgaggaagagattgctgatatgagaaaagatctcaaatgggataatgaacctttcgatatcccagctagtgtttatgaagcctgggatgctaaagagcaaggaagttccaaagaagaggaatggaatcaattatttgatcaatatcaaaaagacaataaagaattagcgtctgaattgagacgaataatgaatggagacttgccagaaggagttgaagaggccatttatggttttgttgatgatgctcaaaaagatttaccaaatatagccaccagagtatcttctcaaagagttttaaatgttttaggtccattaattcctgaattagttggtggatcagccgatttgacaggttcaaataatactaattgggacggtacgattgagattaggtctgataattttgctggaaattatataaattatggcgtcagagaatttggtatgacaggtattatcaatggaatggttcttcatggaggcatcaggccttacggaggaacatttttaacctttttagactatgccagaaatgctgttcgcatggccgctctaatgaagattcagactatgcttgtatactctcatgattcaattggtgtgggagaagatgggcccacccatcagccagtagaacatttaacaagtctcagaactaccccaaatcttgaaacttggagaccttgtgatacttcagagacagcaatttcttggctcgcagccctagaaaattct

SEQ ID NO: 231342 - DNA, 1645 bp, Unknown
  Bacterial polypeptide expressing nucleotide sequence isolated from the Sargasso Sea
tttgaaaaaagaaaacaaaatattagcaaacgcagtgcgttttctttcaatagatgctgttcagaaagctaattctggccatccaggtatgccgatgggaatggcagatgttgttactgttttattcaagtattttttaaaatttaatcctaaaaaccctagttggctaaatagagatagatttgttttgtctgcagggcatggctcaatgctattatactctttactttatttaactggttacaaaagtatttcattaaaaagtataaaaaattttagaaagttaaattcaatttgcgcaggacatccagaatttgaagctaatactggcatagaaacaacaacagggcctcttggtcaaggaatatccaatgctgttggctttgcgatagctgaaaaaattttaaaaaataaattaggaaaagatattattaatcataaagtatatgttttagcaggagatggttgtttgatggagggtataagtcacgaagcaatgagtctagcgggtcacttaaagttaaataatcttgtaatgttattcgacaataactctatatcaatcgatgggcctacaagtctagcagtatcagataattataaaaaaagatttgagagttatggatggaattatttattaattgatggtcataatgaaaaagaaatttttaaagctttgaaaaaagttaatctgtcaaaaaaacctactgtaatttcatgtaaaacaaaaatcggttatggatctccaaataaatctggaaaagcttcgtcgcatgggagcccattaggcgaaaatgaggtaagcttggtgagaaaaaaactaaattggaaatataaaaaatttgaaataccaaataatattttaaatcaatggagaacaattggaaataaaggttcaaaaatagagtctagttggaataaaatttataaaagaaaaaaaaatagaattaataaaatattaaaaaacaactttagtaagtcaattagatctgaaaaaatcaatgctataaaagaatttaaaagcgaagcatctagaaaatcttcagaattagttttaaatgctttaacaaaaaataaaaatactctagttgggggatcagctgatttagcaggttctaataatactaaaacaaaatatcaaaaaataattaaaccaaataattttttaggaaattatattcattatggtgtaagagagcatgccatgtgtggaataatgaatggcttggctcttcatagtaaattaattccttatggaggaacctttttaattttctctgactactgcaaaccatcaataaggttgtccgcaatgatgaagctaagagttatatatgtaatgactcatgattcaattggactaggtgaagatggtcccactcatcaaccaattgaacaattgtcaggcttaagggctataccaaatttaaatgttttaagacctgcagatagaactgagactattgaatgttgggaaatagcattgagaagctcagccacacctagcatcttatctttaacaagacaaaatcttaatcctataagaagcgaatattcaaaaattaataaatgttattttggagcttatgaaattttaagaactagtaataaaattaaattgactatacttgcaagtggttctgaa

SEQ ID NO: 231343 - DNA, 703 bp, Unknown
  Bacterial polypeptide expressing nucleotide sequence isolated from the Sargasso Sea
tttgcaatattcagaaccaataaatgctctcagatttttatctgctgatgctgttcaaaaagcaaattctggccatccaggcatgccaatgggcatggcagaaatagctactgctctatggagtaagcacttaaaacacaaccccctaaatccgacttggtttgatagagacagatttgtgctttccaatggtcatggctcaatgcttttgtacagtttgttgcatttgactggttataagctttcaattgaagacattaaagacttcagacagcttaaatcaaaaacaccaggtcaccctgagtacgatataaatattggtgttgaaacaacgactggtccactaggacaaggaattgcaaatgccgttggaatggcaatctcggaaaaaatgctagcagcacaatttaataaagatgatataaaacctattgaccactatacatatgtttttctgggcgatggttgtttaatggaaggcatttctcatgaagcatgctcatttgcaggaactcatgaacttggaaaattgatttgtttttatgaccaaaatggaatttctattgatggtgaaattgataactggtttacagatgattctgtcaagagatttgaaagctatggctggcaaacaatctgtgtagatggccataatgttgaagaaataagtgaggctatttctaaagcaaaagaagaacctaaa

SEQ ID NO: 231344 - DNA, 1237 bp, Unknown
  Bacterial polypeptide expressing nucleotide sequence isolated from the Sargasso Sea
ccaaaatgggtagatagagacagatttgttttgtctgcaggccatggctcaatgcttatatatgcgttgctataccttactggctattcggatatttctttagacgagattaaaaactttaggcaatttggatccaaaacagcaggccatcccgaatatggagagattgatggagtagaaacgactacgggcccgcttggccagggttttgcaaatgctgtagggatggcaatggctgagaggcagctgtccgctaaatttggcaaggagattgtggatcacaatacatactgtatcgtaggagacggatgtcttatggaaggtataagccatgaagcggcttctttggcagggcatcaaaggcttgggaaactcatagttctctttgatgacaatggaatatcaatagatggatcaaccgacttaacagtatctgacgaccatatagaacggtttaaggcgtatggctggcacacagcatcagctgatggccacgattttaacgctgtaaggtcggtaatttctcaagctaaggattcctcaaagccatcttttttagcgttcaaaacacagataggctttggctcaccaaataaaggtggaacagcagcttgccatggcgctccactcggcgcagatgaaatcgaactagtaagatcgactttaaattggtctgaagaaccgtttgtgatacctgaatcgattattgttgcttggagaaagttaggtgaaaaaggaggtaaagaggagaaggcatggcaggagcggttaaaacagttagaaaacggacaaaaacaaagttttaaaaacacttttaaggcagagctaaacagcaatgtcttaaatgctctacagaattataaaattgagctcgttaatgataaaccaaatattgctactagagtcgcttctcaaaaaacactagaagtgctcaccccggtgatgccatgcttgattgggggatcagcagatctctctggatcaaataatacaaaaactggtgatcatcagacatcaagcaaagacaaccctaccggcaactacgttcactacggagtcagagaacatgcaatggccgcggcaatgaatggcatgtcgcttcacgggggcgtaataccttacggaggtacttttttagtttttactgattattgcagaccatccatacgactttccgcactcatgaaactgagagtaatttatgtcatgacccacgactcgatcggactgggtgagg

SEQ ID NO: 231345 - DNA, 1990 bp, Unknown
  Bacterial polypeptide expressing nucleotide sequence isolated from the Sargasso Sea
attgcagcaatcagatcatattaacgtactaagatttttgtctgctgatgctgtacaaaaagctaattcaggtcatcctggtatgccaatgggtatggcagaaatagccaccgcactttggagtaaacacttaagacataatccaaaaaatccaacttggttcaatagagatagatttgtactttctaatgggcatggctcaatgcttttatacagcttactgcacctaactggttatgatctgtcaattaatgacatcaaggacttcagaaagctcaaatcaaaaacacctggacatcctgaatatgatattgatattggtattgaaacaacaaccggtccattaggacaaggaattgcaaatgcagtaggaatggcagttgcagaaaaaatcttagcagcagaatttaataaggatgatattaagcctattgatcatttcacttatgtttttcttggagatggctgtttgatggaaggaatttctcatgaagcttgttcatttgctggaactcataatcttggcaaattaatatgtttttatgatcaaaatggaatttctattgatggagagattgaacattggtttacagacgattctgtaaaaagatttgaaagttatggttggcaaacgatatgtgtagatggtcatgatattgaagacattgatggagcaatacataaagcaaaagaggaagtaaataaaccaacaatgatattttgtaaaacaactattggctatggttcgccaaataagtcaggtacagcagatgttcatggagcgcctcttggcgatgaagaattaaaagaaacaagagaagtgcttggttggaattacaaacccttcgaagttcctcaagaggtatacgatttctggaactttaaagaagaaggtgcatcattcaatgattcttggaataagattttaaaagattatgaaaaaaaatatccaaacgactcattagaacttcatagaagaattgatggacacttaccaaataattttcaggaaagctatgaaagttttttgaatgaatgcaactcaaataacttatctatggcaactaggaaagcatcaaaagcatgcctagacttttttgtaaaagagatgccagaacttatcggaggttctgctgacctaacaccctcgaataacactttttcatcatctagttcgacattttcaaatgaaaacgcatcaggaaatcacatcaattatggggtaagagagtttggaatgtccgcaattatgaatggaatggtccttcatggggcaattaaaccatatggtgctacatttttggtctttactgactacgcaagaaatgcggtaaggttatcagcgttaatgaagctaccaaacatatttgtctatactcatgattcagttgctttgggtgaggatggaccaactcaccaacctattgagcatatggtgactttaagatccactcctaatttaaataactggcgtccagctgatcttgtagagacagctgtttcatggaaaagtgctgttagctctcaaaagacgccaacttgtttgatttataccagacagggaacctcagcgataaagaggtctcctgaccaaatatctatgattgatatgggaggatatttattagaggaaagcgatgactttgatttaacaattgttgcatctggaagtgaagttcagttagctttagatgctgcaaaagagttgaagaatgattcaattaatgcaaatgttgtatcaatgccctgtctagatattttcttagaccaagataaagagtatcaaaataagatcattaatcctgaaaagcctgttttagtggttgaatgtgctcatcctaattcttggtacaggattttaaacagaaatgataaagtcataggtattgaaacatttggggagtccgcacctggcagtgagttactaaatcattttggatttaatactgataacgttatcaaaactgcaaaatcattaataaatgattaa

SEQ ID NO: 231346 - DNA, 937 bp, Unknown
  Bacterial polypeptide expressing nucleotide sequence isolated from the Sargasso Sea
atgttagagggtcaattacctgagaattgggactcagatctcccctcatattcgcctgatgataaagggttagccacaagaaagcactcacaaatatgtttgggtgctctaggtcctaacctacctgaattaattggcggatcagcagatttaactcattctaattacacagatataaaaggagaaactggatcattccagccacatagccctgaaaaaagatatttacattttggtgtacgagagcatgcaatggcagctgtgcttaatggaattgcctaccacaatagtggtcttattccttatggaggaaccttccttgttttcgccgattatatgagaggctcaatgaggctttcagcacttagtgaattaggagtaatctatgtcttaactcacgattcaattggtgtaggagaagatggcccaacacatcaacctattgaaactatcccctctcttcgtgccatgcctaacatgctagttttcaggcctggagatggcaatgagacgagtggagcttataagcttgctattcaaaaccgaaaaagaccttctgccctttgtttaagtagacaaggcatgccaaatcaagaaaatacttcgatcgacaaagtagctcttggaggatatgtagtttccgattgtgaaggaacaccggacttaatatttattggtactggaagcgaactgaatctttgcattgaagcaagtaaggaaatttcaagcttaggtaaaaaaataagagttgtttctatgccttgcgtagaactttttgaagagcaagaagaatcttataaagaaagtgttttacctagcagtgtgaaaaagagagttgtagtagaagctgcccattcatttggttggcataaatatacagggtttgatggaatttgtattactatggatagatttggtgcatcagcaccaggtggaa

SEQ ID NO: 231347 - DNA, 1480 bp, Unknown
  Bacterial polypeptide expressing nucleotide sequence isolated from the Sargasso Sea
cttagccatgaagcttctagtttggcaggacatttaggattatcaaaattaattgttttttttgacgacaattctatttctattgatggttcaactgaacttagtaattctgataatacaataaaaagatatgagtcgtatggatggaatactataagtatagatgggcataatcatgaagaaatttctagagctattattaaagcaaaaaaaaatgaaaaacctactatcatagcgtgtaaaacaaaaataggttttggttcccctaataaagaatctaaatcttcttctcatggctcccctctaggagaagatgaaattaaattaactagaaaaaacttagattggaattatgatagttttgaaattccagatgatatgctttcaaaatggagaagtttttccataaagaataaaacaattagacaaaattggatggataaaaatgcaaatataatttcttcaaaaaaatataaagattttttttcaaagaatttatcagatgaaataattgacaaattaaaaatatttaaaaataaacattttaaagaaaaaaccaactgcgcttcaagaaaagcaagtgaggcagcaatagaatttttttcatctgagctagaaaatttagtaggagggtctgctgatttaactggatctaataatactaagacgaaaaatatggcccatattagtaaaaatgattttaagggatcatatatctattatggaattagagagcacggcatggcagctataatgaatggtttggctttgcatggaggcttaagaccatatggtggtacttttttagtatttactgattattgtaggccttctattcgattggctgctttaatgaatttacctataatttatataatgactcatgattccataggtcttggtgaagatggtcctacacatcaacctgtggagcatttagcttcacttagagcaatacctaatttaacagttattagaccttcagatattattgaaactattgaagcttggcaatatgctctagaatcacaatctccctgtgtaattgtcttaactagacaaaatcttccaatgcttagaacaaataataatataaatatagttgaaagtggagcacatcctataattgattttgaaaattaccaaggaactattttagccactggatcagaagtagagatagcatgtgaaagttcaaaaattttatctagtgaaaatataaatattagggttatttcttttcctagttgggaaatttttgataaaaagagtaaaaaagaaaaaatggaaattttaggaaataaattactatttgccattgaagctggggcagtaaatggatgggaaaaatatgtttcaaatgaaaactttataggtatgaagtcttttggagctagcggtccatataaagaattatttgaacattttgaaataacttcaaaagcattgactaaactaattaaagaaagaataaaataaa

SEQ ID NO: 231348 - DNA, 1936 bp, Unknown
  Bacterial polypeptide expressing nucleotide sequence isolated from the Sargasso Sea
tttgaaaataaaacataaagatttagctaatgctgtaagatttctatcattagatgctgttgaagcagcgaattctggtcatcctggaatgccaatgggaatggctgatgttgctacagttttatttaaaaactttttacgatttaatcctaaagatcctagttggtttaatagagacaggttcgttctttctgctggtcatgggtctatgcttctttactcacttttatatttaactggttacaaaagtgtttctatagatgacattaaaaactttagaaaacttgattgtatttgtgccggacatcctgaatatcattctaattcagggatagagactacgactggaccattaggacaaggtatatcaaatgctgtgggttttgcgcttgctgaagaaatattaaaaaagaggttaggaaaaaaaaagatagatcataaaacttatgtcttagcaggtgatggatgccttatggaaggaataagccatgaagccttaagttttgcgggtcatataaaattaaaaaatttgatacttctttttgataataattcaatctcgattgatggccctactaatcttgctgtttctgataatacaaaaaaaagatttgagagttatggttggagctatttagaaatagacggtcataatgataaacaaatttttaccgcattaaaaaaagctcaaaattcaaaaaaaccatttgctatttcttgtaagactacaattggttatggctcaccaaataaaagtgggaaagcatcatcgcatggaagcccgctaggtaccgatgaggtaaagctagtaagaaaaaaattaaaatggaattatgagccttttaagatccctgaaaaaattttaagtgagtggagaaaaataggggaaagcgcctcttcaaaagcagaaaaaaataaatcatacgagcctgaattcaatatttttaacgatgagattacaagcgaaatagagcaagtaaaaaatgattatttaaaatcactagaaccaattgcaactaggaaatcctcagaaaaatttttagatatagtttcaaaactaccaaatttaatcggtggctcggctgatcttgcgggttcaaataatacaaaaacaaaaaatcataaaataattaagccaggaaattttgggggaaattatattcattatggagtaagagaacacgcaatgtgtggaattatgaatggaatctcattgcatagtaatcttattccatatggtggaacttttttaatatttagtgattattgcaagccttctatcagattggctgcaatgatgggccaaagggttatttatgttttaacccatgactcaattggtcttggagaagacggtccaacccatcaacctgttgaacagctcgcaatgttgagatctataccaaacttaaatgtatttagaccatccgataccattgaaacttttgaatgttggcagttggctttagaaagtaaaaataaaccaagtgttattgctctaacaagacaaaaaatagaacccgtaagaaaagaggtgatcactaacaatctttgctcaaaaggagcttatgaaattttaagaaatggagataatcttaaggtaacgctattagcgacaggctctgaaactgatcttgcaataaaagtaagtcataaattagccacagaaaatatctattcaaaagttatatcaatgccatgtcatgaaatatttgatagtcaaaaccacgactataaaaaagatattttgcaagaagatacgcttaaagtttctatagaagcatcggaaactagttattggaaaaaatatacaggaaccagtggattaaatttaggaatagataattttggtaagagcgcaccttataaagatatttataaacactttgaattagatgttgaaaatattgtacaaaaaataaagaaaagtttatga

SEQ ID NO: 231349 - DNA, 1709 bp, Unknown
  Bacterial polypeptide expressing nucleotide sequence isolated from the Sargasso Sea
caaaactccaggccatccagaatatgatattgaaagtggtattgaaacaacaacaggtccattaggtcaaggtatcgcaaatgcggttggaatggcaatttcagaaaaaattttagcagcagaatttaaccaagatgatttaaaacccattgatcatcatacatatgtctttttaggagatggttgtttaatggaaggcgtctcccatgaagcatgttcttttgctggaacacataaccttggaaaattgatttgtttttatgatcaaaatggaatttcaattgatggaaaaattgaaaattggtttactgatgactcagtaaaaagatttgaaagttatggctggcatacggtttgtgtagatggtcacgatattgaagaggtaaataaagcaattattcaggctaaagaaatatctaataaaccttcaatgattttttgtaaaaccactattggatttggctcaccaaataaggctggaacagctgatgtacatggcgcagcactaggtgatgatgaggttacaaaaactagagaagctttagattggaaatattcagaatttgagctaactgatgaaatatataatttttgggatgcaaaagatgtcggtgcgaatttaaattccgaatggaataatctaatgaaaacctatgaagaaaaatatcctgagaaatcaaaagagctgtctaggagaatcgaaggtaatgttccagagaatttcgagaaggaatttaaaaagtttcttaaggattgtgattcaaaaaactctccaatggcaacaagaaaagcttcaaaggcttgtttagatttttttgttaaagaaatgcctgaacttattggaggctcttcagatttaacaccatctaataacaccttttctgaatcaagctcaaccttctcaaataaaaatccttcaggaaatcatatcaactacggtgtaagagaatttggaatgtcagccataatgaatggaatggtactgcatggaggaataaagccatatggtgctacttttctagttttcactgactacgcaagaaatgcggttaggctctctgcacttatgggcttacctaatatttttgtatatacccatgattcagtagcattgggtgaagatggtccaactcatcagcctatagaacatatggtaactttaagatctacccctaatctaattagttggcgcccagccgacttagttgaaacagctgtcgcttggaaagatgctctaatatcaaaatcagttccaacttgtttaatatttagtagacagggaacctcagcaattaaaagaaatctagagcaaatcgctcatatcgaaaacggaggttatttattaaaatcatccgaagatccggatataacaatcattgcttcaggaagtgaggttcagctagctctagatgcagcaaaagaattagaaaatgattctataaaatcaaatatagtttctatgccctcattagataaatttcttgagatgccaaaggagtatcaaaaaacaattttaaattctgataaaccaatgttagtggttgaatgcagtcatccaaactcttggtataaaattttaaataggaatgacaaagtattaggcattgaaagttttggagagtcagcgccaggcagccaattaatggaacattttggatttacagttagcaatgtaattaaaatggctaaatcattattagatgattaat

SEQ ID NO: 231350 - DNA, 1288 bp, Unknown
  Bacterial polypeptide expressing nucleotide sequence isolated from the Sargasso Sea
acaaccccccataacccaaaaatggttcaatagagaccgttttgtattatcagctggtcatggctgtatgctgctatattctttgcttcatttgacaggatacaaatcagtttccatagaagatattcaagaatttagacaatggggatcaaaaactcctggacatccagaaacatttgaaactgaaggtgttgaagttacagctggtcctcttggagctggaatttcaaatgcagttggtttagcaatagcagaaactcacttagcagctaaatttaataagcctgattgcaatatcgtagatcactttacttatgtaataatgggtgacggttgtaatcaagaaggtattgcatcagaggcctgctcattagctggtcatcttaagcttggaaaattaattgcactatatgacgataatcaaattacgatagatgggcgaaccgacgtttctttcaccgaagatgttttaaaaagatatgaagcttatggctggcatgtacaacatgttgaagatgggaatcatgatgttagaggaataactgaagctatcgaaaaagcaaaattaattacagacaaaccttcaattataaaaattactacaaccataggttatggttctcccaataaatcagatactgctgggattcatggagcagctgtcggagaagaagaagctgtattaactagagagtttctcaattgggaatatcctccatttgaaatacctgatgaagtatatgctcattttagaaaagcaataaacaaaggagaaaacttagagaaagaatgggattctaaatttgaagaatatcaaaaaaaatatcccactgaaggagctgagttaaacagaatgctaaaaggccaattacctgagaattgggactcagatctcccttcttattcacctaatgataaagggttagccacaagaaagcattcacaaatatgcttaggtgctttaggacctaatctgcctgaattaattggtggatcagcagatttaactcactctaactatacagatatcaaaggagaaactggatcattccaggcccatagtcctgaaaaaagatatttacactttggtgtacgagaacatgcaatggcagctgtacttaatggaattgcctatcacaatagtggtcttattccttatggtggaaccttccttgttttcgcagattatatgagaggttccatgagactttcggcactcagcgaactaggagttatttatgtattaacccatgattcaattggcgtaggagaagacggcccaacacat

SEQ ID NO: 231351 - DNA, 1212 bp, Unknown
  Bacterial polypeptide expressing nucleotide sequence isolated from the Sargasso Sea
ctctctgcagattcggcacagaggttgttgaccatcacacgtattgtgttgtgggtgacggttgtcttatggaaggtattagtcacgaagcagcttcacttgcagggcatcaacgcctagaaaaactcataattcttttcgatgacaacggcatttcaatagacggctcaacaaatctaaccgtatccgacgaccatatagcacggttcgaagcgtatggatggcatacagcgaccgctgatggccacgatttcaactcgatcagaatggccatttctgatgccaaaaattcgcaacagccatcctttttagcgttcaaaactcaaataggttttggttcgcctaacaaaggtgggacggccgcctgccatggcgctcctctcggcgctgaagaagtcgaactagtgagatccactttaaactggtccgaagaaccatttataattcctgatccaattattaaatcatggagaaacctggggaaacgagggagtggagaacaaaaagcctggcaggagcgcttaaatagattagaaaaaaaacaaaggcaggcgtttgaggaggcactagaaggtacgtccagtagcgaggcccataacgctcttgagaggtataaagctgaactaattacggtcaaaccaaatatcgcaaccagagtcgcgtctcaaaaaacactggaggtccttaccccaatgaccccatggttaataggaggatcggcagacctaacggggtcaaacaatactaagaccaatgatcatgaaatattaagcgaggacactccagccggcaattacttgcattacggtgtaagagaacatgcaatggctgcagctatgaatggtatggctcttcacgggggtgttgtgccttacggtggcacttttttagttttcaccgattactgcagaccgtcaattcggctttccgctcttatgaaactgagagtggtttttgtgatgacacacgactctattgggctcggtgaggatggccccactcatcaaccagttgagcatctaagtgccctacgctccataccaaatttgaatgtgtatcgcccggcagatgctgtcgagacattagaatgctgggaacttgctcttcaaacaaatcaaacgccctcaattattgctctttcgcgccaaaacctacctcagatacgtcttgaacataaaccggaaaacctctgttcaaaggaggttacataat

SEQ ID NO: 231352 - DNA, 1111 bp, Unknown
  Bacterial polypeptide expressing nucleotide sequence isolated from the Sargasso Sea
tttgcagcatacagttcctactaacgcattaagatttctatccatcgatgctgttcaaaaagctaattctggtcatcctggcatgcctatggggatggcagaaatagcgacttctttatggggcaaacacttaaatcataacccactgaatcctcattggtttgatagagatagatttgttctttctaatggacacggctcgatgcttctttatagcttacttcatctaactggatatgatatatcaatagacgatcttagagattttaggaagttacattcaaaaactcctggacatccagaatacgacatagatattggaattgaaacaactacaggcccattaggtcagggcattgcaaatgctattggcatggcagtttcagaaaaaataatggcagccgaatttaatgaagatgatattaaaccaattaatcattatacatatgcttttttgggtgatggctgtcttatggaaggaatctcgcatgaggcatgttcatttgctggaactcataaacttggaaaactaatttgtttttacgaccaaaatggaatttcaattgatggagaaattgaaaattggtttacagatgactctgtaaaaaggtttgatagttatggttggcaaactatatgtgtagatggtcataatattgaagaaattgataaggccattgttgatgcaaaaaatgaaacaaataaaccaacaatgattttttgtaagacaataattggttttggttctccaaataagtcaggaacagctgatgttcacggagcagctttgggtgaggaagaagtattaaaaacccgagaagctctaaattgggatcatggtgcatttaaagttcctcaagaggcatatgatttttgggattcgactaaaaaaggctctgaattaaatttggattgggacaatttgattaaaacttatgacaaaaaatatcctgataaatcagcagaacttaaaagaagaattaaaggcgacttacctgatgattttgagaatagttttaaaaccttcttgtcagaatgtgattcaaataatacgccaatggcaacaagaaagtgctcaaaagcatgccttgatttttgtgtaaagattacc

SEQ ID NO: 231353 - DNA, 1538 bp, Unknown
  Bacterial polypeptide expressing nucleotide sequence isolated from the Sargasso Sea
tctaagatttaacccaaaaaaccccaattggataaacagggatagatttattttatcagccggacatggatcaatgttattatactcccttttgtatttaactggctacaaaaacatctctcttaaagacattaaaaattttagacaacttgactctatatgtgcggggcatccggagtatcatccaaacactggaattgaaactacgaccggtcctttgggacaaggaatatctaatgctgtcggttttgctttagctgaagaaattttaaaaaataaagtaggaaaaaaaataattaatcataaaacttatgtattggctggtgatggttgtttaatggaaggaattagtcatgaagctttgagtcttgctggtcatttaaaattaaaaaatcttattttactatttgacaataattctatttctatagatggaccaactaatttagcagtatcagatgatcacaaaaagaggtttgatagttatggatgggattttttagaaataaatggccataatgaaaaagaaatatttaaagctttaaaaaaagcacaaaaatcaaaaaaaccaattgcaatctcctgtaaaacaataattggatacggatcaccaaataaaagtggcaaagcatcttcgcacggaagtcctctgggagaagaagaaattaaattagtcaaaaaaaaattaaaatggaaacatgaaccttttgagattccaaaacatatacttgaagggtggagatctatcggtgataaagcatcgaaaaaaaccgggaaagataaaaataatttcaccaataatttctcattaaaaaataatttaattaaaaagcaaattcattcagctatagaaaaaggtaaaatggattatttaaaatctttagagccaattgctacaagaaaatgctctgaaaaatttttagaaattgcatcaaaattaccaaacttaataggtggttctgccgatctcactggatcaaacaatacaaaaacaaaaaatcataaaataataaagccaggaaatttttcaggaaattatattcattacggtgtaagagagcatgcaatgtgcggtgtcatgaatggaatttcgttacacagcaacttaattccttatggtggaacttttttaatatttagtgactattgcaaaccatccatcagacttgccgcaatgatgaaacaaagagtaatatatgtttttactcatgactctattggtcttggagaagatgggccaacgcatcaaccaattgaacaattaactagtctaagatcaattccaaatttaaatgtatttaggcctgctgatatgattgaaacttttgagtgttggcagatagctcttgaaaataaaaattctccaagtgtaattgccttaactagacaaaaaattaatcctgttagaagaaaaaaaagttcaaaaaatttatcttcattgggtgcttatgaaatcttaagaagcaataataaaataaaattaacaatattgtcctctggatctgaaacaagtttagcatgtgaaattagtcataaat

SEQ ID NO: 231354 - DNA, 1171 bp, Unknown
  Bacterial polypeptide expressing nucleotide sequence isolated from the Sargasso Sea
ttgtgctggacacccagagtatcacccaaactcaggtattgaaacaacaactggtcctttgggtcaaggaattgcaaattctgtgggttttgcaattgcagaagaaatcttaaagaaaaaattaggaagtaatttaataaatcacaaaacctatgtcttggctggtgatgggtgccttatggaaggaataagtcacgaagcaatgagtctagccggtcaccttaaacttaataatcttataatgctttttgataataattctatttcaatagatggtcctactagtttagcagtctcagatgattataaaaacagatttaaaagctatggatggaattatattttaatcaatgggcataattacagagaaatttataatgcgttaaaaaaagcacaaacatcaaaaaaaccaactgtgatttcgtgtaaaacaaaaataggatttggatctccaaataaaggtggaaaggcctcctctcatggaagtcctctaggaatagatgaaattaagttagttagaaagaaattagattgggattataaaccatttaaaatacctcaaaaaattttaactgattggaggaaaattggagaaaagggtgttaaaaaggaaaaaatatggaataaaacttttagcaaacacaaactaaaatttaaaagtattataaaaaataagttctcgagttcaattataaaacaaaaaaaagatgcaattaaaaattttaagactatagctactagaaaatcctcagaagagtttttatcagctataataaaagagagaaatactttaattggtggatctgctgatttagcaggatcaaacaatacaaaaactaagttacataaaattattaattcaagtaactttgatggtaattatattcactatggtgttagggaacacgcaatgagtggaataatgaatggattagctcttcatagcaattttattccttatggaggtacctttttaatattttcagactattgcaaaccttcaataagactgtctgctataatgaaacagaaggtaatttatataatgacacatgactcaataggactaggagaagatgggcctacgcatcaaccaatagagcaacttgctgctttaagatctattccaaacttaaatgttttaaggccagcagattcaaaccgaaacaat

SEQ ID NO: 231355 - DNA, 1489 bp, Unknown
  Bacterial polypeptide expressing nucleotide sequence isolated from the Sargasso Sea
aatggaaggaataagtcatgaagcaatgagtttagcgggacatttgaagcttaaaaatttagtaatgctttttgataacaattcaatttcaattgacggtccaactgatcttgctgtttcagacaattttaaaaaaagatttgagggttatggttggaattatattttgataaatgggcataatgaaaaagaaatatttaaaacattaaaaaatgttcaaaaagcaaaaaaaccgactgttatttcttgtaagacaaaaattggatatggttcaccaaataaatcaggtaaagcgtcctcacatggaagtcctctaggtttagaggaaattgaacttgttagaaaagccctaaactggaataataaaccttttaatattccgaataaatttttgaaagagtggagaaaaattggtcaaagatgtgaaactcaagaaaaaaaatggattaagatatttaacaaaaacaaaacaaaatttaaaaatttaacaaaaaatagttcaataagtattttaaaaagagaaaaaagaaatgcaattctggagcctaaaaatttggctacaagaaaatgttctgagatgacacttaatgcattaacaaaacaaaatcataacttaattggtggctcagctgatttagctggatctaacaatacaaaaacaaaacatcaaaaaataattaagcctggagattttagtggagattatattcattacggagtaagagagcatggaatgagtggaataatgaatggtattgcactctatggaaatttaattccatatggtggaacttttttaattttttctgattattgtaaaccttcaattaggttatctgcgttaatgcaaaaaagagtgatatatgtaatgacgcatgactctataggattgggagaggatgggccaacccatcagccaattgaacagctctcaggtttgcgatcaattccaaatttaaatgtctttaggccagcagatagagttgaaacaattgaatgttgggaacatgctttaaaaagttcgaaaacaccaagtattttatctttaacaagacagggcctaaatcccataagaaaatcatttacaaatataaataaatgttctttgggagcctatgaagttttgagaaccaataataaaattaatttaacaatatttgcaagcggttccgaggttaatttggcaatcgaaactagtcataaattagccaaagataaaatatactgtaaggttatatcaatgccatctatggagcttttcgatcaacaatcaaaattatataaaaataaaattttaaacgaaactaaatttaaaatttcaatagaggctggatcaagcgattgttgggaaaaatatgtagggagttcaggtttaacatttggaatcaatgaatttggcaagagtgcaccctacaaagatatttttaaacactttggactaacagtttcaaatattgtcagtaaaaccaaaaaaatgataggaaattaa

SEQ ID NO: 231356 - DNA, 1918 bp, Unknown
  Bacterial polypeptide expressing nucleotide sequence isolated from the Sargasso Sea
tttgcagcatacagttcctactaacgcattaagatttctatccatcgatgctgttcaaaaagctaattctggtcatcctggcatgcctatggggatggcagaaatagcaacctcgttatggggcaaacacttaaatcataacccactgaatcctcattggtttgatagagatagatttgttctttctaatgggcacggttcgatgcttttgtatagcttacttcatctaactggatacgatatatcaatagacgatcttaaagattttaggaagttacattcaaaaactcctggacatcccgaatacgatatagatattggaattgaaacaaccacaggcccattaggccaaggtattgcaaacgctattggcatggcggtatcagaaaaaataatggcagccgaatttaatgaagatgatattaaaccaattgatcactatacatatgctttcttaggtgatggttgtcttatggaaggaatctcgcatgaggcatgttcatttgctggaacacacaaactaggaaaactaatttgtttttacgaccaaaatggaatttcaattgatggagaaattgaaaattggtttacagatgactctataaaaaggtttgatagttatggttggcaaactatatgtgtagatggccataatattgaagaaatcgataaagccatagtcgatgcaaaaaatgagacaaataaaccaacaatgattttttgcaagacaataattggttttggatctccaaataagtcaggaactgctgatgttcatggagcagcattgggagaggaagaagtaataaaaacccgagaagctcttaattgggatcatgatgcatttaaagttcctcaagaggcatatgatttttgggattcaaccaaaaaaggctctgcattaaatttggattgggataatttgattaaaacctacgacgaaaaatatcctgataaatcagcagaacttagaagaagaattaagggcgacttacctgatgattttgagaatagttttaaaacctttttgtcagaatgtgataaaaataatacgccaatggcaacaagaaagtgctcaaaagcatgccttgatttttttgtaaaagaattaccagaattaattggtggatctgctgatttaactccatcaaataatactttttcatcgtcaagttctactttctcaaatgaaaatccctcaggtaatcatattaactacggagtaagagagtttggaatgtctgcaattatgaatggcatggttcttcatggtggcataaaaccatatggtgcaactttcttggtatttactgactatgctagaaacgcagtaagattatcagccctaatggagataccaagtattttcgtatatacacatgattcagtagctctaggtgaagatggtccaacacatcagcctgtagaacatatggtaactctgagatctactccaaatttaaatagctggaggccggcagatcttgtagaaactgcggtagcttggaacgaggcagttaaatcaaaaaaaataccaacttgtttaatttttagcagacaaggaacttcagcaatatcacgtactgaagatcaattatctttaattaacaagggtggttaccttatcgatgaaagtgataactctgatattactctcattgcatcaggaagcgaagttcaattgattatagatgcagcaaaagaattaaaaagtcactctatctctgcaaatgttgtatcaatgccgtctttagatttatttttacagcaatctgaggaatttcagagttcaataattaatcctgataaaccaatactcgttgttgagtgtagtcatcctaattcttggtacaggattttaaatagaaaagataaagtaattggaatagaaagttttggagaatctgctccaggcagt

SEQ ID NO: 231357 - DNA, 1996 bp, Unknown
  Bacterial polypeptide expressing nucleotide sequence isolated from the Sargasso Sea
catgccttcccgtaaagtactcgccaacgcaatccgtgcgttaagtatggatgcagttcaaaaagcaaactcaggccaccctggcgccccaatgggcatggcagatattgcgcaagtgctgtggaatgatttccttaagcacaatccgaacaatccgaaatgggtagatagagatcgttttatcctctctaacggtcatggctctatgctgatctactctttattacacctcacgggctacgatctgccaatggatgagctgaagcaattccgccagttacattctaaaaccccaggtcacccagaatatggttacaccccaggtgttgaaaccaccacgggtccattaggtgcggggatcagcaacgctgtgggtatggcgattgcagaaaaaaccttagcggcacagtttaaccgtgaaggtcacgagattgttgaccactacacatactgcttcctcggcgatggctgcttgatggaaggtatttcccacgaagcgtgttctctggctggtaccttaggcctaggcaaactgatcgcattttgggatgacaacggcatctctatcgacggtcatgttgaaggctggtttaccgatgacacgccaaaacgtttcgaatcatacggctggcatgtgattgctaacgtagatggtcacgatagcgatgcgattcgcgcggctatcgaagcggctaaagcggtcaccgacaaaccaaccatgatctgctgcaaaaccattatcggttttggttcgccaaacaaatctggcagccacgattgccacggcgcgccattaggtgatgcggaaatcgccgcggcccgtgaattcttaggctggccacatgcgccattcgaaattcctgccgacgtatacgctggttgggatgctaaagaagtgggagcagcccgtgaagcggcatggaacgataagtttgccgcttacgcgaaagcttacccagaactggctgctgaatacgagcgccgtgtactgaaaggtgaattaccagccgatttcgaagccaaagcacaagcctttatccaagaatgccaagccaaaggcgaaggtattgcgagccgtaaagcgtcacaaaacgcgattgcagcctttggcgctatgctgcctgaactgttaggcggctcagcagacttagcgggttctaacctcaccttgtgggcaggttctaaagggattcaagacgatccagcgggtaactacgtgtactacggtgtgcgtgaattcggtatgagcggcatcatgaacggtgtgtctctgcacggtggtttcatcaactacggcgcgactttcatgatgttcatggaatacgcacgcaacgctgtacgtatgtctgcactgatgggaattcaaaacatcttcgtttacacccatgactctatcggtcaaggtgaagacggcccaactcaccaacccgttgagcaattagctaacctgcgtatgacgccaaacatggcggtatggcgcccatgtgacgcggctgaaaccgcagtagcgtggaaagcggctatcgaacgtcgccatgctccaacatcactgatcttcagccgtcaaaacctgaaggctcaagcacgtactgctgagcaattagccaatgtggcaaaaggcgcttacgtactgcaagactgcgcgggtacacctgagtacattctgatcgctactggtagtgaagtgcaattggcggtagaagctgctgcggccctgactgaacaaggcaaacaagttcgcgtggtatctatgccatcaaacactgagtttgataagcaagatgctgcttacaaagaatctgtactgccaaaagccgtaactaaacgtattgctatcgaagcggcccatactgacttctggtacaagtatgttggtttcgaaggcacagttgtgggcatgactacttttggtgagtctgcgccaggcaacgtgctgctgaagcacttcggtttcaccgttgaaaatgtgctgaacgctgcaaaatcactaggctaa

SEQ ID NO: 231358 - DNA, 1996 bp, Unknown
  Bacterial polypeptide expressing nucleotide sequence isolated from the Sargasso Sea
atgtcttcccgtaaagtactcgccaacgcaatccgtgcgttaagtatggatgcagttcaaaaagcaaactcaggccaccctggcgccccaatgggcatggcagatattgctgaagtgctgtggaatgatttccttaagcacaatccgaacaatccgaaatgggtagatagagatcgttttatcctctctaacggtcacggatctatgctgatctactctttattacacctgactggctacgacctgcctatcgatgaactgaagcaattccgtcagttacattcaaaaactccgggtcacccagaatacggctacacccctggtgttgaaaccaccactggcccattaggggcggggatcagcaacgctgtgggtatggctattgcagaaaaaaccttagcggcacagtttaaccgtgaaggtcacgatattgttgaccactacacttactgcttcctcggcgatggctgcttgatggaaggtatttcccacgaagcttgttctctggctggtaccttaggccttggcaaactgatcgcattttgggatgacaacggcatctctattgacggtcatgttgaaggctggtttaccgatgacacgccaaaacgtttcgaatcatacggctggcacgtgattgctaacgttgatggtcacgacagcgatgcgattcgcgcggctatcgaagcagcaaaagccgtgaccgacaagccaaccatgatctgctgcaaaaccattatcggttttggttcgccaaacaaatctggcagccacgattgccacggcgcgccattaggtgatgcagaaatcgccgcggcacgtgaattcttaggttggccacatgcgccattcgaaatccctgctgacgtatacgcaggttgggatgctaaagaagccggtaacgcccgtgaagcggcttggaacgacaagtttgccgcttacgctgctgcttacccagaactggctgccgaatacgagcgccgtgtgctgaaaggtgaattacctgccgatttcgaagctaaagcgcaagcatttatccaagaatgccaagcgaaaggcgaaggtattgcgagccgtaaagcgtcacaaaacgcgattgccgctttcggtgcggttctgcctgaattgttaggcggcagtgctgacttagcgggttctaacctgaccttgtgggcaggttctaaaggtattcaagaagatccagcgggtaactacgtgtactacggtgtgcgtgagtttggtatgagcggcatcatgaacggtgtgtcactccacggtggtttcatcaactacggcgcgacgttcatgatgtttatggaatacgcacgtaacgcagtacgtatgtctgcgctaatgggcattcaaaacatcttcgtttacacccatgactctattggtcaaggtgaagatggtccaactcaccaaccagttgagcaattagctaacctgcgtatgacgccaaacatggcggtatggcgcccatgtgacgcggctgaaaccgcagtggcatggaaagcggctatcgaacgtcgtcatgcaccaacatcactagtattcagccgtcaaaacctgaaggctcaagaacgtactgctgagcaattagcgaatgtggcaaaaggcgcttatgtactgcaagactgtgcgggtacacctgagtacatcctgattgcaaccggtagtgaagtgcaattagcggtagaagcggcagctgcgttgactgaacaaggcaaacaagttcgcgtggtttctatgccatcaaacactgagtttgataagcaagatgccgcttacaaagagtctgtactgccaaaagctgtgactaagcgtatcgctatcgaagcggcacatactgacttctggtacaagtatgttggtttcgaaggcactgttgttggcatgaccacttttggtgagtctgcgccaggcaacgtgctgctgaagcatttcggtttcaccgttgaaaatgtgctgaatgctgcaaaatcactaggctaat

SEQ ID NO: 231359 - DNA, 244 bp, Unknown
  Bacterial polypeptide expressing nucleotide sequence isolated from the Sargasso Sea
attgataaagaacgaaacagtaaacgctcttagatttttgtctgcagatagtgtagaaagggctcagtctggccatccaggcatgcctcttggcatggcagatattgcagaagttctttggagagatcactttaaccattcacccacaaattctaattggtttaatagagataggtttgttctatcaaatggccatggatcaatgctgctttatagccttttacatttaacgggctacaaacta

SEQ ID NO: 231360 - DNA, 766 bp, Unknown
  Bacterial polypeptide expressing nucleotide sequence isolated from the Sargasso Sea
atgttcgacaaggtaactaaatcagtaagagttttatcagcagcagctgtggaaaaagctaattcaggacatccaggcatgccccttggaatggcagatgttggtgttgctttgtataaaaattttttaaaagtatcaaatgaaaaacctgattggatcaacagagataggtttgttttaagcgcaggtcatggctctatgcttttgtatagtcttcttcatttaaatgggtttcctttaagtatggatgaaattaaaaattttagacaacttaactcaaaaactgctggacatcctgaagttgatacttctataggcattgatacaacaactggtccactaggtcagggttttgctaatggtgtagggtttgcagttgcagaaagatatttggcatctttattaggagaagatgttattaaccactttacatatggaattgtatctgatggagacttaatggaaggaatctcatttgaagctgcagaacttgcagcagtctggaagttaggaaaaataatttatttttttgatgataataatatctcaatagacggttccgttgacaaagtctctatcacaaatcaaaaagagaagtttgaatcaataggttggcatgttttagaaattgatggtcacaatgagaaagaaataattaaatcagttgaaaagggtagaaaagtagaagataagccaactttaattattgcaaaatctacaattggtaaatttgcccctaataaagaaaacacgagtggagtccatg

SEQ ID NO: 231361 - DNA, 2008 bp, Unknown
  Bacterial polypeptide expressing nucleotide sequence isolated from the Sargasso Sea
aatggtcgctgcatctgtttcattagaatcactttgtgtaaatagtataagaatgcttgctgtagatgcagtaaataaatctaatagtgggcatcctggattgccaatgggatgtgctcctatgggttatgcattatggcaaaacatacttaatcacaaccctaataacccaaaatggttcaatagagaccgttttgtattatctgctggtcatggttgtatgctgttatattccttgcttcatttgacaggatataaatcagtatccatagaagatattaaagaatttaggcagtggggatcaaaaactcctggacatccagaaacattcgaaactgaaggtgttgaagttacagcagggcctcttggagccgggatttcaaatgcagttggtttagcgatagctgaaaaacacttagcagctaaatttaataagcctgattgcaatatcgttgatcactatacttacgttattatgggtgatggctgtaatcaagaaggtattgcatcagaggcatgctcattagctggtcatcttaagcttggaaaattaattgcactctacgacgataatcaaattacaattgatgggcgaaccgacgtctcttttaccgaagacgtcttaaaaagatacgaagcttatggatggcatgtacaacatgttgaagatgggaatcatgatgttaaaggaatcactgaagctattgaaaaagcaaaattaattacagacaagccttcaattataaaaatttctacaactataggctatggttctccaaataaatcagatactgctggaattcatggagcagctgttggagaagaagaggccgcattaactagagagttcctaaattgggaatatcctccatttgaaatacccgatgaagtatatacgcattttagaaaatcaataaaaaaaggtgaaaatttagagagagaatgggattctaaatttgaagaatatcaaaaaaaatatccctctgaaggatccgagttaaagagaatgttagagggtcaattacctgagaattgggactcagatctcccctcttattctcctgatgataaagggttagccaccagaaagcattcacaaatatgtttgggtgctctaggtcctaaccttcctgaattaattggcggatctgcagatttaactcactctaactacacagatataaaaggagaaactggatcattccagccacatagccctgaaaaaagatatttacattttggagtacgagagcatgcaatggcagctgtacttaatggtattgcatatcacaatagtggtcttatcccttatggtggaaccttccttgttttcgccgattatatgaggggctcaatgaggctttcagcacttagcgaattaggagtaatctatgtcttaactcatgattcaattggtgtaggagaagatggcccaacacatcaacctattgaaactatcccttctcttcgcgcaatgcctaacatgctagttttcagacctggagatggcaatgagacgagtggagcttataagcttgctatccaaaatcgaaaaagaccttctgccctttgtttaagtagacaaggtatgccaaatcaagaaaatacttcgatcgaaaaagttgctctagggggatatgtagtgtccgattgtgaaggaacaccagatctaatatttattggtactggaagcgaactgaatctttgcattgaagcaagtaaggaaatttcaagcttaggtaaaaaaattagagttgtttctatgccttgtgtagaactttttgaagagcaagaagaatcttataaagaaagtgttttacctagtagtgtgaaaaagagagttgtagtagaagctgctcattcatttggttggcataaatatacaggttttgatggaatttgcattactatggacagatttggtgcatcagcaccaggtggagaatgtatgaaaaattttggatttacagtcgaaaacgtagttaataagacgaaagaaattctataa

SEQ ID NO: 231362 - DNA, 739 bp, Unknown
  Bacterial polypeptide expressing nucleotide sequence isolated from the Sargasso Sea
atgcttattgaaaaattacgaaaagaacatcctcaacattgggcaaattccacagccataagagttttaaccttagacgcggttgcggcagcaaattctgggcactctggaatgccaatgggtatggcagacgtagcgaccgttttgttctttaaccacttaaaatttgatcctaaagcgcctttatggaccgacagagacagactaattttatctgcaggtcatggctcaatgcttttatatagtctgctctatttaacagggtacgacgattttcctttagaagagataaaaaactttcgccagttaggagctaaaacggctggccacccagaaaactttttatccgatgcaatcgaaactacgactggtccgttaggtcaaggaattgctaattctgttggtttcgccatagccgaagaaattcaaagagcaaattttggtaaaagtatagtcgatcactatacatatgtatttgctggagacggttgtctaatggaaggtgtcagtcaggaagcaattaccatagctggaagacaaaaattatcaaaactaatagtgttctgggacaataacaatataacgattgatggcaaagttgaactatctgacaataccaaccaagttgaaagatttaggtcgtcggggtggcatgttttagaaattgatggccataacccagtcgaaattaatgaagctataattgaggctaaaaaaaatagcaaaccaacaatgatag

SEQ ID NO: 231363 - DNA, 601 bp, Unknown
  Bacterial polypeptide expressing nucleotide sequence isolated from the Sargasso Sea
atgccaactaactcagagctagctaattctatccgagccctttcaatgtatgccgtgcaggaggcagggtctggtcatccaggaatgcctatgggaatggcagatatagcctcggttctttggaaaaaacatctaaaacataatccaaagaatcctaattgggcagatagagacagatttgttttgtcaaatggacatggctctatgcttatctattctcttctttatctaacgggctatgatctatccattgacgatataaagaattttagacaattaggttcaaaaacgcccggtcatcctgagcatggaataacaccaggcgtagaaacaactaccggacccttaggacaagggctagcaaatgctgttggcatggctttatctgaaagaatgcttgctcaaagatttaatagagatgagttagaagtagtagatcacatgacttatgtctttgccggggatggttgcttaatggaaggcatttctcatgaagcttgttctttggcaggtactttaggcctgggcaaacttattgttatttatgacgataatgagatatcaatagatggaaaagtagaaggatggtttacagaagata

SEQ ID NO: 231364 - DNA, 2002 bp, Unknown
  Bacterial polypeptide expressing nucleotide sequence isolated from the Sargasso Sea
ttgagcaaaaaagataaacaaaatcctaacaatgaagtcagtctaaatgacatggctaatgctataagatttcttgcagctgacgcagtagaaaaagctaactgtggacatccaggaatgcctatgggcgccgccgattttacaactgttttatattctaaatttttaaaaattgatcctcaaaaacctgattggcctgatagagacagagtaatattatcagccgggcatggttcaatgctcttatatgctgttaatcatttagtcggtttttcagatatgaccatagaagaaattaaaaattttagacaacttggttcaaaaacacctggtcatcctgaatatggtcatacacttggagttgaaactactactggtccacttggtcaaggaatatcaactgctgttggcatggctattgctgaaaaaatacaaaatgcgaaatatggtgatgcaatagtagatcacaaaacttttgtaatagcatcagatggtgatttaatggaaggaattagccaggaagcaatcggtcttgctggtcatttaaagctttcaaaattaattgtattattcgatgataataatatttcaattgatggggccatagatctttcagattcaactgatcaacttatgcgttttgaggcctcaggatggaatgttaatagagttgatggacataatcatgatgaaattgaaacagcaatccaagaggccattaaatcagataagccatcattgattgcctgcaaaacaaaaataggatttggttcgccttccaaagaaggaaaatcatcatcacatggcgctccattaggcgcagaagatattgcacaaatgaaaaaaaaccttaattgggattatgaagaatttgaaattccatctgatattaaggatgcttggagacttgttggtttaaaaaattcttctaaaagacaagagtgggaagaaagattactagataataaagataaggaaatagagttcttaaaggatattgatggtcaaatttctgaagaacttgataaagaaataaatgagatcaaaaaagttttctctgaggaaaaacctggatgggcaacaagaaaatcttctcaggaagttttagaaacaattaacaaggttttacctaatacaattggcggttcagcagaccttacgggatcaaataataccaaaacaaataatattaacattattgatagcaataattttgcaggaagatttattcattatggaattagagagcatggtatggcagcagcaatgaatggaattgctcttcatagaggtttaataccttactcaggaacctttttagtattttctgattattgtcgtccttctattcgattagcagccttaatggatattaaggttatacatgtcatgacacatgattcaattggtcttggagaagacggcccaacacatcaacctgttgagcatttacctagcctaagagctataccaaatctaaatgtatttcgaccagcagatactactgaaactgcagagtgttggtctctagcgatcaaaagcaaaggtccaagtattattgcgcttagtagacagggctgccctcatttaagaaatacatacgaagaaaagaataagtcttcacttggtgcttatgaattaaaaagttcagatggagaaacccaagttaacttaattgcaactggttcagaagtttccttggctctcgaagtatatgaagaattaaaaaatgatggaattaattctcgagtggtttcagcgccttcttttgaactgtttaacaaacaagacaatgattatatcgacaaaactcttggacaaagtggtttaagagtaggtattgaggcttctactggtcttggttggcataattatcttggtgatcaaggtttatttattggaatgaatagctttggagcaagcgcaccagcagatcaattatataaaaactttggtattgataaagaaaatataattaataagattaaagagaaattataaa

SEQ ID NO: 231365 - DNA, 493 bp, Unknown
  Bacterial polypeptide expressing nucleotide sequence isolated from the Sargasso Sea
tttgaatcaaacagatcctataaacgctctaagattcttatcaatagatgctgtccaaaaagcaaactctggtcaccctggcatgcctatgggtatggcagagatagcaaccgcattatggagtaatcatttaaaacacaatccttctaatcccaaatggtttgatagagacagatttgttctatctaatgggcatgggtcaatgcttttatatagtttgcttcacttaacaggatataagatctcaatcgatgacatcaaagattttagacagttacattctaaaacccctggccatcctgagtatgatattgatatcggagttgaaactactactgggcctctaggccagggtattgcaaatgctgttggaatggcgatttcagaaaaaatattagcagcagaatttaatcaggacgatataaaaccaatcgatcattatacttatgtttttttaggagattggttgtttaatggagggcgtttctcatga

SEQ ID NO: 231366 - DNA, 1141 bp, Unknown
  Bacterial polypeptide expressing nucleotide sequence isolated from the Sargasso Sea
ttgaataaaattgataaagaattagcaaactctattagatttttatctattgatgctgttgaaaaggcgaattctggccatccgggcatgccaatgggcatggcggatgttgccacaatattatttaagaattttatgaagtttaatcctgaagatccaggatggattaatagagaccggttcgtgctgtctgctggtcatggatctatgttattatactctttgctatacttaactggatataaaaccatttcattaaatgacataaaaaattttagacaattaaattctatttgtgcaggacacccggagtatgtaaaaaactcaggggtagaaaccactacaggacctctaggccaaggtattgctaacgctgtaggttttgcaattgcagaagaaattttaaaaaaacaactaggtaaaaaaattataaaccataaaacatatgttttagctggtgatgggtgtttaatggagggaataagtcatgaagcactaagtttagccggacatctaaaactgaaaaatttaattttattatttgataataattcaatttcaatcgatggacctactagtcttgctacatccgataattttaaaaaaagatttaatagttatggttgggattttattgagattgatggacataaccaaaaacaaatttacaatgcattaaaaaaagtacaaaaatccaaagttccttcagtaatttcctgtaaaacaactataggatatggctcaccaaataaatcgggcaaagaaactgcacatggaagtccgctaggaaaagatgaaatagatttagtaagaaaaaaattaaaatggaattacaaacctttcgaaatacctaaacatattattcaggagtggagaagaattggaaaaaataactcaacaaattataaaggaaaaaaaatcaaatcatacacaaaaaaattattttctaatattattaaacaagaaaaaaaaaattacataaaatctaacgaagcaatcgctacaagaaaatcttcacaaataattctgaatgttttgacaaaaaaaattccaaaaattattgggtgggtctgcagatctctctggatcaaatacacaaagacaatcaaccataaaataaataagacctggaaattttgat

SEQ ID NO: 231367 - DNA, 916 bp, Unknown
  Bacterial polypeptide expressing nucleotide sequence isolated from the Sargasso Sea
aatgcttgattccgaattacgaaaaagctgtgtcaataccatccgttttctggcggcggatgcagtagaaaaagcaaaatctggtcaccctggtgctccgatgggaatggctgatatggcctttgtgctgtggaatcaatttcttcgctataatcctgatgatcccgactggaaaaatcgtgatcgttttgtcctctcggcaggtcatgcttcgatgctgctttattccctgcttcacctggcaggttacaagctgagcatggatgaactgaaaaacttcaggcaatggaacagcctcactccaggacatcccgaatatggcttaacccctggagtggaatgtactaccggtccgctaggctccgggttcagcaatgctgcaggcatggcgctcggagcaaaaatgatgggttcacgcttcaacagcagcgatatcagcctaatcgattccaggatttttgtcctttgcagtgatggcgatatgcaggaggggattgcttccgaaacggcttcctgggctgggcatctgggactcgggaatctgattgccctttacgacagtaacgatatcaccattgccggagatgcaggtttggcgatgagcgaggatgttggtaaacgatttgaggcttatgggtggcatgttcagcattgtgatggacacaatcactatgaaattgcagattgtcttgaagaatccctgtcggtagcgaacaagcccagtttgattgttgcaaaaaccgttatcggaaaaggagcaccaaccaaagagggaacggccggatctcacggagccccactcggttcagaagaaatcgaggcggccaaattggcttcgggatggaatgataagccagattttcatgtgcctgatgaagtacgagaagtttttgcagaaagaaaaaaagaactgaaa

SEQ ID NO: 231368 - DNA, 1792 bp, Unknown
  Bacterial polypeptide expressing nucleotide sequence isolated from the Sargasso Sea
tttgcaacaaaataactcaataaacgcccttagattcctatcagctgatgctgttcaaaaagcaaattctggacatccaggcatgccaatgggtatggctgagattgcaacagcgctttggagcaagcatttaaagcacaatccttcaaatccgcgttggtttaatagggatagatttgttttatcaaatggacatgggtcaatgttgttatatagtttgcttcacttaactggctacgatctatctattgatgatttgaaagattttagacagttaaaatcaaaaactccaggacatccagaatacgatattgatattggcgtcgaaaccacaacaggcccactagggcaaggcattgcaaatgcagttggtatggctatttcagagaaaatacttgccgctgaatttaatgaggaggacattaaaccaattgatcactatacatatgtttttcttggggatggctgtttgatggaaggagtttctcatgaggcctgctcatttgcaggcacacataatcttggaaaactaatatgtttttatgatcaaaacggaatttcaattgatggcgagatagaaaattggtttactgatgattcaattgaaagatttaacagttatggatggcacacaataagtgttgatggtcacaatgttgaagaaattgaaaaagctatagaagaggcaaagaaagaatctgataagccttctatgattttttgcaaaaccacaattggttttggttctccaaataaatcaggaacagctgatgttcatggagcgcctcttggagaagaagaaattaacaaaactagagaggccttgggatggacatatgagccatttgaattgcctgaggatgtttatgagttttggaatgcaactgaacagggctcatctttaaatctagattgggataatttgatttcttcttatgaagaaaaatatccagaaaagtcaaaagaattaaatagaagaattaatgcagatcttcctaagagttttgagaataattttgataaatttctatctgagtgtgacaaaaataatagtgcaatggctacaagaaaagcttcaaaagcttgtttagacttttttgtaaaagaaatgccagaattaataggaggttcagcagacttaacgccttccaataatactttttctgcatctagctcaactttttcaaacgaaaatccatcaggaaatcatataaattatggagttagagagtttggaatgtcagctatcatgaatggaatggttcttcatggtggcattaaaccatatggagctaccttccttgtattcacagattatgccagaaatgctgttaggctttctgcgcttatgggcttaccaaatatatttgtttacacccatgattcagttgcacttggtgaggatggtccaactcaccaaccaatagagcatatggtgactttgagatctactccaaatttaaataattggagaccggctgatttggttgagactgcagttgcatggaaagaggcggtaagttctaaatcaacaccaacatgcttaatatttagcagacaaggaacctctccaatatcaagaagtactgaacagatttctaatattcaaaaaggcggatatttgcttcaaacaaatccagatcctcatctaacaattgttgctacgggtagtgaagttcagcttgcaatagatgcagcaaacgaattaaaaacagactctataaaggcaaacgttgtatcaatgccttctttagatattttcatgcaacaaaaagaagatttcaaaatagca

SEQ ID NO: 231369 - DNA, 2056 bp, Unknown
  Bacterial polypeptide expressing nucleotide sequence isolated from the Sargasso Sea
gatgagtgatcccaccgcacattcccgggcgacgcccaaagccgtgccgcccccaagagacccacatcttcgcgcgctggcgaactgcattcgcttccttgcaatggatgccgtccagaaagccaacagcggtcatcctggtgcgccaatgggattggctgacgtcgcgacggtcctgttcaaggaattcatgcaattcgatgcatccgcgccccactggatcgatcgagaccggctggtgctttccaacggacacgcgtcgatgctcctctacagcctcctctacctgacgggttattccgacatgaccctggacgagatcaagcgcttccggcaagtcggcagcaagacgccgggccatccggagtactcgcacgccgagggaatcgaactgacgaccggccccctcggacaaggcctcgcggagtccgtcggaatggcgctggccgagcgcatcatgaatgcgcacttcggcgatgatcttgtcgatcactacacgtacgtatttctcggtgacggttgcctgatggaaggcatcagccacgaggccatctccttggccggccacctccggttgggcagactgattgcgttttgggacaacaattcgatttccatcgacggcgccaccagcctcgcggtctcggacaacgagatcgagcgctttcacgcggccggatggcgcgtcctggaaatcgacggtcacgacacggatgcgattcggcgcgctatcgaaaccgctcgaacaacgaatgacagaccgaccttgatcgcatgcaggacgatcatcgggttcggctttccgacgaaggccgggaccgagcgcgcgcatagcgacgcgccgggcgaggacgaaatcgcgggcgcacgacagaccctcgactggcattcgccgccgtttgaaatcccggatgacctgctgaaggcatggcgagagatcggggcgcgcggccgcaacacgagactcgcgtgggaagaacgcgtcggccgggcgccgcaggcgctgcgtaccgaattcgagcggcgcaatgcgggcaagcttccagatgactggaagcaggcaattgccgcggcacggcaggcgtttattgccagtcgtagtgaaatggccacccgcaaggccagcggcgaagtgctggatcgtctctttgacgcgattccggaattgctcggcggctcggcggatcttacggtgtccaacaatacgaagacgaagaatcaaatcgcgatcgagcctggccagttcaaaggttcgtatctccactacggcgtccgcgaacacggcatggccgctgcaatgaacggcattgcactgcatggcggcctgattccgtacggcggtaccttcctttgtttttcggactactgccgcccggcgatccggttgagcgcgatgatgcgggtgcgatccatctttgtgatgacgcacgattcgatcggcctcggagaagatggcccgacccatcagcccgtcgaacatctcgcggcacttcgggccattccgcagctcgccgtgtatcggccggccgatccaatcgaagcggcagagtgctgggaactgattctcgaacagccccgcagggctgcgctcctcgcattgtcgcgacagccggtcccgctcgtgcgcaacgagcccggcaacgacaacgagtcggcgcgtggcgcctacattttgcggaaggccgatggcggaccgcgccgactcacgctgctcgcgacaggctcggaggttcacctcgctgtccaggctcgcgacatcctgcagaaggaaggtgtgccgacgaccgttgtatcgatgccgtgccgcctgctcttcgaggagcagccacgcgattaccaggaggctgtgctgggcgcgtctcctgcgagagtcgcggtcgaggccgcggtcgaactgggatgggagcgatacatcggcccgaaaggccgatttgtcggcatgcacagcttcggcgagtccggaaaaatcaacgacgtgtacgagaaattcgacatcacggtagaggcgatcgttcgtgccgcgcgggacgtgctgcgagataacggcatgcactag

SEQ ID NO: 231370 - DNA, 1993 bp, Unknown
  Bacterial polypeptide expressing nucleotide sequence isolated from the Sargasso Sea
tatgaatattgaagaaaaatgtataaatgctctgagatttctttctattgatcaagtaaataaagcttcatctggacaccctggggcccctatgggagctgcagctatagcttatgttttgtttaataacataatgaatcataatccaaataatccaaatttcataaatagagataggtttattctttcaataggacatgcatcagctcttttatactctgttcttcacttatcgggatataagttctctgtagaagaccttaagaattttcgacaattaggttcaataactcctggtcatccagaaagagatatagatttaggaattgaagttactaccggaccactaggccaaggttttgcaaatggagttggtatggcaatttctgagaaaatgatgtctcaaaaatattctgacttaattaatcactatatttatggaatagtaggagatggagatttacaggaaggcatttcttcagaatcagcttctttggcaggaaccttaggcttgggaaaattaatttatatatatgattcaaatggtatatctattgatggaagtaatgacctcgcatttactgaaaatgttgctgaaagatttaagtcatataattggcatgtgattgaaaacattaatggaaatgatattaattctattcaaaatgcaatagaaatttctaaaaatgaattatctaaaccatcactaattatcgcagatacaacaataggttttggatcacctaataaagcaggtagtgaaagtgcacatggagaacctctaggagaagaagaaacaaatttaactagagataatctagggtgggattataaagagtttgaagtacctgaagatgtcgtaaaacatatgaatcagataattacaaaaggtaataacttagaaaaaaaatggaaaaaagatgctgaaaatttcaaagctgaaaatccagatcaatataataattttcttcagataatgaaaaatgaatttcctgaaaattgggatgaacaattattagagaatattaaaaattcaaatgaacctgaagccaccagagcttcatcaggttttgcaattaatttaatatccaactctttagataatcttataggaggttctgctgatttaacaggatcaactaatacactcataaaaaactctgaaaatttttctaaaagtacaccaaatggaaaaaatattaagtttggagttagagagcatgggatgggtggagtgatgaatgggatttcagcttatggatctcatcgagtttttggaggtacgtttttagttttttcagactatatgagagcatctataagacttagtgctttatcaaaattaaatagtatatggatatttacccatgattctataggcttaggagaagatggaccaactcatcaaccaatttctcaattaatgagcttgagatctatacctaacttaaatgtctttaggccagctgatagaagagaaactttacttgcttggagacatgcattaaatgaagtggataaaccttctgccttaattttttcaagacaatcattacctgatataagtacaatctcagattcaaaaatagattcagctaccttttcaaaaggagctttttcagtctatgataattctgatgatgacccagaaataattctaatttcaacaggttcagaactagccaacacaatagaagcagcaaaaaactttgataaaaataattcaatcagagtaatttcaatgccttgttgggaactttttgatcaacaggataataaatatcaaaaaaacttaattcctgaaaacactaaacatataatatcagttgaagctggggttggattaggttggcaaaaatatactagaagtaatgattctattatttcaatggaaacatttggggcatctgctcctggcaataagctaattgaccactttggtttttccactgataaaattaccgatagggtaaaaaaaataataagtgaataa

SEQ ID NO: 231371 - DNA, 700 bp, Unknown
  Bacterial polypeptide expressing nucleotide sequence isolated from the Sargasso Sea
atggcaaatgctattagggtactaaccatagatgcagttgaagcggcgaattctggtcacccgggtatgccaatgggtatggcagacgttgcaactctacttttttcagaatttcttaagttcgatccgcaaaatcctaaatgggccgatcgggaccgcttcattttatctgcgggtcacggttcgatgctcatttacgcgctgctttatttaactggttattcagatatgtcattagacgaaattaaaaacttccggcaatttggatccaaaacagcaggtcacccggaatatggagaagtaaatggagtagagactaccacaggcccacttgggcagggtttcgcaaacgcagtcggaatggctatagcagagcgccaactctctgcaagattcggcatagaggttgttaaccatcacacatattgtgttgtgggtgacggttgtcttatggagggtattagtcacgaggcggcctcacttgcagggcatcaacgcctagaaaaactaataattcttttcgatgacaacggcatttcgatagacggctcaacaaatctaaccgtatccgatgatcatatagcacggttcgaagcgtatggatggcatacagcgaccgctgacggtcacgatttcgactcgatcaaaatggcaatttctgatgccaaaaattcgccaaagccatcttttatagcgtaaa

SEQ ID NO: 231372 - DNA, 751 bp, Unknown
  Bacterial polypeptide expressing nucleotide sequence isolated from the Sargasso Sea
tttgaaaaatatagaaaaaaatttatcaaatgctattcgttttttatcaatggatgcggttcaaaacgctaattctggtcacccaggtatgccaatgggtatggctgacgttgcaacaattttatttaaatattttctaaaatttaatccaaaaaatccaaattggcttaatagagatagatttattttatcagctggacacggatcaatgttgctttactcgcttttgtacttaactgggtataaaagtgtatcacttaacgacatcaagaaatttagacaactaaattcaatttgtgctggacacccagagtatcacccaaactcaggtattgaaacaacaactggtcctttaggtcaaggaattgcaaattctgtgggttttgcaattgcagaagaaattttaaaaaaaaaattaggaagtaatttaataaatcacaaaacctatgtcttggctggcgatgggtgccttatggaaggaataagtcatgaagcaatgagtctagccggtcaccttagacttaataatcttataatgctttttgataacaattctatttcaatagatggtcctactagtttagcagtctcagatgactataaaaacagatttaaaagttatggatggaattatattttgatcaatgggcataattacagagaaatttataatgcgttaaaaaaagcgcaaacatcaaaaaaaccaactgtgatttcgtgtaagacaaaaataggatttggatctccaaat

SEQ ID NO: 231373 - DNA, 421 bp, Unknown
  Bacterial polypeptide expressing nucleotide sequence isolated from the Sargasso Sea
ttgaataaacaaaacaaaattttagctaacgcagtacgttttctatcaatagatgctgttcagagggctaattctgggcatccaggtatgccaatgggaatggctgacgttgcaactattttattcaaatattttttaaaatttaatccaaataatcctagttggataaacagggatagatttgttttatctgctggacatggttcaatgctattatattcgctgctttatttaacgggctacaaaagtatatctttaaaaaatattaaaaattttagacaattaaattctatttgcgcaggtcatcctgaatacaaatcaaatagcggtatagaaactacaacagggccacttgggcaaggaatatcaaacgctgttggctttgcaattgcagaaaaaattttaaaaaaaaaaattggga

SEQ ID NO: 231374 - DNA, 1441 bp, Unknown
  Bacterial polypeptide expressing nucleotide sequence isolated from the Sargasso Sea
ttgaaagcaaataataaagatttatccaacgctatcaggtttttatccatggatgctgtgcaaaaagctaactctggacaccctggtatgccaatgggcatggcagatgtggcaacaatattgttcaaagactttctaaaatttaatccaaaaaatccaaattggcttaatagagataggtttgttttgtcagctggtcacggttctatgctgctttactctttattatacttaactggatacaaaagtgtttccttaaaagatataaaaaactttagacaattaaattcaatttgtgcaggacacccagaatacattcctaattcaggaatagagaccactactggacctttggggcaaggaatagcaaactcagtgggaatggcaattgcagaagaaattttgaaagaaaaaattggtaaaaatattataaatcacaaaacttatgttctagctggagatggctgtctaatggaaggtataagtcatgaggctttaagtctagctggtcatttaaaattaaaaaatttaatcatgttgtttgataataattctatatcaattgatggacctactagtcttgctgtatctgataattttaaaaaaagatttgaaagttataattgggattatattctaattgatggtcataacgaaaaacaaatatcaaaagcacttaaaaaagtacaaaaagcaaaaaaacctactgtgatatcttgcaaaactgttatcggctttggttcacctaataaatcaggaaaagaaacttctcatggaagtcctcttggtgaagatgagataaaattaataagaaaaaaattaaaatggagtcatgcgccttttgaggttccaaaaaaaatattggatgaatggagaaaaattggaagcagaggaattaaagaagcagaaaagtgggttaaaaaaaataaatataaaaaaattagcaacacttcttttttaaaagattttctaaaagaaaaacaaaatgtaattaataaacctgaggctattgctactagaaaatcatccgaaaaaataatcagtttcttaacaaaaaaaaatcctgttataataggaggttccgccgatctatcaggttcaaataataccaaaacaaaaaatcatcaaatagttaagcccggaaattttaaaggaaactatattcattatggagttagagaacatgcaatgtgtggtataatgaatggtttagcactacatagtgaattaattccatatggtggaacttttttaatctttagtgattattgtaaaccatcaataagattgtctgcaataatgaaacaaagagtaatttatgtaatgagtcatgactcaattggacttggagaagatggtccaactcatcaaccaattgaacaattagctggtctaagatctattccaaatttaaatgtttttagacctgcggatactgctg

SEQ ID NO: 231375 - DNA, 1527 bp, Unknown
  Bacterial polypeptide expressing nucleotide sequence isolated from the Sargasso Sea
attggaaaatcataagctagcaaatgcaattcgctttctctctattgatgctgtccaagcagcaaaatctggacatcctggcatgccaatgggtatggctgatatagcagtatctctctggaaaaataacttaaagcataacccttctaatcctaaatggattaatagagacaggtttgttctttcaaacggccatggttcgatgttgctttatagtcttttacatttaacaggatatgaccttaacattaatgatttaaaagattttaggaaacttaaatcaaaaacaccgggccaccccgagtatgatatcgatattggtgttgaaacaaccactggcccgcttggacaaggaattgggaatgctgttggaatggctctagccgaaaagaatcttgctgcaacatttaataaagaagatataaaaataatagatcattatacctatgcttttcttggtgatggttgcttaatggaaggtatctctcatgaagtttgttcattcgcaggtacacacaagcttggaaaacttatatgtttttatgatcaaaatggaatatctatagatggagaaattgatctatggtttacagataatacaaaacaaagatttgaaagctatggatggcaggtaattgagattgatggccacaacatagatgaagttaatgaagctactgaaaaggctcagcaggaaactgaaaaaccatcaatgatttgctgcaagacaaccattggatttggctcaccaaataaatcaggaaccgctggagtccacggaagtccattaggtgacgacgaaattgaaataacaaggaaagagcttaactgggagcatggcccttttaaagtacctgaagatatttatgatgcctggaatgcaaaagatgagggtgccaaaaaagaaaaagcctgggaagatcttctgaaaacttatagacaaaaatatccagaggaatccaatgaattggagagaagatttaattcagagatacctcatgaatttaatgaaagattcgatgactttttaagagattgtttgttacaagaagatccagttgcaaccagaaaagcatctcaaatttgtcttgatcatttttgtgctgacttacctgagctaattggtggttctgccgatttaacaggatctaataatactttttctaaacacaacactgaacttactcctgataatcctgatggatcacatatttactatggcgtaagagagtttggcatggttactatcatgaacggaatgagtctccatggcggtattaggccatatggaggaaccttcctagtttttatggattatgcaagaaatgcagtgcgcttatctgcaatgatgagtctgccaaatatatatgtctttactcatgattcaatcggcttaggtgaggatggcccaacacatcaacctatcgaacatttggttactctcagagcaacgccaaatttatacaattggaggccagctgatcttaaagaaacagcagtggcatggaaagagtcaattttatcaaa

SEQ ID NO: 231376 - DNA, 1284 bp, Unknown
  Bacterial polypeptide expressing nucleotide sequence isolated from the Sargasso Sea
tttgctcaattgtactcataaaatattatatcatattattgatatacttagtttaagtctatataggttattaaaagtgagagtaaattttaatcaattatcaaatgcggtaagatttttgtcaatcgatgctgtacaaaaagccaattctggccatcctggaatgccaatgggtatggcagatgttgcaactgttttatttaaataccacctgaggtttaatccaaaaaatcctaactggataaatagggatcgatttattttatcagcaggacatggttcgatgttgctttactctcttttgtatctttgtggttacaaaagtatttcaattgaggatataaaaaatttccgacaactaaattctatctgtgctggacatcccgagtacaaaaaaggttctggaattgagacgactactggacctttaggtcaagggttaggaaacgctgtaggtatggctgtagcagaagaaatattcagaaaaaaatttagctcttctgtcattaataacaaaacctatgtaattgcgagtgatggagatttaatggagggaattagtcatgaagcaatgagtctagctggccatctaaagttaaaaaatctaatagttttttttgataataataaaatttcaattgacggttcaacatcgcttagtgtttcagataattacaaaaaaagatttgagtcgtacggttggaacttcttagaggtaaacggtcacaatgaaaaacaaatttcaaaagcgatcacaaaagcatcaaaatcaaaaaaacctacaataatatcttgtaaaactataataggatttggatcacctaataaatctggtaaagcttcttctcacggctctcctttaggagatgaggaaatagctttagtaagaaaaaaactaaaatggaacaaccagccatttgaaatacctcaagaaatattagatgaatggagaaatataggtaacaagggtcagcaactagaaaatgaatggctcgaaacagtgaataaaaaaagtcctaaaattaaaagtgaacttaacggctccaatcagaaattggatttgagcgggttagaaaatataattcgtcaagaaaaagataaaaattttgaatctaaaccaagtttagctactcgacaatgctcaatggcagctatagaaaaaatttctgcttttcttcctggattaataggtggttctgcagatttaagtggttctaataatacaaaaacaaataattctaaaattataaactctaaaaattttaatggaaattatattcatta

SEQ ID NO: 231377 - DNA, 1471 bp, Unknown
  Bacterial polypeptide expressing nucleotide sequence isolated from the Sargasso Sea
gcaatgagtttagctggtcacttaaaattaaaaaatttggtgatgcttttcgataataataatatttcaatagatggtccaacaagtcttgctgtatcagacaattttaaaaaaagatttcaaagctatggatgggattacatattaattgatggtcacaatgaaaatcaaatttatagagctttaaaaaaagttcaaaatgcaaaaaagccaacagtaatttcttgtaaaacaaaaattggatatggttctccaaataaatctggtaagtcgtcttcacatggcagtcctttgggattagatgaaattaaattagtaagaaaagtacttaagtggaaatataaaccttttgagattccaaataagatattgaaagaatggagagctataggaagcaatggtcagttaaatgaaaaaaaatggaacaaattaattaaaaaacaaagtaaaaaattaaatctaatcaaaaataataataactttaaaaatattttaaattcagaaaagaaacttgcaattaaagaatctaaaagcttatcaacaagaaaatgttctgagttaactttaagcgcattaaccaattcaaataataatcttattggtggttctgcagatttagctggatctaataatacaaaaacaaaaaaacataaaattattacaccgggaaattttgatggagattatattcactatggtgtcagggaacatgcaatgagtgggattatgaatggaatcgcacttcatagtaattttattccttatggtggaacttttttaatattttctgattactgtaaaccatcgataagattgtcagctttaatgcaacaaagagttatttatgtaatgacacatgattcaattggcttaggtgaagatggaccgacacatcaaccaattgagcaattatctggtttaagatcaattccgaacctaaatgtatttagacctgcagacagaattgaaacaattgaatgctgggagcatgctttaaaaactactaagtctccaagtgtgttatctctaacaagacaaaatttagatccaatcagaaaaaaatattcctcaaataataaatgttcacttggtgcttatgaggtgcttagaacaaataagaaaattaaattaacaattttggcaagcggttcagaagtaaatcttgcaatcggggctagtcataaacttgctaaagataagatttactctaaagttatttcagtaccttgtatggagctttttgacaaacaaagtaaaacttataaaaataaaatactaaatgaaaccaaaaataaaatctctatagaagctggttcaagtgattgttggaaaaagtatgttggagaaaatggaaaaaattttggaattaatgaattcggtaaaagtgcaccatttaaagaaatatataaatattttgggctaacaaaagaaaatataactaacaaatcaaaaaatttaattaaaaattaat

SEQ ID NO: 231378 - DNA, 2008 bp, Unknown
  Bacterial polypeptide expressing nucleotide sequence isolated from the Sargasso Sea
ttggaaagaaataattctaatacaaatagcaaagttttagctaacgctatcagagcactttcaatagacgctgttcaagctgcaaattctggacacccaggaatgccaatgggtatggcagatatagctgaggtattatggagggattttctaaatcataaccctgctaatccttattggtttaatagggatagatttgtgctatcaaacggtcatggatcaatgcttttatatagtattttgcacttgtctggatataaactaggcatagaagatctaaaaaattttagacagttacattcaaaaactcctgggcatccagaacttgaccttgattgtggtattgaaaccactactgggcccctaggtcaaggtattgctaatgctattggaatggcaatatctgaaaaagttttatcaaatcaattcaatactaaagaacataaaattgttgatcactacacctatgtatttactggcgatggttgtcttatggaaggcatctcacacgaagtatgttctcttgcaggcaccttaaagcttaataagttaatcgttttttatgatgataatggcatatcgattgatgggagtgtagatggttggtttaccgataatacaccaatgaggtttaactcatatggttgggaagttatctcaaatgttgacggtcataatagagagcatatttcaaatgctatagaaaaagcaaagaaatgtgataagcctgttctaatttgttgtaaaactaaaataggttttggctcaccaaataaagaaggaaaagaaagttctcacggtgctccgttaggcgaagatgaagttaaaaaaacaaaagaaaatttaaattggcgttacccttcatttgaaattccaaatgatatttatgatgcgtggaatgctgagaattttggtaacgaacttgaaaaaaaatggaatgaaatttttcaaagttatgaaaaacaaaatcctgaaaaagcaaaagaatttttaagaagagttaataaagaagagccaggcggatttcaaaaattgagcaatgaaattgtcaaagaggttaacgataaatcagaaagtcttgcaacccgaaaatcttcacaaaatgctttaaatttatttgcaccgttatttccagaattaattgggggttcagcagatttatcagcctcaaatcttactcagcattcaaattcaaaagatattttaaataatcaagatggtaattatattaattatggggtgagagaatttggtatgtctgcaattatgaatggcattagtttgcatgggggctttattccatatggaggtaccttcctaacattttcagattattctaaaaatgctatcaggatgtcatgcctgatgaatttaaaaaatatttttgtttttacacatgactcaattggtttaggtgaagatggtccaactcatcaggccatagagcatattaactccttgagagaaattcctaaaaatacagttattaggccatgcgattcgttagaaacttctttagcttggaaacatgcgctttcaaaggatgttgggaccacttgtctaatactttcaagacaaacatgtgaatttattccaagaaatagtgagcaaattgctggcataagtagaggtggttacgtaatactagatgatagtaattttgaagttataattattgctacaggaagtgaaatgggaatagcgtacgaagcttcgaaaaaacttattgaagatggagtaaaaattagattagtatctatgccctcttctagtatttttgattctcaagacgaagaatataaaaattctgttataccaaaagattttcataaaatcgttactgttgaagcagggtcaccaaatttttggtttaaatacaccaaagcagttggcattccaattggtataaatacttttggcgagtctgctccagggaactctttattagaattttttggtttcacctcacaaaatattataaataatgtaaaaaagatacttggttgaa

SEQ ID NO: 231379 - DNA, 730 bp, Unknown
  Bacterial polypeptide expressing nucleotide sequence isolated from the Sargasso Sea
gatgagtcttcatggtggcattaggccatatggaggaaccttcctagtttttatggattatgcaagaaatgcggtgcgcttatctgcaatgatgagtctgccaaatatatatgtctttactcatgattcaatcggcttaggtgaggatggtccaacacatcaacccatcgaacatttggttactctcagagcaacgccaaacttatacaattggaggccagctgatcttaaagaaacagcagtagcatggaaagagtcaattttatcaaaatctccaagctgtcttatcctcagcagacaaggtcttccgcaggtcaaaatgagtgaggacaagattagtaatatctctaagggaggatatttagttcaaaaggacgaaaatgcagagttaaacattatatcctctggaagcgaactgcaattagccattcaagcagctaaagatcttgatcagtcgggtataaaggtaaatgtggtttcgatgccatgtttagatagatttcttgaggcagatttagaatatcaaaataaagtgatccaaaaagatttgccatccattgttgttgaggctgcccacccaaactcatggtatagaattttaggaagagatgatcttgtaattggtatgacaacatttggggagtctgcacctgcaaaaatgctctttgaggagttcggctttacagcagagaatattgtttcaaaggcaaaaaaacttttaaataaatga

SEQ ID NO: 231380 - DNA, 384 bp, Unknown
  Bacterial polypeptide expressing nucleotide sequence isolated from the Sargasso Sea
cttgagtaaactttataaagaattagcgaattgtatcagatttttatctatagatgctgtccaaaaagctaattctgggcatccaggtatgcctatgggaatggctgatgttgtaactgttctttttaaagatttcttaaactttaatcctaaaaatccagattggattaatagagatagatttgttctgtcagcaggacatggttctatgctactttactcgctcctctatctgacgggttataaaagtatttctttaaaagaaattaaaaaatttagacaactaaattcaatatgtgcaggtcaccccgaatatcatccaagtactggcattgagactacaacaggtcctttaggacagggaatttctaatgcagttggttt

SEQ ID NO: 231381 - DNA, 1915 bp, Unknown
  Bacterial polypeptide expressing nucleotide sequence isolated from the Sargasso Sea
atgtttgacgatgtaacaaaatctataagagttctttctgctgctgctgttgaaagagcaaactctggacatcctggtatgccactaggtatggcggatattggagttgttttgtacaaaaactttttaaaagtatcaaataaacatccagactggatcaatcgggatagatttgttttaagcgcaggacacggttcaatgcttctatatagtcttttacactttaatggattcgatatatctctagatgaaataaaaaattttagacaattaggatcaaaaactgcaggacatccagaaaaagattttgagattggaattgatacaactacagggccactcggtcaaggatttgcaaatggcgtaggtttagcagtggctgagagatatctagcctctgtctttggagaggatgttgtggaccatcatatttacgggattgtttctgatggtgatttaatggagggtatttcaactgaagctgcagaattagctggattatggcagctcggaaaactaatttacttttttgatgacaacaacatttctattgacggaaatgttacgcaagtgtcagtaactaaccaaaaacaaaaatttatttcgatggggtgggatgtgctcgaaattgatgcacataatgaaaatgaaattattaacgcagttgaatctgcaaaaagtgttaccaataagccgacattgattatctctaaatcaacaatcggtaaatacgctccaaataaagaaaacacaagcggcgttcatggttctccactgggtgaaaatgaattcgagcttttcttaaagaatattgggttttcgggtgatccatttttgcacgattcggaaatttattcatattttgatgaaaaaagagcaaatgataattcaaaatatgatgaatggaaagctaacttagaatcgaaacttcaatctgacaagaattttaggcaattgtggaatcagtttaataattttgaaacctcagaggttgaacttgagtggtcaagcgatgaagcttcaagggttgtcggtggaaaaatattgaatgaatatggtttatccaacaaatttattattggtggatctgcagatttagctgcttcaacaaaacaaataataagtgatgatacttttggctcaaataattttggaggaaacagtattgaatttggaattagagaacatgcaatgggcggaattgttaacggtcttgcattacatagtaatttaatcccatatggatcaacttttttagttttctccgactatatgaggccaagcatgcgattagcatctttgatgaatgttaactcgttatttatattcactcacgattcaatatatctaggagaggatggaccaacacatcagcctattgaacatttaatgtcgctaagactgatacctaatcttgatgttatcaggccatcaaacagcatggagttaatacattcttatagatatgcattagaaaaaagggataatcccaaagcaataattttatcaagacagaacatgaagttttttgataatgacgttagctatgaggattttcaaacaggtgcttatgtatttatgcctggttcagacattactttaattgcaacaggttcagaacttgaacttgcgtttgaaataggtacgaaattaaaagatttatctgtccaaataattagcgctccaattttaaatagattaaatgaagagaggattgaatcattaagtcttaatcaaaatatttttacaattgagttgggaagaacaataggttgggatacatacattcagaacattaaaaaatcattctcaatagattcttttggtgaatcagccccgatcgatcaattagctgaaaaatttaactttgatgctgaaaaaatatctgatgaaataagaagtttattgaattaac

SEQ ID NO: 231382 - DNA, 1693 bp, Unknown
  Bacterial polypeptide expressing nucleotide sequence isolated from the Sargasso Sea
ttgtctaactctatacgtgttctttcgatggatgccgtacagaaagctaattctggtcacccaggtatgcctatggggatggctgatgtatctacgatactttttaaatattttttgaaatttaatccaaaaaatcctaggtggatgaatagagatagattcgttttatctgcaggtcacggatcaatgttgctttactcattactttatttaacaggttacaaaagtgttaaattgaaagatattaagaactttcgacaaattggttctatttgtgcaggtcatcctgagtatgttcaaaactctggtattgaaacaacaacaggtcctttaggtcagggaatttctaatgcagtaggttttgcattagcagaagaaattttaaaaaaaaaaattggaaatgatattataaatcataaaacttatgtaattgctggggatggctgtctaatggaaggcataagtcacgaagctatgagcttagctggtcatttaaaacttaaaaacttaataatgttatttgacaataattctatatctattgatggaccaacaagtttagcagtttcagataattttaaaaaaagatttgagagttatggatgggattacttagaaataaatggtcataatgaaaaacaaatatttaatgcccttaaaaaagttcaaaatgcaaaaaaacctacagttatttcttgtaagactaaaattggttatggatcacctaataaatctggaaaagcctcctcgcatggaagccctctaggtactgaagagattgaactggttcgaaaagaattaggttggaattataaaccatttgaaattcccaaaaatatattgaagacttggagagatattgggggtaagggagaaaaaattgaaaacaggtggaataaaatttataggaagaaaaaaagtaaaataaataaactttttaaaaatgatttcttaaagtctgcagtaaatgaaaaaaaaatagcattaaaagaagaaaaaagtcttgcttccagaaaatcctctgagtcaattattaactctcttgttaaaagtaataatacacttattggtggatcagcagatcttgctggatcaaataataccaaaacaaaaaatcatgaaataataaaaccgggaaattttaacggaaactatattcattatggagtaagagaacatgcgatgtgtggaataatgaatggattagctttacacagtaaattcataccttatggaggaacttttttaattttttcagattactgcaaaccatcaataagattagcagcaatgatgaaacaacaggttatatatgtaatgacacatgattccatagggcttggggaggatggaccaacacaccaacctattgaacaattatctggattaagagcaatacccaaccttaacgtttttagacctgcagatagaatagaaactattgaatgttgggaacatgctttaaagagcactaaaacaccaagtattctatcgttaacaagacaaaaccttaatcctattagaaataaatattcaaatactaacaagtcttcattgggagcatatgaagttttaagaacaaacaaaaaaataaaattgactattttggcaagtggttctgaggtaaacttggctatagaggtcagccataaattagccaaagataggatatactccaaagttatatcggtac

SEQ ID NO: 231383 - DNA, 892 bp, Unknown
  Bacterial polypeptide expressing nucleotide sequence isolated from the Sargasso Sea
ttgaacaaaaattataaagatttatccaatgcaataaggtttttgtccatggatgctgtgcaaaaagctaactctgggcaccctggcatgcctatgggaatggcagatgtagcaacggtgttgtttaaatattttcttaaatataatcctaaaaatccaaattggcttaatagagatagattcattttgtccgcaggacatggttctatgctgctttactctttattatatttgactggatataaaagtatttcattaaatagtattaaaaaatttagacaattaaacagtatttgtgctggccatcctgagtaccatccaggatcaggaattgaaacaacaactggtccacttggacagggaattgcaaactcagttggttttgcaatagctgaagaaattttaagaaaaaaaattggtaaagatataattaaccataaaacatatgttttggctggtgatggatgcttgatggaaggtattagccatgaagcaatgagtttagcaggtcatttaaaattaaaaaatcttataatgttatttgataataactcgatctcaatagatggaccaaccaatttagctgtttcagataattttaagaaacgatttgaaggttacgggtggaattatattttaattaatggacacaattatagcgaaatctttaaagcattaaaaaaagttcaaaattctaaaaaaccaacagttatttcttgtaaaaccaaaataggatatggatcacctaataaatctggcaaagcgtcttcacacggaagtccccttggtaaagatgaaatagaattagtaagaagaaaattatgttggatgtataaaccatttgaaatcccaaaaaatattttaaatgaatggaataaaataggtagtaaag

SEQ ID NO: 231384 - DNA, 775 bp, Unknown
  Bacterial polypeptide expressing nucleotide sequence isolated from the Sargasso Sea
attgatcaaaaacaggactgtaaatgcattaagatttctgtctgtagacagtgtggagaaggctgcttcaggacatccaggaatgccacttggcatggcagacatagcagaggttttatggcggaaacatcttaggcattccccaaagaatccaaaatggtttgatagagatagatttgttttatcaaatggacatggttctatgctcttatatagtcttttgcatcttactggctatgacttaactatcgaagatctcaaagattttagacaattaaaatctaaaactcctggtcacccagaatttggaatcactccaggtgttgaaactacaacagggcctcttgggcaaggaattgctaatgctgttggaatggctttagccgagaaaatcctagctaatctcctaaatagcaaaaaaacaaatgtgattgatcattttacttactgctttttaggtgatggatgccttatggaaggtatttcacatgaagctatgtcttttgctggcgttcatgagcttaataaattaatttgcttttatgattcaaatggaatttctatagatggtgaaataagtgattggtacaaagacgacatttcattaaggtgtaaggcatatggatggaatgttattaataatatagatggacataatagagaagaaattgatgaagcaatttctgttgcaaagaagtcaaaaaaaccaactatgattgtatgtaaaacacatattggttacggtgcaggcaacaaacaagattctgaatcctct

SEQ ID NO: 231385 - DNA, 1533 bp, Unknown
  Bacterial polypeptide expressing nucleotide sequence isolated from the Sargasso Sea
tatttgatcattttacgtatatttttgcaggagatggatgtttaatggaaggactgagtcatgaggcttctagtttagctggacatttaggattatcaaaattaattgttttttttgacgataattctatttccattgatggctcaactgaacttagtaattctgaaaatacaatgaaaagatatgagtcgtatggatgggatactataagtatagatgggcataatcatgtagaaatttctaaagctattgttcaagcaaaaaaaaatacaaaacctactattatagcttgtaaaacaaaaataggttttggttctcctaataaagagtctaaatcttcatctcatggttctcctctaggagaagatgaaattaaattaactagaaaaaacttagaatggaaatacgatagttttgaaattccagatgatatgctatcaaaatggagaagttttgctgaaaaaaacaaagcaattagacaaaattggattgagaaaaattcaaacacaatttcttcaaaaaaatataaagattttttctcaaaaaatttatcagatgaaataattgacaaattaaaggaatttaaaaataaacattttaaagaaaaaacaaattgtgcctcaagaaaagcaagtgaggcggcaatagaatttttttcatctgaaatagataatttagtaggaggatcagctgatttaacaggatctaataacaccaagacgaaaaatatgacccatattagtaaaaatgattttaagggatcatatatctattatggaatcagagaacacggtatggcagcgataatgaatggtttggctttacacggaggcttaaggccatatggcggaacttttctagtctttactgattattgtagaccttctattcgattagcagctttaatgaatttacctataatttatgtaatgacacatgattccataggtcttggtgaagatggacctacccatcaacctgtagagcatttagcttctcttagagcaatacctaatttaacagttattagaccttcagatatgattgaaactattgaagcttggcagtatgctctggaatcacaatctccctgtgtaattgttttaactagacaaaacctaccaatgcttagaactaacaataaaataaatatagttgaaaatggagcataccccattattgattttgaaaattatcaaggaactattctagccactggatcagaggtggaaatagcatgtgaaagttcaaaaattttatctagtgaaaatataaatattagagttatttcttttcctagttgggaaatatttgataaaaagagtaaaaaagaaaaaatggaaattttaggaaataaattactatttgccattgaagctggaagtgtaaatggatgggagaaatatgtttcaaatgaaaattttataggtatgaaatcttttggagctagcggtccatataaagaattatttgaacattttgaaataacctcaaaagcattagttaaactaattaaagaaagagtaaaataaa

SEQ ID NO: 231386 - DNA, 1993 bp, Unknown
  Bacterial polypeptide expressing nucleotide sequence isolated from the Sargasso Sea
atgcacaaagagcttgctaacgctataaggtttttatcaatcgatgccgttgaaacagccaaatccggtcatccaggaatgccaatgggcatggccgatatcgcagtggctttatggaaatataacttaaaacataatcctcaaaatccaacttggttcaatcgagataggtttgtactttcaaacggtcatggatcaatgctcttgtacagtttgctttacttaactggttatgatctttctatagaagacttaaaaaaatttagacaactaggctccaaaacgcctggtcacccagagcttgacatgtcgattggtgtagaaacgactactggcccattgggacagggaattgcaaatgcagttggaatggcgctagctgaaaaaatgttgtcaagtaggttcaacaaagatgacgagttaaaaccaatcgatcattttacttacacatttttaggtgacggttgcttgatggagggagtttcgcatgaagcttgttcatttgcaggaactcaccgcttaggaaaattaatttgtttttatgatcaaaatggaatatcaattgatggagaaataaccaattggtttactgatgacactcggcaaagatttgaaagttacaactggcaagtattggaggtagatggacataatattgagaaagtcttagaggcaattcaaacagcgaagaaagatgttgagcgtcctactttgatttgctgcaaaacaattattggtttcggatcgcccaacaaatcaggaacatcaggcgtccatggctctgctttgggtgaagatgaggtcaaaaagactcgagttgagcttggatgggatcacgaaccatttcatatacctgatgaaattaaatctgagtgggatggtaaagtcgcaggtgctgaactaaatgcatcctgggacaagctgatgaaagattattctgaaaagcatcctgagtcttttaaggaactgaaaagagtaatcaataatgagttaccaataaactttgaagatacctataaagattttatatatgaattatctgaaggtgataaaaaagatatagctactcgaaaggcatctgaactatgtttaaactatttttgtgaaaaacttccagaacttgttggaggatctgcagatttaactggctctaataatacattttcttctgtcagcactgaaatgcttcctgagagcccacagggaaatcacatattttatggagttagggagtttggcatgactgccatgacaaatggaatggtcttgcatggtggaataaaaccatacagcggaacgtttttagttttcatggattacgctagaaatgctgttagattagcagcacttatgaagataccaaatatctttgtatatactcatgactccattggtctaggagaagatggcccaacccaccaacctattgagcatcttgttacattaagagcaactccaaatttaaacaattggagacccgcagacattatagaaactgccgtaagttggaaagaagcaattagctctaaaagaacccctcatagtttaatattgtctagacaaaaccttccttttattgatagatcaaaagaacaaatagagttgattgagaaaggaggttatttgctatcttttgatgataaagctgatattacattgattagttcaggaagtgaggttaagttaattatcgaagcagctaaaataattgcaaaagaaggcttaaaagctaatgttgtctctatgccctgtcttgataaatttgtctcacaagataaagcctacagagatagtattatcgatcctgaaattccaaaactcgtagttgaggctctacatcctaattcttggcattgtctagtaaatctaaatgatattgtgattggcatggaaacatttggagaaagtgctccaggaaatgagttaatgaatgagtttggcttcacagtcgacaatattgtcagtcaagccaagaagctaactgcaaaatgag

SEQ ID NO: 231387 - DNA, 1390 bp, Unknown
  Bacterial polypeptide expressing nucleotide sequence isolated from the Sargasso Sea
aatggtcgctgcatctgtttcattagaatcactttgtgtaaatagtataagaatgcttgctgtagatgcagtaaataaatctaatagtggacatcctggattaccaatgggatgtgctcctatgggttatgcattatggcaaaacatactaaatcacaaccccaataacccaaaatggttcaatagagatcgtttcgtattatcagctggtcatggctgtatgctgttatattccttacttcatttgacagggtacaaatcagtttctatagaggatattaaagaatttaggcaatggggatcaaaaactccaggacatccagaaacattcgaaactgaaggtgttgaagttacagctggacctcttggagccggaatctcaaatgcagttggtttagcaatagctgaaactcacttatcagctaaattcaacaagcctgattgtaaaatcgttgatcactatacttacgtaataatgggtgacggctgtaatcaagaagggattgcatcagaggcctgctcattagctggtcatcttaagcttggaaaattaattgcactctatgacgataatcaaattacaattgatgggcgaaccgatgtttctttcactgaagatgtattaaaaagatatgaagcttatggatggcatgtacaacatgttgaagatggaaatcatgatgttaaaggaataactgaagctatcgaaaaagcaaaattaattacagacaagccttcaattataaaaatttctacaaccataggttatggttcgcccaataaatcagatactgctggaattcatggagcagctgttggagaagaagaagctgtattaactagagagtttctcaattgggaatatcctccatttgaaatacccaatgaagtatacgcacattttagaaaatcaatcaacaaaggggaaaacttagagaaagaatgggattataaatttgaagaatataaagaaaaatatccctcagaaggagcagagttaaccagaatgttaaaaggccaattacctgagaattgggactcagatctcccctcttatacacctagtgataaaggtttagcgaccagaaagcattcacaaatatgtttaggtgctttaggacctaacctacctgaattaattggcggatctgcagatttaactcactctaattacacagatatcaaaggagaaactggatcattccagccacatagccctgaaaaaagatatttacattttggtgtaagagaacatgcaatggcagctgtacttaatggtattgcttatcataatagtggtcttattccttatggaggaaccttccttgtattcgctgattatatgagaggctcaatgaggctttcagcactcagcgaattaggagtgatc

SEQ ID NO: 231388 - DNA, 796 bp, Unknown
  Bacterial polypeptide expressing nucleotide sequence isolated from the Sargasso Sea
cttgaacaaaaaaaataaaactttatctaacgcaataagattcctttcaatggatgctgtgcaaaaggccaattctggccaccctggcatgccaatgggaatgtcagatgtcgttactattttatttaaatattttctaaaatttaatccaaagaatccaggttggttaaatagagacagattcgttttgtctgctggacatggttcaatgcttttatattcattactatatctaactggctataaaagtatttccttaaaagatattaaaaattttagacaattgaattctatttgcgcaggtcatcctgagtatatacctaatactggaattgaaacaaccacaggacctctaggccaaggaatttcaaatgcggttggatttgctttagccgaagaaatgttaaaaaaaaaaataggaaaagatataattaatcataaaacttatgttgttgctggagatggttgtttgatggaaggtataagtcatgaagcaatgagtttagcgggtcatctaaaactaaaaaatttagtcatgctgtttgataataactcaatttctattgatggaccaactagtttaacagtttctgataatttcaaaaaaagatttgaaagttatggttgggattattttcttattaatggacacgatgaaaaagagatcataaagggattaaaaaaagttcaaaatgcaaaaaaacctacagtgatttcttgcagaacaaagattgggtatggatcaccaaacaaatcgggaaaagcttcctctcatggaagtcctcttgaaagaaga

SEQ ID NO: 231389 - DNA, 856 bp, Unknown
  Bacterial polypeptide expressing nucleotide sequence isolated from the Sargasso Sea
gttggataataaagacctagcaaacgcgataagattcctttcaattgatgctgtgcaagcagcaaaatctggacaccccggcatgccaatgggcatggctgatatagccgtatctctttggaaaaataatttaaagcataacccttcgaatcctaaatggattaatagagacaggtttgttctttcaaacggtcatggttcgatgttgctttatagccttttacatttaacaggatatgaccttaacatcaatgatttaaaagacttcagaaaacttaaatcaaaaacaccgggtcaccccgagtatgatatcgatattggagttgaaacaaccactggtccacttggacaaggaattgggaatgctgtaggaatggctcttgccgaaaagaatcttgcagcaacatttaacaaagaagacataaaaataatagaccattttacttatgcttttcttggcgacggctgtttaatggaaggtatttctcatgaggtttgctcttttgcaggaacacacaaacttggaaaactcatatgtttttatgatcaaaatggaatatctatagatggagaaattgatctatggtttactgacaatacaaaacaaaggtttgaaagctatggatggcatgtggttgaaattgatggccatgacatagatgaaattaataaagctactgaagaagccaagaaagaaactgaaagaccgtcattaatttgctgtaagacaactattggatttggctcgccaaataaatcaggaactgctggagttcatggaagtccattaggtgaggatgaaattgaaataaccaggaaagagcttaactgggagcatggcctttttgaaatacct

SEQ ID NO: 231390 - DNA, 1462 bp, Unknown
  Bacterial polypeptide expressing nucleotide sequence isolated from the Sargasso Sea
gatgataatggaatttcaattgatggagaaattgacggatggtttactgatgatacagcagcccgctttaagtcttatggttggcaggttatagacaaagtcgatgggcatgatgctgacgccatttcatcggcaatagataaggccataaaggatactaataatcccacactgatttgctgtaaaactcaaattggttttggatcaccaaataaagcggggaatgcaagcagtcatggttcaccattaggtgaagatgagattgaaaaaacaaaagaaaagcttggctggaagcatgaggcatttgagattcctcaggatataagagaaatgtgggacggctcaaaaaaaggagaaaagcttgaaaaatcatgggaagacttgtttgctaattattcaaggcattaccctgatctcgcagaggaatttaagagaagaataaacagaaatctaccagaaaattgggaagagatatcaaaaaatgcaattaatgaaatcaatcatcaagccatcgatttagcaacaagacagtcttctcatctgtctctcaataagttgggagattctttaccagagatgataggtggctctgcagatctcaccggatcaaatcttacgaagcatgatgcttcagtcgtaatagatgagactaactcggacggcaactacatatattatggtgttagagaatttggaatggcagcaattggtaatggaatgatattgcatggcggtgtaattccttattcaggaacatttctaacattttcagattattcacgaaatgccctcagaatggcagcacttatggagatacaaaatatttttgtattcacacatgactctattggtttgggtgaagatggtccaacacatcaaccaatagaacatgttagcagcttgagaatcatgcctaatatgaatgtttggagaccttgcgatgcagtcgaaacaataacatcatggtgtcatgccatagaaaatcaaagtggacccacaagcctgattctaacgcgtcaaaaacttaatcatcagctaagaactgaggaacaagttcaggcaataaagaaaggcggatacattttaaaagacagtaaaaatactccagagattattcttatagccactggttcggaagtatcagttgcgatggagtcagcaaagatgcttgaggccgacggaattgatgtcagggttgtttcaatgccatgcaacaatatatttaatcaacagccggaaagttacagatcagcagtactgccaaaatcagtaaaatctcgattagcaatagaggcgggcattacgaatttttggtggcaatatgttggatcggaaggtgatgtaatcggaatagacgaatttgggttgtcggctcctgcaaatgagttattcgaatattttggattcacagtaaagaacattacagagagagcgagattgctcattgaaaaaaacagttaat

SEQ ID NO: 231391 - DNA, 1330 bp, Unknown
  Bacterial polypeptide expressing nucleotide sequence isolated from the Sargasso Sea
gatgctgttgaagcagccaaatccggtcatccaggaatgccaatgggaatggctgatattgcggtagctttatggaaatacaacttaaaacataatcctcaaaatcccacttggttcaatcgagataggtttgtcctttcaaacggtcacgggtcaatgttgttatatagcctgctttatttaactggctatgaactttcaattgaagaattgaagaactttagacaattaggctctaaaacacctggtcatccagaatttgatatagatattggcgttgaaactactactggtccattaggccaaggcattggcaacgctgtgggaatggctttagcagaaaaaatgctagcaagcagattcaatcaagacaatgggctaaaaccaattgatcatttcacctatacatttttaggagacggttgtttgatggagggagtctcacatgaagcttgttcatttgcaggaacccatggtttaggaaaattaatatgtttttatgatcaaaatggaatttcaattgatggggagataactaattggttcacagataacacttcacaaagatttgaaagctatggatggcaagtacttgaggttgatgggcataatgttgaggaaactatagaagcaattcgaacggctcaaaaagatacagaacgtccaactttaatatgctgcaaaacaattattggctttggatcgcctaataaatcaggaacatctggtgttcacggcgctgcattaggagaggacgaagttaaaaaaactcgggacgagcttggatgggagcacgaaccatttcatataccagatgacattaagtcagagtgggatggcaaagatgagggggctgagctaaatgcatcatgggatcaattaatgatggagtattctaaaaagcacccaaagtcttttgatgaattgacaaggataatcaacaatgaacttccaaaaaactttgaaaacagttatagagattttataaatgaattatctgcaggtgatcaaaaagatctagctactcgcaaggcatctgagctatgtttaaattttttttgtgaaaaacttcccgaattaattggtgggtctgctgatttaactggctcaaacaatactttttcatcagtaagcactgaaatgctccctgataatccaaagggtaatcatatattttacggggttagagagtttgggatgactgccatgacaaatggaatggttttgcatggtggaataaaaccttatagcggaacttttttagtttttatggattacgccagaaacgctgtcaggcttgctgcactaatgaaaataccaaatatctttg

SEQ ID NO: 231392 - DNA, 1264 bp, Unknown
  Bacterial polypeptide expressing nucleotide sequence isolated from the Sargasso Sea
aatgactgaacaaaatttagatatgctaagcataaacactatcaaactgctatcagttgattctgtcgaaaaagctaaatcaggccaccctggcgctcccatgggggctgctcctatggcctatgttctctggaaagatttcctaaaacataaccccgaaaatccccaatggattaaccgagacagatttattttatctcctggtcatgcttcagctctcctatacagcttgctccatctaaccggctacaaagttagcctagaagacttaatggcattcagacaattgggaagtaaaaccccggggcatccagaatacggggtcactcctggagtggaagtaaccactgggcctttaggacaagggttcgcaaatggcgtcggtatggcgatagcagaaaccaaccttgcgaaagaatttaacactacggaacaccaaatcattgaccatttcacctacggtattgtatctgacggagatcttcaagaaggagtcgcatcagaagctgcatcaatagccggaacgcttaagctacataaactgatctacttgtatgacagcaataatatatctatagaaggtgatacagatttatcattcaccgaaaatgtatctgatagatttaaagcttatggttggcaagtcataggaccgatagatggatctgaccttaccgaaatacatgatgcaataaaactcgctcaaaatgaaacatccaagccaagtctagtaatttgtaaaacagtaataggaaatggtagccctaacaaatcaggaaccgcatcagcccacggggaacctcttggtactgatgaagtgatactgactaaacagtcattagactggaaactcgaagccccattttctgtaccagatttagtcaaggaacacctttcccaaatcggtgttcaaggcgccaatgatgaaatggattggaataataaaactcaatcatatatgcaacaacatccggacaaatatacaaaactaattagtcaaactgatggagatatccccgccgactgggatgcagaattatcaaatttatttaacagtgaatctgccaacatggctacccgagaagcatctggcattgtgatcaacaagatcgcaaagagtatcccaggacttttaggaggatcagcggatctagctccctccacaaaaaccaatttaaatgaattcgaagattatagttcagaaaatcgatccggcagaaacttccatttggagtccgtgaacatgctatgggttcaattgcta

SEQ ID NO: 231393 - DNA, 1051 bp, Unknown
  Bacterial polypeptide expressing nucleotide sequence isolated from the Sargasso Sea
aactataaaaagagattcaattcatatggatgggactacattgaaattgacggtcataatgaaaaaaaaatttttaatgcattaaaaaaggtccaaagagcaaaaaaaccaacagttatatcttgtattacaaaaattggatatgggtcacctaacaaatctggtagtgaaaaagcgcacggaagtccacttggagaaaatgaagttaaattggtaaggaaaaaattaaattggctgcacgaaccttttataattccaaaaaatataattcaggaatggagacggataggaagtgctggcaagataaaagaggataaatggagaaaaatttataataagaaaaaaaaacaaatagataaaattttctcgtctaatttttctggtatttttaaaaaggaaaaacaaaatgcaattaaaagctcagaaactttagcaaccagaaagtcatcagaaaaaatattgaccgcattaaacgagaaaaaaaatatgattattggtggttctgctgatcttgcaggatcgaataatacaaaaactaaaaaccataaaccaattagcaaaaataattttaaaggaaattatattcattacggggtacgggagcatgctatgtgcggtattatgaatggtctatctttacacagtaaattaattccttatggaggaacgtttttaatatttagtgactactgtaaacctgcaattagactctcagctcttatgaaactaaacgttgtttatgtaatgactcatgattctataggtcttggtgaagatgggccaactcaccaaccgatagaacaattaaccggattaagatcaattccaaatcttaatgtttttcgaccagctgatacaacagaaactattgagtgctgggagttagcattaaagaatttagatacacctagtgtacttgccttaagtagacaaaatttatctccaataaggaaagtttatgaaagtcaaaataaatgttctctgggtgcatacgagatatatagatcaaaagataaagttgatttaactatatttgctagtggttcggaag

SEQ ID NO: 231394 - DNA, 1208 bp, Unknown
  Bacterial polypeptide expressing nucleotide sequence isolated from the Sargasso Sea
ttctggagcagctgttggagaagaagaagctgcattaactagagagtttcttaattgggaatatcctccatttgaaataccagatgaagtatatgcgcattttagaaaatcaataaacaaaggcgaaaacttagagaaagaatgggattctaaatttgaagaatatcaaaaaaaatatccttctgaaggagccgagttaaacagaatgttaaaaggccaattacctgaaaattgggactcagatctcccttcttatacacctgatgataaaggattagccaccagaaagcattcacaaatatgtttaggtgcactaggtcctaacttgcctgaattaattggtggatccgcagatttaactcactctaactacacagacatcaaaggagaaaccgggtcatttcagcctcatagtcctgaaaaaagatatttacactttggtgtaagagagcatgcaatggcagctgtacttaatggcattgcctatcacaatagtggtcttattccttatggtggaacattccttgttttcgccgattatatgagaggttcaatgaggctttcagcactcagcgaattaggagtaatctatgtcttaactcacgattcaattggtgtaggagaagatggcccaacacatcaacctattgaaactatcccttcacttcgtgccatgcctaacatgctagttttcagacctggagatggaaatgaaacaagtggagcttataaacttgctattcaaaatagaaaaagaccttctgccctgtgtttaagtagacaaggtatgccaaatcaagaaaatacctcgatcgacaaagttgcccttggaggatatatagtttcggattgcgaaggtacgccagatctaatatttattggtactggaagcgaactaaatctttgcattgaagcaagtaaggaaatttcaagcttaggtaaaaaaattagagttgtttctatgccttgtgtagaacttttcgaagagcaagaagaatcttacaaagaaagtgttctacctagtagtgtgaaaaagagagttgtagttgaagctgcccattcatttggttggcataaatatacaggttttgatggaatttgtattactatggacagatttggtgcatcagcacctgggggagaatgtatgaaaaattttggatttaccgtcgaaaacgttgttaataagacgaaggaaattctataac

SEQ ID NO: 231395 - DNA, 1999 bp, Unknown
  Bacterial polypeptide expressing nucleotide sequence isolated from the Sargasso Sea
tatgcctaacaaaaaagatcagtctgcagttactcatgatgatttagctaacgcaataaggtttctttcaatcgatgcggtcgaaaaagcaaaaagtggtcacccaggtttaccaatgggtatggcagatgtagcaactgttctttttacgaagtttttaaaatacaatcctaatgttccaaggtggcatgatagagataggttcgtactatctgctggtcatggatcaatgcttttatactcactactctatctaaccggtcataaagatatgactattcaagagatcaagaaatttagacagcttggtagtaaatgtgcaggtcatccagagtatgggcacgctaaaggaatagaaacgacgactggcccacttggacaaggtatcggcaatgcagttggaatggcgttagcagaagaaatactaagaagccaatttggcgaaaaaattgtaaatcatttcacttacgttattgcaagtgatggagatctaatggaggggatttctcatgaagttgcatcttttgcaggacatctaaaactaaataaattaattgttttttttgacgataatggaatttcaatagatgggcctgttaaactagcaaactcagaaaatacggctgaaagatttaaagcctatggatggaatacaattaaaattaatggtcacaaacctaaagaaataatacagtcaattaagaaagctcaaaaatctaagaaacctacattaatttcttgtaaaactaaaattggttttggatctccaaacaaacaaggaaaatcatcagttcatggttcaccacttggtgaggatgaagtaaaacttactagaactaaactgaattggccacacaaaccatttacagttccaaaaaatatacttgaggagtggaaaaatcttagtaaaaaatcaatagatgcatataagtcttggaaattgaattatgagaaacttccaaaaagcaaaaaggctcactacataagaagaatcgaaggaaagcttccattaaaattaattcaaaactttaatcagtttaagaagaaatatattaagaaaccactcgatgttgccacacgacaagcatcagaaatggtaataaatacaatttcatcatcactacctgaattggttggaggctcagcagacttgacaggctctaacaataccaaaggtagtaaaatggaagttattaattctacaaattacaatggcaattatatttactatggaatacgagagcacggtatggcttccatcatgaatgggttgtcactccataaaggaattattccatttggtggaacctttttaatttttttagattattgtaaaccatctcttcgtcttgcagctttaatgaaacaaagagctatatatatattaacacatgactcaatcggtcttggtgaagatggcccaacgcatcaaccaattgaacagcttgcatcattaagagcaacgccaaatgtaaaagtctttagacctgctgatttaattgaaactgcggaagcatgggaattagcgctttcaaattcaaagggaccaagtgtaattgcgcttacaaggcaaaaacttccaatgataagaaaaaagtatcatgcaaaaaatattagtgctcaaggagcttacgaattaaaaagtaattcaaaaaaacctaatatttctattttcgcgtctggctctgaagtcgaaattgcactgcaattaatgactatgcttgaaaaaaagaaaaagttagtaagagtcgtttcagtaccgtgcatggaacagtttaaaatccaaagtaaaacgtatcaaaaaataattagaggaaactctgaaattaatgtctcgattgaggcgggaactaattttgggtggagccaagtatgccctgaaaatacaataaacatcggtatgaaagattttggagcaagtgctccttatcaaaagctctacgatttttatgggatcacggcaaaaaaaatattcaaattaataagtaagaaaatatag

SEQ ID NO: 231396 - DNA, 1159 bp, Unknown
  Bacterial polypeptide expressing nucleotide sequence isolated from the Sargasso Sea
ttggaaaatcataagctagcaaatgcaattcgctttctctctattgatgctgtgcaagcagcaaaatctggacatcctggcatgccaatgggcatggctgatattgccgtatctctttggaaaaataacttaaagcataatccttctaatcctaaatggattaacagagacaggtttgttctttcaaatggccatggttcgatgttgctttatagtcttttacatttaacaggatatgaccttaacatcaatgacttaaaagacttcagaaaacttaaatcaaaaacaccaggtcaccccgagtatgatatcgatatcggagttgaaacaactactggcccacttggacaaggaattgggaatgctgtaggaatggctcttgccgaaaagaatcttgcagcaacatttaacaaagaagatataaaaataatagaccattttacttatgcttttcttggcgacggctgtctaatggaaggtatttctcatgaggtttgctcttttgcaggaacacataaactcggaaaactcatatgtttttatgatcaaaatggaatatccatagatggagaaattgatctatggtttaccgataatacaaaacaaaggtttgaaagctatgggtggcatgtagttgaaattgatggccatgatatagatgaaattaataaagctactgaagaagctaagaaagaaacagaaagaccatcaatgatttgctgtaagacaactattggatttggctcgccaaataaatcaggaactgctggagttcacggaagtccattaggtgacgacgaaattgaaataaccaggaaagagcttaattgggagcatgccccttttgaaatacctgaagatatttacgatgcctggaatgcaaaagatgagggcgccaaaaaagaaaaagcctgggaagatcttctggaaacttataaacaaaaatatccagaggaatccaatgaattggagagaagatttaattcagagatgactcatgaatttaatgaaagattcgatgactttttaagagattgttcattacaagaagatccgatcgcaaccagaaaagcatctcaaatttgtcttgatcatttttgtgctgacttacctgagctaattggtggttctgccgaatttaacgaggatctatataata

SEQ ID NO: 231397 - DNA, 1391 bp, Unknown
  Bacterial polypeptide expressing nucleotide sequence isolated from the Sargasso Sea
catgatatcaaatccaatatcaaacgctgtgagatttttaagcgctgatgcagtgcaaaaagcaaaatccggacatccgggagctccgatgggtatggcggacatagcgaacgttttatggagaaaatatttaaagcataatcctctcaatcctaattggatgaatcgtgatagatttatactttcaaatggacacggttccatgcttttatactcattactacatttgacaggttataaaatatccatgaaggacataatgagttttagacagctgcactcgattactcctggtcacccagaatgtgatattacgccaggcgttgagacaactactggaccactgggacagggtttagcaaatggggtaggaatggccattgcagaaaaatctttagctgacgagttcaacaaacccggtttaaatatcattgatcatcgaacttttgtctttgcaggcgatggctgtcttatggaaggtatttctcatgaggcatgttcgcttgcaggaacactttctctcagcaagttaatagttttttatgatatgaataatatttcaattgatggagatacttctttggcttttacagaaaatgtttatacgagatttaaatcttatggctggaatgtaattaataatattgatggacataacatacagcaaattgataagtcaattaaggcagcaatgagagagaaaaataaacctacgcttctttgtatgaaaacaaaaattggttttgggtcaccgaacaaacaaggaacagcatcagttcatggcgctccgcttggcgatgaggaattgtctttggcaagacaaaatttaaaatggaattttaaaccttttgtgataccaaaagaaatttatgacaaatgggattgtaaaactaaaggctctagacttgaaaagaattggaaccaaatgttcaactcttataagaaaaaatatccaaaacaatttagcgaactacaaaggagaaaaaaatcacgtataaagagctccattcctaagatactaatgaattttaaggtagacaaggataagtcgatagcgacaagaaaatgttcacagatggtgttagaacgtataggagaacatgtacctgaacttattggaggctcggcagatttgaaagattcaaatcttgcatactggtctaaatctctaccatttatggctaaatcatatagtggaaaatatctgcattatggagttagagaatttgctatgtcggctatcagtaatggaatatctctgtatggaggtttcagaccttatgcaagtacatttttaattttctcggagtacgctaaaaatgggattagaatgtcatctataatgcatcaaccagtaatttatattttcactcatgattctattggtttag

SEQ ID NO: 231398 - DNA, 2026 bp, Unknown
  Bacterial polypeptide expressing nucleotide sequence isolated from the Sargasso Sea
tatgagaagctataaagatattgacacatttactgattgggaggcagaagagaaaaatcaatttgcattagcggtaaccaaaggattgattatggatatggtacgcaaagcgaattcagggcatagcgggggcccaatgtcatcagcggattatacgcaaatactattttcagaatacctaaattttgatcccaacgatccagattggtttaacagggacagattcgttctatctgctgggcatgaatcagcattgctttatgctcttttatatcaaataggctggcttgattcaaatgatattaacaattttcgccaacttcacagtagaacaccaggacaccctgaagtagaaattcctggagttgaggcaaccacggggccgttaggccaaggatttgcaatggctgttggtatggcgactgctgaatcaatattgcgtgcaaattttgaaaaatttaataatggatcagatgaaattattggccattttacctatgttgtttgtggagatggcgattttcaagaaccggttgttttgggggcaggttcaatggctgggcactggggtttatctagattgattgtctattacgattcaaataatgcgcaaatttctggaaaggtggatcgttcagattctacaaattattctcaagtttttgagggttttggttggcatgttcaggaaattgatggtcacgatcatgagaaaattagagaagcgattgaaaaagcgcaggtcgttgataggcccagtttaattattggtaataccattatggctaaaggcgctgcaaatgtggaaggtgaccatgaaacacatggcgccccattagacccagaagaaataaaagcaaccaaagaaaagcttggccttccgcaagaacagttttatctacccaatgaagtcgttgaacattttcaaagcagatttaaaacattaaccgattcatgtcaacaatggaaatctcaaattgattctgcaagccaagataacgattttgacgttgcctggaaatgtgtgcatcagaccacttatccagaattggaatacccaacttttgatgccgggacaaagcttgcaaccagaaaagcatttggggctacgttagataaatttgccgatcaaattcctaatctaattggtggatcagcggatctagagccctcaaattataccggaaattttgctacaaagtttggtgatttttccaaaactaatcgtactggtcgcaatttagcctttggagtaagagaatttccaatggcagcagcaatgaatggtattgcgctgcatggtggtttgatcccttttggtggcacttttttggtttttgcagattatgagcgcccagctctacgtttaggctctatccagaaatgccgggttatgcatgagtttactcacgattcattttgggtgggcgaagatggcccaactcaccaaccaattgaacacgctatggcactacgcgcaatcccaaaccttaatgtttatcgtcctgccgatgcaaaagaaactgcggtatgttttaaactagcgctagagtctcatgaaacgcccagtgcattattattaactaggcaaggggttcccgttttagaaccttcgatcgatgctactatagatggcgttactaaaggcgcatattcagtgtttgattgcgattccccagagttaatatttcttgcaacaggttctgaggtgagtcttgcaatggaagttgcacaacaaatgaacgataaaaagattagggttgttagcatgccatgttgggagctctttgagtctcaatcttccgattacaaacgttctttaatcccaacaagaggagcaatgaaaatatcttttgaagcaggggtgactttaggctgggagaggtatattggcagcaatggactagcaattggaattgatcattttggggcttcagctcctggggcagatctagctgaagaattcggatttacggcgccaaaagtagaagcgaaaatacgagagcatctaggttctttattatga

SEQ ID NO: 231399 - DNA, 1984 bp, Unknown
  Bacterial polypeptide expressing nucleotide sequence isolated from the Sargasso Sea
ttgtctaatgcgatcaggtttctttctattgatgcagttgaaagagcgaactctggtcatcctggaatgccaatgggcatggctgatgttgccactgttttatttagagattttcttaaatataatccaaaaaatccaaactggttaaatcgagatagatttgttctttcggcaggtcatggttcaatgctgctttattctttactgtaccttactggatataaaagtatttctttagacgatataaaaaattttagacaactaaactctatatgtgcaggacatcctgaatatcactcaggatctggaattgaaacgacaactggcccactaggtcaaggcatagcaaatgctgttggttttgcattagcagaagaaattttaaaaaataaagtaggaaaagaaattataaatcataagacttacgttttagcaggggatggatgtttaatggagggaattagtcatgaagcattaagttttgcaggtcatcttaaattaaaaaatcttattttgttgtttgataataattcaatatcaatagatggaccaactaatttagcagtatctgataatacaaaaaaaagatttgaaagctatggctgggattatctagatataaatggacatgatgaaaaacaaatttttaaagcacttagaaaagcacaaaaagcaaaaaaaccttttgccatttcatgtaaaacaacaattggttatggttctcctaataaaggtggaaaggcatcatctcatggaagtcctcttggagaggaagaaattaatttggttagaaaaaaactaaagtggagttataaacctttcgaaattccaaacgaaatcaaaaaagagtgggaaaaaattggcgaaaaagcatctgcaaatgcagaaaaagatgaagctaaatatcaaaaaaaaataaataaacttggttggttgggatggtcattaacaagaaattttaaaaataattatcctcctggttttaaaaatcataaggatcaaattaatcaatcaattgaaaaagtaatgaaaaactatttaaaaaacttgagtcctattgcaacaagaaaatcatctgaaatgtttttagaattaattacatctataccaaacttaattggaggatcagctgatttggctggttcgaataatactaaaactaaaaaacatgaaataattaaaccaggtaattttaaaggaaattatattcattacggagtaagagaacatgctatgtgcggtattatgaatggtttgtctttgcatagtggcttaataccttatggtggaacatttttaatctttagtgattattgcaaaccatcaattaggttagctgcgatgatgatgcaaagagtaatttatatttttacccatgactcgattggacttggagaagatggtccaactcatcaaccaattgagcaattagccagtttaagatcaatacctaatttaaatgtttttagacctgcagatacaattgaaacttttgagtgttggcaattagcacttgaaagtaataaatcgccaagtgtgattgctttgtctaggcaaaaaataaaccctgttagaaaagaatatagtaaaattaataagtgctctaaaggagcttacgaagttatgagaactggagataaaattaaactaatattattgtccagtggatctgaaactagtttagcttgtgaagttagccataaattagccacagaaaatatctattcaaaagttatatcaatgccatgtcaagaattatttgacaaacaagatgaaacttacaaaaaacaaattttatctgaagcagaacttttagtttctatagaagcatctgaaactgaattttggaaaaaatatacaggctctaatggaatgaattttggtattaatgattttggaagaagtgctccctacaaagatatttataatcactttggtttaaatgtagacaacattgtaaaagaaattaaaaaaaaaatatgaa

SEQ ID NO: 231400 - DNA, 1000 bp, Unknown
  Bacterial polypeptide expressing nucleotide sequence isolated from the Sargasso Sea
aatttagattggccctacgcgccatttgacattgataaggaaatatacgattcatggaatgcggtggaaaaaggaaccgcttttgagaaagaatgggatgatctgtgcaagaaattctcagaatcagagcctgataaatctgatttaatgcacagactaatagcgggtaaaatgcctgaaaattttgatgatgattttaacaagttcattgaggagctatcttcaaattctgactctttggcaactagaaagagctctcagatagttcttgaatttttgcaagcaaatttgcctgagctgataggtggatctgcagatttaagcggatcaaataataccaatactaaacattccattgatatcaattctaatgatgatggtaactatatttattacggtgtaagagaatttggaatgaatgcagtcatgaatggtatggctttgcatggaggattaattccatattcaggcacatttttagtatttatggattatggaagaaatgcggtcaggatggcagcgcttatgggtattagagtaatatttgtattttctcatgattctattgcgttaggagaagatgggcccacacaccaaccaattgaacatttaacaaccttacgttctactccaaatatgaccacatggaggccagcaaacttagctgaaacagcagttgcatggaaagaagctctttctaaaactaatggtcctagctcgattatcttatccagacaaaatttagcgccatttgcatcaaaagaattaaaacaattagagatgggaggttatttcgttacaaagaaaaatgatgccactgtcaatttaattgctacaggttcagaggttggcttagccattgaagtagaaaaattattaacagcagatggcataagctgtaacgttgcaagtgtgccctgtcttgaagctcttctcaacaacaaggatcaatacaatgaaattttctcttcgaacacaaccaatattgtcattgaatgtg

SEQ ID NO: 231401 - DNA, 1690 bp, Unknown
  Bacterial polypeptide expressing nucleotide sequence isolated from the Sargasso Sea
gctcggccaggggctcggcaatagcgtcggcatggcaatggcggcgcgctggtacgaaagccacttcaacaaaccggacgtgccgctgttcgattaccgcgtctatgcgctgtgcggcgacggcgacatgatggaaggcatctcgcacgaagcggcctcgctcgccggacatctgcaactgtcgaatctgatctggatctacgacagcaatcgcgtgacgattgaaggccacacggatctcgcgtatagcgacgacgtggaaagccgctttcgcggttacaactggcacacgcttcgggtgaacgacgcgaacgacgccgcggcgctggaggccgcgtttgtcgaagcgaaaagcatcacggaccggccgacgctgatcgtggtgcacagcattatcggctggggcgcgccgcataagcaggacacctccgccgcgcacggcgaagcgctcggcgtcgaagaagtggcgctgaccaagaagttttatggctggccggaagacaagtttttctacgtgccggacggcgtgcgtgaacgcttcgcagagggtatcggtgcgcgcggcaaggcggcgcgcgcagcatggcagacgaagctcgacgcatacagcacgaaatatccggacctgtcacgccagttcgcacaaatggaagcgcatgaattgcccgcgggctgggacagcgatatcccaaccttcgatgcggatccaaagggaatcgcgtcacgcgattcatccggcaaggtgctcaacgcgattgccgcgcgcgtgccgtggatgatcggcggtgcggccgatctcgcgccgtccaccaagaccaatctgaaattcgaaggcgcgggtagtttcgagcacgacaactatggcggctgcaatctgcacttcgggattcgcgaacacggcatgggcgcggcggtgaatggtctcgcgttgtcgaatttgcggccgttcggttcgaccttcctgattttcagcgactacatgaagccgccgattcgcctgtccgcgatcatggaggtgccgtccatctatgtgttcacgcacgattcgatcggcgtcggcgaagatggtccaacccatcagccgatcgagcaactggcgtcgctgcgtggggtgccggggctgaccgtattgcgcccgggcgacgcgaacgaagttgccgaggcatggcgcgtagccatgtcggatccacggcggccgtcgtgcattgtcgtgtcgcgccaggcgttgccgacgctggaccgcacgcgctatgcgccggccagcggcgtgcagaagggcgcgtatgtgcttgccgacgcgccggacgggcagaagcccgaggtgattctgctcgccacgggcagcgagttgtcgctctgcgtcgacgcctacgagaagctgaaaagcgaagggattgccgcgcgggtggtttcaatgccgtcgtgggatcttttcgagcgtcaggacgaggcatatcaggaggccgtgctgccgtccgacgtggacgcacgtgtggccgtcgagcaggcggcaacgctcggttgggatcgttatgtcgggcggctcggcgcgcaggtggtgatgcatacgttcggcgcgtccgcaccgctggccgacctgaagaagaagttcggcttcacgcccgagcacgtttatgacgccgcgaagcagcagattgcgcgggtgaagggcaaaagcggcaagcagtag

SEQ ID NO: 231402 - DNA, 2011 bp, Unknown
  Bacterial polypeptide expressing nucleotide sequence isolated from the Sargasso Sea
tatgctttcgaggcatgaactagcaaatgcaattcgtgcgttaagtatggatgcggtgcaacgcgcaaattcggggcaccctggtgcgcctatgggaatggctgatattgcagaggttctctggaacgactttttaaaacataacccaaataatccaaattgggataaccgtgatcggtttatcatgtcaaatggacatggttcaatgctggtgtacgcacttttacacctgactggctatgagttaagtattgaagaaattaaaaattttagacaattacattctaaaacgcctggccaccctgagtatggatatgctcctggtatagaaaccactacaggaccacttggccaaggacttgcaaacgctgttggtatggcactggcggaatctatattggctgcaaaatttaataaagaagggtttgatattgtcaatcatcatacctatgtcactgtcggtgatggttgtttaatggaaggcatttcccatgaggcaagctcacttgctggcacacttggattgggaaagttaataacaatatatgatagcaatcaaatatctatcgacggggatgtttcgggttggtttactgaagacattccaaatcgttttgaatcctatggctggcaagtgattcgagatattgatggacataatcctgatgaaatcaaagttgctatacaaagcgcaattaaaaatataaatcaacccagcataatttgttgcaacaccgtcattggctggggttcgcccaacaaagccggtaaagaatcatcccacggtgcgcctcttggagacgaagagatccaacttactcgtgaaaaaattggttggcaacatggaccatttgttattcccgacgaatattattctgcttgggatgcaaaatctcagggtaaaaaattagagagtgaatggcgagagaaaattactacttatgagaaaaaatatcctgaacttgccgccgaatataaacgaagaataaaaggacagttacccgataactgggataacattgttcaagaacacatagatttgactgtaaaaaaatccgaatcaatagcatcacgaaaggcatcacaaaattcgattgaagcatttgcaaaagttttgcctgaaatgattggaggctcagctgatcttactggctctaatctaacaaattggtctggatcggtcgtcatcgataataaaaataaaaacggtaactatatagcatacggtgttcgtgaatttgcaatggctgccgtaaacagtggaattgctctgcataaaggatttattccgtactctgggacctttttaatgttttcagaatacgcaagaaatgcgctacgtatgtctgccctaatgaaaatacagaatatttttgtgttcacacatgattctatcggtttaggtgaagatggtcctactcatcaggcggtagaacaggcatcaacgctacgcttaatgccaaatatgtcgttgtggagaccttgtgacgcagtagaatcaactattgcatggcagactgcaattgaacgtcggggagggccaacaagtttacttttctctagacagaatttaaaacatataaacagaacagaatctcaaataaaaaacataaagcgtggtgggtatacactaatagagggatctgatgatccagagcttataattatagcaactggttctgaagttgaaattgcagttgatgtagcaacggaactcaattcaaagaatagaaatatacgtgttatatcaatgccaagtactgatgttttcgataaacaagatgaacaatataaagaaactgttttacccttttcatgtcgtagtagagttgctattgaagccggggtaaccgattactggaaaaagtatgttggattagatgggctcgccttgggtgttgataattttggagaatccgcgccggcaaaaaatgtattcgaatattttggattaacgaaaaataatctaaaggaagtaattggtaattatctagtagagactaaaaaataa

SEQ ID NO: 231403 - DNA, 1219 bp, Unknown
  Bacterial polypeptide expressing nucleotide sequence isolated from the Sargasso Sea
tttgattaaaaataatagagatttatccaacgcattaaggtttctgtccatggatgcggttcaaaaagctaattctggacaccctggtatgcctatgggaatggcagatgttgctacagtattatttaaaaattttttgaaatttaacccaaaaaatcctaattggcttaatagagatagatttattctgtctgctggacatgggtctatgcttttatactcattactatatttgactggatataaaagtatttctttaaaaaatattaaaaactttcggcagctaaatagtatttgtgctggacatccagaataccatccttccactggtattgaaacaacaactgggccacttggacaaggcgttgcaaattcagtgggttttgcaattgctgaagaaattttaaaaaaaaaattaggtagagaaataattaatcataaaacttatgtcttagctggagatggttgtttaatggaaggaataagccacgaagcaatgagtttggcgggtcacttaaaattaaaaaatttaattatgttgtttgataataattcaatatctattgatggtccaactaacttagcggtttcagataattttaaaaaaagatttgaaagctatggttgggactatattttaattaatggtcataactataatgaaatttttaaagcactaaaaaaagttcaaagtgcaaaaaaaccaactgtaatttcttgtaaaacaaaaataggttacggttctccaaataaaatgggcaaagcttcttcgcatggaagtcctctaggaaaagaagaaattaatcttattagaaaaaaattaaactggaaatataaaccttttgaaattccaaatcatgttttaaatcaatggaaaaaaattggaaataaaggttcaatgcttaatacaaaatggaacaaagtatataaaaaaaataaaaataaaataaataagtcttttaagaataatttttctaaatcaataaaatctgaaaaacatagagctattaaagaattaaaaagtttggcaactagaaaatgttctgagctatttttaaattctattacttataaaaacaactgtttacttggaggttctgctgatcttactggatcaaataatacaaaaacaaaataccataatataattaaaccaggagattttagtggaaattatattcattatggtgtgagagaacatgcaatgtgggaatcatga

SEQ ID NO: 231404 - DNA, 1963 bp, Unknown
  Bacterial polypeptide expressing nucleotide sequence isolated from the Sargasso Sea
ttgataaagaacgaaacagtaaacgctcttagatttttatctgcagatagtgtagaaagggcaagctcgggccatccagggatgccactgggaatggcagacatcgcagaagttctttggcgagaacacttacatcattcaccaaccaattctaattggttcaatagagatagatttgtgctctcaaatggtcatggttccatgcttctttatagccttttacatttaacaggatataaattatcacttgatgatctaaaagattttagacaattgaagtctaaaactcctggccatccagaatatgggattactgatggcgtcgaaacaacaacaggaccactaggtcagggattagctaatgccataggaatggctctagctgaaaaaattctagcctcaaaaattaatacggataaattaaaaccgattgatcataaaacttattgttttataggagatggatgcttaatggaaggcatctcacatgaagtaatgtctttggctggtgttttagagctaaataaattgatttgcttctacgacagcaatggcatttccattgatggcgaaattaaagattggtataaggatgatattaggcttagatgtgaatcatatggctggaatgtaattggagaaatagatggccacaatagagaccaaataaatgaagccataatagcagctaaagaatcaaataaaccgacaatgatagtctgtaagacttctattggttacggagctggaagcaaacaagatagtgagtcttcacatggggcacctcttggagaagatgcactaaatgaattaagaaagaatctaaaatggagttatgaaccttttgaaatacccgaatcagtttacgaagattgggattttaaagagaagggtaaaattcttgagaataattggaaagaaatttgcgaagagcatgaaaaggaagactcagaaaaagcacatttattaaaaagattagcatctggagatcttccagaaggattttttcaggcttttaacaatcatattgtagatttacaggaaaatactgactctgtagcaactagaaagtgttctcaaatagtgctggaatttttgaaagagcaattacctgaattagttggaggttctgcagatctaagcggatcaaacaacacaataactaaattatctacggcaattaactcagatccgtctggtaactacatttactatggggtgagagagtttggaatgaatgcgattatgaatggaatgtcactccatggcggcataataccatttggtggaacattcctcgtttttatggactatggtagaaatgctgttcgtatgtctgcactaatgggtataagaacaatttatgtgttttcacatgattctgtagctcttggagaagatggtccaacacaccaaccaatagaacatttaaatacattaagatctacaccaaatatgcatacatggagacctgccactttagttgaaaccgctgtttcttggaaaaaagcattagaaaacaaaaatggacccacttctattatcttatccagacaaaaccttaataattttccagttgaaagtgttttagaggttgaaaaagggggttattttgttaaatattctgccgatgcaaaaattaatctaattgctacaggatctgaagttagcaccgcaatagaatcatcagagattttaaaagagaatggtttaaccactaatatagctagtgttccatgcttagaagaattagaaaagcatgaatcgatctataaaaaaatattttcacaagacagcattaatatcgttattgaatgttctcaccctaattcttggtataagcatactaaaaaggtgattggtatagatacttttggggagtctggtaagggcaatcagttgatggatcattttggctttactcctagtaaaattgctaagaagatttccgaattagtatgaa

SEQ ID NO: 231405 - DNA, 730 bp, Unknown
  Bacterial polypeptide expressing nucleotide sequence isolated from the Sargasso Sea
aaaaagtctagctacaagaaaatcctctgaattaacgctaagcactttaattaaaaatactaatactttaattgggggatctgctgatttagctggatctaataatacaaaaaccaagaaccacaatttaatcgaaccaggaaagttctttggaaactatattcattatggtgttagagaacatgctatgtgtggaataatgaacggtcttgcattacatagtaaaattattccatatggtggaactttcttaattttttctgactactgtaaaccttctattagattggctgcacttatgaagcaaagagttatttatattatgactcacgattcaattggattaggagaggatggtccaacacaccaaccaatagaacaattatcaggattaagagcaatacctaatttaaatgtattaagaccagccgatagaattgaaacaattgaatgttgggatctagctttaaaaaatttaaatacacctagcgttctatgcttaactaggcaaaatcttgatcctataaataaaaaatacttaaaaataaataaatgttcttttggagcatatgaagtattaagaacaaataagaaaatcaaattaactatacttgcaagtggatcagaagttaatttggcgatcaatatttgtcataaattagccaaagataaaatatattcaagaagttatatcaatgccctgccaagaaatattcgaaaaacaatctaa

SEQ ID NO: 231406 - DNA, 1417 bp, Unknown
  Bacterial polypeptide expressing nucleotide sequence isolated from the Sargasso Sea
catgccctctcgtcgtgaactcgccaatgcaatccgtgcattaagcatggatgccgttcaacaagctaaatctggtcacccaggtgccccaatggggatggctgatatcgcacaggtactatggggtgatttcttatcacacaaccctgcaaacccatcttgggctaaccgcgatcgctttgtgctttcaaatggtcacggctcgatgctgttgtactctcttcttcacctttcgggctacgaactgccaatagaagaattaaagaacttccgccaattgcattcaaaaacgccaggccatcctgagtacggttatgcgccaggtgttgaaacgaccactggcccactaggccaaggtatcagtaatgctgtgggcatggcgcttgccgagaaagtgctagcggcacaattcaacaaagatggtcacaatattgttgaccaccacacctacgcattcttaggcgacggctgcttgatggaaggtatctcacacgagacatgttcactagccggcacactaggccttggtaagcttatcgcgttttgggatgacaacggcatttcaattgatggcgaagtagaaggctggttcactgacgatacaccagcacgctttaagagctacggttgggaagtgatcgatggcgttgacggtcacgatgcagagcaagtaaaagccgctattgaaaaggcgcaagcgaacaccgcgcagcctacgcttatttgttgtaaaaccactattggcttcggctcgcctaataaagaaggtaccgagtcttgtcacggtgcaccactaggtgaagatgaaattgtagccactcgcgaaaagcttggctggagccatggcgcgttcgaaattccagacgatatttacgcgggttgggatgctaaagagaaaggttcaaacgcggagagcgcgtggaatgacgctttcgcagcatacgaagccgcttacccagagcttgcggcagagttcaaacgccgcgtaaatggcgagttgccagcagatttcagcgaaaaagcagatgcaattattgctgagcttcaagctaacccacaaaatattgcttcacgtaaagcgtcgcaaaatgcactaaacgcatttggtccactacttcctgagctattaggcggctctgctgaccttgctggttctaaccttactatttgggaaggcagcaaaggcgttgaagcgaacgatgcgtcaggtaactacatttattacggtgtacgtgagtttggtatgtctgccatgatgaatggtattgcccttcacggtggctttaaggcatacggtgcaaccttcctaatgttcatggaatatgcacgcaatgcggtacgtatggcagcgctaataaagcagcctgcaattttcgtttacaccccacgattcaattgtctagggaagacggcccaa

SEQ ID NO: 231407 - DNA, 1445 bp, Unknown
  Bacterial polypeptide expressing nucleotide sequence isolated from the Sargasso Sea
tatggtcaattttgcagattggtcaaaagtagaaaaagatcaatacaccatctctgtaatgaaaggcttggtcatggatgctactagacaggcaaatagcgggcaccctggcggcccaatgtcctgtgcagattttgcttatttattgtatcgttatcatttgacctttgatccaaaagatccagaatggttcgatagagaccggtttattctttcaggcggacatatgtcaatgctgcagtattcattattgttattcattggttggcttgatctcaatgatataaagaattttcggcagttacatagtaagaccccagggcatccagaggtagagatacctggtgtagaatgtacaactggccctcttggtcaaggttttgcaatgggggctggtatggctcaggcagaagcatatctacgtaatctatttgtttcaaccgaccaaaaagctagcagactgatcaatcattttacatatgtccttgctagtgatggtgaccttcaagagccagtagcactaggctctgcatctcttgcaggtcatttgggactctccaaactgatagtattctatgatgctaatgaagcacagatctctggcaatacaaatcgctcagactcaaccgactatgcaactgtatttgaaggatttaaatggcatgttcaacagatagatggccatgatcatgatcagctaaataatgcgatcttagatgcaaaaaaaagtgatagacctagtattattattggaaagaccattatggctaagggtacagccaatatggaaggagatcataacacccatggagctccattacctcaagatgaaatagatagaacaaaagataaacttggtttgccacctgataaattttattatcctaaagaagttaaagaatatttccaagaaaggtttcctgaacttgaggatacggcacaacaatggaagaaagatcgatcagaatttgatacaaatgataagataagacctttgttatctgtttgtttagataatgaattgccagacaccacttatccgagtttcactgttggtgaatcactggcaaccagaaaagcatttggtgctacactagatcaatttgcaaaagatcttccaaatcttattggaggctccgcagatcttgaaccatctaattatacgggtaattttgccaaaacatatctggactttagtaatgataatcagtcaggccgtaatatcccttttggagttcgggagtttcctatggctggaatgatgaatggtatggctctgcatggaggtattataccttttggaggtacttttttagtatttgctgactatgaacgtccagcacttcgtttaggagcaatacagaaagtaagggtcatacatgaatttacacacgactcgttttttgtaggagaggatggtcccactcaccaacccatgagcatac

SEQ ID NO: 231408 - DNA, 1195 bp, Unknown
  Bacterial polypeptide expressing nucleotide sequence isolated from the Sargasso Sea
atctttcgctggacatttgcgtctgggaaaacttatcgttctttttgacaataatggaatttcaattgacggatcaacacaacttactgtcaatgacaatcaactcatgcgttttgaagcttgtggttggggtgtttatgaatgtgatggacatgatcccgatgcaattgagcaagcaattaagcaggcaagggagacccagaacaaaccatcatttattgcctgcaaaacaaccataggttttggttctccaaataaagctgggactgccgcaactcatggggcaccgcttggtgaagaagaaattgctgctacacgtgaaagtcttaaatggccttatcctcctttcgaaatccctgagaaagttaaaagtgcctggattagaatcggcgcaatgcatactgaaaaagttgaagcatggaaagatcggttgaacgagtcagggcaaaaagatgaatttgaacgtgttatgtccgggacattgccacagaattgggaagataagcttaaggaatttaaacgattgcatacggaagagaaaacaaaaatggcatctcgtaaagcgagtcaggaaactttaaatgttctgaccaagtttattcctgaattggcaggcggttctgcagacctgactggatcaaatcttacaaaatctaaatcacaaaaaacaatagctccaggagaatttggagggagctatatccattatggggtgagggagcatggaatggctgcagccatgaatggcattgtgcttcatggaggtttcattccttatgggggtacttttttaatttttactgattattgcagaccttcaataagactttcggcccttatggagcagcgtgttatttatgttatgactcatgattcaatcggtttgggagaagacggtcccacccaccagcctgtggagcatctggcaagtttgagagccattcccaacttaaatgtctatagaccctgtgatattgttgaaacagcagaatgctgggccgcagcgcttgcaacaaaatcaacaccgtcggttatttcactttcacgtcaggggctaccctgtctgagaaaggatcatactgaacagaatttaagtgctaatgggggatatgttctgtctgatacagaatcacaaagggatattacattgctcgctactggttctgaggtatctttagccctagaagcaggggat

SEQ ID NO: 231409 - DNA, 1405 bp, Unknown
  Bacterial polypeptide expressing nucleotide sequence isolated from the Sargasso Sea
agacaacttcactcaaaaacagctggtcacccagagtatggaatcactccaggagttgaaactactactggacctctcggacaaggaatatcaaatgctgtaggaatggctatagctgagaaagttttagctactaaattcaatactaaaatacataaagttattgatcacatgacttatgtttttactggtgatgggtgtttgatggaaggaatctctcatgaggcctgttccttggcaggcactcttggactgggaaaattggttgttttttacgacgacaataatatttcgattgatggagaggttgatggatggtttaccgaggacattccagccagatttcaatcttatggttgggaggtaattcctaatgtaaatggtcatgatccagaagagataaatgcagctataaagaaagctaaaaacagtcaaaataagccaaccttaatttgttgtaaaacaataataggcaaaggttctccaaataaagaaggaacggcatcgacacacggaagtcctctgggagaggaagagattgctgaaatgagaaaagatcttggatgggataataagcctttcgatatccctgatagtgtttacgaagcttgggatgccaaagagcaaggcaattctcaagaagaagaatggaatcatttatttgatcaatatcaaaaagacaatgaagaattatcgtctgaattgagacgaataatgaatggagacttgccagaaggagttgaagaggccatttacggttttgttgatgatgttcaaaaagatttaccaaatttagcaaccagagcatcttctcaaagagtgcttaatgttttaggtccattaattcctgaattagttggtggatcagccgatttaacaggttcaaataatacgaattgggacggtacgattgagataaggtctgataattttgctggaaattatataaattatggcgtcagagaatttggtatgacaggtattatgaatggaatggttcttcatggaggcatcaggccttatggtggaacatttttaacctttttagactatgccagaaatgctgttcgcatggctgctttgatgaagattcagactatgcttgtatactcccatgattcaattggtgtgggagaagatgggcccacccatcagccagtagaacatttaacaagtctcagaactaccccaaatcttgaaacttggagaccttgtgatacttcagagacagcaatttcttggctcgcagctctagaaaattctgataaacccactgcgcttatattatcaaggcaaggcctacctaactttgaaagaacggcaaaacagattgattctatgaaaaagggcgcttatacgctgtatgagccaaacgaaaaacctgaattaatattaattgctactg

SEQ ID NO: 231410 - DNA, 1144 bp, Unknown
  Bacterial polypeptide expressing nucleotide sequence isolated from the Sargasso Sea
aatgtttgacgatgtaacaaaatctataagagttctttctgctgccgctgttgaaagagcaaactctgggcatcctggtatgccactaggtatggcggatattggagttgttttgtacaaaaactttttaaaagtatcaaataaacatccagactggatcaatcgggatagatttgtcttaagcgcaggacacggatcaatgcttctatatagtcttttacactttaatggattcgatatatctctagatgaaataaaaaattttagacaattaggatcaaaaactgcaggacatccagaaaaagattttgagattggaatagatacaactacgggaccacttggacaaggatttgcaaacggtgtaggtttagcagtggctgagagatatctagcctctgtctttggagaggatgttgtggaccatcatatttacgggattgtttctgatggtgatttaatggagggtatctcaactgaggccgcagaactagccggattatgggagctcggcaaactaatttacttttttgatgacaacaacatttctattgacggaaatgttacgcaagtgtcagtaactaaccaaaaacaaaaatttatttcgatgggatgggatgtgctcgaaattgatgcacataatgaaaatgaaattattgacgcagtcgaatctgcaaaaagtattaccaataagccgacattaattatctctaaatcaacaatcggtaaatacgctcctaataaagaaaacacaagtggagttcatggttcaccactaggtgaaaatgaattcgaactttttttaaagaatattgggttttcgggagatccatttattcataattcggaaatttattcatatttttatgaaaaaagagaaaacgataattcaaaatttgatgaatggaaagctaacttagaatcgaaacttcaatctgacaagaattttaggcaattgtggaagcagtttaataattttgaaacctcaccggttgaattggaatggtcaagcgatgaagcttcaagggttgtcggtggcaaaatattgaatgaatatggtttatctaacaaatttattattggtggatctgcagatttagctgcttcaacaaaacaaataataagtgataataccttcggctca

SEQ ID NO: 231411 - DNA, 1333 bp, Unknown
  Bacterial polypeptide expressing nucleotide sequence isolated from the Sargasso Sea
cattatacatatgtttttgctggagacggttgcttgatggaaggattaagtcatgaagcctgtagtttagcgggtcatttaaaattagataagctaatagttttctttgatgataactcaatttcaatagatggagaaatatcattaagcagtagtgatgatgtagaaagtcgattcaaatcatataattggaatgtatcaaatattaatggtcacgaccatacagaaattaatgaagctatacttagtgctaagaattctgataagccaaccattatttgttgcaaaactaaaataggatttggatcacctaataaagaagctagtgctgcttctcatgggtcacctttaggtaaagaagaggtggaacttactagaaaaaatttaaattggaattatgaagaattttttattcctgataatcttctatcagagtggagagactttgctaatagaaatgctgaagttaaaaaaaattgggaaaataaaaatgtagagtttctaaattctagcaaatacaataaattttttaatgaaaatttagactccaatattaaaactgaaataattaatttcaaaaaatcatacgcaaaagatgaaacaaaatatgcaacaagaaaagctagtgaaagttcacttgagctgtttaataatcatattgtaaacttgctaggaggatctgctgatttaacaggatctaataatactaaaacaaaaggaatggatatttttaatgctgaaaattataaaggaagttatgtctattacggaataagagagcatgctatggctggtgtaatgaatggtttagcattacatggtggaatcaaaccttatggtggaacatttctagttttttctgattactgtagaccatcaataagattatctgctttaatgaaactgcctgttatatatgttatgacacatgactctataggtcttggagaagatggtccaacacatcagcctgtagaacatttagctgctttaagagctattccaaatttaaatgtcataaggccgtgtgatattttggaaacaattgaagcgtgggaaatagctctagaaactaaaggaccaactattttagcattaactagacaaggtttgacaactaataaaagagattcctttgaagataatttggttaaaaaaggtgcttatatattaaaaaattactccaaatataatgcttcaatttttgcatcaggttctgaagttgaaattgcacttcaggcctcaataaaattacaagagataaatattaatctcagagttatatcttttccatcaatggaacttttcgaaatgcaaaatgaaaaatataaaa

SEQ ID NO: 231412 - DNA, 1390 bp, Unknown
  Bacterial polypeptide expressing nucleotide sequence isolated from the Sargasso Sea
ggaaggaatctcgcatgaggcatgttcatttgctggaacacacaaactaggaaaactaatttgtttttacgaccaaaatggaatttctattgatggagaaattaaaaattggtttacagatgattctataaaaaggtttgatagttatggttggcaaactatatgtgtagatggccataatattgaagaaatcgataaagccattgttgatgcaaaaaatgagacaaataaaccaacaatgattttttgtaagacaataattggttttggatctccaaataagtcaggaactgctgatgttcacggagcagctttgggagaggaagaagtaattaaaacccgagaagctctaaattgggatcatgatgcatttaaagttcctcaagaggcatatgatttttgggattcaaccaaaaaaggctctgaattaaatttggattgggataatttgattaaaacctacgacgaaaaatatcctgataaatcagcagaacttagaagaagaattaagggcgacttacctgatgattttgagaatagttttaaaaccttcttgtcagaatgtgataaaaataacacgccaatggcaacaagaaagtgctcaaaagcatgccttgatttttttgtaaaagaattaccagaattaattggcggatctgctgatttaactccatcaaataatactttttcatcatcaagttctactttttcaaatgaaaatccttcaggtaatcatattaactatggagtaagagagtttggaatgtctgcgattatgaatggcatggttcttcatggtggcataaaaccatatggcgcaactttcttggtatttactgactatgctagaaatgctgtaagattatcagccttaatggggataccaagtattttcgtatatacacatgattcagtagctctaggtgaagatgggccaacacatcagccagtagaacatatggtaactctgagatctactccaaatttaaatagctggaggccagcagatcttgtagaaactgcggtagcttggaacgaggcagttaaatcaaaaaaaactcccacctgtttaatctttagcagacaaggaacttcagcaatatcaaggactgaagatcaattatctttaattaacaagggtggctatcttatcgatgaaagtgacaactttgatattactctaattgcatcaggaagcgaagttcaattggttatagatgcagcaaaagaattaaaaaatcactctatctctgcaaatgttgtatcaatgccgtctttagatatatttttacagcaatctgaagaatttcagagttcaataattaatcccgataaaccaatacttgttgttgagtgcagtcatcctaattcttggtataggattttaaat

SEQ ID NO: 231413 - DNA, 912 bp, Unknown
  Bacterial polypeptide expressing nucleotide sequence isolated from the Sargasso Sea
tttgagtaaattttataaagaattagctaattgtattagatttctctcaattgatgctgttcaaaaagccaactcaggtcaccccggaatgccgatgggaatggcagatgttgctacagtactttttaaagattttttaaaatttaatccaaaaaatcctagctggattaatagagatagatttgttctctctgctgggcatggatcaatgttactttactctcttctttatttaactggttacaaaagtgtttctttaaatgatattaaaaattttagacaattggagtccatatgcgctggacatccagaatatcatccaaatactggtattgaaactactacaggtccattaggacaaggagtttcaaatgcagttggatttgcaatatcagaagaaattttaaaaaaacaattagggaaaaaaaggatcaatcataaaacttatgttctcgctggagacggatgcttaatggaaggtattagtcacgagtcattgagcttagctggacatctaaaattaaagaaccttattttattatttgataataattctatatcaatcgatggtcctactaacttagctgtttcggatgatcacgaaaaaaggtttaagagctacggatgggacttcttaagaattaatggtcatgattttaaagaaatatctaaagctttaaaaaaagcacagaaatcaaaaaaacctattgcaatttcatgtaaaacaacaatcggttacggatctccaaacaaaggtggtaaggcttcatctcatggaagtccattaggtgatgaggaaataaaactggttagaaaaagactaaaatggaaatatgaaccattcaagattccgactgaattattaaatgaatggagaaaaattggagaaaaagcctcacaaaaagctcagaa

SEQ ID NO: 231414 - DNA, 1876 bp, Unknown
  Bacterial polypeptide expressing nucleotide sequence isolated from the Sargasso Sea
aaattctgggcaccctggtatgcccatgggaatggctgatgttgctactgttctttttaaaaattttttaaattttgatcctaagaatccaagctggataaatagagatagatttgttctttcagcaggtcatggatctatgttgctttactctcttctatatttgacaggttataaaagcatttcattaaatgatataaaaaattttaggcagctagattctatttgtgctggtcatccagaatatcatccaaatactggaatagaaactactactggtcctttgggacaaggaatatcaaatgcagtaggctttgcaatatctgaagaaattttgaaaaaaaaatttggaaaaaataaaattgatcataaaacttatgtgctagctggtgatggttgtttaatggaaggaataagtcacgaagctctaagtctagcaggacatctaaaactaaaaaatcttattttactttttgataataattctatatccattgacggccctactagtctagcagtttcagatgaccatgaaaaaagattcaaaagttatggttgggattatttgaaaattaatggtcataataataaagaaatattcaaagctttaaaaaaagctcaaaaatcaaaaaaacctatagctatttcttgcaaaactaaaattggatatggttctccaaataaaagtggcaaagcatcatctcatgggagtcctttaggtgaagatgaaataaaattagtaagaaaaaaattaaaatggaagtataaaccttttgaaattccaaatgatttattaaatgagtggaaaaagattggaaataaagcttccaataaagctaaaaaacaccaaagtaaatataagaaaatcctttctaataatgaaattctaaattcatttaataattcaatcgaaaaaacaaaaaaaaattatttgaaaaatttaaagcctcttgcaacaagaaagtcttctgagatgtttttagatattgtatcaaaattaccaaaccttattggaggttcggctgatttagctggttcaaataacacaaaaaccaaagatcacaaaataataaagcctggtaatttttctggaaattatattcattacggagttagagaacatgcaatgtgtggtgtaatgaacggaattgctctgcacagtaatttaattccttatggaggtacttttttaatattcagtgattattgcaagccttctatccgtctagcagctatgatgaaacaaagagtaatatatgtctttactcatgactcaataggtcttggagaagatggccccacgcatcaaccaattgaacagttaactagcctaagatctgttccaaacttaaatgtatttagaccagctgattttatagaaacttttgaatgctggcaattagcaatagaaaataaaaaatcccctagcgtaattgctttaacaagacagggggttagtcctgttagaactaaaaattcttccaaaaatgagtcatctaaaggtgcgtatgaaattttgagaactggagatgatattaaaataacaataatatcatctggatcagaaactagtttggcatgtaatattagtcataaattagccacagagagtatttactccaaagtaatatctatgccctgtcaagaattatttgaccaacaaaatgaaaattataaaaataaaattttagctgaaactgacctagttgtgtctttagaggcttctgaaacaaattattggaagaaatatactggtataaatggattaaactttggaattaataattttggaaaaagtgcaccttataaagaaatttacaatcattttaatttaaatactgaaagtatagttaaaaagattaaagaaaaattatga

SEQ ID NO: 231415 - DNA, 1795 bp, Unknown
  Bacterial polypeptide expressing nucleotide sequence isolated from the Sargasso Sea
tggcttaatagagatagatttattttgtcagctggacatggatcaatgttgctttactcgcttttgtacttaacaggatataaaagtgtatcacttaacgacatcaagaaatttagacaactaaattcaatttgtgctggacacccagagtatcacccaaactcaggcattgaaacaacaactggtcctttaggtcaaggaattgcaaattctgtgggttttgcaattgcagaaaaaattttaaagaaaaaattaggaagtaatttaataaatcacaaaacctatgtcttggctggtgatgggtgccttatggaaggaataagtcatgaagcaatgagtcttgccggtcaccttagacttaataatcttataatgctttttgataataattctatttcaatagatggtcctactagtttagcagtctcagatgactataaaaacagatttaaaagctatggatggaattatattttgatcaatgggcataattacagagaaatttataatgcgttaaaaaaagcgcaaacatcaaaaaaaccaactgtgatttcttgtaaaactaaaataggatttggatctccaaataaaagtggaaaggcctcttctcatggaagtcctcttggaatagatgaaattaagttagttagaaaaaaattagattgggattataaaccatttaaaatacctcaaaaaattttaattgattggaggaaaattggagaaaaaggtattaaaaaggaaaaaatatggaataaaacttttagcaaacacaaactaaaatttaaaaatattataaaaaataaattctcaagttcaattataaaacaaaaaaaagatgcgataaaaaattctaagactatagctacaagaaaatcctcagaagagtttttatcagctatattaaaagagagaaatactttaattggtggctctgctgatttagcgggatcaaacaatacaaaaactaaattacataaaattattaattcaagtaactttgatggtaattatattcactatggtgttagggaacacgctatgagtggaataatgaatggattagctcttcatagtaattttattccttatggaggtacttttttaatattttcagactattgcaaaccttcaataagactgtctgctataatgaaacagaaggtagtttatataatgacacatgactcgataggactaggagaagatggtcctacgcatcaaccagtagagcaacttgctgctttaagatctattccaaacttaaatgttttaagaccagcagatcaaactgaaacaattgaatgttgggatattgctttaaatagcaacaaaacacctagcgtattagccttaaccagacaaaacttaaaacccataagaaatagctttagcagaaaaaatcaatgctctatgggagcttacgaagttataaggacaggaaaaaacataaatttaactattttagcctcaggatcagaggttaatcttgcaattgagactagtcataaattggccaaacaaaaaatttattcaaaagtaatatcaatgccttgccaagaaatttttgacaaacaaaacaagagatataaagacaaaatcttaaaagaaagcaaaaacactttttcaattgaggcgggatcaaaaatatcttgggaaaaatatattgaaaaaggcttatctttctcaatagaagactttggcaaaagcgctccttataaaaaagtttatcatcattttggtttaagtagtgaaaaaattagtaaaaaaattaattcttatttaaaaaaatgac

SEQ ID NO: 231416 - DNA, 988 bp, Unknown
  Bacterial polypeptide expressing nucleotide sequence isolated from the Sargasso Sea
atggtcgctgcatctgtttcattagaatcactatgtatcaatagtataagaatgctggctgtagatgcagtaaataaatctaatagcgggcatcctggcttacctatgggttgcgctcctatgggttatgcattatggcacaatattctcaatcacaatcccaataatccaaagtggtttaatagagatcgctttgtattatcagcgggacatgggtgtatgttgttatattcccttctgcatctgactggatataaatcagtttccatagaagatattaaagaatttagacaatggggatctaagacacctggacacccagaaacatttgagactgagggtgttgaggtaacagcggggccattaggagcaggaatttccaacgcagttggtttagcgattgcagaagcacacttagcagctaaattcaataaaaaagattgcgaaattgttgatcattatacctatgtaataatgggagacggttgtaatcaagaagggattgcctctgaagcatgttcacttgctggacatcttaagcttggaaaattaatagctctatatgacgataatcaaatcacaattgatggacgtacagatgtttcatttacagaagatgttttaaaaagatacgaagcttatggatggcatgtgcaacatgttgaagatggtaatcatgatgtaaatgggattaccaaagctattgagaatgcgaaatctgtaaaagataaaccttctctaatcaaaatttctacaatcataggctatgggtcaccaaataagtcagatactgcaggaattcatggagctgcagtaggagaagaagaagcttccttaacaagagagtttttaaattgggaatatcctccctttgaaatacctgaggatgtatattctcaatttagacaagctattactaaaggtgaagactctgaaaaaaaatggaatttaaaatttcaagaatatcaaaacacattccctcgaagga

SEQ ID NO: 231417 - DNA, 1282 bp, Unknown
  Bacterial polypeptide expressing nucleotide sequence isolated from the Sargasso Sea
aaaaatgttcaaaaagcaaaaaaaccaactgttatttcttgtaaaacaaaaattggatatggctcaccaaataaatcaggtaaagcatcttcccatggaagtcccctaggtttagaggagattgaacttgttagaaaaggcctaaattggaataataaaccttttaatattccaagtaaatttttgaaagagtggagaaaaattggtcaaagaggtgaaactcaagaaaaaaaatggattaagctatttaacaaaaacaaatcaaaatttaaaaatatatcaaaaaataattttacaagtattttaaaaaaagaaaaaagaaatgcgatttcggagcctaaaagtttggctacaagaaaatgttctgagttaacacttaatgcactaacaagccaaaatcataacttaattggcggctctgctgatttagcgggatctaacaatacaaaaacaaaacatcaaaaaataattaagcctggaaattttaatggagattatattcactacggagtaagagagcatggaatgagtggaataatgaatggtattgcactctatggaaatttaattccatatggtggaacttttttaattttttctgattattgtaaaccttcaattaggttatctgcgttgatgcaaaaaagagtgatatatgtaatgacgcatgactctataggacttggagaggatgggccaacccatcagccaattgagcagctctcaggtttacgatcaattccaaatttaaatgtttttaggccagcagatagagttgaaacaattgaatgttgggaacatgctttaaaaagttctaaaacaccaagtattttatctttaacaagacaaagcctaaatcccataagaaaatcatttacaaatataaataaatgttccttgggagcctatgaagttttgagaactaataataaaattaatttaacaatatttgcaagcggctcagaggttaacttggcaatcgaaactagtcataaattagccaaagataaaatatactgtaaagttatatcaatgccatctatggagcttttcgatctacaatcaaaattatataaaaataaaattttaaacgaaactaaatttaaaatttcaatagaagctggatcaagtgattgttggaaaaaatatgtagggagttcaggtctgacgtttggaattaatgaatttggcaagagtgcaccctacaaagctatttttaaacactttggactaacagtttcaaatattgccagtaaaactaaaaaaatgataagaaattaaa

SEQ ID NO: 231418 - DNA, 1258 bp, Unknown
  Bacterial polypeptide expressing nucleotide sequence isolated from the Sargasso Sea
tattggttttggttctcctaataaatctggaacagctgatgttcatggtgctcctctaggagatgaagaaattgaaaaaaccagagaggctctcggttggcaatatacggcttttgaaatacctaaagatgtatatgatttctgggactcaaaaaaatcaggcgctgaaaaaaatgcaacctgggaaaattcaattaaaagctataaagataaataccccaatgattcactagagctagaaagaagaattaaaggagacatgccagccaaatttgaacaaaactttcttgattttcttaatgattgcaatacaaataatttaccaatggcaacaagaaaagcttctaaggcttgtctagatttttttgtaaaggagatgcctgaacttgtcggtggatcagctgatttaactccttctaataataccttctcagcttcgagcacaacattttcttcagaaaacccatctggaaatcacattaattatggtgtcagagaatttggaatgtcagcaattatgaatggcatggttcttcatggaggcattaagccttatggagcaacctttttagtttttacagattatgcaaggaatgcagttagattatctgcgcttatgggactaccaaatatatttgtttatacgcatgattcagtagctttaggcgaagatgggcctacacatcaacctatagagcacatggtaacgttaagatctactccaaacatggatagttggagaccagctgatcttgtcgaaacagctgttgcatggaaaaatgccataagctcattgtcaactcctacatgtctgatttttagtagacaagggacttcagcaatagagcgaacacctgaacaactttcttctatcgagaatggtggatatcttcttgaagaacacgaggacccgaatataaccatagttgcatctggaagtgaagttcagttggccatagatgctgcgcaagaattaaagaatgaatcaattaatgctaatgttgtttcgatgccctcactagatgtttttttaaaacaatctaatgaaattcaaaataagattattaatcccaataaaccagttctagttgttgaatgcgcacatcccaattcttggtataagattttaaataggagtgataaagtaattggaatcgaaacatttggagaatctgcacctggaagtgaattgctagaacactttggatttaataaagacaatgtaattcagacagctaaatcactagttaatgattaa

SEQ ID NO: 231419 - DNA, 1950 bp, Unknown
  Bacterial polypeptide expressing nucleotide sequence isolated from the Sargasso Sea
tggcgcttgccccagttgcctacacggtatggaaagactttctgcggtacgacccccttgatccgagttggccgaatcgtgaccgtttcgttctttcgtgtgggcatgcctcaatgctgctatatagcctgattcatctcgcgggcgtacgacagggcagaccaaacactgaagcgaacaagattccagcggtcagccttgatgacattcggggatttcgtcaactcgacagtgtttgtgccggacatccagaacaccatttggctgtaggcgttgaaacaacaacaggaccgcttggccaaggatgtgcaaactcagttggcatggctatttcctctcgatggctaggcgcacaatacaatcgtcctgatgcaacactgtttgattttgatacatatgtgctgtgcagtgatggtgatctgatggagggggttgcaagtgagtctgcgtcactggctggccatcttcaactggcaaacctctgctggatttacgatgacaataaaataaccatcgagggtgaaaccgaccttgcatttagtgaggacgttgggcgtcgattcgaaggatttgggtggcgagttgaatatgttgacgacgcgaacgatgcatcctccctgagtcgtgctcttcaagcttttaagcacgaaactgagaaacctaccctaatcgtcgtcaaaagcgtcattggctttggcgcaccaacaaaagctggttctcattcatctcacggtgctccgcttggaccagatgagatcgctggggcgaaagaagcttatgattggcctacacaagaggcattccatgttccaaatggagttgcggaacatttccaaggcttgataggtgcacgcggtcaacacgcgaatgcctcatggcagacagctcatcaaaaattagcctcgtccgaaccgaccgccgcgaaggaactgaactgtatgctggctggaaagttaccagagggctgggcagatgcaattccaaaatttgcgactgacgcaaagggactggctagtcgtgtctcgtcaggaaaagttctccagagtcttagcactactatcccatggttcttaggtggctcagctgaccttgcaccatcgacgatgactctcattcctggtgcaggtgactttgggcccgagaacctccgcgggcgcaacttccactttggtatccgcgagcacgccatggctgctgcttgcaacggcatggctttgtgcggcctgcggccttatgccgcaaccttttttgtattctttgactacctcaaaccagcccttcgactttctgctttaggggaacttggtgtcacttatgttcttacgcatgattcaattggtcttggtgaggacggtcccactcatcagcctattgaacatcttgcgagtgcccgagctgtccctgggttaaatgtgtttcggccggccgatgccaacgaagttgcagaggcgtatcggagttcattactgaacccaaaacagccagccgtcatggtactttcacgacaaaatctcccaacactcgaccgaaccaatcttgggccagcgaacggcgttacaaagggggggtacattttaaaggaagctacaggaggcgaggctgaatgcattctcatcggaaccggtagtgagataccactttgccttgatgcagctgacattcttgactcagagggtattcgaactcgagtcgtgagtcttccgtgctgggaactctttgccgagcaagaccaagagtaccgtgagcacgttcttccagcgagcattccagcgagagtagcatgtgaagctgcctcaggatttggctgggaaaggtggatcggtcagaaaggcacattcatcggcatgaatggattcggtgcttctggcccggccaagaagttgttcgaacactttggcataactactgaagccgttgtcactgcagcacgagatctcgtgcgtaaataaa

SEQ ID NO: 231420 - DNA, 1264 bp, Unknown
  Bacterial polypeptide expressing nucleotide sequence isolated from the Sargasso Sea
tgctgtttcagacaattttaaaaaaagatttgagggttatggttggaattatattttaataaatggacatgatgaaaaagaaatatttaaagcattaaaaaatgttcaaaaagcaaaaaaaccaactgttatttcttgtaaaacaaaaattggatatggctcaccaaataaatcaggtaaagccgcctcccatggaagtcctctgggtttagaggaaattgaacttgttagaaaagttctaaattggaataataaaccttttaatattccgaataaatttttgaaagagtggagaaaaattggtcaaagatgtgaaactcaagaaaaaaaatggattaagatatttaacaaaaacaaaacaaaatttaaaaatttaaaaaaaaatagcttaataactatattgagaaaagaaaaaagaaaagcaattctggagccaaaaaatttggctacaagaaaatgttctgagatgacacttaatgcattaacaaaccaaaaacataacttaattggtggctctgccgatttggcaggatctaataatacaaaaacaaaatatcaaaaaataattaaacctggagattttagcggagattatattcactacggagtaagagagcatggaatgagtggaataatgaatggtattgcactctatggaaatttaattccatatggtggaacttttttaattttttctgattattgtaaaccttcaattaggttatctgcgttgatgcaaaaaagagtaatatatgtaatgacgcatgactctataggacttggagaggatgggccaactcatcagccaattgagcagctatcaggtttacgatcaattccaaatttaaatgtttttagaccagcagatagaattgaaacaattgaatgttgggaacatgctttaaaaagttcgaaaacaccaagtattttatctttaacaagacagggcctaaatcccataagaaaatcatttacaaatataaataaatgttctttgggagcctatgaagttttgagaaccaataataaaattaatttaacaatatttgcaagcggttcggaggttaatttggcaatcgaaactagtcataaattagccaaagataaaatatattgtaaagttatatcaatgccatctatggagcttttcgatcaacaatcaaaattatataaaaataaaattttaaacgaaactaaattgaaaatttcaatagaagctggatcaactgattgtggaaaaaatatgtggggagttcaggtctaa

SEQ ID NO: 231421 - DNA, 902 bp, Unknown
  Bacterial polypeptide expressing nucleotide sequence isolated from the Sargasso Sea
gctgggctggaaatacgcgccgttcgaaatcccgtctgaaatctacgcgcagtgggatgcgaaagaagccggccaggcaaaagaagccgcatggaacgagaagttcgctgcttatgccaaagctttcccgcaggaagctgctgaattcacccgtcgtatgaaaggtgaaatgccgtctgacttcgacgcaaaagccaacgagttcattgctaagctgcaggctaatccggcgaaaatcgccagccgtaaagcgtctcagaacgcgattgaagccttcggtcctctgctgcctgaattcctcggcggctctgctgatctggcaccgtctaacctgactctgtggtctggttctaaggccatcaacgaagatactgccggtaactacatccattacggtgtacgtgaattcggtatgactgctatcgcaaacggtatttccctgcatggtggtttcctgccgtacacctccaccttcctgatgttcgtggaatatgcccgtaacgcggtgcgtatggctgcgctgatgaaacagcgtcaggtgatggtctatactcacgactccatcggtctgggtgaagatggcccgactcaccagccggtagagcaggttgcttctctgcgtgtgaccccgaacatgagcacatggcgtccgtgtgaccaggttgaatccgcagtagcatggaaatacggtgttgagcgtcaggacggcccgaccgcgctgatcctctcccgtcagaacctggcacagcaggaacgtaccgcagagcaactggcgaacatcgctcgcggtggctacgtgctgaaagattgcgcgggtcagccggagttgatcttcatcgccaccggttctgaagttgaacttgccgtggctgcctgggacaaactgaccgctgaaggcgtga

SEQ ID NO: 231422 - DNA, 1394 bp, Unknown
  Bacterial polypeptide expressing nucleotide sequence isolated from the Sargasso Sea
tgaagaaattttaaaagaaaaaatcggtaaagacattataaatcataaaacatatgtaatcgctggagatggttgcttaatggagggaataagtcatgaagctatgagtttagcaggacatctaaggcttaaaaatcttgttttgctatttgataataattcaatatctatcgatgggccaactagtttagcggtatccgataattttaaaaaaagatttcaaagttatggatgggattacatagaaattgatggacataaagaaaacgaaatatttaaagcacttaaaaaagttcaaaatgcgaaaaaaccatcagtgatttcatgtaaaaccaaaattggttacggatcaccaaataaatctggaaaagcctcttcgcacggaagtccattgggtgatgaggaaattagtttagttcgcaaggagttaggatggaattataaaccatttgaaataccaaaaaatgtgatgaagatttggagagaaatagggaaaaagggagaaaaaattgagtataaatggaacaaaatctacaatccgaaaaaaagtaaaataaataaatattttaaaaatgattttgtaaagtctgtaataaatgaaaaaaaaatggcattaaaggataataaaagcttagcctcaagaaaatcttctgagctcataattagctctcttgttgaaaaaagtaatactcttataggtgggtcagctgatcttgctggatcaaataataccaaaacaaaaaatcataaaattgttacaccaggaaattttgaggggaactatattcattatggagttagagagcatgctatgtgtggaattatgaatgggttagctttgcatagcaaattaataccttatggaggaacttttttaattttttctgattattgtaagccctcaataagattatcggcaatgatgaagcaacaggttatatatgttatgacacatgattctattggtctaggggaagatggaccaacgcaccaacctgtggaacagttatctggattaagatctataccaaatcttaatgtatttagaccagcagatagatcggaaacaatagaatgttgggagcatgctttaaagagtttaaaaacaccaagcattctatgtttaacaagacaaaacttaagtcccattagaaataaattttcacaaacaaatagatgttcttttggggcatatgaagttttgagaacaaataaaaaagttaatttgacaattttagcaagtgggtctgaagtaaacttagctatagagactagccataaattggccaaagataagatatattcaaaagttatatcagtgccttgtatggaattattcgaagctcaatcaattaattacaaagaaaaaattttaaatgaaacaaaattaaaaa

SEQ ID NO: 231423 - DNA, 1290 bp, Unknown
  Bacterial polypeptide expressing nucleotide sequence isolated from the Sargasso Sea
tcctcttggagctggaatctcaaatgcggttggtttagcaatagctgagactcacctagcaggtaagtttaataaacctgactgcaatatagttgatcactatacttacgtaataatgggtgacggttgtaatcaagagggtatcgcatcggaggcctgctcattagccggtcaccttaagcttggaaaattaattgcactttatgacgataatcaaattacaattgatgggcgaaccgacgtttctttcaccgaagatgttttaaaaagatacgaagcttatggatggcatgtacaacatgttgaagatgggaatcatgatgttaaaggtataactgaagctatcgaaaaagcaaaattaattacagacaaaccttcaatcataaaaatttctacaacaataggttatggttctccaaataaatcagatactgctggaattcatggagcagctgttggagaagaagaagctgcactaactagagagtttctaaattgggaatatcctccatttgaaataccagatgaagtatatgcacattttcgaaaatcaataaacaaaggagaaatcttagagaaagaatgggattctaaatttaaagagtatcaaaaaaattatccctccgaaggagctgagttaaacagaatgttaaaaggccaattacctgagaattgggactcagatctcccttcctatacacctgatgataaagggttagccaccagaaagcattcacaaatatgtttaggtgctttaggccctaacctgcctgaattaattggtggatccgcagatttaactcactctaactacacagatatcaagggggaaaccggatcattccagcctcatagtcctgaaaaaagatatttacactttggtgtacgagagcatgcaatggcagccgtacttaatggaattgcctatcacaatagtggtcttattccttatggtgggaccttccttgttttcgccgattatatgagaggttcaatgaggctttcggcactcagcgaactaggagtgatctatgtattaactcatgattcaattggtgtaggagaagacggtccaacgcatcaacctattgaaactatcccttctcttcgtgccatgcccaacatgttagttttcagaccgggagatggaaatgagacaagtggagcttataagcttgctattcaaaatcgaaaaagaccttctgctctttgtttaagtagacaaggtatgccaaatcaagaaaatacttcgatcgaaaaagttgccctaggcggatatgtagttccgac

SEQ ID NO: 231424 - DNA, 1462 bp, Unknown
  Bacterial polypeptide expressing nucleotide sequence isolated from the Sargasso Sea
tttgctggcgttcatgagcttaataaattaatttgtttttatgattcaaatggaatttctatagatggtgaaataagcaattggtacaaagacgatatttcattaaggtgtaaggcatatggatggaatgtcatcgacaatattgatggacacaatagagaagaaattgatgaagcaatttctgtcgcgaagaattcaaaaaaaccaactatgattgtgtgtaaaacacatattggctatggtgcaggaaataagcaagattctgaatcgtctcatggggctgcacttggatctgagatcgttaaagagttaagagaaaatcttgattggccatattctgaatttgaaatccctaatgaaatttatgcagattgggatgcttcggacataggtcaaaaatatgaaggtgattggaatgaaaaagtacgaaccctcaaatcagaaaaccctgagaaagcagagcttctagaaaggttgttaaacgaaaagctgcctgggaaatttgattctaattttagcgcctttttagaagaaattttaaagcacaatgaaccaatagcaactagaaaagcttctcagaaagttcttgaattcttgaaaaaaaacctgcctgaattgataggcggctcagctgatctaagtggctcaaataataccaatacaagtatttcaaacccaattactagctcccaaaacggaaattatatttattacggcgttagagaatttggtatgaatgcaataatgaatggcatttctcttcatggaggtcttattccttatgcaggtacatttttagtatttatggattacggaagaaatgcagtaagaatggctgcattgatggggataaaagtaatttttgtttattctcatgatagtgttgctcttggagaagatgggccgactcatcaaccaattgagcatcttacaactttaagatctacgccgaatatgcatacctggagagcagcttcattattagagacagcagttgcttggaaatcagctattcaaagaaatgatggaccttcttctctaatacttacaaggcagaatatagataacattgagaataaaagttttgatgaagtatcaagggggggatactttttaagaaaatttgatgattcaaacattcaacttatagctactggatcagaggtttctttagcacttgaagctgctgaaattcttgagcaagaaggagtcaaatgtaatgtagtaagcatcccttgtatcgaagttttagaaaccaacaaacaaatttataaagagatttttaccgaaagcaaaattaatattgctattgagtgtagtcatccaaattcttggtatgctcacacaaagaatgttattggaattgaagaatttggagaatcaggtaaaggtcatatattaatggagcattttggtttcaccccaaaaaaaatagtagaaaaaataaaaagttttttatgac

SEQ ID NO: 231425 - DNA, 726 bp, Unknown
  Bacterial polypeptide expressing nucleotide sequence isolated from the Sargasso Sea
catgaccccctcggttctcacggagctcacggcggcgggagtgagcctgtggttggacgacctgagtcgtgcccgtttggacggcgacctgcaacgcctggtgcatgagcggtcaatatccggcgtcacgacgaaccctacgattttccagaaggcaatcgccggcggcggggatgattacgcggcacagttgcaggatctccgagtgttgggcgtcgacgtggacttcgcgatccgcacactcaccaccgacgacgtccgcgccgcgtgcgacatccttgcgcccgtctacgcgagcactggtggtctcgacgggcgggtatccatcgaagtcgacccgcggctggcgcatgacacagaggccaccgttaaccaagcgcgcgagctctggatgctggtggatcgccccaacgccatgatcaagattcccgctaccgctgccgggctgccggccatcacgcggactctcgccgaagggatcagcgtgaacgccacgctgatcttttcgatcgaccggtaccgcgaggtgatggctgcgcacaccgccgggatagggcgcgcgcacgactctcgcgtggacgtatccggcattgagtccgtcgcgtcgttctttgtcagccgcgtggacaccgccgtcgacgctcggctatccgagagcactccggcgctcgccgacggactccggggacgcgctgccatcgccaacgcccacctcgcgtggcacgc

SEQ ID NO: 231426 - DNA, 586 bp, Unknown
  Bacterial polypeptide expressing nucleotide sequence isolated from the Sargasso Sea
aatgaaattttttatagacactgccgatatacctcagatcgaagagttaatgcctagtggattaatagacggtgttacgacaaacccctctctaattgcaaaaagtggtaaagatatgggtgaaacaattaaaacaatttgttcaatagtatctggtccagtaagtgcagaagtgacagcaacggaatataacaagatgcttgaagaaggtaaatacttagcatcattagctaagaatgttgctgtaaaagttcctctcacacctgctggtcttcagacatgcaaagctcttagagaaaaagatatcatggtaaatgtaacgttgtgttttagtgctgctcaagcattactagccgctaaggttggtgcaacatttatttctccatttgtgggaagactcgatgatattggtgaaaaaggtatggatctaatttcagatatagtaataatgtatgaaaattatggatttgatactgaagtattggttgcttcggtaagaaatactcaacatcttattgatgcagctgtgattggtgcccatgtttcaactctaccacctaaagttattcacgaattatataaacat

SEQ ID NO: 231427 - DNA, 223 bp, Unknown
  Bacterial polypeptide expressing nucleotide sequence isolated from the Sargasso Sea
gcactccttgagagcctagacaatgatctctcaccgctggctcaatcattaagcatagaggcgtctaaagctgaagatatagaagaacaatctatcgatgaacaacgctttcgctggctaatgaataacgatgccatggcaacagaaaaactagctgaaggtattcgcctgttccatcgcgacctattgctgctttatgagacattgtcaaactatttttagt

SEQ ID NO: 231428 - DNA, 598 bp, Unknown
  Bacterial polypeptide expressing nucleotide sequence isolated from the Sargasso Sea
ggctttgttgatggagtaacaacaaatccatcgctaatcgccaagtcagggcgagatattttggacacaattgcggagatttgcggccttgttgacgggccagttagtgccgaagtaacagcaaccgatttcgagaccatgctaaaagagggccgtaaactagccgctattgcaactaatgtaacagtaaaagtgcctttgacccctgatgggttaatgacatgccgagcgctaagcgatgccggtacagatgtgaatgttaccttgtgctttaccgctggacaggcccttcttgctgccaaagcaggtgccaaatttatttcgccatttgttggcaggcttgatgatattggccaggatggcatgggtctaatcgaagaaatttgcagcatttatgcaaattatgattttgataccgaagtgttggtagcatcagtccgaagtacatctcacgttgttgatgcagcgttaatgggagccgatgtggtaaccttaccaccaaaaattctgacagcgctctataaacaccccctaaccgatagcggattggatgcttttttaaaagattggcaggcgactggccagtcaattttataat

SEQ ID NO: 231429 - DNA, 529 bp, Unknown
  Bacterial polypeptide expressing nucleotide sequence isolated from the Sargasso Sea
atgaaactatttttagattgttcagatgctgaatttattagagacgcatatagcacaggtctaatagatggtgtgactactaacccatctttaatgttaaaggcagggaaagatcctcgtgaggtattgaaagagatatcagatatctttcctttccatgcttctgtatctgctgaggtcgttggtgattcagtagaagagatgctagagatggcagatgattacattgaaataggacctaacattactattaaggtacctcttaccccagagggattgaaagtctgtaaagatttaagtacagatgatgtggcagtaaatgtcactctctgtttctctacagcacaagcaatacttgctgccaaggcaggtgcaacatatgtatcccctttcgttggtcgtgttaacgatcaatcattcgatggtatcaaacttatagaggagatctcagatgtctacgctacgcataaacaaaaaacacaagtccttgctgcttccattagggacgtttaccaagtcgcctcttgct

SEQ ID NO: 231430 - DNA, 661 bp, Unknown
  Bacterial polypeptide expressing nucleotide sequence isolated from the Sargasso Sea
atgaaattttttatagacactgccgatatacatgagattgaagagttaatgcctagtggattaatcgatggtgttacgacgaacccatctcttattgcaaaaagtgttaaggatatgggagaaacaattaaaacaatttgctcaatagtatccggtccagtaagtgcagaagtcacagcaaccgagtatgacaaaatgcttgaagaaggtgagtacttagcatcattagctaagaatgttgctgtaaaagttcctctcacacctgctggtcttcaaacttgcaaagctctcagagaaaaagatatcatggtaaatgtaacattatgttttagtgctgctcaagcattactagccgctaaggttggtgcaacatttatttctccatttgtgggaagattagatgacattggtgaaaaaggaatggatctgatttcagatatagtaataatgtatgaaaattatggctttgatacggaagtattggttgcttcagtaagaaacacgcaacatttgattgatgcagctgtgattggtgcacatgtttcaactctaccacctaaagttatttacgaattatataaacatcctcttacagataaagggcttaaagcatttctcgatgattgggcaaaaacaggacagcaaatcttgccaaaataat

SEQ ID NO: 231431 - DNA, 808 bp, Unknown
  Bacterial polypeptide expressing nucleotide sequence isolated from the Sargasso Sea
aatgaaattaatattagataaaaatctagaaaatcttatttataattattataaaaaatattataaaaatgatttaggtcttaaagattggcaaaatcgaattaagttaaggcttgatgaagaaaataatttctcacaagatagaaatgtaaaaattttagaaaatatctataatttaagttttgaaaataaatcaattttaattgtaggcagtggtactggtggagaatgtctgtattttagtaaaaaacaaatgaaagtagaaggtattgaacctaatgatgaagctaatgaaattgcaaatcaaaaaataaaacttttagatttgaaaaatatcaaaatacaaaaaggtttttctgaaaatttgccatttaaaaataataaatttgattatgtctattgttacacagttttagagcatgtagcaaatgtaaaaaaatcaatttcagaaatgattagagttcttcaaccagggggaggactttttatttgtacaccagattatcggcaattttatgaacctcattataaattaccattgcctatgtttcttccaaaaatagtcaataaaattttgttaaaaatatttgctaggcccacaacctttttagataccctaaatttgtttaatgaaaaagatataaataaaattttaaatcagcacaatgttacagcaacaagaatttatgaatgtatccctaaagagtggacgaagcatccttcatttcaaataaaaataattaaatatataaccataaaatttggaatacataaaaatcaatattggtttattaaaaaaaatctttag

SEQ ID NO: 231432 - DNA, 259 bp, Unknown
  Bacterial polypeptide expressing nucleotide sequence isolated from the Sargasso Sea
aatgatatatgtgattgatcataaagattcctttactcataacgttgtccatcaattatctttgtttgataaagttaaatgcacaaattatgatgagattaataatcaatatctaaaaagagcatcaacaattgttttatctccaggacctggttcaccaaaagattatccaatcactagcaaaatttataattattataaaaggaagaaaaagaatagtaggtatctgtttaggatttcagcagatattatattgtga

SEQ ID NO: 231433 - DNA, 639 bp, Unknown
  Bacterial polypeptide expressing nucleotide sequence isolated from the Sargasso Sea
ctgctaatattgacgaaattcgggaattagaaaatactggactcgtagatggcgtcaccacaaatccatctttgataaacaaatctgggcgaaatttttttgaagttgttcgagaaatttgttccctcgtagatggcccggtcagcgcagaagtcacttcacatgattttgacactatgctcaaagagggcaagaaattagccgaaatagcttcaaatattgcagttaaggtacctctaacacgagcaggtctgaggacctgtaaattgttaagcgacaaaggaacaatggtaaatgtgacactctgcttttcggcaaatcaggccatactagcggcaaaggcgggtgcacgttttatttctccctttgtcggtcggctggacgatattgctcatgatgggatggacttgatatcggatatttgtgatatctacgcgaattatcctgacttctcaacagaggtattggttgcatctgttcgaagcccaatgcatgtggtagaggcagcaaagatcggcgccgatgttgccactgttcctccctcggtgctgcaccaaatgttttcacatccgcttaccgacaaaggtctagctgatttcacctccgattgggaaaaaacgggccagtctattctctagg

SEQ ID NO: 231434 - DNA, 661 bp, Unknown
  Bacterial polypeptide expressing nucleotide sequence isolated from the Sargasso Sea
aatgaaattttttatagacactgctgatatacctgagattgaaaagttaatccctagtggattaatagacggtgttacgacaaacccatctctaattgcaaaaagtggtaaagatatgggagaaacaattaaaacaatttgttctatagtatctggtccagtaagtgcagaagtgacggcaactgagtataacaaaatgcttgaagaaggtgagtacttagcatcattagctaagaatgttgctgtaaaagttcctctcacacctgctggtcttcaaacttgtaaagctcttagagaaaaagatattatggtaaatataacattgtgttttagtgctgctcaagcattactagccgctaaggttggcgcaacatttatttctccttttgtgggaaggctcgatgacattggtgaaaaaggaatggatctaatttcagatatagtaataatgtatgaaaattatggatttgatacagaagtgttagttgcttcagtaagaaacactcaacatttgattgatgcagctgtaattggtgcacatgtttcaaccctaccacctaaggttattcatgaattatataaacatcctctcacagataagggacttaaagcatttctagatgattgggcaaaaacaggacaacaaattttgccaaaataa

SEQ ID NO: 231435 - DNA, 661 bp, Unknown
  Bacterial polypeptide expressing nucleotide sequence isolated from the Sargasso Sea
atgaaattttttgtcgatacagcagatattaaagaaatagaagagctgattcccacaggttttgttgatggtgtaacgacaaacccatctcttattgctaaaaatggggatgatatggccaaaacaataaaagcaatttgctctattgtgccaggacccgtaagtgctgaagtaacagcaactgattttgataccatgttgcaagagggagaatatttagcatctctagctaaaaacgttgccgtcaaagttcctcttactccgaatggactaaaaacgtgtaagacgcttagagagaaaaatattatggtaaatgtcactctctgttttacagcggcgcaggcattgttggcagcaaaagcaagagctagtttcatctcaccttttgttggaagactcgatgatttgggagaaaacggaatggatctcattgaagatatagttgatatctatgacaattatgattttgatacagaggtacttgttgcttctatacgctcaacacaacatgttatagatgctgcggtaatcggagctcatgtctcaacattgccaccaaaagtaattcatgaattatataatcaccctttaactgaaaagggattaaacgcctttttagatgattggaaaaaaacaggacaatccatccttcccaaataaa

SEQ ID NO: 231436 - DNA, 427 bp, Unknown
  Bacterial polypeptide expressing nucleotide sequence isolated from the Sargasso Sea
catggacatttttgcagacacagcggatatcgaagaaattaaaaaactgaatgatctaggaatcattgatggagtgaccaccaacccaactctgatcgcaaaatcaggaagggatttacgggaggttcttggggaaatctgtgatgtcgtccgtggaccggtatcaggtgaaaccgtttctactgatgcagaggggatgatccgggagggacgttggttgagagaaattgatgatacctacatggtggtcaaggttccacttacggctgaaggaatcaaggcctgttatcatttgagccaagaaggtcatcccgttaatgtgactctttgtttttctgcaaaccaagcattgttggcggcaaaagcgggtgctacttttatcagtccctttgtgggtagactggatgacttaagtcttgaagggatg

SEQ ID NO: 231437 - DNA, 425 bp, Unknown
  Bacterial polypeptide expressing nucleotide sequence isolated from the Sargasso Sea
tggtaaaactagttttttgggtgctgaagatcctggtgttatttcggttacacaaatttacaagtattttaaagaaaagggattcaagacagaagtaatgggagcaagttttagaaatcttgatgaaataaaagaattagcaggatgcgatcttttaacaattgcacctaaatttcttgaggaactaaaaaaagaaaaaggaaagttaattagaaaattagatgttagtacccaaataaataattctattgactatgaatttgaagaaaaagatttcagattaagtatgttagaagatcagatggcgagtgagaagcttagcgagggtatcaccggattcagcaaggctatagaagaattggaagagctgctacttaagagatattcagaaattaaaaattataaattaatttctactaactaaa

SEQ ID NO: 231438 - DNA, 661 bp, Unknown
  Bacterial polypeptide expressing nucleotide sequence isolated from the Sargasso Sea
atgaaattttttatagatactgcagatatacctcaaattgaagagttaatgcctagtggattaatagatggtgttacaacaaacccatctctaattgcaaaaagtggcaaggatatgggagaaacaattaaaacaatttgctctatagtatctggtccagtaagtgcagaagtgacggcaaccgaatatgacaaaatgcttgaagaaggtaagtacttagcatcattagctaagaatgttgctgtaaaagttcctcttacacctgccggtcttcaaacatgcaaaactcttagaaaaaaagacatcatggtaaatgtaacattatgttttagtgctgctcaagcattactagctgctaaggttggcgcaacatttatttctccatttgttggaagactcgatgatattggtgaaaaaggaatggatttgatttcagatatagtaataatgtatgaaaattatggatttgatactgaagtattagttgcttcagtaagaaacacacagcatcttattgatgcagctgtgattggtgcacatgtgtcaactctaccacctaaggtgattcacgaattatataaacatccgctaacagataaagggcttaaggcatttcttgatgattgggcaaaaacaggacaacaaatcttgccaaaataat

SEQ ID NO: 231439 - DNA, 610 bp, Unknown
  Bacterial polypeptide expressing nucleotide sequence isolated from the Sargasso Sea
atgaaattttttcttgatacagctaatattgaagaaatagaggaattaatacctacaggttttgtggatggagtgacaactaatccatctttaattgctaaaaatggtgatgacatggctaaaacaattaaatcaatttgttcaatagtgtctggtccagttagtgccgaagttacagcaacagattatgaaactatgctaaaagagggtgaatatcttgcttcgtttgcaaaaaacgttgctgtgaaagttcccttgacttttaatggtttaaaagcctgtaaagcattgagagagaaaaatattatggttaatgttaccctttgtttttctgaagctcaagcccttctagcagcaaaagctggggctacttttatatctccatttgttggtcgtcttgatgatataggggaaaaaggtactgacttaattaaaaatatagttgttatgtataaaaattataattttaaaactgaggttttggttgcttcagtcagatctgtagaacatttaattgaatcctccttaatgggagctgatgttgcaacacttccaccaaaagttattcacgaattatataatcatcctctaactgacaaaggtttaaaag

SEQ ID NO: 231440 - DNA, 667 bp, Unknown
  Bacterial polypeptide expressing nucleotide sequence isolated from the Sargasso Sea
atggacatttttgcagacactgcggatatcgaagaaattaataaactgaatgatttaggaatcattgatggagtgaccaccaacccaaccctgattgcaaaatcaggaagggatttacgggaggttcttggggaaatctgtgatgtcgtccgtggaccggtatcaggtgaaaccgtttctactgatgcagaggggatgatccgtgagggacgttggttgagagaaattgatgatacctacatggtggtcaaggttccacttacggctgaaggaatcaaggcctgttatcatttgagccaagagggacatcccgtcaatgtgactctttgtttttctgcaaaccaggcattgttggcggcaaaagctggtgcaacttttatcagtcctttcgtgggcagactagatgacttaagtcttgaagggatgcagctcattgaagacattcgaatcatctatgaaaattatgagttcgacaccagaattctaactgcttctgctcgtggtccgaaacatatcctggatgctgcaaaaattggatcagatgtggtgacggccccacccaaggcaatttggcagatgctccagcatcctttgacagataaggggctgaaagcttttttggacgactgggaaaataccgggcagactctagggcaggttggttgag

SEQ ID NO: 231441 - DNA, 661 bp, Unknown
  Bacterial polypeptide expressing nucleotide sequence isolated from the Sargasso Sea
atgaaattttttatagacactgccgatatacctcagattgaagagttaatgcctagtggattaatagacggtgttacgacaaacccatctctgattgcaaaaagtggtaaagatatggcagaaacaattaaaacaatttgttccttagtatctggtccagtaagtgcagaggtgacagcaactgaatatgacaaaatgcttgaagaaggtgaatacttagcatcattagctaagaatgttgctgtaaaagttcctcttacacctgctggtcttcagacatgcaaagctctaagagaaaaagatatcatggtaaatgtaacattgtgttttagtgctgctcaagcattactagccgctaaggttggtgcaacatttatttcaccatttgtgggaagactagatgatattggtgaaaaaggaatggatctaatttcagatatagtaataatgtatgaaaattacggatttgatacggaagtattagttgcttcagtaagaaacacgcaacatcttattgatgcagctgtgattggtgcccacatttcaactctaccacctaaggttattcatgaattatatatacaccctctcacagataaaggacttaaagcatttcttgatgattgggcaaaaacaggacagcaaatcttgccagaataat

SEQ ID NO: 231442 - DNA, 661 bp, Unknown
  Bacterial polypeptide expressing nucleotide sequence isolated from the Sargasso Sea
atgaaattttttatagacactgctgatatagccgaaattgagcaattaataccaagcggtctaattgacggagtaacaacgaatccatcattaattgcaaaaagtggaaaagacatggctgaaacaattaaaacaatttgttcaattgtacctggaccagtaagcgctgaagtaacagcaactgaatatgaaaaaatgttagaagaaggattgtacttagcatcacttgctaaaaatgtagcagtcaaagttcccttaactccagctggactcaaaacatgtaaaacattgagagaaaaagatattatggtgaatgtcactctttgtttttctgccgcacaagcacttttagcagcaaaagttggtgcaacttttatctcaccttttgtgggaagattagatgacattggtgagaaaggaatggatcttatctcggatattgtcatcatgtatgaaaactatggttttgatacagaagttttagttgcctcagttagaaatactcaacatctaattgactcggctgtaattggagcgcatgttgctacattgcctccaaaagtaattcacgaactgtataagcatccacttactgataaaggattaaaagcatttctagatgattgggcaaaaacaggacaacaaattctgcataaataat

SEQ ID NO: 231443 - DNA, 652 bp, Unknown
  Bacterial polypeptide expressing nucleotide sequence isolated from the Sargasso Sea
atgaaactatttttagataccgctgatacaggtgctataaaggatggatttgatactggtctaatagatggtataactacaaatccaactcttattatgaagagtggtagaaatccagaagatgtatatcaagaactaattgatttaggaatacctgatatcagtatggaagttgtaggcaatgatgaaatcatgcttgctgaaggacttagacttgctaaaaagtttggtaagcaatctacaattaaagttccttgtacaccagaaggattgtgggtatgtaagcaattatcaaaaaacttgatcaaggtaaatgtaactcttatattttcacctagtcaggcaattcttgctgcgaaagcaggagcaacttatgtttcaccttttgtaggaagagttgatgataattcttttgatggactatctctcataagagacatagcaaacatatatcataaacaaaattggaagagtaccgaaatactcgcagcatcaattcgtaatgtaagagatgttggaaaggcatttgagtatggtgctgacatatgtacgattccacccactgtttttggtaaaatgtataagcacattcttactgacaagggtattgaactctttgaaaatgactggaaatccgtacaaagtgtgtagc

SEQ ID NO: 231444 - DNA, 658 bp, Unknown
  Bacterial polypeptide expressing nucleotide sequence isolated from the Sargasso Sea
ttgaagttttttattgatactgcagatgtttctgaaataaaagagcttgcaaaaagtggtctacttgatggtgttactactaatccatctttaattaaaaagtccggaaggaatataaacgaagtaataaaagaaatttgtgacatagttcctggacctgtctcagcagaagttacagccacagaatatgatgaaatgttaagagaagcagaagttttaaaatccattgctaaaaatgtaactattaaagttcctcttacatgggatggattaaaaacatgtaaagctttaagagaagaagaggtcttagttaatgtaacgctttgtttttcggccaatcaggcattgttagctgcaaaagcaggtgcttcttttatatcgcctttcgtaggacgactggatgatataggtattgatggcatgaacttaatatcagatatttgtcaaatttattccaactacccaaacttaaatacagaagtacttgttgcaagtgtaagaagtccgcagcatgttgcagaggcagctaaactaggagcagatgtagtaacacttcctcctaacgttctcaaacagttaattactcatccgttaactgaaagtggattgcaggcatttttagatgattggaaaaaaactgggcaaagcattacttaac

SEQ ID NO: 231445 - DNA, 661 bp, Unknown
  Bacterial polypeptide expressing nucleotide sequence isolated from the Sargasso Sea
atgaagttttttgtagatacagcaaatatagaggatatagaaaaattgattccaactggattcgtggatggagttacaacaaatccctcacttatagctaaacaaggggctgatatggctgaaactattaaaaacatctgttcaatagttagtggccctgtcagtgctgaagttacagctactgagtttacaaaaatgcttgaagaaggtgaatatttagcttcattggcaaaaaatgttgctgttaaagttcctttaactgttgatggtcttaaaacttgcaagtctcttcgcgaaaaaggaattatggtgaatgtcactttatgtttttctgctgcccaagctttgttagctgctaaagcaggtgcttcatttatctcaccttttgttggaaggctagatgacatcggagaaaaagggatggaccttatagaagatatagtaattatgtatgaaaactatgcttttgaaacagaggttctagttgcttctattcgtactaaacagcatgtaattgattcagcagtcattggagctcatgttgcaaccctacctccaaaagtaatttatgaactatacgatcattctttaaccgataaaggcctcaaagcttttcttgatgactgggcaaaaactgggcaatctatacttcctaaataag

SEQ ID NO: 231446 - DNA, 403 bp, Unknown
  Bacterial polypeptide expressing nucleotide sequence isolated from the Sargasso Sea
tgctgaagatcctggtgttatttcggttacacaaatatacaattattttaaagaaaagggattcaagacagaagtaatgggagcgagttttagaaatctcgatgaaataaaagaattagcaggttgtgatcttttaacaatcgcaccaaaatttcttgaggaccttaaaaaagaaaaaggagagttagtcaggaaattagatgaaagtacccaaataaataattctgttgattacgaatttgaagaaaaagattttagattaagtatgttagaagatcaaatggcaagtgaaaagcttagtgagggtatcactggattcagtaaggctatagaagaattagaagagctgctactaaagagatattcagagattaaaaatcataaattgatttctgctaactaa

SEQ ID NO: 231447 - DNA, 676 bp, Unknown
  Bacterial polypeptide expressing nucleotide sequence isolated from the Sargasso Sea
aatgagtgatttattaggtttatcagagcttcaattatctactaccagtttatcagaatttattataggatttactttaacaattatattctctttgttaataaaaatgatatatataaagcattcaaactctgtctcaaataaaactattgttgctaatatttttcccttatttagtgtagctatttttttaattgttattacaattaaatcaagtattgtcctctccttaggtctagtaggagctctttcaataattaggtttcgaacagcaattaaagaggctgagcaaatagtttattttctaattcttaccgctatcgctattgctgcagcagcaggaacttacctatttccagttttattggtactatttatatacatatataactattataagactcaacaaaaaagtggcaaagtctcatcaattaatgaccatctagttattagaactgaaaaatttgaaaataaaaaaattaaagaattgattaatttacttaatgatagtggagttaatgttgaagttcagagtataaataaacaggaaaataatatttccgttgtattaaaaatttcagattttgatataaattctcttacactagttgaggaatttttactgaaacagggtattaataaaaaagaaattcaatttttttcttcttctgaatga

SEQ ID NO: 231448 - DNA, 415 bp, Unknown
  Bacterial polypeptide expressing nucleotide sequence isolated from the Sargasso Sea
atgaaattttttatagacactgccgatatacctcagatcgaagagttaatgcctagtggattaatagacggtgttacgacaaatccatctctaattgcaaaaagtggtaaagatatgggtgaaacaattaaaacaatttgttccatagtatctggtccagtaagtgcagaagtgacagcaacggaatataacaagatgcttaaagaaggtgaatacttagcatcattagctaagaatgttgctgtaaaagttcctctcacacctgctggtcttcagacatgcaaagctcttagagaaaaagatatcatggtaaatgtaacgttgtgttttagtgctgctcaagcattactagccgctaaggttggtgcaacatttatttctccatttgtgggaagactcgatgatattggtgaaa

SEQ ID NO: 231449 - DNA, 667 bp, Unknown
  Bacterial polypeptide expressing nucleotide sequence isolated from the Sargasso Sea
catggacatttttgcagacactgcggatattgaagaaattaaaaaactgaatgatttaggaatcattgatggagtgaccaccaatccaaccctgatagcaaaatcaggaagggaattacgggaggttcttggggaaatctgtgatgtcgtccgtggaccggtatcaggtgaaaccgtttctactgatgcagaggggatgatccgggagggacattggttgagagaaattgatgattcctatatggtggtcaaggttccacttacggcagaaggaatcaaggcctgttatcaattgagccaagagggtcatcccgttaatgtgactctttgtttttctgcaaaccaagcattgctagcggcaaaagcgggtgcaacttttatcagtccctttgtgggtagattggatgacttaagtcttgaaggaatgcagctcattgaagacattcgaatcatctatgaaaattatgagttcgacaccagaattctaaccgcctctgctcgtggcccgaaacacatcctggatgctgcaaaaattggatcagatgtggtgacggcccctcccaaggcaatttggcagatgctccaacatcccctgacagataagggtctcaaagcttttttggacgactgggagaagaccgggcagactcttgggcaggttggttga

SEQ ID NO: 231450 - DNA, 539 bp, Unknown
  Bacterial polypeptide expressing nucleotide sequence isolated from the Sargasso Sea
tggacaaaaaaactttaaagcaattataaaaaaaatctgcaaaatagctaaaggtcctgtaagtgctgaggttatctctaccaattataaaggaatgattaaagaaggagaagaattagcaaaaattgataaaaatgttgttattaaactaccaatgactaaagatggaataaaagctacaagctatttttcaaaaaagaaaattcgagtgaatgttacactcatcttttcttccactcaagctttgttagctgctaaagctggggctgcatatgtaagcccttttgttgggaggctagatgatatctcatctaatgggatgtcgttaataagtgacttatctgagatttttttgaactatggttttatgactgaaattttagtagcaagcattagaaatccaatccatatagttgaatcagcaaaactaggtgctgatgtagcaactcttccctattcagtgataatgcaattatttaatcatccacttactgatataggaattgaaaagttccttaaagattggaacaataaataag

SEQ ID NO: 231451 - DNA, 440 bp, Unknown
  Bacterial polypeptide expressing nucleotide sequence isolated from the Sargasso Sea
attgaagttttttattgatacggcagatgtttctgaaattaaggacctttcttcaagcggctttttagatggggtaactactaacccctcactgataaaaaaatcaggtagaaatattaatgaagttattgctgaaatttgtgatattgttccaggccctgtttctgcagaagttgcggcaataaattatgaggatatgattgcagaagctcaagtattaaaaaaaatagctaaaaatgtaactataaaagtacccttaacatgggatggacttaaagcatgcagaacattacgtgatgaaaatgttttagtaaatgtaactttatgtttttcagctagtcaagctttactagctgcaaaagcaggagcaacttttatatctccttttgtaggaagattagatgatataggtttagatggaatggaccttatttctgata

SEQ ID NO: 231452 - DNA, 360 bp, Unknown
  Bacterial polypeptide expressing nucleotide sequence isolated from the Sargasso Sea
cacaagtttctttcaataagaaaattcctgtaaatgtaacattaatcttcagctcttcccaagccttgattgctgcaaaggctggcgcttcttacgttagtccatttgttggaagacttgatgatatatctactaatgggatgaacttaattaatgaaatatcagagatttttttaaattatggattccccacagaaatcctggttgcgagcatacgaaacccggtacatattgtcgactcagcaagaatgggtgcggatgtagcaacactcccatttaaagttttattacagctattcaaacatcccctaacagatattggccttgagaatttcttaaaagattggaataagaaataaa

SEQ ID NO: 231453 - DNA, 661 bp, Unknown
  Bacterial polypeptide expressing nucleotide sequence isolated from the Sargasso Sea
aatgaaattttttgtcgatacagcagatattaagcaaatagaagagcttatcccaactggattcgttaatggagttacaacaaacccatctcttattgctaaaaatggtgatgatatggctaaaactataaaagctatttgctctattgtatcagggcctgttagtgcagaagttactgcaacagattatgatactatgatgcaagaaggtgaatacttagcttctcttgccaaaaatgtagcggttaaggttcctctaacaccaagtggtttaaggacttgtaaaacactgcgagagagagaaattttggttaatgtcacattgtgctttactgccgctcaagctttattagcagcaaaagcgggagcctcatttatttctccttttgttggaaggttggatgatctaggcgaaaatggaatggatttaattgaggatattgttgatatatatgagaactatgattttgatacagaagtgttggttgcgtctgtaagatcacaacagcatataattgatgctgcagtaattggagctcatgtagcaacactgccaccaaaagttattcatgaattatataatcaccctttaactgaaaagggattaaatgcctttttagatgattggaaaaaaacaggacaatccatcctcccaaaataa

SEQ ID NO: 231454 - DNA, 148 bp, Unknown
  Bacterial polypeptide expressing nucleotide sequence isolated from the Sargasso Sea
accaggtgaccgcttaacagaaagcgaattccgctgggcaatgaacgaagatgcaatggcaaccgaaaagctgtctgaaggcatccgcaacttcgccgcagatcaggaaaaacttgaaaccatgcttcgcgaaaaacttagcgcgtaa

SEQ ID NO: 231455 - DNA, 451 bp, Unknown
  Bacterial polypeptide expressing nucleotide sequence isolated from the Sargasso Sea
tatattagattggcataaagcaaaaactggtaaaactagttttactggtgctgaagatcctggtgttatttcggttacacaaatatataagtactttaaagaaaagggattcaagacagaagtaatgggagcaagttttagaaatcttgatgaaataaaagaattagcaggttgcgatcttttaacaatcgcaccaaaatttcttgaggaactgaaaaaagaaaaaggagagttagttagaaaattagatgtaagtacccaaataaataattctattgattacgaatttgaagaaaaagatttcagattaagtatgttagaagatcaaatggcaagtgaaaagcttagtgaaggtataactggattcagtaaggctatagaagaattggaagagctgttactaaagagaaattcagagattaaaaatcataaattgatttctgctaactaa

SEQ ID NO: 231456 - DNA, 529 bp, Unknown
  Bacterial polypeptide expressing nucleotide sequence isolated from the Sargasso Sea
actttactttttaacttctgccaagcggtaacttgtgccaatgcaaagataacttttttttctccgttcgttggccgtatattggattggcataaagcaaaaactggtaaaactagttttgttggtgctgaagaccctggtgttatttcagttacacaaatatacaagtactttaaagaaaagggattcaagacagaagtaatgggagcgagttttagaaatcttgatgaaataaaagaattagcaggttgcgatcttttaacaattgcaccaaaatttcttgaggaactgaaaaaagaaaaaggagagttagttagaaaattagatttaagttcccaaataaatcattctattgactacgaatttgaagaaaaagatttcagattaagtatgttagaagatcaaatggcaagtgaaaagctaagtgagggtattactggattcagtaaggctatagaagaattagaagagctgctacttaagagatattcagaaattaaaaatcataaattgatttctgctaactaaa

SEQ ID NO: 231457 - DNA, 661 bp, Unknown
  Bacterial polypeptide expressing nucleotide sequence isolated from the Sargasso Sea
aatgaaaattttccttgacactgctgatgttaaaattatcggcaaacacttcatcgaaactggtttgatcgatggagtaacgacaaacccatcgttaattatgaagagtggtaaacaacccgatgatgtttactttaaattattcacactaggtgtgaaggatgtcagtatggaggttgtttctaataccgctaaaggtatgattgaagaagcagatcgactgataggtaagttccaagacatagtaacaatcaaagttccttgcactagggagggcctgatcgcctgtaaggaactttctgatcgtggtataagagttaatgttactttgatattcagtgcctcacaagcgattctatctgccaaagcaggagcaaaatacatatcaccattcgtgggtcgtgtagatgaccagagatttggtggttgtaacttaatcaaaaggatcagagaggtattaccttatgactcttgtgagatattatctgcatctattagaagtgtgggtgatgtggaacattcattcgcacagggtgctgacatttgcacaatgccacctaccgtatttgaaaagatgtatgatcacatacttactgataagggtttggaattatttgatattgattacaaaagaacactagaacaatttggaggagtctaa

SEQ ID NO: 231458 - DNA, 184 bp, Unknown
  Bacterial polypeptide expressing nucleotide sequence isolated from the Sargasso Sea
atgaaatcaattttagaacaattgtcctcaatgaccgttgttgttgctgatactggagatttagattcgataaaaaaattccaaccaagggacgccaccaccaatccatccctaatacttgctgctgctaagaaccctgattatgtgaaattaattgataaagctttagaaagttcagaaaatg

SEQ ID NO: 231459 - DNA, 261 bp, Unknown
  Bacterial polypeptide expressing nucleotide sequence isolated from the Sargasso Sea
catggccagcctgctcgatcagctttcacaaatgaccgtggtcgttgccgacactggtgatctggaggcgatccgcaagttcacccctcgggatgccaccacaaacccgtcgttgatcctggctgcagcacagattcccgcctatcagagcctgattgatgaggctttgcggtcatcgcgcaagttgatgggcagcgatgcagcggtggaggacgtggtgcgggaagctctcgatgagatcagtgtgatcttcggcaagga

SEQ ID NO: 231460 - DNA, 655 bp, Unknown
  Bacterial polypeptide expressing nucleotide sequence isolated from the Sargasso Sea
atgaaaatatttttagacacagcagatgtctcaactattcttacacatttcgagactggtctgattgatggagtgacaaccaacccaactctgattatgaagagtggtagagatcccgaagatgtgtatcaggaactcgctgaagcaggtgtaagagacattagtatggaagtagtaggaagtcgtgaagagatgacctctgagggtcgtaggcttgccactaagttccaagaagtagcaactatcaaggttccttgtacaccagatggtctttatgtgtgtaatcagttggcaaaagacggtacaaaggtgaatgttacattgatttttgatgctgcacaggcaatacttgctgctaaagcaggtgctacatatgtttcaccatttgtaggaaggcttgacgataactcagtaaatgggttagatgtaatcagtgatatctctgagatctttagtaagcattggatcaaaactcagattctatctgcatccataagaggagtgaaggcagtttctacttcttttgctcttggtgctcaagtcgtgacaatgccacccgcagtctttgagaagatgtataatcatgttcttacagacaaaggacttcaattatttgatgctgattgggctgcagtattatctcacactaaataaa

SEQ ID NO: 231461 - DNA, 841 bp, Unknown
  Bacterial polypeptide expressing nucleotide sequence isolated from the Sargasso Sea
taaagcagttcaatcaaataaatataaaaaactttttgatgatgtgttagctaattcgaaaagtagaaaatttaatgaattagctaaacaagttgattatattgctgatcaactggcaatagcttttggaatagaattgacaaaaatagtacccggttacgtgtcaaccgaggtggactctgatttatcatttaatacagatgcaactgttgaaaaagccagacaaattatcaatagttacgaacaatctggagtacctagaaatagagttttaataaaaatagccggaacttgggaaggtattcaagctgttaaaaaattagaagctgagggaatatcatgtaattgcacattaattttttctctaacccaagcaatagcgtgtgcagaagcaggtgcttttttgatttcaccatttgttggaagaatccttgactggttcaaagcaaacagtccaaaagattatgatgcaactaatgacccaggtgttgaaagtgttgagaaaatttataattattttaagaagtataattataatacgattgtaatggctgcatcttttagaaacaaagaagaaataattaatttggcaggatgtgataaattaacaataagcccaaccctgcttgaagaattaaataaatcagaaggggagttggacctaaaactatctcaaaatcaatctagtcaaatggacattgatagaataaatgtaaacgaaagttcttttcgttggcatctaaatgagaatcaaatggcttcctttaagcttgccgagggaattagattattcaacaaagacctactaaaactcaaggaaactattagagaaaaattataa

SEQ ID NO: 231462 - DNA, 613 bp, Unknown
  Bacterial polypeptide expressing nucleotide sequence isolated from the Sargasso Sea
aagaattttgattaaaattgctgcaacttgggagggaattaaggcagctgaaattttggaacaagaggggattaagtgcaacttaactttactttttaacttctgccaggcggtaacttgtgccaatgcaaagataactctaatttctccgttcgttggccgtatattagattggcataaagcaaaaactggtaaaactagttttgttggtgctgaagaccctggtgttatttcggttacgcaaatatataagtactttaaagaaaagggattcaagacagaagtaatgggagcgagttttagaaatcttgatgaaataaaagaattagcaggttgcgatcttttaacaatcgcaccaaaatttcttgaggaactgaaaaaagaaaaaggagagttagttagaaaattagatataagtacccaaataaataattctattgactacgaatttgaagaaaaagatttcagattaagtatgctagaagatcaaatggcaagtgaaaagctgagtgaaggtattactggattcagtaaggctatagaagaattggaagaactgctaatacagagatattcagagattaaaaatcataaattgatttctgctaactaa

SEQ ID NO: 231463 - DNA, 238 bp, Unknown
  Bacterial polypeptide expressing nucleotide sequence isolated from the Sargasso Sea
tatgaaatcaattttagaacaattgtcctcaatgaccattgttgttgctgatactggagatttagattcgataaaaaaatttcaaccaagggacgccaccaccaatccatcgctaatacttgcggctgctaagaaccctgattatgtgaaattaattgataaagctttagaaagttcagaaaatgccttgcctcaaggattctctggaattgaattaattaaggaaactgttgacaaa

SEQ ID NO: 231464 - DNA, 526 bp, Unknown
  Bacterial polypeptide expressing nucleotide sequence isolated from the Sargasso Sea
ttactatttaacttttgccaagcggtaacttgtgccaatgcaaagataactctaatctctccttttgtcggccgtatattagattggcataaagcaaaaactggtaaaactagttttgttgctactgaagaccctggtgttatttcggttacacaaatttataattattttaaagaaaagggattcaagacggaagtaatgggagcaagttttagaaatcttgatgaaataaaagaattagcaggttgtgatcttttaacaatcgcaccaaaatttcttgaggaactgaaaaaagaaaaaggagagttagttagaaaattagataaaagtaccccaataaataattctattgactacgaatttgaagaaaaagatttcagattaagtatgttagaagatcaaatggcgagtgagaagcttagtgaaggtatcactggtttcagtaaggccatagaagaattggaagagttgctacttaagagatattcagaaattagaaatcaaaaattaatttctgccaactaaa

SEQ ID NO: 231465 - DNA, 655 bp, Unknown
  Bacterial polypeptide expressing nucleotide sequence isolated from the Sargasso Sea
atgaaaatatttctggatacagcagacacgccaacagtaaagaggttattttcgacaggtttgatagacggagtgacaacgaatccatcattgattcggaagtctggagctaatcctctagatgtttatgctgaattgcaatctcttggagtacccgatatcagcatggaagtttacggcactgcagatgaaatgtacgatgaagcacagaatctgtcagctcagtttggtgatgtagctactattaagctgccaatgactgttgatggattaagtgttactcgtaaattaagtcagcagaatatccgtacaaatgtcactttgatcttctctattcctcaagcaatccttgcagcaaaagcaggtgctacttatgtatctccttttgtaggacggcttgacgatcaacaagttgcaggacttgaagttgtccgaggaatagcatctctatttcaaatgaaaagtgtacgcactaaagtattagctgcgtctattcgagatgtacatcgagctgtgcgctctttttacaatggagctgacatagtcactatgcctcctgctgtatttgaaagaatggcagatcacattcttactgatgcgggattagatatctttaacaaagatattgccgcaatggcacacaataattactaaa

SEQ ID NO: 231466 - DNA, 961 bp, Unknown
  Bacterial polypeptide expressing nucleotide sequence isolated from the Sargasso Sea
catggtatctcaattagatagtcttaaaaaattttcatcagttgtggcagacaccggagatattgacagtattcaaaaatttaacccagatgactgtactactaatccgtctttaatttttaaagctgttcaatcaaacaaatacaaaaaattagttgatgaagtaataagtaattcaaaaagtaggaaattttctcaaactgaggatcaggttaattacattgctgatcaactaactattgcttttggtatagaattaacaaaaatcgtgccaggatatgtttctaccgaggtggactctgatttatcatttaatactgacgctactgttgaaaaggcaaagcaaataatcaatagctatgagcaatcaggcgtcctcaagaatagaatattaattaaaattgcaggcacatgggaaggaattcaagcagtaaaaaaattagaggcagagggaatatcttgtaattgcacactcattttttctttaacacaagcaatagcttgtgcagaagcaggagcatttttaatttcaccatttgtgggaaggatacttgactggtttaaatcaaatacacaaaaagattatgactcatctaatgatccaggtgttgagagtgtagagaagatttttaattattttaaaaagtttaattataacactattgttatggcagcatcatttagaaataaggatgaaataattaatttagctggatgtgataaattaactatcagcccaactcttttagaagagttaagccaaaacgatgatgaaattaaacttaaattatcaaaagaaaactcatcttcattagatattgagagaattaatgtgaatgagagctcatttcgttggcatttaaatgaaaatcagatggcatcttttaaactagctgagggtattagattatttaataaggatttattgaaattaaaagaattgattagaggccaattataa

SEQ ID NO: 231467 - DNA, 643 bp, Unknown
  Bacterial polypeptide expressing nucleotide sequence isolated from the Sargasso Sea
gatgaaaatatttattgattccgctgacattgacgaaattattaaagctgataacactggattaattgatggtgttaccactaatccaactcttattaagcgttccggtttagatccttatgatgtttacgatcgagtgttgaatgaaaccaacattaccgatctaagcatggaagtgtcaggatctcgatctgaaatgctgtatgaagctgatcgacttatcgatcgttatggtgaatcgtttgccaccatcaaagttcctatgacaaaagatggactctttgtctgtcgatcgttatcagctcttcaggtccgagtaaatgttactttgattttctctattccccaagcaatccttgctgctaaagcaggtgcttattatgtttctccttttgttggtcgtcttgatgatcaatctgtagcagggcttgaagttgtgcgtggaattgcttccttgtatcaacagcaagcagtgcctacacaagttttggctgcatctattcgaactgtacataaagcagtacgttctttttacaatggagcctcggttgtaaccatgcctcctaaagtatttcatcagatgtgggatcacattcttactgatcaagggctcgcaatatttgagcaagatttgatatcttga

SEQ ID NO: 231468 - DNA, 304 bp, Unknown
  Bacterial polypeptide expressing nucleotide sequence isolated from the Sargasso Sea
atgaaatcaattttagaacaattatcttctattactgttgttgtcgctgatactggagatttagatgcgattaaaaagtttcaacctagagatgccaccactaatccatcactaatattggctgcggctaagaatcctgattacataaaattaatcgatcaagctttggaaagctcaagaaaatccctacctgttggcttttcagaaagtgaattaattaaagagactatagatcaggtttcagtattttttggcaaggagattcttaatcttattatctggaagagtatctacagaagttgat

SEQ ID NO: 231469 - DNA, 559 bp, Unknown
  Bacterial polypeptide expressing nucleotide sequence isolated from the Sargasso Sea
atgagcaatcagttagcttcattacgtgatatcactaccgttgttgccgacacgggcgacatcgatgccattaaaaagtatcaaccagtcgatgccacaactaacccgtcgctacttttaaaagcggctggtcttcctcaatatgcaagcctaattgatgatgctgtagcatgggcaaaacttcagtcaaacgacgctgaccagcagcttactgatgcagcagacaaactagcggtagccattggtaaagaaatctctgcaacgattccaggccgaatctcaactgaagtagacgcacgcctatcgttcgacactgccgccactatcgaaaaagcggaacgtttggttcagctatatgaagacgcgggtatcgataagtcacgcattcttattaaaattgcctctacttgggaaggtattcaggcagcagaagagctagagaagaaaggcattcagtgtaacttaacgcttctatttagcttcgcccaagcacaagcttgtgcagaggccggtgtttatcttatctctccattcgtagggcgcattttagactggtaca

SEQ ID NO: 231470 - DNA, 743 bp, Unknown
  Bacterial polypeptide expressing nucleotide sequence isolated from the Sargasso Sea
gttgcgctgggagtgcgtcgtgctatcatcagggaagatcggttacatccccctaacaagctgtttaaagagaatcgctatcatgacggacaaattgacctcccttcgtcagttcaccacagtagtggccgacaccggagacatcgcggcaatgaagctgtatcagcctcaggatgccacaactaacccttctctcattcttaacgcagcgcagatcccagaataccgcaagctgattgatgacgctgtagcctgggctaagcagcagagcaacgaccgcgcacagcagatcgtcgacgcgaccgacaaactggcagtaaatatcggtctggagatcctgaaactggtcccgggtcgtatctctactgaagttgacgctcgtctgtcttacgacaccgacgcgtccatcgcgaaagcaaaacgtctgatcaagatgtacaacgacgctggcatcagcaacgatcgcattctgattaaactggcttcaacctggcagggcatccgtgccgctgagcagctggaaaaagaaggcatcaactgtaacctgactctgctgttctccttcgcgcaggcacgtgcatgtgcagaagctggcgtatacctgatttctccgttcgttggtcgtattcttgactggtacaaagccaacaccgacaagaaagagtatgcaccggcagaagatccgggtgtggtttccgtaacggaaatctacgagtactacaaacagcacggttacgaaaccg

SEQ ID NO: 231471 - DNA, 902 bp, Unknown
  Bacterial polypeptide expressing nucleotide sequence isolated from the Sargasso Sea
gttggctgatactggagatttagattcgataaaaaaatttcaaccaagggacgccaccaccaatccatcgctaatacttgctgctgctaagaaccctgattatgtgaaattaattgataaagctttagaaagttcagaaaatgcattgcctcaaggattctctgaaattgaattaatcaaagaaactgttgatcaagtttcagtattttttggaaaagaaatattgaaaattatttcagggcgcgtatctacagaagttgatgcaagattgagctttgataccgaagctacggtagaaaaagcgagaaaattgatcaatctttacaaaaattttggcattgaaaaggaaagaattttgattaagattgctgcaacttgggagggaattaaggcagctgaaattttggaaaaagagggtattaagtgcaacttaactttactttttaacttctgccaagcggtaacttgtgccaatgcaaagataactctaatttctccgtttgttggccgtatattggattggcataaagcaaaaactggtaaaactagttttattggtgctgaagaccctggtgttatttcggttacacaaatatacaagtactttaaagaaaagggattcaagacagaagtaatgggagctagttttagaaatcttgatgaaataaaagaattagcaggttgcgatcttttaacaatcgcaccaaaatttcttgaggaactgaaaaaagaaaaaggagagttagttagaaaattaaatgtaagtacccaaataaataattctattgattacgaatttgaagaaaaagatttcagattaagtatgttggaagatcaaatggcaagtgaaaagcttagtgaaggtatcactgggattcagtatggctatagaaaaattggaa

SEQ ID NO: 231472 - DNA, 862 bp, Unknown
  Bacterial polypeptide expressing nucleotide sequence isolated from the Sargasso Sea
atgaaatcaattttagaacaattgtcctcaatgaccgttgttgttgctgatactggagatttagattcgataaaaaaatttcaaccaagggacgccactaccaatccatcgctaatacttgctgctgctaagaaccctgattatgtgaaattaattgataaagctttagaaagttcagaaaatgcattgccccaaggattctccgaaattgaattaatcaaagaaactgttgaccaagtttcagtattttttggaaaagaaatattgaaaattatttcagggcgcgtatctacagaagttgatgcaagactgagctttgacaccgaagctacggtagaaaaagcgagaaaattgatcaatctttacaaaaattttggaattgaaaaggaaagaattttgattaagattgctgcaacttgggagggaattaaggcagctgaaattttggaaaaagagggtattaagtgcaacttaactttactttttaacttctgccaagcggtaacttgtgccaatgcaaagataactctaatttctccgttcgttggccgtatattagattggcataaagcaaaaactggtaaaactagttttgttggtgctgaagaccctggtgttatttcggttacgcaaatatacaagtactttaaagaaaagggattcaagacagaagtaatgggagcgagttttagaaatcttgatgaaataaaagaattagcaggttgcgatcttttaacaatcgcaccaaaatttcttgaggaactgaaaaaagaaaaaggagagttagttagaaaattagatgtaagtatccaaatgaataattctattgactacgaattgaagaaagagattttagattaag

SEQ ID NO: 231473 - DNA, 388 bp, Unknown
  Bacterial polypeptide expressing nucleotide sequence isolated from the Sargasso Sea
aacgatcgccttctgattaaactggcttcgacctggccgggtatttgcgccgccgagcagctggaaaaagaaggcatcaactgtaacctgactctgctgttctccttcgctcaggctcgcgcttgtgctgaagcgggtgtattcctgatctctccgttcgttggccgtattctcgactggtacaaagcgaacaccgataagaaagagtacgcgccggctgaagatccgggcgtcgtttccgtcagtgagatttacgagtactacaagcagcacggttatgaaactgtcgtaatgggcgcaagcttccgtaacgtcggtgaaatccttgagctggctggctgcgatcgcctgactatcgctccggctctgttgaaagagctggcggaaa

SEQ ID NO: 231474 - DNA, 323 bp, Unknown
  Bacterial polypeptide expressing nucleotide sequence isolated from the Sargasso Sea
tatgaaatcaattttagaacaattgtcctcaatgactgttgttgttgctgatactggagatttagattcgataaaaaaatttcaaccaagggacgccaccaccaatccatctctaatacttgctgctgctaagaaccctgattatgtgaaattaattgataaagctttagaaaattcagaaaatgcattgcctaaaggattctccgaaattgaattagtcaaagaaactgttgaccaagtttcagtattttttggaaaagaaatattgaaaattatttcagggcgcgtatctacagaagttgatgcaagactgagctttgaca

SEQ ID NO: 231475 - DNA, 743 bp, Unknown
  Bacterial polypeptide expressing nucleotide sequence isolated from the Sargasso Sea
tatgagcgacttacttagccaactgaaagccgtgaccacagtcgttgtggacagcggagatctgactgccatcgagcagttccgcccggtcgatgcaaccactaaccccagtttgctgttaaatgccagtcaattggagtttgccaaaccgattttgagcaatgccattgcttacgcgaaaagcaaaaccagtgacagtgcagaacagcttagcctggcttctgacaaatttgctgtcgatattggtaccgccattgccaagctggtacctggccgcgtatcaaccgaagttgatgcccgcctgtctttcgacaccgacgctacggttaacaaagcgctgcagcttattgctctgtacaaagagaacggcgttgcaaccgaacgtatcctgatcaaaatagcctctacctgggaaggcattcaggcggcccgcgtgctggagcagcaaggtattcagtgtaacctgacgttgttattccatatggcccaggccagagcctgtgccgaagccggtgcgtacctgatttcacctttcgtcggtcgcattctcgattggtataaagccagcactggcaaagactacactgctgaaacagacccaggtgtattatcagtgcgtgacatataccgtttctacaaacaacacggctataaaacggttgtaatgggtgccagcttccgcaacaccggtgaagtactggcgctggcaggttgcgatcgtttaacgatcagcccggcattac

SEQ ID NO: 231476 - DNA, 370 bp, Unknown
  Bacterial polypeptide expressing nucleotide sequence isolated from the Sargasso Sea
ctacaccggttccgatgacccgggcgtgcagtcggtgacgcgcatctataactactacaaggctaacggctacaaaacagtagtgatgggtgcgagcttccgtaacctcagccagatcgaagagctggccgggtgtgatcgcctgaccatcagcccggacctgttggagaagctggcagccgatgaaggcaagctggagcgcaaattggcgccaggccatgccggtgaggcccgtgtgcatatgactgaagcgcagttccgttgggagtccaacgaggacgcgatggcgactgagaagctggcggaggggattcgtcagtttgctcgggaccaagagaagctggaggcgttgttgtcggccaagctgtaa

SEQ ID NO: 231477 - DNA, 363 bp, Unknown
  Bacterial polypeptide expressing nucleotide sequence isolated from the Sargasso Sea
tatgaaatcaattttagaacaattgtcctcaatgaccgttgttgtcgcagatactggagatttagattctataaaaaaatttcaaccaagggacgcaaccaccaatccatcgctaatacttgctgctgctaagaaccctgattatgtgaaattaattgataaagctttagaaagttcagaaaatgcattgccccaaggattctccgcaattgaattaattaaagaaactgttgatcaagtttcagtattttttgggaaagaaatattgaaaattatttcaggtcgcgtatctacagaagttgatgcaagactaagctttgataccgaagctacggtagaaaaagcgagaaaattgatcaatct

SEQ ID NO: 231478 - DNA, 793 bp, Unknown
  Bacterial polypeptide expressing nucleotide sequence isolated from the Sargasso Sea
tatgagcacactgttaagtcaattaaaagccgttactactgttgttgtcgacagcggtgatctgactgctatcgaacaattccgtccggtggatgccaccaccaatccgtcactactactcaatgccagtcagttggacttcgcccggcctttactggcacaagctgccgcctatgccaaaagccatgccagcaccgctgaaatgcaactgagcctggcttcagataaatttgcggttgatgtcggtaccgccattagcaaactggtgccaggccgggtatcgacagaagtcgatgccagattaagttttgataccgcagcgactattgccaaagctcagcagttggtcgccttgtatcaggaaaatggcattggcaaagataaaattctgatcaaaatcgcgtccacctgggaagggattcaggccgctaaggtgctggagcaacaaggcattcaatgtaatctgacgctgttatttcatatgtgccaagcgcgcgcttgcgctgaagccggggttttcctgatctcgccatttgttggccgtattctggattggtacaaagcccaaaccggccagagctatgatgctgaaaccgatcctggtgtgttatcggtgcgggaaatttatcgttattttaaacaacacggccacaacaccattgtgatgggcgcgagctttcgcaacatcggtgaagtgttggcgctggcaggctgtgaccgcctgacgatagcgcctgggttactggatgagctggataaacacaaggtgaattggtggtgcatttgcgagatc

SEQ ID NO: 231479 - DNA, 511 bp, Unknown
  Bacterial polypeptide expressing nucleotide sequence isolated from the Sargasso Sea
atgagcaatcagttagcttcattacgtgatatcactaccgttgttgccgacacgggcgacatcgatgccattaaaaagtatcaaccagtcgatgccacaactaacccgtcgctacttttaaaagcggctggtcttcctcaatatgcaagcctaattgatgatgcagtagcatgggcaaaacttcagtcaaacgacgctgaccagcagcttactgatgcagcagacaaactagcggtagcgattggtaaagaaatctctgccactattcctgggcgaatctcaactgaagtagacgctcgcctatcgttcgacactgccgccactatcgaaaaagcggaacgtttggttcagctatatgaagatgcgggtatcgataagtcacgcattcttattaaaattgcgtctacttgggaaggtattcaggcagcagaagagctagagaagaaaggcatacagtgtaacttaacgcttctatttagcttcgccccaagcaccaagcttgtgcagaggc

SEQ ID NO: 231480 - DNA, 598 bp, Unknown
  Bacterial polypeptide expressing nucleotide sequence isolated from the Sargasso Sea
atgaaaaaccaattagatgcgttgagggatatgaccactgtagttgccgatacaggggatgtagatgcaattaaaaaatatcagccctatgacgccactaccaatccatcgttaattttaaaagccgcttctttaccccaatatcaacacttaattgataaatccctgagctgggcaagggcacaaaccaataaaaaagcgcggcaaataatgtacgccaatgacatgctctgtgtacttattggcaaagaaataagcgagtctgtgcctggaaaagtctctacagaagtggatgctagactgtctttcgataccttagccactattgataaggccaggcaactcataaggctatatgaggaagaaggcgtcgataaatctcgtattcttataaaaatggcgtcgacgtgggaaggaattaaagcggctgaacaattagagcaagaaggcattcattgtaaccttactctcttgtttagctttgcgcaggcaagggcgtgtgccgaagcaaacgtgtatttgatatcgccgtttgtgggcagaatattagactggtacaagtcttatcataacgttactgagtactcacctgaagatg

SEQ ID NO: 231481 - DNA, 373 bp, Unknown
  Bacterial polypeptide expressing nucleotide sequence isolated from the Sargasso Sea
cttgagcgcctgccagcgctcgggtaatgtcactagacccacaggacagagcacgcccatgacttccaagctggaacaactcaagcaattcaccaccgtcgtagccgataccggcgatttttccactctcgccaagctcaagccacaagacgctaccaccaacccttccctgctgctcaaggctgcgtcgatccctggctatgccaagctgctggatgagtgcgtgcaggactgcaacggcgatgtgggcctggccagtgaccgctttgcggtggcggtgggtcaagaaattctcaaagtagtgccgggccgtatttccactgaggtggatgcgcgtctgtcatttgacgaggccgccattctcaagcgtgcg

SEQ ID NO: 231482 - DNA, 766 bp, Unknown
  Bacterial polypeptide expressing nucleotide sequence isolated from the Sargasso Sea
gtttcggtattttttggaaaagaaatattgaaacttatttcagggcgcgtatctacagaagttgatgcaagattgagctttgataccgatgctacggtagaaaaagcgagaaaattgatcaatctttacaaagattttggaattgaaaaggaaagaattttgataaagattgctgcaacttgggagggaattaaggcggctgaaattttggaaaaagagggtattaagtgcaacttaactttgctttttaacttctgccaagcggtaacttgtgccaatgcaaagataactctaatttctccgttcgtaggccgtatattggattggcataaagcaaaaactggaaaaactagttttgttggtgctgaagatcctggggttatttcggttacgcaaatatacaagtactttaaagaaaagggatttaagacagaagtaatgggagcgagttttagaaatcttgatgaaataaaagaattagcaggttgcgatcttttgacaatcgcaccaaaatttcttgaggaactgaaaaaagaaaaaggagagttagttaggaaattagatgtaagtacacaaataaataattctattgactacgaatttgaagaaaaagatttcagattaagtatgttagaagatcaaatggcaagtgaaaagcttagtgaaggtattactggattcagtaaggctatagaagaattggaagagctgctactaaagagatattcagagattaaaaatcataaattgatttctgctaactaaa

SEQ ID NO: 231483 - DNA, 466 bp, Unknown
  Bacterial polypeptide expressing nucleotide sequence isolated from the Sargasso Sea
atgaaatcaattttagaacaattgtcctcaatgaccgttgttgttgctgatactggagatttagattcgataaaaaaatttcaaccaagggacgccaccaccaacccatcgctaatacttgctgctgctaagaaccctgattacgtgaagttaattgataaagccttagaaaattcacaaaaggcattgtcccaaagattctctgaaattgaattaattaaagaaactgttgaccaagtttcagtattttttggaaaagaaatattgaaaattatttcagggcgtgtatctacagaagttgatgcaagactgagctttgacactgaagccacagtaaaaaaagcaagaaaattgatcaatctttataaaaattttggaattgaaaaggaaagaattttaattaagattgccgcaacttgggagggaataaaggcagctgaaattttggaaaaaggagggtattaaa

SEQ ID NO: 231484 - DNA, 745 bp, Unknown
  Bacterial polypeptide expressing nucleotide sequence isolated from the Sargasso Sea
agaaatattaaaaattatttcagggcgcgtatctacagaagttgatgcaagactgagcttcgacaccgaagccacagtagaaaaagcgagaaaattgatcaatctttacaaaaattttggaattgaaaaggaaagaattttgattaagattgctgcaacttgggagggaattaaggcagcggaaattttggaaaaagagggtattaagtgcaacttaactttactttttaacttttgccaagctgtaacttgtgcaaatgcaaagataactctaatttcacccttcgttggccgcatattggattggcataaagcaaaaactggtaaaactagttttgttggtgctgaagaccctggtgttatttccgttacagaaatatacaagtactttaaagaaaagggattcaagacagaagtgatgggagcgagttttagaaatcttgatgaaataaaagaattagcaggttgcgatcttttaacaatcgcaccaaaatttcttgaagaacttgaaaaagaaaaaggagagttagttagaaaattagatgtaagtacccaaataaataattctattgattacgaatttgaagaaaaagatttcagattaagtatgttagaagatcaaatggcaagtgaaaagcttagtgaaggtatcactggattcagtaaggctatagaagaattggaagagctgttacttaagagatattcagagattaaaaatcataaattgatttctgctaactaa

SEQ ID NO: 231485 - DNA, 775 bp, Unknown
  Bacterial polypeptide expressing nucleotide sequence isolated from the Sargasso Sea
atgagcgacttacttacccagttaaaagcagtgaccactgttgtggtcgacagcggcgatctgaccgctattgagcagttccgtccggtagatgctaccactaatccaagcttattgttaaatgccagccaactggactttgctaaacctgtattagctggcgctgtagcttatgccaaaagcaaagccagtgcggcggatgcacagctcagcctggcatcagacaaatttgccgtcgacattggcacagccatcagtaagctggtaccgggccgggtatcaactgaagtagacgcccgtttgtcttttgatacagatgcaacaatagctaaagcgcatcaattggtggcgctgtacaaagaaaacggcataggcacggatcgcattctgattaaaattgcctcaacttgggagggcattcaagccgcacgccagttggagcaagaaggtattcaatgcaacctgacgctgctgtttcatatggctcaggcccgcgcctgcgccgaagcaggtgtgtatttaatttcacctttcgttggccgcattctggattggtacaaagccagcaccggccaggattacaccagcgagaccgatccgggtgttatttcagtgcgcgaaatttatcgtttttacaaacagcatggttttaaaacggtggtgatgggcgccagcttccgtaacgtaggtgaagtgctagccctggccggttgtgaccgcctaaccattagcccgggcttactggccgaactgagccagcaacagggcgagctga

SEQ ID NO: 231486 - DNA, 955 bp, Unknown
  Bacterial polypeptide expressing nucleotide sequence isolated from the Sargasso Sea
atgaaaaatcagttagatgcattgagggatatgactaccgtagttgcagatacaggaaacgtggaagcaattaaaacgtatcgaccttatgatgccactaccaacccatccttaattttaaaagccgctacgctgcctcaatatcaacatttgattgataaatcacttagctgggcaagggcacaggctaataataaggaacggcaaattctgcacgccaacgacatgctctgtgtacttattggtaaagaaataagcgagtttgtacctggaagagtgtctacggaagtagatgctagactgtccttcaatacatttgccactattgataaggccaaacaactcgtaaaactatatgaggaagaaggcgtcgacaaatctcgtattcttataaagatagcctcgacgtgggagggaattaaagccgctgagcagttagagcgggaaggcattaattgtaaccttacgcttttgtttaactttgcgcaggcaagagcgtgtgccgaagcaaacgtgtttttgatatccccgttcgtcggcagaatattagactggtacaagtctcatcacaatattgctgagtacttacctagcgatgaccctggagttaaatcggtcaccgaaatctataattattataaagttcacggttataaaaccgttgttatgggagcgagctttagaaatatcggtgagattcaggctttggcagggtgtgacagattaactattagtccagagcttctggaggcactggcgaactgttcagatccgctacctcgtatgctttgtgataaaaatgagtaccaagttccccctgcaccaatagatgaggcaacctttcgctgggaaatgaaccaaaacgcaatggccacagaaaagcttgctgaaggcatacgcaactttaatatcgatcaacaaaagctggaaaacatgcttgctgacagactatagg

SEQ ID NO: 231487 - DNA, 820 bp, Unknown
  Bacterial polypeptide expressing nucleotide sequence isolated from the Sargasso Sea
catgagccagctaaatgaactcaaaaaactgacgatcgttgtggccgacagtggtgatatagactcaattaggatctattccccacaagatgcaaccaccaatccttcactgattttaaaggccgcccctcttccacagtacaagcatctcactgaagacgcgattcggtatgcgaatgagcagggaggagaaaaatcaacccgggttttaaatgcctgcgatgctctggcggtcaatattggtgctgaaattcttaagtatgtcccaggccgtatctcgacggaagtggatgccagattgtcatttgaccggggactctgtgtggccaaggcccggaagctaattcaaatgtacgctgagaaaggaattgataaatcccgtgtgctgatcaaactggcttcaacatgggaaggtatccgtgccgctgaagaactcgaacgtgaaaatatcaactgtaatctgacgttgctgttttcgtttgcacaggcgcgggcatgtgcagatgctggcgtgtaccttatttcgcctttcgttggtcgtatttacgactggtatcagaaaaatactccagccgccgaatatgtccctgaacaggatccgggcgtggtgtccgtcagaaatatttatgaattctacaagaaattcggatatgaaacggttgtgatgggggctagtttccgtcgtaaagagcagatcattgcacttgccggatgtgatcgactgaccattgcgccgcagttcctagatgaacttgaaaaaacccagggggccctggtacggcaactgtcgccttcggtagaaaaagagtatcgcctgtta

SEQ ID NO: 231488 - DNA, 736 bp, Unknown
  Bacterial polypeptide expressing nucleotide sequence isolated from the Sargasso Sea
tatgaacaaactggaacaactgcgcgccatgaccacggtcgtggccgatacgggtgatctcgaggccatcacacggctcaaacccacggacgccaccaccaacccctcgttgctgctcaaggccgcggcgttgcccgaattcgctgacgaagtcgcagcgctgacggcgtctcaagaagccgtggcggacaaggtcgaccgctttgcagtcagcgtcggggccaggatcaatcaagtgatcccgggcgttatcagcacagaggtcgacgcgcgcctctcattcgataccgaggcgaccatcgccaaagccgaaaaactgatcgggctttatgacgacgcaggtatcggccgcgatcgtgtgctcattaaagtcgcggcgacctgggaagggattcgtgcggcggaaatcctcgagcagcgcggcatccactgtaacgccacgctgatcttcagttttaaacaggcttgtgcctgtgccgacgcaggggtattcctcatttcaccctttgtcggccgcattaccgattggtacaccgtcaataccgatctcgtcattcaaaaccctgccgatgaccccggtgtgcagtcagtcacccggatctacaaccacttcaaggtgcacggttacggcacggtcgtgatgggggcaagcttcagaaacaccggccaggttgaagcgctcgccggctgcgatcgcctgaccatcagccccgatctgttacaacagttggaagcc

SEQ ID NO: 231489 - DNA, 361 bp, Unknown
  Bacterial polypeptide expressing nucleotide sequence isolated from the Sargasso Sea
atgacctccaagctggaacaactcaagcagttcactaccgtagtcgctgacaccggtgacctcgacgccatcgcccgcctgcaaccggtggatgccaccaccaacccctcgctgctgctcaaggcggcggccctaccccgctatgccgatctgttgaatcaggcagtgagtgccggcaagggagacctgggattggcctgcgatcacttcgcggtggccgtcggccaggagatcctcaaggtcattccggggcgcatttccaccgaagtcgatgcgcgcctgtcgttcgacaccgacgcgaccctgcgccgcgccgagcgcctgatcggcctttacgaaaaagcaggggatggccgcgagc

SEQ ID NO: 231490 - DNA, 409 bp, Unknown
  Bacterial polypeptide expressing nucleotide sequence isolated from the Sargasso Sea
catggcaaccctgctcgaccagctctctgcgatgaccgtcgtggtggcggataccggtgatctcgaggcaatccgtaagttcacgccgcgtgacgccacgaccaacccgtcgttgatcctggcggctgcacaaatacctgcttatcaaagtttgattgatgaggcgctgcgttcctcacgcaagctcatcggtgatgcagctcctgttgaagacgtggtgcatgaagccctggacgaaatcagtgtgattttcggtaaggaaatcctcaagattgttccccgtcgtgtgtctactgaagtcgatgcacgcttgagctacgacaccgatgcgacgatcgagaagggtcgcaagctgatccgcctttacaacgatgctggcatcagcaatgaccgcgttctgatcaagatt

SEQ ID NO: 231491 - DNA, 750 bp, Unknown
  Bacterial polypeptide expressing nucleotide sequence isolated from the Sargasso Sea
ggaaagaaatattgaaaattatttcagggcgcgtatctacagaagttgatgcaagactaagctttgatacagaagctacggtaaaaaaagcaagaaaattaatcaatctctacaaaaattttggaatcgaaaaggaaagaattttaattaagattgccgcaacttgggaaggaattaaggctgctgaaattttggaaaaagagggtattaaatgcaacctcactttactttttaacttctgccaggcggttgcttgtgcaaaagcaaagattaccttaatttctcccttcgttggtcgtatattggattggcataaagcaaaaactggtaaaactagtttcgagggttctgaagaccctggtgttatttcggttacacaaatttataagtactttaaagaaaaaggatttaagacagaagtaatgggagcaagctttagaaatattgatgaaataaaagaattggcaggttgcgatcttctaacaatcgctcctaaatttctagaggaactaaaaaaagaaaaagaagttttagttagaaaattagatgcaagtacccaattgaataattctcctgattacaaattcgaagaaaaagattttagattaagtatgttggatgatcaaatggctagtgagaagcttagtgaaggtattactggcttcagtaaggctatagaagaattggaagagttgctaattaagagatattcagaaattaaaaatcataaattaatttctgctagctaaa

SEQ ID NO: 231492 - DNA, 571 bp, Unknown
  Bacterial polypeptide expressing nucleotide sequence isolated from the Sargasso Sea
atgaaatcaatcttagaacaattatcttctatgactgttgttgttgctgatactggcgatttagatgctattaaaaagtttcaacccagagatgccactactaatccttctttaatattggccgcggctaaaaatcctgattatgtaaagttaatagatcaagctttggaaagttcgagagaatctttgcctaaaggctttactgaaagtcaattaataaaagaggctattgatcaggtttcagttttttttggcaaggagattcttaatcttgtttcgggaagagtctctacagaagttgatgcaagacttagttttgatactgaagctacagtcaaaaaagcgagaaagttaataaatcattataaaagttttggaatagataaagaaagaatattgattaagatcgcatcaacttgggagggaattcaagcagctgagattctggaaaaagagggtattaagtgtaatttaactttactttttaacttctgccaagcagtagcttgtgcaaatgcaaaagttactttaatctctccttttgttgggcgaaatattggattggcataaa

SEQ ID NO: 231493 - DNA, 559 bp, Unknown
  Bacterial polypeptide expressing nucleotide sequence isolated from the Sargasso Sea
ggcggaggagctggagcgggaaggtatccactgtaatctgacgctgctcttttcctttgcccaggcgcgcgcctgcgccgaagcgggcgtctggctgatttccccgtttgtcgggcgtatttacgactggtatcgcgaccgtcagctgctggaagatgagagcccacagaacgatccgggcgttatctcggtacgcaacatctatgagtactacaaaaaacatcgttacccaacggtcatcatgggggcgagctttcgtaaaccggagcaggttatcgccctggccggctgcgaccgtctgaccattgccccggcgctgctggaagcgctcagccggatggagggggagctcgccgtggcgctggcgcctcccgttgccggcgaaataccgccgtcgcccctgaacgaagccgagttttactggctgcacaaccaggacccgatggccgtcgataagctggcggaagggatccgtttatttgctcaggaccaggagaagctggaatcgatgttgagcgagctgctggaaaaacaggaggccgtaaatgtcatcgcgtaa

SEQ ID NO: 231494 - DNA, 670 bp, Unknown
  Bacterial polypeptide expressing nucleotide sequence isolated from the Sargasso Sea
ggcggcgctgtccttcgatagcgccgccaccgtggcacgggcgcgcgcgctgcatcagcgctacctgcagctgggcatccccggcgaccgcgtcctggtgaagatcgccgccacctgggaaggcatccaggcggcgcgccagctggagcgcgagggcattcgctgcaacctcacgctgatcttcaacctggcccaggcccgtgcctgcgccgaggccgacatctacctggtgtcgcctttcgtcgggcgtattctcgactggcacaggcagcagaccccggacgtccgcttcgaggccgagaacgaccccggcgtgctgtcggtgcgccaggtctatcgtttcttcaagcagcacgactacgccacagtggtgatggccgcgagctttcgcaacatcggcgaagtgctcgccctggccggctgcgaccgcctgaccatcagccctgccctgctcgccgaactggaacaggccagcggcgaactgcggccagcgctgcaggacgacggccagcgggtgctcgccccggcctgcctcgacgagcagcagtttcgctggcagatgaacgaagaccccatggccacggagaagctcgccgagggcattcgccagttccatgccgatcagctcgccctggaagcgctgctgatcgagcgcatgcgggagctctga

SEQ ID NO: 231495 - DNA, 502 bp, Unknown
  Bacterial polypeptide expressing nucleotide sequence isolated from the Sargasso Sea
atggccagtttgcttgagcagctctccagcatgaccgtcgtggtagccgataccggcgacctccaggccatcaagacgttcactccgagggatgccaccaccaacccctcgttgatcctcgctgccgctcagattccggcgtaccaaaacctgatcgatgagacgctgcgtgcctcacgggctctgatcggtccaacggcgcccgctgagcaggtcgtcgccgaggcgctcgacgagatctgcgtgaccttcggcaaagagatcctcaaaatcgtgccgggccgtgtttcgaccgaagttgatgctcgcctgagctacgacaccgaagccaccattgccaaagcccacaaattgattgggctttacaacgacgctggcatcagcaatgaccatgtgctgatcaaaatcgcctccacctgggagggcatcaaggccgctgagcaactggaacgcgaaggcattcattgcaacctgaccctgctgttcggtttcgcgcaggctg

SEQ ID NO: 231496 - DNA, 668 bp, Unknown
  Bacterial polypeptide expressing nucleotide sequence isolated from the Sargasso Sea
catgaaatcaattttagaacaattgtcctcaatgaccattgttgttgctgatactggagatttagattcgattaaaaaatttcaaccaagggacgccaccaccaatccatcgctaatacttgcggctgctaagaatcctgattatgtgaaattaattgacaaagctttagaaagttcagaaaatgccttgccccaaggattctctgaaattgaattaattaaagaaaccgttgatcaagtttcagtattttttggaaaagaaatattgaaaattatttcaggacgcgtatctacagaagtcgatgcaagactgagctttgaaaccgaagctacggtagaaaaagcgagaaaattgattaatctttacaaaaattttggaattgaaaaggaaagaattttgattaagattgccgcaacttgggagggaattaaggcagctgaaattttggaaaaagagggtataaagtgcaacttaactttactttttaacttctgccaagctgtaacttgtgcaaatgcaaagataactctaatttctccattcgttggccgtatattagattggcacaaagcaaaaactggtaaaactagttttgttggtgctgaagaccctggtgttatttcggttaacaaatttacaagtactttaaagaaaaggattcaaaaca

SEQ ID NO: 231497 - DNA, 778 bp, Unknown
  Bacterial polypeptide expressing nucleotide sequence isolated from the Sargasso Sea
atggcaaccctgctcgatcagctttccgcgatgaccgtcgtggtggcggacaccggtgatcttgaggcaatccgtaagttcacccctcgcgacgcgacgaccaatccctcgctgatcctggccgctgcacaaattcctgcatatcagagcctgatagatgaagcgctgcgctcctcacgcaagctcatcggcagtgaggctcccgttgaggacgtggtgcatgaagccctggacgaaatcagtgtgatcttcggtaaggaaattctcaagatcgttccccgccgggtgtccactgaagtcgatgcacgcctgagctttgataccgacgccacgatcgagaaggggcgcaagttgattcgcctttacaacgatgctggcatcagcaacgaccgcgtgctgatcaagatcgcgtccacctgggaaggaatcaaggcggccgaggtgctggagaaagaggggattcactgcaacctcaccctgctgttcggtttcggtcaggccgtggcctgcgctgaagcgggggtgaccctgatctctccctttgtcgggcgcatcctggattggtacaaggccaacacgggtcgtgattcctatcccggtcctgaagaccccggtgtgatctcggtgactcggatcttcaattactacaagacctacggctacaaaaccgaggtgatgggtgccagtttccgcaacctggatgagatcacggaactggcgggctgcgatctgctgaccatctccccccaagctgtggatcagctgcgcgagagcgaag

SEQ ID NO: 231498 - DNA, 851 bp, Unknown
  Bacterial polypeptide expressing nucleotide sequence isolated from the Sargasso Sea
gtctaatttagataaaataaaaaagaatacagttattgttgccgatactggagatatagatttaataaggaaaataaaaccagaagatgctaccaccaatccaagtttaatcctcaaaagtatcaatcaaaaatataatagtgtaaatgaagcgattgtagatattggttgtaagatatataatagtgtacctggttatatttcaacagaagtagatgctagttttagctttgatacaaatgaaactgtcaaacaagctgtagatatcatagatttatacaaaaagaatggtgtagataccagcagaattttaattaaaattgctgctacttggcaaggaattcaagccgcaaaaattttagaaaaaagaaatataaaatgtaatctgactttaattttttctttgacgcaagcaatatcatgtgctcaggctaatgtaacacttatatctccttttgttggaagagtaactgattattataaagttaataatattttatataatgaagaccctggagttcttttggtaaaaagcatatacaaatattttaaggagcataattacaatacaataataatgggagctagttttcgcaatattgatcaaatatgtagtttaaatggttgtgatagattaactatcagtccacaattaattttagaattaaagaatactcaaggtaacataaatcataatatatcgaatgatgtcaaaaatgataaaaaaaaagatgaatatataaatgaaaatacattttatatagagttggctagaaatgttttagcaacaactaaattaaacgaaggaattacaaattttattgcagatactgaaaaaattaaagaaaaaa

SEQ ID NO: 231499 - DNA, 586 bp, Unknown
  Bacterial polypeptide expressing nucleotide sequence isolated from the Sargasso Sea
ttcctatccaggcccagaagatcccggcgtgatctcagtgacccggatcttcaactactacaagacatacggctacaaaactgaagtcatgggagccagcttccgcaacctcgatgagatcacggaactggctggctgtgatttgctgaccatctcacccaagttgttggatcagcttcgcgagagcgatgcatccttaagccagaagttggatgcgactaatcccagcggcggtgaagaacaaatccatgtggatcgcgaacgcttcgacgcgatgatggcggcggatcgtatggcgacggacaagctcggcgaagggattaaaggcttcagcaaagccatcgaaacccttgagcatcaactggcgcatcgccttgctgaactcgaagggggtgaagccttccgtcatgcggttcaagagattttcatgcttaatgacatgaatggtgatggctgcatcacccgtgatgagtggctggggagtgatgccgtcttcgatgcccttgatctcgaccatgacgggcgtctgacccctgaagaggtgcgtaagggtttcggtgcggcactgaccctgaccacggcttga

SEQ ID NO: 231500 - DNA, 632 bp, Unknown
  Bacterial polypeptide expressing nucleotide sequence isolated from the Sargasso Sea
tatgagcaatcagttagcttcattacgtgatatcactaccgttgttgccgacacgggcgacatcgatgccattaaaaagtatcaaccagtcgatgccacaactaacccgtcgctacttttaaaagcggctggtcttcctcaatatgcaagcctaattgatgatgcagtagcatgggcaaaacttcagtcaaacgacgctgaccagcagcttactgatgcagcagacaaactagcggtagcgattggtaaagaaatctctgccactattcctgggcgaatctcaactgaagtagacgctcgcctatcgttcgacactgccgccactatcgaaaaagcggaacgtttggttcagctatatgaagatgcgggtatcgataagtcacgcattcttattaaaattgcgtctacttgggaaggtattcaggcagcagaagagctagagaagaaaggcattcagtgtaacttaacgcttctatttagcttcgcccaagcacaagcttgtgcagaggccggtgtttatcttatctctccatttgtagggcgcattttagactggtacaaaaaagcgaccggtactgagtcttacgcaccagatgaagatccaggcgtagtatctgtaactaaaatttata

SEQ ID NO: 231501 - DNA, 958 bp, Unknown
  Bacterial polypeptide expressing nucleotide sequence isolated from the Sargasso Sea
catggcaaatacattagagcaactcaagtcatacactactattgtggccgatactggcgatattgaagcaattaagcgctatcaaccagaagacgcaaccactaacccatcactcattctaaaagccgctcaaatccctgagtatagcgctctaatcgacaatgctattgcatgggctaaattacaaagtgctgatattgagcaacagattgatgatgccagcgataaacttgcagtgaacattggcgtggaaattctgaaactggttccaggccgaatttcaactgaagtggatgcccgcttatccttcgataaagaaaaatccattgcaaaagcgcataagcttgttcgtctatatcaagaagcaggaatagataaatctcgcattttgatcaaattagcctcaacttgggaaggcatttgtgccgccaaagagttagagcaagaaggcatcaactgtaacttaaccctattatttagcttcgctcaagcacgtgcctgtgctgaagctggcgtgtacttaatttctccattcgttggccgcatcctcgactggtacaaaaaagacacaggtaaagactatgacgcagtaaatgatcctggtgtcgtttctgtaactgaaatttacaactactacaagcagcatggctataacacggtagtcatgggggcaagtttccgtaatattggtgaaatcatcgaattagcgggttgtgaccgcctgactattggtccttcattacttgaagagctagcaaactctcaagtcgctattcaacctaaactcattcctgccagcactacagttgctgcgggtgagcctttaaccgaagcccaattccgctgggactttaaccaagatcctatggccgttgacaagctagcagaaggcatccgtaacttcgccatcgaccaaggcaaactcgaagtcatgctcaaggctaaactggcaaactaa

SEQ ID NO: 231502 - DNA, 535 bp, Unknown
  Bacterial polypeptide expressing nucleotide sequence isolated from the Sargasso Sea
tatgaaatcaattttagaacaattgtcctcaatgaccattgttgttgcagatactggagatttagattcgataaagaaatttcaaccaagggacgccaccaccaatccatcgctaatacttgctgctgctaagaaccctgattatgtgaaattaattgataaagctttagaaaattcagaaaatgcattgccccaaggcttctccgaaattgaattaatcaaagaaactgttgatcaagtttcagtattttttggaaaagaaatattgaaaattatttcagggcgcgtatctacagaagttgatgcaagactgagcttcgataccgaagctactgtagaaaaagcgagaaaattgatcaatctttacaaagattttggaattgaaaaggaaagaattttgattaagattgctgcaacttgggagggaattaaggcagctgatattttggaaaaagagggtattaagtgcaacttaactttactttttaacttctgccaagcggtaacttgtgccaatgcaaagataactctaatt

SEQ ID NO: 231503 - DNA, 955 bp, Unknown
  Bacterial polypeptide expressing nucleotide sequence isolated from the Sargasso Sea
atgactaccgcactcgaccagctgaagcagtacacgaccgtcgtcgccgacacgggcgatttccagcagcttgcgcaataccagccgcaggacgcgaccacgaatccgtcgctgatcctgaaggccgtccagaaggatgcgtacaagccgatcctcgagaaaaccgtccgcgatcatcgcaacgaaagcaccgatttcatcatcgaccgcctgctgatcgcattcggcaccgagatcctgaagctgatcccgggccgcgtgtcgaccgaggtcgacgcgcgcctgtcgttcgacacgcagcgctcgatcgacaagggccgcgaactcatcaagctgtacgaagcagccggtatcggccgcgagcgcatcctgatcaagctcgcctccacgtgggaaggcatccgcgcggccgaagtgctgcagaaggaagggatcaagtgcaacatgaccctgcttttctcgctcgtgcaggccgctgcatgcgcggaagccggcgcacagctgatctcgccgttcgtcggccgcatctacgactggtacaagaagcaggccggcgccgagtggaatgaagagaaggacggtggcgcgaacgatccgggcgtgcagtcggtgcgccgcatctacacgtactacaagacgttcggctacacgaccgaagtgatgggcgcgagcttccgcacgaccagccagatcaccgaactcgccggctgcgacctgctgacgatcagtcccgatttgctgcagaagctgcaggacagcaacgagaccgtcacgcgcaagctgtcgccggaagcgctgcaggacaagcccgcctcgcgcgtcgcgatcgacgaggccgcgttccgcttccagctgaacgacgacgcgatggcaaccgaaaagctcgccgaaggcatccgcgtattcgctgccgatgcggtgaagctcgagaagctgatcgactcgctgcgctgag

SEQ ID NO: 231504 - DNA, 1174 bp, Unknown
  Bacterial polypeptide expressing nucleotide sequence isolated from the Sargasso Sea
aatggccagcttgcttgagcagctctccgcgatgacggtcgtggtggcagatacaggagatctggaggcgatccgtaaattcactccccgcgacgccaccaccaacccatccctgatactcgctgccgcccagatacccgcttatcagaatctgatcgatgaggcgctgcgctcatcccgcaagctgatcggtgacaatgctcccgtcgaggatgtggtgcatgaggctctcgacgagatcagcgtcattttcggtaaagagattctcaagatcgttcccggccgcgtgtccaccgaggtggatgcccgcctcagttacgacacggacgccacggttgaaaagggccgcaagctgatccgcctgtacaacgatgccggtattagcaacgagcgcgttctgatcaagatcgcctccacctgggagggcatcaaggctgctgaagtgcttgagaaagacggcatccactgcaatctcaccctgctgttcggcttcggtcaggccgtggcctgcgccgaggcgggtgtcaccctgatctccccgtttgtcggtcgcatcctcgactggttcaaggccgacaccggtcgtgattcctatccgggcccggaagatcctggtgtcatctctgtgacccgcattttcaactacttcaagacctacggctatgagaccgaggtgatgggagccagtttccggaatctcgatgagatcacggaacttgccggatgcgatctgctcaccatttctcccaagctgctggatcaactgcgtgagagcgacgcggcactgacccgcaaacttgatggatccagtcctgtgagcgccgaagagcagatccatgtggatcgcgagcgtttcgacgcgatgatgaaggacgatctaatggcgtcggacaaactgggcgagggcatcaaaggcttcagcaaggccatcgagacgcttgagcatcagctcgcccatcgcctcgcggaactggagggaggcaaggccttcggtcatgccgttcaggagatcttcatgctcaacgacatgaatggtgacggcagcatcacccgggacgagtggctcggcagtgatgctgtctttgatgcactggatcaggatcacgatggtctgatctcccaggaggatgtgcgtcagggttttggtgctgcgctttccctgaccgccgcctga

SEQ ID NO: 231505 - DNA, 943 bp, Unknown
  Bacterial polypeptide expressing nucleotide sequence isolated from the Sargasso Sea
aatgaatcagctagaacaactcagcaaagtaacggtggtagtggcagacagcggtgatattgctgctatacagcagcttcaacccaccgaagccacaaccaacccatcgcttattttgcaggccagccagcaacctgaatatcagcatttattggtgagtgcactcaaaggcaatgaacaggatatagacgcagcctgtgagctagtgacagtgaattttggctgcgaaattttgcggcatataccgggtcgggtctcgactgaaattgacgcccgcttgtcttttgataccgaagccagtgtggccaaggcattaagtattattgagcgttaccgcgcagcaggcgtggattcaaacagagtgctgattaaactggctgccacctggcaaggtattcaggccgcagcccgactggaaaaattaggtattcactgcaacctgacgctgatttttagtctggcccaggccaaagcctgtgctgacgctggcgtcactttaatctcgccttttgtcggccgtattcttgactggtacaaacaaaatcagccagagcaggatttttccggcgacaaagaccctggcgttatatcagttaaaactatttataaccattataagaaccatggtatccctactgtcgtcatgggcgccagtttccgtaatgtcgatcaaattcgccagttggcaggctgtgatctgctgaccatagcccctaatttgttactgcaattaaaagactcgactgaccctttaccagcagccttgcagccagtgagcactcaaagccctgccaaagccaaagccctgagtcaggccgaatttttatggcaactgaatgaagacgctatggctacagagaaactggccgagggtattcgtaaatttgccgtggatcagcgcaagctggaacaactgttacatcacttagctcaaagccgttag

SEQ ID NO: 231506 - DNA, 1009 bp, Unknown
  Bacterial polypeptide expressing nucleotide sequence isolated from the Sargasso Sea
tatgagcactttactagaacagctaaaagcagtgactacagtagtggtcgacagtggtgatttaggcgccattgaacaattccgccctgtagacgcaacgacaaacccctctttattactaaacgccagccagctggagttttccaagccgttattagctcaggccgtggcttatgctaaaagcaaaagctcagatctggcgactcaggtcagtatagccagcgataagtttgcagtagatattggcactcagatcagcaagttagtaccaggccgtgtgtcgactgaagtggatgcccgtttatcttttgatactcaggccagcatcaataaagcactgcaactggttgctttatatgaagaaaatggcatcagtaaagatcgcattttgatcaagatagcctctacctgggaaggtattcaagctgcccgccatcttgagcaacaaggtattcagtgtaacctgacgctgctgttccatatggcgcaagcccgtgcttgtgctgaagcaggcatcttcttaatttctccttttgttggccgtattctggactggtacaaagccaacaccaaacaagactacacagcagaaaccgatcctggtgtggtttcagtgcgtgaaatttatcgctatttcaaaacctatggccataaaactgtggtgatgggtgcaagcttccgcaacatcggtgaagtattggctctggcaggctgtgatcgcttaaccatcagcccgggtttattagaagaactgaaccagcaacaaggcactttaactgtttatctaaaagatacaggcgctaccgccaaagaaacggccgctttaactgaagcagaattccgctgggcgctgaatgaagacgcaatggccaccgaaaaactatcggaaggtatccgtaaatttgccgttgaccaacgtaagctggaaagtttaattcaggcccaattacagcctagcaaaggcttgatttttatcaccattagtgatgtaatacaggagtttatatga

SEQ ID NO: 231507 - DNA, 1003 bp, Unknown
  Bacterial polypeptide expressing nucleotide sequence isolated from the Sargasso Sea
atgaaatcaattttagaacaattgtcctcaatgaccgttgttgttgctgatactggagatttagattcgataaagaaatttcaaccaagggacgccaccaccaatccatctctaatacttgctgctgctaagaaccctgattatgtgaaattaattgataaagctttagaaaattcacaaaatgcattgccccaaggattttccgaaattgaattaatcaaagaaactgttgaccaagtttcagtattttttggaaaagaaatattgaaaattatttcagggcgcgtatctacagaagttgatgcaagactgagctttgacacagaagctacggtagaaaaagcgagaaaattgatcaatctttacaaaatttttggtatcgaaaaggaaagaattttgattaagattgctgcaacttgggagggaattaaggcagctgaaattttggaaaaagagggtattaagtgcaacttaactttactttttaacttctgccaagcggtaacctgtgccaatgcaaagataactctaatttctccgttcgttggccgtatattagattggcataaagcaaaaactggtaaaactagttttgttggtgctgaagaccctggtgttatttcggttacgcaaatatacaagtactttaaagaaaaaggattcaagacagaagtaatgggggctagttttagaaatcttgatgaaataaaagaattagcaggttgcgatcttttaacaatcgcaccaaaatttcttgaggaactgaaaaaagaaaaaggagagttagttaggaaattagatgtaagtacccaaataaataattctattgactatgaatttgaagaaaaagatttcagattaagtatgttagaagatcaaatggcaagtgaaaagcttagtgaaggtattactggattcagtaaggctatagaagaattggaagagctgctactaaagagatattcagagattaaaaatcataaattgatttctgctaactaaa

SEQ ID NO: 231508 - DNA, 1003 bp, Unknown
  Bacterial polypeptide expressing nucleotide sequence isolated from the Sargasso Sea
tatgaaatcaattttagaacaattgtcctcaatgaccgttgttgttgctgatactggagatttagattctataaagaaatttcaaccaagggacgccaccaccaatccatctctaatacttgctgctgctaagaaccctgattatgtgaaattaattgataaagctttagaaagttcagaaaatgcattgcctcaaggattctccgaaattgaattaatcaaagaaactgttgaccaagtttcagtattttttggaaaagaaatattgaaaattatttcagggcgcgtatctacagaagttgatgcaagactgagctttgacaccgaagctacggtagaaaaagcgagaaaattgatcaatctttataaaaattttggaattgaaaaggaaagaattttgattaagattgctgcaacttgggagggaattaaggcagctgaaattttggaaaaagagggtattaggtgtaatttaactttacttttcaacttctgccaagcggtaacttgtgctaatgcaaagataactctaatttctccgttcgttggccgtatattggattggcataaagcaaaaactggtaaaactagttttgctggtgctgaagaccctggtgtcatttcggttacacaaatatacaagtactttaaagaaaagggatttaagacagaagtaatgggagcgagttttagaaatcttgatgaaataaaagaattagcaggttgcgatcttttaacaattgcaccaaaatttcttgaggaactgaaaaaagagaaaggagagttagttagaaaattagatctaagtaccccaataaatgattctattgactacgaatttgaagaaaaagatttcagattaagcatgttggaagatcaaatggcaagtgaaaagcttagtgaaggtatcactggattcagtaaggctatagaagaattagaagagctgctacttaagagatattcagaaattaaaaatcataatttgatttctgctaattaa

SEQ ID NO: 231509 - DNA, 1174 bp, Unknown
  Bacterial polypeptide expressing nucleotide sequence isolated from the Sargasso Sea
atggcaaccctgctcgaccagctttctaagatgaccgtcgtggtggcggataccggtgatctcgaggcaatccgtaagttcacgccccgtgacgccacaaccaacccgtcattaatcctggcagctgcacaaatccctgcttatcaaagtctgattgatgaggcgttgcgttcctcacgcaagctcatcggtgatgccgctcctgttgaggatgtggtgcaagaagccctggatgaaatcagtgtgatattcggtaaggaaatcctcaagattgtcccccgccgggtgtcaaccgaagtcgatgcacgcttgagctacgacaccgacgccacgatcgagaagggacgcaagctgatccgcctctacaacgacgcgggcatcagcaatgaccgcgttctgatcaaaatcgcgtccacctgggagggcatcaaggcggctgaagtgctggagaaagagggaatccactgcaacctcaccctgttgttcggtttcggtcaggccgtggcctgtgctgaagctggtgtgaccctgatttctcccttcgtgggacgcattctcgattggtataaggccgataccggtcgtgattcctatcccggccccgaagaccccggcgtgatctcagtgacccggatcttcaactactacaagacatacggctacaacactgaagtgatgggtgccagcttccgcaatctcgatgagatcacggaactggcaggctgcgatctgttgaccatctcacccaagttgctggatcagctgcgcgagagcgatgctgccttaagccggaaattggacgcgaccaatcccatcggtggtgaagaacaaatccatgtggatcgcgaacgctttgacgcgatgatggcggaggaccgtatgacgacagacaagctcggcgaaggcatcaaaggcttcagcaaagcgattgaaaccctcgagcatcaactggcacatcgacttgccgaactcgaaggtggtgaagccttccgtcatgcggttcaggagattttcatgctcaacgacatgaacggcgacggatgcatcacccgcgatgagtggctgggcagtgatgccgttttcgatgctcttgatctcgaccatgatggtcgtctgacccctgaggaggtgcggaagggattcggtgcagcactgaccctgaccacggcttgat

SEQ ID NO: 231510 - DNA, 760 bp, Unknown
  Bacterial polypeptide expressing nucleotide sequence isolated from the Sargasso Sea
ttggcaaggagattcttaatcttattatctggaagagtatctacagaagttgatgcaagactaagttttgatactgaagcaacagttacaaaagcgagaaagttaataaatcactataaaacttttggaataaataaagaaagaatattgattaagatcgcttcaacttgggaaggaattaaggcagctgaaattttagaaaaagaaggtattaaatgcaatttaactttactttttaacttctgccaagctgtagcctgtgctaatgcaaaaataaccttaatctcgcctttcgtcgggcgaatattggattggcataaagcaaaaactggcaaagataactttgcagggtgtgaagatccaggtgttatatcagtaaccagaatctacaattattttaaagaaaaaggatttaaaactgaagtcatgggtgcaagctttagaaatatagatgaaataaaagaattagcaggatgtgaccttctaactattgctccaaaatttttagacgaacttaatagagaggaaggggaattaattaaaaaattagatgaagatgctcaatcccatagttctattgattataaatttgatgagagagactttagattaagtatgttaaaggatcaaatggcaagtgaaaagcttagtgaaggaataacaggcttcagcaaagcaatagaagaattagaagagttgttattaaaaagactttcagaaattaataatcaaaaattaatttcgacaactcagatttaat

SEQ ID NO: 231511 - DNA, 958 bp, Unknown
  Bacterial polypeptide expressing nucleotide sequence isolated from the Sargasso Sea
atggcaaatacattagagcaactcaagtcatacactacgattgtggccgatactggcgatattgaagcgatcaaacgctatcagccagaagacgcaacgaccaacccatcactcatcttaaaagcggctcaaatccccgagtatagcgctctaatcgacaatgctatcgcatgggctaaattacaaagtgctgatattgagcaacagattgatgatgccagcgacaaacttgccgtgaacattggcgtggaaattctgaaactggttccaggccgtatttcaactgaagtcgatgcccgcttatccttcgataaagaaaaatccattgccaaagcgcataagctagtgcgtctgtaccaagaagcgggcgtggataaatctcgcattctgatcaaattagcctcaacttgggaaggcatttgtgccgccaaagagttagagcaagaaggcatcaactgtaacttaactctactatttagcttcgctcaagcacgtgcctgtgctgaagccggcgtgtacttaatttctccattcgttggccgcatcctcgactggtacaaaaaagatacaggtaaagactatgatgcagtaaatgacccaggtgtcgtttctgtgactgaaatttacaactactacaaacagcatggctataacacggtcgtcatgggcgcaagtttccgtaatatcggtgaaatcatcgaattagcgggttgtgaccgcctgactattggcccttcattactcgaagagctggcaaactctcaagttgctattcagcctaaactgcttcctgccagcaccacagttgctgcgggtgagcctttaaccgaagcgcaattccgctgggacttcaaccaagatcctatggctgtcgacaagttagcagaaggtatccgcaacttcgccatcgaccaaggcaaactcgaagtcatgctcaaggcaaaactggcaaactaag

SEQ ID NO: 231512 - DNA, 599 bp, Unknown
  Bacterial polypeptide expressing nucleotide sequence isolated from the Sargasso Sea
agctgctgaagtattagaaaaagagaatattcattgcaacttaactttgttgtttaatttttatcaagcagttgcttgtgctgaggcaggcgtaacgcttatttcaccctttgttggaagaatcttagattggtataaatctgctacaggaagggattcttatccagcgactgaggatccgggggtagtttcggttactaaaatatttaattttttcaagtcaaatggttataagacagaggtcatgggagcaagtttcagaaatatagaggaaataaccgagcttgcaggatgtgatctcttaacgatttctcccaaattacttcagcaacttaaagaaactcatatggacttgcccattaagttgaatgcaaaaaaacccttagtcattgaagagaaaatacatctagaccagacttcttttgaactaatgatggctggagataaaatggctacggaaaaacttgacgatggaattagcggttttagtaaagcaattgataaattagaaaatcaattgaacgaaagacttgagttgattgaagaaggaagttgccctaactctttgagctttaattttgaaagagtaatctcttgat

SEQ ID NO: 231513 - DNA, 187 bp, Unknown
  Bacterial polypeptide expressing nucleotide sequence isolated from the Sargasso Sea
tatgaagaaaaaaaagattagtggagctgaagctgttatacattcattgttaaatgaaagtgttgacctggtttggggatatcctggtggagctataatgccagtatacgatgagttttataaatttcaagataaacttaaacatatacttgcaagacatgaacaaggtgctattcatgcagcacaa

SEQ ID NO: 231514 - DNA, 965 bp, Unknown
  Bacterial polypeptide expressing nucleotide sequence isolated from the Sargasso Sea
tttggtattccaggcgttccactcagttgaattatatagaggattagctcagaagaatattcgccatataactcctagacatgagcaaggagctggctttatggcagatggttatgcccgtagatcaggaatgccaggtgtatgttttgtcatcacagggccgggcttaacgaatattattacccctatggctcaggcctatgcagaccgaataccaatgctggtaatttctacaataaacccaacacctgaattgggaaaaaattctggcttattacatgctcttcctgatcaatcaaaactggccaaatcagtgtctctaaaattatatactatcactaaccctaagaatgcatccaaaattgttagcaaagctttctttaaaaccttaggatcaagaaaaggtccagttattattgaaattccaacaaatatcctggaagaaagaatttctaatgtgactcgcaatataggctctccgattagcttaatgtcaagaaaatttaaaagtgacttactgaagtttttaaaagtagttgaaagcgaagaaagcatactaatttttgcaggaggtggagcagttaacgcctcagaagaactctctgaattgagtgaaaaactttgtgctcctgtgatactcacaataaatgcaagaggattgatgtcttctagctctatggtattacctgcctcccccagcctccctgttgttcgagcctttattaagaattatgatatagcaatagtcataggcagtgaattaggtccgacagattatgatatgtttgggactggaacaaaattaaaatttaagaaaatagtacgaatagacactgaccccaatccgaattctgggaatacaaaaattaacttaaatattactcaagagagcaaactgttctttacagaaattaatcgctatcttttagaaaaaaacttaggccgaaaaagattaaatcagatgt

SEQ ID NO: 231515 - DNA, 886 bp, Unknown
  Bacterial polypeptide expressing nucleotide sequence isolated from the Sargasso Sea
acaaagcataattatttagtgatgaatgcagatgaaattccgagagttttaaaagaagcatttattattgcaaatactggaaggcctggcccagttttaattgatatcccgagagatgtttttactgaagaatttgattttgataataaattttgggatgaagatataaaaatccttgggtataatcctcctaaatttgccgacaatccaaaaattgataaagctttaaaattaattgaagaatcaaaaaaacctgtaattttagctgggcacggaataattatttccaaagcgtatgatgaacttttagaattagctgagagtgctcagattccagtcataaccactcttttaggaataagttcatttcctgaaaatcatgtactaagtttgagttttcctggtatgcacggagttgcttgggctagccttgctttggatcaagcagatcttgttattgcaattggtagtagatttgatgacaggataacaggcgatacatcaagattcgcaacaaggtcaaagaaaattcatattgatatagatcccgcagaaataaataaaaatattgaagttgatgttgccttaattgggaatgcaaaagatattttgaaacaaatgttaccaaagttaaaaagaaaaacacatattgattggcttagtcatattgaaaaattaaaagaagatcatccttcgttgaaattaagaaaatcatcagatttaactgggcaatatgtcattaaatcactttctgatgaaactgagggcaaatcagttattgttactggtgttgggcagcatcaaatgtgggcagcacaacattattcttattgttctcaaaattcatggatttcatcaggtggctttaggaacaatggggtttgaa

SEQ ID NO: 231516 - DNA, 683 bp, Unknown
  Bacterial polypeptide expressing nucleotide sequence isolated from the Sargasso Sea
cacaggaataacaagaccttgtacaaaacataattggttagtcaaagatataaatgatctttcaaaagttatgcatgaagctttcagagttgcaacaacaggaagacctggaccagttttaattgatatcccaaaagatattcagtttgcaaaaacaaaatacaagaaactaaataaagaaaaagagttaaatggaaaatcgcataataaattttctcaagaccaaattgatgaattagtaaaattattaaagaaatctaaaaaaccaataatttatagcggcggaggagtgattaactcagggccaaaagcaagccaggcacttagagagtttgttgagataactggtttcccaattacttctacacttcaaggtttaggcgcttatccaggagatgataatcaatttttaggtatgcttggaatgcacggaacctatgaagcaaataatgctatgcatgattgtgatcttttaattaacatcggtgcaagatttgatgaccgtattactgggaagatagatgagttttctccaaattcaaaaaaggttcatattgatattgatccatcgtcaattaataaaattattaaggtagatcttgcaattgtaggagatgttacaagtgtaataagtaaaataaataaaacatttataaaaagtaaaaatggtcacagtaaatcaa

SEQ ID NO: 231517 - DNA, 880 bp, Unknown
  Bacterial polypeptide expressing nucleotide sequence isolated from the Sargasso Sea
tgcactaaacataattggttagtaaaagatataaatgatctgtctgatgtaatgcatgaagcatttaaagttgcaaccactggaagaccaggtcctgtgttaatagatattccaaaagatattcagtttgcaaaagctaaatatacaaaaccaaagaaagaaaaaaatttaaatggaaaatcaaataataaattttctcaaaaacaaattgatcaattaattgatttacttaaaaatgcaaaaaaaccaattatttatagtggtggtggagtaattaattcaggccctaaggcaagtgatgcattaagagagtttgtcgaattaacaggatttccaatcacgtccacacttcagggtttaggtgcataccccggtgatgacaatcaatttcttggaatgttaggcatgcatggaacatatgaagctaataatgctatgcatgattgcgatcttttaataaatattggtgcaagatttgatgatcgtatcactggaaaaatagatgaattttcgccaaactcaaaaaaagttcatattgatatagatccttcgtctataaataaaattattaaagttgatcttgctatagtaggcgatgttacgaaagtaatcgctaaagtaaataaaacaatattgaagaaaaaaaatggccataacaaatcaaataaatcaaacattgctaaatggtgggaacagattcaaaaatggagaactatagagtctcttaattttataaatagcaatgacaacataaaacctcagcacgcagttcaaagattatatgagttaacaaaagataaagacacttatgttacaactgaagttggccagcatcaaaaaagggcagcacaacattacaaatttaataaaccaaaataga

SEQ ID NO: 231518 - DNA, 757 bp, Unknown
  Bacterial polypeptide expressing nucleotide sequence isolated from the Sargasso Sea
aatgatttttaaaaataaagaaaacaagagttcaactattggaagttctttattaactatattagaagaatttggtgttgatattatttttggaataccaggagtgcatactattgaaatttatcgtggtctccaaaaaacaagtataaaacatattaccccacgccatgaacaaggtgcaggatttatggctgatgggtattatagagtaagtggtaagcctggtgtatgcttagtaattactggtccaggacttacaaatattttgactgccatggctcaagctcgagcagattctattccaatgcttattatttcatcagtcaatccttatgaaaatacagataaatcatcaggattacttcacgaactacctaaccaacaaaaattattaaaaaaaatagcaattagttctcttacagtaaaaaaaacaaaagatttacttccagcaattaaaaagtcatttttaaaaatgcttgaggaaagaccaggacctgttcacctagaaattccaacaaatgtattaaattataaataccctaaattaaaaaaaaataacctcgctattaaaaagaaaaaaatcaaatcatctgagaaagaattacatgaagttgcaaattatttaacctttgcaaaatatccagttttgctccttggcggtggagcaagagaatgtgatgaatatatcctacaaattgtagaaaaattaagtctctttgtaattactacaataaatgcaagaggtatattaggagat

SEQ ID NO: 231519 - DNA, 470 bp, Unknown
  Bacterial polypeptide expressing nucleotide sequence isolated from the Sargasso Sea
acctgccgctattggcgtacaaattgcaaatcctggtaaattagttattgatatagcaggcgaggcttcagttttaatgactatgcaagaaatgtctactgcagctcaatataaattaccaataaaaatatttatacttaataatcaatacatgggaatggtaagacaatggcaagaactacttcatgaaaaaaattattccgaaagttatactgctgccttaccagattttgtaaaattggctgaagcatatggctgtgtgggcatcagagcaagcaagcctgatgagcttgacgaaaaaattaatcatatgttatcggtgaataaaccagttatttttgattgtgtggttgataaagtggaaaactgctatccaatgattccttcaggaaaaccacataatcaaatgctattaggtgagcaagatgaagaggatgaaatttcagaggaagggaaagttttagtttaat

SEQ ID NO: 231520 - DNA, 673 bp, Unknown
  Bacterial polypeptide expressing nucleotide sequence isolated from the Sargasso Sea
ctggacatccaggcctgggccgacgactgcgctggtgcggccagagcgggcgctcaccgctatgacgcgccgggcgagggggtctatgcgcccgccctgctgaaggaaatctcggaagcggcgggcgatgatttcgtcgccgcctgcgacgtgggccagcatcagatgtgggcggccatgcactgccgcttcgccaagccggaagcccacatcacctcgggcggtctgggcgcgatgggctttggcctgcccgccggcatcggggccaagctggccgatccgtctgcgacggtcgtcaccatcgccggcgacggcggcttcatgatgaacatccaggagctggcgacgctgaagcgttacggcgtcccgttgaagatcgtgctgatcgacaactcctcgctgggcctggtgcgccagtggcaggagctgttcttcgccgagaactattccgagatcgacctgtccgacaacccggacttcgtgaaggtcgccgaagccttcggcatcgaggccttccgcatcgatcgccgcgatcaggtgtctgacggcatccagcgcctgctggccgccgacggtccctgcctggcccatgtggtcatcgacccccgagacaatgtctggccgctggttccgccgggcaagaacaacgctgaaatgatggagggctcctgag

SEQ ID NO: 231521 - DNA, 616 bp, Unknown
  Bacterial polypeptide expressing nucleotide sequence isolated from the Sargasso Sea
tgtgatagttaccgacatgggcctatcttttgttggtacacatcaaacttttaaaattcaaaaagggcaaaggctatttacaaattctggtcatgccccaatgggatggggtttacccgcagctattggagcatactatgcgtcaaaaaattctagaataatttgtttatcgggagaagggggattacaaatgaatatccaagaattagcaacaattatgcataataaacttccaattaagatttttatttttaacaacggaggctatttaaccataaaacaaacccaacaactaggatttaacagtagaattatgggatcaaattcaaaaagcgggatatcgtttcctaattataaaaaaatagctgagtcacataaaattaaatatattaaaattcaaaataacaaaaatatagataaaaaaatcaaacaagttttaaaaggcaaaaattctgttatctgtgaattaatgatggatcacaatcaagaacaaatgcccaaggcaataaataaaagaactattagcggcaaggtagtagcaactaaatatgaggacatgtatccatttttgtctaaaaatgaattagaaagtaataattttaaaaatacaaattaa

SEQ ID NO: 231522 - DNA, 100 bp, Unknown
  Bacterial polypeptide expressing nucleotide sequence isolated from the Sargasso Sea
gattaatatccttgtcagaagaggtgaaaattgttatccaatggttcctcctggtaaaagtaatgctcaaatggttggatatgttaattgtgaagactaa

SEQ ID NO: 231523 - DNA, 751 bp, Unknown
  Bacterial polypeptide expressing nucleotide sequence isolated from the Sargasso Sea
agaaattcccaaagtaattaaagaagctttttatattgcaacctcaggaagaccaggtccagttgtaatagatatccctaaagatacaacagccccagataaattatttgagtataattctcctgaaacagtaaaaattagatcttacaatcctcctgttgaaccagactctaaacaaattgctagagcagtatctgaaattttaaaggcaaagaaaccagttatttatgcgggaggaggtgcaataaatagcaatgcatctaaagaactatttgaactaaatgagcttctaaattttcctgttacaaatactttaatgggattaggcatatatcctgcgaaacataatcgatttatgggaatgttaggaatgcacggcacatatcaatcaaatatggctatgcataatgcagatttgattattgctattggagctaggtttgatgacaggataacaaatactccagatttatttgctccaaatgcaaagataattcatttcgatgttgatcaatcttctgtttcaaaaattatcgaagcaaatattgcagtttttggacaggttaagaactctttaattgaattaaataaacaattaaaagataaaattgattcaattgatagcactttaattcagccctggcttgatcaaattgatgaatggacctcacttcatggactaaatcatgaattatataaagagaattctgatgaaaaaatgataatgcctcaatcagtagttcaacatgtt

SEQ ID NO: 231524 - DNA, 433 bp, Unknown
  Bacterial polypeptide expressing nucleotide sequence isolated from the Sargasso Sea
tctggacaagttccaactcatttaattggtacagatgcatttcaagaatgcgatacaaccggaataactagaccgtgcactaaacataattggttagtcaaagatataaatgatttagctagtacaatacataaagcatttgaggtagcaactactggtagaccaggaccagttttagttgatataccaaaagatattcaatttcaaaaaacgaaatacaagaaaccacaaaaagaaaaaaaattaaatggcaaatctcataatcagtttaatcaaaatagtattgatcagttaattgatttaatgagcaaatcttcaaaacctattttttatactggtggaggagttattaattctggacctaaagctagtgaacttttaagagaacttgtttatgcaacaggttttcctattacatcaactttacagggat

SEQ ID NO: 231525 - DNA, 85 bp, Unknown
  Bacterial polypeptide expressing nucleotide sequence isolated from the Sargasso Sea
gctgcccaaatattacaaatttgaagagcctaatagatggttaacatctggaggtttaggcactatgggttatggttttcctgct

SEQ ID NO: 231526 - DNA, 265 bp, Unknown
  Bacterial polypeptide expressing nucleotide sequence isolated from the Sargasso Sea
atgaataatgaaataacaggcgctgaaattgtcttaaaaagcttagctgaacaaggcgtagaggttgtatttggatatcctggtggtgcggtattacccatatacgatactttatttaaacagaattctatcaagcacgttttagtaagacaagagggtggtgcaatacatgcagctgaaggttatgctaggtcgactggtaaaactggagtagttcttgttacatcaggacctggtgcaacaaaatgttgtaaccaggtttaac

SEQ ID NO: 231527 - DNA, 461 bp, Unknown
  Bacterial polypeptide expressing nucleotide sequence isolated from the Sargasso Sea
tattggcgttcaggttgccaatccagataaacttgttatagatattgctggtgaagcctcagttctgatgacaatgcaagaaatgtcaacagctgtccaatataatttgccaattaaaatttttattttgaataatcagtggatgggaatggttcgacaatggcaagaattactacatgaaaaaaactattcagaaagttatacagcagctttaccagattttgtaaaactagcagaagcttatggttgtgttggaattagagcaaacaaaccccaggaattagatgaaaagattgctgaaatgctttcagtaaataaacctgtaatttttgattgtgtggtagataaagctgaaaattgttatccaatgataccttcaggtaaagctcataaccaaatgttattaggagatcaagacgaagaagaaaagatttctgacgaaggaaaggttttggtttaat

SEQ ID NO: 231528 - DNA, 193 bp, Unknown
  Bacterial polypeptide expressing nucleotide sequence isolated from the Sargasso Sea
ttgccgaattttactggagctgagatcgtaataaaatctctcttgtcacaaggtgtcgatactgtttttggctatcctggtggagctgttctcccaatttacgatgaaatatttaaagaaaaaaaaattaaacatgttttagtccgacatgagcaagcggccgttcatgctgctgagggatatgccagatcaa

SEQ ID NO: 231529 - DNA, 838 bp, Unknown
  Bacterial polypeptide expressing nucleotide sequence isolated from the Sargasso Sea
caaacaattacgccacaattgggtaaagatgcattccaagaggcagatgtcttcgggattacggctcctacttgtaaacatagttatttagtaaagaatgctgatgatattcctagagttgtcgaagaatcctttcatattagtacaactggacggcccggacctattgttattgatttacctaaagatgtaacgagcgcagttactacagctaaaacaagtaatgttgaaatggatttacctggttatgaacttgatacagacttagatgttgccactatcaaaaagatggcaaaagcgctaaagcaatcaaaacgtcctttactcttattcggacatggtggaataatctcaaaagctagtaaagaattacaggaattagccgaaactttaaatgctcctgtcgttacaactaagttagggaagggtagtatccctgaaaaccacgaactagccttgggtatgcttggtatgcatggcactgcgtatgcaaataaagctgttgctggttgcgatttaattttttctattggaagtcgctgggatgatcgtattactcctttaaaaatagaacgtttctgtccaggtgctgttaaattacatattgatattgatcctgctgaaattaacaaagtgctggtcccagactatagcgttgttgctgatgcaaagcgtgcagttaaagagttattaaaacatatcagcccctgtcaatctaagcgctgggtagctgaaacaaaaaagaataaaaagaaatttcctctaaaatataaaatacatgggggcttaaaagctcagcatgttattgatgtggcgtatcaactaagtaaaggtaatg

SEQ ID NO: 231530 - DNA, 781 bp, Unknown
  Bacterial polypeptide expressing nucleotide sequence isolated from the Sargasso Sea
aaagaattgccacaaaaaattagtcttgataaaaattggctagattattgtagaaaagttagaaaaaaatatccaattgttttagataaatataaaaaacaaaaaaaatcaattaattcttattatttcatagatatcttatcaaagcttctcaaacctaaagatgtggttgttacagacatggggctttcatttgttggaacacatcaggcatttaaagtaaaaaaaggacaaagagtatatactaactcgggtcatgcacccatgggctgggggttgccagcagcgattggagcttattatgcatcaattgaaaccaaaggaaaaaagaacatcatttgcttgacaggagaaggtggtttgcaaatgaatattcaagagttagcgactgtgttacaccacaaaatacctatcaaaatatttatttataataatggagggtatttgactattaaacaaacacaacaattgggttttaaaagtagaattatgggatctaattatgatagtggtttgtcttttccaaactatgaactagtgtcaaagtcgcatagcatcaaatattttaaaatagcggatacaaaaaaaattaaaaatacaatttcaaaaattttaaaatttaatgaacctgtaatttgtgaactgattttagatagtgagcaggaacaaatgccaaaggcaataaataaaagaacatcagatggtaaatctatacccactacatttgaggatatgtatcctttcttgccaaaaaaagaattaaaaagtaatatgttataga

SEQ ID NO: 231531 - DNA, 355 bp, Unknown
  Bacterial polypeptide expressing nucleotide sequence isolated from the Sargasso Sea
tatggcgacctgcggcgaagtattggtgcacctcctggaacgctacggcgtggaccacgtgttcggcattcccggcgtgcacaccgtggagctgtaccggggcctggcgcgctccagtattcggcatgtcaccccgcgccacgaacagggcgccggcttcatggccgacggttatgcgcgcacctctggcaagcccggcgtgtgctttatcatcaccggccccggcatgaccaatatcaccaccgccatgggccaggcctatgccgactcgatcccgatgctggtgatttccagcgtgcaagcacgcagccaaaagggcggcgggcgcggcaagttgcatgaactgccgaaccaa

SEQ ID NO: 231532 - DNA, 790 bp, Unknown
  Bacterial polypeptide expressing nucleotide sequence isolated from the Sargasso Sea
gattccatccccatggtggttctgtgcggccaggttgcgtccaccctcatcggcgaggacgcgttccaggaaaccgatatgatgggtgtctcccgtccggtggttaagcacaacctcagtgtccgtcatcccgaggaaatcccggagattatccgcaaggcgtattacattgccgcgaccggtcgtcccggtcctgtggtcgtggatattcccaaggatatgaccacgccgaacgagcgttacgagtacgcctatcccaagaaggtcaaactgcgctcctacaaccccgctattcgcggccatgccggtcagatcaagaaagcggtcgacatgatgctggcggcgaagcgcccaattatctatgcaggtggtggggttgttctgggcaaggcatcggatcagctgaccgagctggtaaggctgctgggctatccgatcaccaataccctgatgggcattggctgttacccggccagcgataaacagcacctgggctggcttggcatgcacggcacctacgaagccaacatggccatgcaccactcggacctcatcctctgcgtgggagcccgttttgatgatcgggttaccaacgctaccgagaagttctgtccgggcgcgcgcatcatccatatcgacattgatccagcctcgatttccaagaccgtcgatgccgatgtgcccatcgttggcccggttgacgctgtgctcaaggaaatgctgtcgctggtgaaggaagccaaggaaaaaccggacgcggacgcaatcgcttcctggtggaagcagatcg

SEQ ID NO: 231533 - DNA, 427 bp, Unknown
  Bacterial polypeptide expressing nucleotide sequence isolated from the Sargasso Sea
agttaaagatattaatgatttagagaatacaattgcagaaggtttttatgttgctaaatcaggaaggccaggacctgtagtaattgatttgcctaaggatgttcaaaattcaattactaattataagggtattaaagtaaaaagtatggcttcttataagccagcaaaaaaagctaagataaataatattaaagaagctatagatatccttattaaagctaaaaagccggttatatattcaggaggtggcgttattaattcaggtcaaaaggcttcgtcaactcttactaaattagtagattatctaaatattccaataacacagactttaatgggattaggggcagtatctgcaaaaaataaaaactttataggaatgttaggcatgcatggtacatatgaagcaaatatggctatgcatgattgt

SEQ ID NO: 231534 - DNA, 369 bp, Unknown
  Bacterial polypeptide expressing nucleotide sequence isolated from the Sargasso Sea
aaaaaacacgcttaaaaaaaaacttaacggaaaagctactaacaaaatatctaacttagaattagataaatttattaatctaataaaaaaatcctcaaaacctattttttatacaggaggaggagttataaactctggtcctgaagcgagcaaatatttaagagaattagtttcattaactgggtttccaattacttctacattacaggggcttggagcatatcctggagatgatccgcaatttttaggaatgcttggtatgcatggaacatacgaagcaaataatgcaatgcacgattgtgaccttatgattaatattggagcaaggtttgatgacaaaataactggaaaagttgatgagttttcacc

SEQ ID NO: 231535 - DNA, 133 bp, Unknown
  Bacterial polypeptide expressing nucleotide sequence isolated from the Sargasso Sea
tcagaaagcattggccaatgaaggcccagttcttgttaacgtaaatgtaagaaaaggtgaaaattgttatcccatggtgccacccggtaaaagtaatgctcaaatggttggtatacctgagattaagacataa

SEQ ID NO: 231536 - DNA, 886 bp, Unknown
  Bacterial polypeptide expressing nucleotide sequence isolated from the Sargasso Sea
gtggtcatgctgcaactggatatgctaaatcttcaaataaaaacaggagtatgtgttgtaactagtggtccgggtttaacaaatttaataacacctatattagatgctaataatgattcaacacctttagtagtattttcaggacaagtgcctttaagagcaatgggcacatgtgcttttcaagaagctccttcaaccgaaattacaaaaccaattacaaaatggtcatattgtgtccaagatgtaaatgagcttccatatgtagtagataaggctttttggttagccaatcataaaaaaccaggtgctgttcatattgatttaccaaaatgtgtattaacaagtgagttaaatgataatcataaagaatttagttataaagaagaaaaaaaagaattaaactatgattttaatgagatagtagatattattaataattcaaatcagccagtattatatattggaaaaggagttttagaagcttcaaaagaattaagagaactagcgattaaagccaatataccagtaacaactacaatgcatgcaatgggtgtatttgatgaaaatcatgatttatcattacaaatgttaggtatgcatgggagttatgcagccaatcatgccattcaaaattcagattgtataatttgtattggagctcgttttgatgatagaacaactggtaatttagattattatgctccaaaagctagacaagcttttgaagaaggaagaggtggaattatacattgtaatattgaaggtagtgaaataaataaagtaataaatagtaattataacttttgtatgaattctaaagattttattaataaaatttcagcaatggtaaattttagagaaagaaaaggttggtttacacaaataa

SEQ ID NO: 231537 - DNA, 968 bp, Unknown
  Bacterial polypeptide expressing nucleotide sequence isolated from the Sargasso Sea
cttgtacgtcaggacctggagcacaaatgttgtaactggtttaactgacgctatgatggatagtgttccgattgtatgtattaccggacaagttccacaacacttaattggtagtgatgcatttcaagaatgtgacacaaccggtattacaagaccttgtactaaacataattacttagttaaggatgtaaataaattatcttctgtgtttcatgaagcatttactattgctcaaaatggaagaccaggccctgtattaattgatatacctaaagatgttcaatttgcttcaggaacttatgaagaaaaaaataaaattattattccttcacatagattgtttgaaccaagtcctgattttgaaaaaaataaaattgaagaagcagttgaattaatttcaaaagcaaaaaaaccaattttttatattggtggtggatgcattaactctggtccaaaagcttcaacattagttagagaatttataaatatggttggatcaccagttacaatgactttaatgggtctcggtgtagtaggttcatcagataaaaattcacttggcatgcttggtatgcatggaatgtatgaagctaatatggcaatgcatgaatgtgatgttatgattaatatcggtgcaagatttgatgaccgtgttacaggaagacttgatgctttctcgccaaattcaaaaaaaatccatattgatattgatgaaagtaatattaataaaactataaatgttgatgttccaataataggtgatgtaaaacaggttgttgaaaaaatgatcactatttggaaagaaaagaaatttcaaatagatgataaagagttaaaattatggtgggataaaataaataaatggaaacaggtagattgtttaaattacaataatgaaggtaaacagataaaaccacaatacgcagttcaaagactctatgagttaacaaaaaatacaaaaactttta

SEQ ID NO: 231538 - DNA, 124 bp, Unknown
  Bacterial polypeptide expressing nucleotide sequence isolated from the Sargasso Sea
attagcaaatgaaggaccagttcttgttaatgtaaatgtaagaaaaggtgaaaactgttatcccatggttcctcccgggaaaagtaatgctcaaatggttggtatatctgagattaagaaataa

SEQ ID NO: 231539 - DNA, 247 bp, Unknown
  Bacterial polypeptide expressing nucleotide sequence isolated from the Sargasso Sea
atggcaatgaaacaagaaatgacaggagcagaaattgttctacaatcccttgtagatcaagatgttgaggtagtatttgggtatccaggtggagcagtattgccaatctatgatactttattcaaacaaaattctattaagcacgttttagttcgtcaagaaggaggggcaatacatgccgctgaaggttattcacgttcaactggtaaaataggtgtagtacttgttacatcaggaccgggagcta

SEQ ID NO: 231540 - DNA, 304 bp, Unknown
  Bacterial polypeptide expressing nucleotide sequence isolated from the Sargasso Sea
aaaacatttgttacaacggaagttggccaacaccaaaggtgggcagcgcagttctacaaatttgaagagcccaacagagggcttacttctggaggcttagggacaatgggttatggatttcctgctgcaattggagcgcagggaggtaatccagaagctctggtagttgatatagctggagatgcatcaattcttatgaatattcaagaaatgagtacggctattcaatatagacttccagttaaaatattaattataaataatgaatacatgggaagggtaagacaatggcaagagctataac

SEQ ID NO: 231541 - DNA, 553 bp, Unknown
  Bacterial polypeptide expressing nucleotide sequence isolated from the Sargasso Sea
gatgtgggcagctcagttctgcaaatcaattagagagcgtcaatggctttccagtgggggtgctggaacaatgggttatggatttcctgccgctattggggcacagcttggaaggcctactgatcttgtagtagctgttgttggtgacgggggatttcaaatgacaatgagtgaactagccacagcagcaattcataagctgccaatcaaaattataattattaataatagttatctcggaatggtcagacaatggcagcagttgttttttgataatcgggaaagtggagttgacatggaaggaaatcctgactttgttaaaataggagaagcatttggaatcaaaggtttttatcttaggagagcgggagatgttgttaaagtgcttaaaaaagcgctagattatgacgatggcccatgcattgtagatgcccaggttgttaaagctgacaatgtttttccaatgatcccagcaggggctgcagtatcagatatgctgattgatgagcctcctaaaaaccaaaaaatgcaaaaaccagttggaagcacttga

SEQ ID NO: 231542 - DNA, 794 bp, Unknown
  Bacterial polypeptide expressing nucleotide sequence isolated from the Sargasso Sea
ttatttagttaaggatgtaaataaattatcttcagtttttcatgaagcatttactattgctcaaaatggaagaccaggacctgtattaattgatataccaaaagatgttcaatttgcctctggaacttatgaagaaaaaaataaaatagttataccttcacatagattatttgaaccaagtcctgattttgaaaaaaataaaatagaagaagcagtagaattaatttcgaaatctaaaaaaccaattttttatattggcggtggatgtattaattctggtccaaaagcttcaaaattagttagagaatttataaatattgttggatcacctgtaacaatgactttaatgggtcttggtgtagtagcttcatcagataaaaactcacttgggatgcttggtatgcacggaatgtatgaagctaatatggcaatgcatgaatgtgatgttatgattaatattggagctagatttgatgatcgtgttacaggaagacttgatgctttttcaccaaattcaaaaaaaatccatattgatattgatgaaagtaatattaataaaactataaatgtcgatgttccaataataggtgatgtaaaacaagttgttgaaaagatgatcgaaatttggaaagataataaatttcagattgatgataaggcacttaaattatggtgggataaaataactaaatggaaaaaagtagattgtttaaattacaataacgaaggtaatcagattaaacctcaatatgcagttcaaagactctacgagttaacaaaaaatacaaaaactt

SEQ ID NO: 231543 - DNA, 154 bp, Unknown
  Bacterial polypeptide expressing nucleotide sequence isolated from the Sargasso Sea
gcaaggattaggtgcttaccctggagacgacccgcaatttttaggaatgttaggtatgcacggaacatttgaggctaataacgcaatgcatgattgtgatttaatgattaacattggcgcaagatttgatgacagaataacaagaaaaagttga

SEQ ID NO: 231544 - DNA, 617 bp, Unknown
  Bacterial polypeptide expressing nucleotide sequence isolated from the Sargasso Sea
ggttattgagcttttaaaaaaatcttcaaaaccatttttatatacagggggaggagtaattaattctggaccgagagcaactcaattacttagggagttggtaactttaacaggatttcctattacttcaactcttcaggggttgggagcataccctggaaatgatagtcaatttttgggtatgttaggaatgcacggaacttacgaagcaaataacgctatgcatgattgtgacctaatgataaatattggtgctcgttttgatgacagaataacaggaaaaattgatgaattttctcctaactctaaaaagatacatattgatattgatccatcctcaattaataaaaatgtcaaagttgatctagctttagtaggagatgttaagctagttcttgaaaaaattgtttcagcagttaaaaaaaaacatccagactttgaaagttcaaacaaacaaaaaatatctgcatggtggggcatgatagatcgttggagaaaaaaaaattctttaagttatataaacagcaaagaggttataaaaccacaatttgcagttcaaaggctttatgaattaactaaagctcaagatgttttcataacaacagaagttggccaac

SEQ ID NO: 231545 - DNA, 882 bp, Unknown
  Bacterial polypeptide expressing nucleotide sequence isolated from the Sargasso Sea
gttgttacaggattaactgatgctatgatggatagtattccaattgtttgtatcacgggtcaggtgccacaacatttaattggtagtgatgcatttcaagagtgtgatacaactggcattacaagaccttgcacaaaacataattatcttgttaaagatcccaataaattatcacctgtttttcatgaggctttcacgatagcacaagatggtagacctggaccagtcttaattgatattcctaaagatgttcaatttgctaatggcacttatacaaaaaaagaaaacattatcatcccatctcatagattgtttgaaccagaaatttttaagaatgataaaaaaattgatgaagttgttaatttaatttcaaaagcaaaaaaacctattttttatattggtggtggatgtattaattctggccctaaggcagctgaattagtgtcacagttagttgagatgacaggcgcaccagctactatgactttaatgggcttaggtgtgcttggatcatctcatccaaattctttaggaatgcttggaatgcacggtatgtatgaagcaaatatggctatgcatgaatgtgacgtgatgattaatattggtgcacgttttgatgatagggtaacaggcaggcttgatgcattctctccaaattctaaaaaaattcatattgatatagatgaaagtaatatcaacaaaacaattaaagttgatgtaccagttgtaggagatgtaacagccgttctaaaaagagtggtaaaagtttggaaagataatcatataaaaactaatgagtctgatttaaaattatggtggaataaaattaataattggaaaaaaatagattgtttacattttacgaataagaaaaagaaatca

SEQ ID NO: 231546 - DNA, 763 bp, Unknown
  Bacterial polypeptide expressing nucleotide sequence isolated from the Sargasso Sea
gatataccaaaagatattcaatttcaaaaaacaaaatataagaaacccaaaaaagaaaataaattaaacggtaaatctcataatcattttaatcaaaatagtattgatgaattaattgaattaatgagtaaatcgtcaaaacctattttttatactggtggtggagtaattaattctggacctaaggctagcgaacttttaagagaacttgtttatgcaacaggctttcctattacatcaacattacagggattaggatctttcccaggtgatgataatcaatttttgggaatgttgggtatgcatggaacctatgaagcaaataatgcaatgcacgattgtgatttaatgattaatattggggcacgctttgatgataggataacaggaaaaatagatgaattttcaccaaattcaaaaaaagttcacatcgatatagatccatcatctattaataaaaatgtcaaagttgatttagctattgtcggagatgtaaaaactgttctttcatctactttgaaaagtttaaaacaaaaaaaatcaaaatttttaaaatcaaataaacaaaaaacttctaaatggtgggaaaaaattcaaaaatggagatcagttagatctttagattacattggaagtgaagagactataaaaccccaatatgcaattgaaagattatatgagttaactaaagataaagactcctatattacaactgaggtaggacagcatcagaggtgggccgcacaacactataaatttaata

SEQ ID NO: 231547 - DNA, 574 bp, Unknown
  Bacterial polypeptide expressing nucleotide sequence isolated from the Sargasso Sea
aatgaaagtatctgattatatttgggattatttatacagaacaacgaaatctaaacacgtctttttattatcaggcggtggtatgatgcatctactagactcagttggtaaaagtaaatttaaaattgtaccaacccatcatgaacaaggagcatcaattgccgcctactcttatggaagaactataaattcaataggtgtttgcttagttacgtctgggcctggggccactaatgcattaactggagttgctgcagcatatatggatagcacacccatgattgtgatttctggtcaagtatctactttattttcaaaaaaaaatatgaaaattagacaacttggttttcaagaatttgacattatcagttctgttaaatctacaacaaaatatgctaaatttttaaataataaaaatcaagttcagtacgagttagataaagcttgctttctggcaaaaaatggcagacctggccctgtttggttagatgtaccacttgatattcaaaattctcaggttgaaattaaaaaagataaaaaatttttttttaatagaaatatttcttcaaaatta

SEQ ID NO: 231548 - DNA, 607 bp, Unknown
  Bacterial polypeptide expressing nucleotide sequence isolated from the Sargasso Sea
atgaaaaaatcatctaaaccaattttttatactggaggaggcgttataaactctggccctgatgcaagtaaatatttaagagagttagtatctttaacaggttttcctattacttcgactttacaaggactaggatcatatcctggagatgatcctcaatttttaggaatgttggggatgcacggaacttttgaagcaaacaatgcaatgcatgattgtgatttgatgataaatattggagcaagatttgatgatagaataactggaaaggttgatgagttttcgcctaagtctaaaaagatacatgtcgatatagatccttcctcaataggaaaaaatattaaggttgatttagccgtagtaagcgatgtttcagaacttttaaaaagtttaatcaaaagatttaaggaaaagaataaaaactttttaagctctaataaacaaaaaacatctaaatggtgggaacagatcgacaaatggagagaaaaaaaatctctaaattttattaatagtaataaaataataaaacctcagcacgcagttcaaagactttatgaactaacaaaagatcaagatacttttattaccactgaagttggccaacacc

SEQ ID NO: 231549 - DNA, 184 bp, Unknown
  Bacterial polypeptide expressing nucleotide sequence isolated from the Sargasso Sea
tatgaagacttctgacctatttgttaagtgtcttgaaaatgaaggaattgaatacatctttggtgttccaggcgaggaaaatgcagattttttgatgtctttacacgagtctaagaaaattaaattcattttaacaagacatgaacaaggcgcagcttttatggctgagtcatacggaaaatta

SEQ ID NO: 231550 - DNA, 691 bp, Unknown
  Bacterial polypeptide expressing nucleotide sequence isolated from the Sargasso Sea
gatgtaaataaattatctactacaattcatgaagcatttgaaattgcaaataatggtagacccggaccagttttaattgacattccaaaagatgtacagtttgcaaaaggaaaatttgaaaaaaaagaaaatattattattcctaaacatcgtttgtttgaacctaagattatagcaaataaacaaaatatttatgaagcagcaaaactaatatctggtgcaaaaaaacctatattatatattggtggtggttgtataaattcagggccacatgcttcaaagttgattactgattttattgaagaaacaggtattccagcaactatgactctaatgggactcggtgttttaggttcatcaaataaacattctttaggtatgttagggatgcatggcatgtatgaagcaaatatggcaatgcatgactgcgatgtaatgattaatattggtgcaagatttgatgatagagtaacaggaagacttgatgcgttttctcctaattcaaaaaaaattcatatagacatagatgccagtaacgtaaataaaactataaagattgacttgcctataataggagatgttggatcagttatgaaagattttatgactgtttggaaagataataatttttttgtagataaagaggtattacaaaaatggtggaagaaaattgaagattggaaaaaagtag

SEQ ID NO: 231551 - DNA, 676 bp, Unknown
  Bacterial polypeptide expressing nucleotide sequence isolated from the Sargasso Sea
aatgaaaaaaaaattaaatggaaaatcgcataataaattttctcaagatcaaattgatgaattagttaaattattaagcaagtccaaaaaaccaatcatctatagtggtggaggagtaattaactcaggtccaaaagcaagtcatgctctaagagaatttgttgagctaactggctttcctataacttctacacttcaaggattaggtgctttccctggagatgataatcaatttttaggaatgcttggtatgcatggtacttatgaagcaaataatgctatgcatgattgtgatcttttaattaatattggcgcaagatttgatgatcgtattactggaaaaattgatgagttttcacctaattcaaaaaaggtacatatagatatagatccatcatcaattaataaaattatcaaagtggatcttgcaattgttggagacgttacgagtgtcatcagtaaaattaataagacaattgccaaaagaaaaaatggtcatagcaagtcaaataaatcaaatatagctaaatggtgggaacaaattgaaaaatggagagaaaaagattctcttaactttgtaaatagtaatgaaagtataaaacctcaatatgctgttcaaagactttatgaattaactaagaataaagatacttatgttactaccgaggttggacaa

SEQ ID NO: 231552 - DNA, 547 bp, Unknown
  Bacterial polypeptide expressing nucleotide sequence isolated from the Sargasso Sea
tatgaccgctaaaaaggtgaatcaaatcaatgaaactgagttatctggtgctgagcttatttataggagtttagctagagagaaggtagagttcatttttggtcaccctggagccgttttactgactgttttagatctcttcttaaagagaaaaaatataactcatattctcactagacatgagcaatgtgctgcgcatatggcagagggatacgcaagagcaagcggaagagttggagtatgtcttactacttcaggacctggcgcaacaaatttggttactggaatagctgacgcctatatggattcgatcccactagtttgcatcactggacaggtggcaacatcgatggttggaaatgacgcttttcaagaagcagacattataggaatgactcgcactgtaactaaacatagttacttgattaaaagtacaaaggacttgtcaaagatttttcaggaagcattccatatttcacgaaccggccgacctggtcctgtactaatagatatccctaaagatgtcatcttaggaaggcaaaagaaa

SEQ ID NO: 231553 - DNA, 812 bp, Unknown
  Bacterial polypeptide expressing nucleotide sequence isolated from the Sargasso Sea
aatgttgtaacgggtttaactgatgctatgatggatagcgtacctatcgtatgtataactggacaggtaccacaacacttaattggtagtgatgcatttcaagaatgtgacacgacaggtataaccagaccttgtacaaaacacaattatttagttaaagatgtaaataaattatcttccgtatttcatgaagcatttactattgcacaaaatggacgaccaggacccgtattaattgatataccaaaagatgttcaatttgcatcaggaacttatgaagaaaaaaataaaattattattccttctcatagattatttgaacctagtcctgattttgaaaaaagtaaaattgaggaagcagtagaattaatttctaaagccaaaaaaccaattttttatattggtggtggatgtattaactctggtccaaaagcttcaaaattagttagagaatttataaatatggttggatcgccagttacaatgaccttaatggggcttggtgtagtgggctcatcagataaaaactcacttggtatgcttggtatgcatggaatgtatgaagccaatatggctatgcatgaatgtgacgtaatgattaatattggagcaaggtttgatgacagggttacaggaagacttgatgctttctctcctaattcaaaaaaaatccacattgatattgatgaaagtaatatcaataaaacaataaatgttgatgttccgataattggtgatgttaaggcagtcgttgaaaaaatgattactgtttggaaagacaaaaaatacaaaatagattctgagtcactaac

SEQ ID NO: 231554 - DNA, 487 bp, Unknown
  Bacterial polypeptide expressing nucleotide sequence isolated from the Sargasso Sea
gatattccaaaagatattcaacttgcaaaagctaaatataaaaaacctaaaaaagaaaaaaaattaaatggaaaatcaaataataaattttctcaaaaacaaatagatcaattaattgatttactaaaaaatgcaaaaaaaccagttatttatagcggtggtggagtaattaattcaggacctaaggcaagtgatgcattaagagagtttgtagaactaacaggatttccaatcacttccacccttcagggtttaggagcatatcctggtgacgataatcaattccttgggatgttaggaatgcatggaacttatgaagcaaacaacgcaatgcatggttgcgatcttttgataaacattggtgcaagatttgatgatcgtatcactggaaaaatagatgaattttcaccaaactcaaaaaaagttcatattgatatagatccttcgtctataaataaaattattaaagttgatcttgcaatcgtag

SEQ ID NO: 231555 - DNA, 522 bp, Unknown
  Bacterial polypeptide expressing nucleotide sequence isolated from the Sargasso Sea
gagaacgccaatggctctccagtggaggagcgggaacaatgggctatggattccccgctgcaattggtgctcagcttggtaagcctaatgatcttgtagtagctgtagttggtgatggaggatttcagatgacaatgagtgaactagctacggcagctattcacaaactgccaatgaaaatcattattattaataacagctatctcggaatggtcagacaatggcaggagttgttttttgacaatcgggaaagcggggtggacatggaaggtaatcctgattttattaaaatcggtgaggcatttggaatcaagggattttatcttaggagagcaggagatgttgaaaaagtgctaaaaaaagctctggattataacgatgggccctgcattgtcgacgcccaagttgttaaagcagacaatgtgttcccaatgatcccagcaggagctgcagtatcagatatgttgattgatgagcctcctaaaagccaaaaaatgcaaaaaccagttggaagcacctgac

SEQ ID NO: 231556 - DNA, 556 bp, Unknown
  Bacterial polypeptide expressing nucleotide sequence isolated from the Sargasso Sea
catggcacgaaacattggatcaggcgaagcaatagtagacatcttacagcaggaacaagtcacccaccttttcgggattgtgggctcatcgttcctagatatcttagactctttgtacgacaaacaaacaattgaattcgttggcacaaggcacgaacaaggagcagcattaatggcggacgggtacgctagagttacagggaaacccgcagtctgcatagcaacaaatggtccaggagttctcaacctgagttatggagtaggttcagcatttgtagcacactctcctgtggtatacatagcgccatctgcatccagagatcatcagaaccgagattcgacacaagaatttgatcaagtgagtctattcaaacctatcacaaaagcggcctattctgtcaacaaagttgaaagaatcccagatgccatcaggcaggcatttagaatagctacctcaggtaaaatgggacctgtgttagtggacattcctagagatgttattgcaggaaacagtttagatatcgatgatctttcagtagaccaatatcggccctaa

SEQ ID NO: 231557 - DNA, 472 bp, Unknown
  Bacterial polypeptide expressing nucleotide sequence isolated from the Sargasso Sea
gcagccatgggtgccaaggtagctcatccagaagcccttgtggttgatattgacggtgatggaagcatcctcatgaacattcaggaattcgctacctgcaagaccgagaatattcccgtcaaggtccttctactgaacaaccagcacctagggatggttgttcaatgggaagatcgatttttcaaaggaaaccgtgcgcatacgtatcttggtccagtggatcaccctgaggcatgcggtcaaggtgatgggatttcaccggggagtcggtatccagacttcgttgcaattgctcagggatttggttggcaggccgagaccgtgtcggagaagggtgaactcgaggcagcactgacacgacttattgatgcagagggaccagctttattagattgtcaggttccatatcaagagcatgtgctcccaatgattccaagtggtgggacagtgcgggatctcatcaaaaagtagt

SEQ ID NO: 231558 - DNA, 1651 bp, Unknown
  Bacterial polypeptide expressing nucleotide sequence isolated from the Sargasso Sea
atgacaggtggaaaagctatggttatggcagccaaggctaatggcatagatacagtttttggtcttcctggagcacaaacatatccaatctttgatgcgttatataacttgcctgaaataaaaacaatcatatctcgccatgagcaaggggcggcatatatggcttatggatattctaaagcaacgggtaaacccggggctttttcggtagttcccggtcctggcgtattgaatacgaccgcagcattgtgtactgcagcaggtgggaatgttcctcttttatgcatgacaggacaggttcctgctgaatttttcggtaaaggcagaggtcatctgcatgagttgtctagccaaactggcacattagaaacattgatcaagcatgcagagcatattgccgatccatccaaaacatactcatacatgaataaggctttccgcactatgctaagtggccggcctgggcctgtatcactggaaatgtgctgggataccatgggtcaacagtgggacgttgaagtgacaaatgggaacagttctgttgataaaccagacctagacgatgacgcagtaaatgaagcagcaaaattaatatccaattcaaaaaatatcatgatcatgtctggtgcaggagctcaacatgcaagtaaggaagtgagggaattggcttcattgcttggggctccatctacagcacttaggagtggaaaaggggttgtgagcgaagacagtgatgtaggagtttcttctgccgtagcaagaaagttatgggaagataccgatcttctcattggtattggatcgaggctggaaatgcaatacatgcgatggttgtcgatgatgaagtactatgatcgttctcccccaggatggagaggttctgtcacacccaatgcgcctaaactcatcagaattgatattgatccagaagaaatggtcagactcaagcctgacgtcggaattgttgcagactctattgatggagtgacagcattaatcaatcgagtgaataaaattggttttcaaaaaggaaatctcgatcgtattgcatcaatgaaagctaaaatgagaaaagccattgaaaaaattcaacctcagatgtcatacctagatatcattagagatatcttgccaagagacgggtattttattgaagagctctgtcaggcaggatttacatcttattatgggtttcctgtttatgagccaagaacttatgtatcttccggctatcaaggtactttgggtttcggttttccaactgcactcggggtaaaagcttctatgcctgataaagctgtggtttctatcattggcgatggtggttttatgttcgcaatgccagaactatcaacagctgttcaacacaacctatctgtcattacagtattgtttaataataattcttttgggaacgtcagaagagaccaaaaagatagattccaatcacatattattggcgccgatcttacaaatccagatttccttaagattgcagattcttttggtgttaaagggtatcgcgtatcaactccaaaagattttaaacctgcccttaaaaatgcaattgaagaagacaagccagcaattattgaggtagaaattgaaaaagattctgaaacaaatccttggaaatacattcatggataaa

SEQ ID NO: 231559 - DNA, 87 bp, Unknown
  Bacterial polypeptide expressing nucleotide sequence isolated from the Sargasso Sea
gctgcgcaatatcttaggaattcaccaagaaaaatggattagtagtgcaggcttaggaactatgggttttggattgcctgctgcatt

SEQ ID NO: 231560 - DNA, 1861 bp, Unknown
  Bacterial polypeptide expressing nucleotide sequence isolated from the Sargasso Sea
tatgaaagttgctgattatattattaaatttttctctaagaaaggaattgataaagcatttgtagtttatggtgctgcaaacggtgatttgatagatgcttttacaagaaataagaaaatccaatatgtagcaacaatgcacgaacaagccgctggtttcgctgcagaaggatatgctaaaataaaaagaattccaggattatcaattgtaacaagtggtccaggtgcaacaaatttggttacctcgattgcaaattgtttttacgattctattccttgtattttcatcgctggacaaattaattcaaaatttctaaggccagataaaagcataagacaagtaggttttcaggaaacagatatagtttcaattgtaaaaccagtcgctaaatatgcggtaatgattaaagaccctaataaaattaaatatgagttagaaaaatcttacaatatatgcaagtcaggtagaatgggacctatatttttggatatacctatggatattcaaaaagctcaaattgatgaaaaaaaattaattggttatagaaaaaaaattaacaaaccgaaatataatataaataaagttagaacaagcataaaaaaatatttgagagatctgaataaatcagtaaggccaatttttcttgttggtggaggtctgcagctaacaaacaattctaaaaaaattctcaaaatttctaaattacttcaaatcccctgtattccaacttggaacggtattgatacgataacttctgattttcaattttatggtggtagagtaggaacctatggtggtccaggtagaaactttgcaattcaaaatagtgaccttctttttggagtgggaacaagagtttcaggaagaataactggaggcaatccaagcagttttgcaagagaagcaaaaaagtatatagttgatattgatccgcctttattaaaaagaaaactccaacaagttaaatttgatgaaaatatttattgtgatttagatttattttttaaagttttttttgaagaaattaaaaaatttaaaataaaaaaaaataattttaaaaaatggaatagtaaggtcaaatattggataaaaaaatacgacacttataaagaaaaatattcaaataaaaatggatatacctacaaaggtaagaactttgttcacccatatgctttcatgaatagtttatcaaaaaatctaaataagaaagatataattgttggtgattgtggaggaataagtgtaatgataggccatagtctaaaaactaaatttggacaaagataccatagtaataatggtcatgcccctatgggtttttcattttccgcagctataggatcatggtttggttcaaacaaaaaaaataatacaattagtttaactggtgatggtggttttaatatgaatatccaggagctacaaactttagttaattataaaattaaagttaaaactttcatattaaataatcatatatatggtattactaaagcatttcagaaaactaattttcaaggaagagaggaagcttgtggcccaaaagggtacaatcctccaaattttattgatatcgctaaagcctataaaataaaaactgtaagtataaataataatagtgaaatagaaaaaaaaattaaagaagtattaaattataatgggcctgttgtttgtgacgtaaattgtcatgaattccatgattatgaaccaaaattaattggatggcagactcctatagaagatatgtatccatatatttcaagatcagaattaaaaaataacttgtatatcaaaatgcatgaggcctcaaaaaatccattcatgcctgatgttagtactaaagttgatacaatggaatga

SEQ ID NO: 231561 - DNA, 472 bp, Unknown
  Bacterial polypeptide expressing nucleotide sequence isolated from the Sargasso Sea
gatggagggtggccgcatcgtacaggtgggcactccgcaggcgatctatcaccagcctgccagccgcttcgtggcaagctttgtcggcaccatgaacttcctcgacaccctggtgctgagccccagccaagtgcgcctaaacgaacaaccactgacactggccaaccgggccgcggccggcagcaaattgcaggtggcgatccgccccgaggcgatcaccctgagtgcgccgagcgagccctatcttgggcaacatggcattgaagcaactatcgatcaggtggagtttctcggcgcagcccagcgccttatctgcaccgccgacacctatctgggcccgcagcaaattctggtggagcgcccgacccatgagctgccccgccacgagcagggtggctggcgcagcggcatgcgctgctcactgcactggcccgccgcggcgatgcagctgtttgaaggagagcgtccatga

SEQ ID NO: 231562 - DNA, 238 bp, Unknown
  Bacterial polypeptide expressing nucleotide sequence isolated from the Sargasso Sea
atgttaactggagcagaattaatagttagaacccttgaacacttaaaaatttcaacggtttttggactcccaggtggtgcaatactgcctgcttatgatcctttgtacgacagccctataagacacatcttagcaagacatgaacaaggtgctggccatatggcggaaggctatgcacaagctactggagaacttggagtagtaatagcaacctccggacctggtgcaacaacttaat

SEQ ID NO: 231563 - DNA, 910 bp, Unknown
  Bacterial polypeptide expressing nucleotide sequence isolated from the Sargasso Sea
aaacgcaggtttacagctttaacagatgcgtacatggactcagttccattggtttgtatttcaggacaagtgcccacacatttaattgggacggatgcttttcaagaatgtgatacaacgggaataacaagaccgtgtacaaaacataattggctagtcaaggacataaaagatttagctaaaacaatgcgcaaagcttttgaagttgcaacaactggaagaccaggtcctgtgttagttgatattccaaaagatattcaatttcaaaaaacaagttattcaaaaaataaaaaacaaaaaaaattaaatgggaaaaaaaataataatttttcacaaaaagaggttgatgaattaataaagctaatgagcgaagcatcaaaaccaattttttatactggaggaggtgttattaactctggacctaaagcaagtgaattgttgagagaattagttaggtctagtggttttccaattacatctactttacaaggactgggctcatatcctggagatgataaccaatttttaggaatgcttggcatgcatggatcatatgaagctaataatgcaatgcatgattgtgacctgatgataaacattggagcaaggtttgatgacagaataactggaaagatagatgagttttctcctaaatcaaaaaaagttcatatagatattgatccatcttctataaataaaaatgttaaagttaatttgcctatagtaggtgatgtttctgaagttttaagttctattattaaaactattaaaaaaacaaaatctaattttacaaaatcaaataaagaaaaaatttcaaaatggtgggatcaaattgaaaaatggagatccataaattctttcaattttgtaaatagtacagagttaataaagcctcaatatgctgtttcaa

SEQ ID NO: 231564 - DNA, 529 bp, Unknown
  Bacterial polypeptide expressing nucleotide sequence isolated from the Sargasso Sea
atggacggtaacacagatacaaaaactacaataaccggtgcggatgcaattttaaaagttttaaatgagcaaggtgtcgaagttatttttggttatcctgggggagcaatccttcctatttatgatgcattgtttaaatctaatagtattagacacatcttagtaagacatgaacaagctgctgttcatgcagctgaaggttatgcaagatcaactggaaaagttggtgtagtcttagtaacatcaggaccaggtgctacaaatgcagttactgggctaactgatgctcttatggattcaattccaattgtttgtttatcaggacaagttcctactcatttaattggtaatgatgcttttcaagaggcggatacaacagggattacacgtccttgcacaaaacataattatttagtcaaagaaagtgataaactttgttcgacacttcatgaagcatttcatgttgcgcgaacaggtaggccaggacctgtggttattgatcttcctaaagatattcagttatctgaat

SEQ ID NO: 231565 - DNA, 204 bp, Unknown
  Bacterial polypeptide expressing nucleotide sequence isolated from the Sargasso Sea
catgctcagtggcatgcctgatttcatcgccctggcccgttccttcggcgtggatggcgtcaagatcaccgaccgtgagttgctgcaccgcgacctcgctgcagccctgcaatcaccaaccccgacgatgattgatgtgcacgtgcggcggggagagaactgctacccgatggtcccgccgggcaagagcaatgcacagatggt

SEQ ID NO: 231566 - DNA, 509 bp, Unknown
  Bacterial polypeptide expressing nucleotide sequence isolated from the Sargasso Sea
ggtagcgcaacacatgaaatttagccacccgagcaaccatttaagtagtggtggcgcaggcactatgggctttggtttaccagcggctattggcgcacaagtagcacgcccagacgattttgtaatgacggtgtcgggtgatggctcaatcatgatgaacattcaagagcttgcgactattcgacgtaacaatttaccagtaaaaatactaatattagataaccaacgcttaggtatggttcgccaatggcaggagctattttttgaaggacgttactctgaaacaaacctttcagataaccctgattttgttcagttagccgccgtatttggtattcctgggcaaacaattacccatgccaaccaagttgatgatgcaataacagcattagtcaacagcaaagggccgtacatagtacatgcctgcatagacgataaagaaaacgtatggccacttgtaccacctggggctgcaaatgacgaaatgattacggagaaagcacaatgaa

SEQ ID NO: 231567 - DNA, 508 bp, Unknown
  Bacterial polypeptide expressing nucleotide sequence isolated from the Sargasso Sea
gatgacttcaggcggacttggaacaatgggttatggctttcctgcatcaataggcgtgcaaattgctcacccaaaggcattggttattaatgtcgctggcgaggctagttggttgatgaatatgcaggaaatgggtacggcagtccaatataagttacctgtaaagcaatttatattgaataacgaaagattgggtatggtaagacaatggcaagagttgctgcacggtgaacgctactctcacagctggtctgatgcccttcccgactttgtgaaattggcagatgcatttggtgcaaaaggcatcatggtatcagatcctgcagatttagatgatgctattatggaaatgctgtcttacgatggtccggttctctttgattgtttagttgaaaaacatgagaactgcttcccaatgattccgtctggggagcctcataataaaatgttgttaggagaagcgacaacagaggacgccataggaagcagcggagcagtattagtatga

SEQ ID NO: 231568 - DNA, 331 bp, Unknown
  Bacterial polypeptide expressing nucleotide sequence isolated from the Sargasso Sea
aatgaatgaaactatgatcggcgctactgcgctaatgaaagcattggaaaaagaaggagtaaaggaggtcttcggtctaccgggaggtgcgaaccttccaatgtatgacgagttaggtaaaagtaacattcgtcatattttggtaagacatgaacaatctgctgcacatatggcagatggttttggtagagttagtcgaaaacctggcgtatgttttgcaacctctggtcctggtgcaacaaatttgttaactggaattgcaactgctcaagcagattctgcaccaatggttgcagttactggacaggtacctgttgcaatgatgaaaaga

SEQ ID NO: 231569 - DNA, 953 bp, Unknown
  Bacterial polypeptide expressing nucleotide sequence isolated from the Sargasso Sea
aaaatatctaatgcctatgacgaattactagaattagctgaaaaatgtgaaatcccagttataaacactttacttggattgagctcatttcctgctaatcattatttgtatgcagggtggccaggaatgcatggaatggcatattcgaatttaatcttagaccaagctgacttgatagtggcgattgggatgagattcgatgataggataacaggtaatcctgaaaaatttgctacatcatcaaaaaaaatccatattgacattgatgcatcagaagttggaaaaatcatacaagtagatgtacctatagttgcaaatgcaaaaactgctttaaaagaactaatacctgctgtttcagataaaaaacattctgattggttaagtcaaattgacagaattaaaaatgatcatccttcattaaaattaagagatactcaaaaactacttccacaatatataataaataagctacatgaaattacaaaaggagaatcgattatagttacaggtgttgggcaacatcaaatgtgggcagcacaatactatacatttaatgacaaaaataaaatcataacatcaggaggtgctggagcaatgggttacgaagtgcccggtgcattgggtgctcaagtcgggcgaccaaacgaaatggtgtggtcgatagctggtgacggtggttttatgatgaccatgtctgaacttgcaacaattgctgagaataaactcccagttaaaattgcaataatgaataatggatttttagggatggtaaggcagtggcaagaattattttatgataaatcatatgtatcaacttcatacaatggtattcctgatttcgttaaactagctgaagcatttggaataatggctatgagagtaactgacaaaactcaagtacaatctgctataaccgatgcaattaatcatgatggtcctgtacttatagattt

SEQ ID NO: 231570 - DNA, 895 bp, Unknown
  Bacterial polypeptide expressing nucleotide sequence isolated from the Sargasso Sea
tacatggactccgtcccacttgtatgtatatcagggcaagttccaacacatttaattggaacagatgcttttcaagaatgtgatactacaggaataactcgaccgtgcactaaacataattggttagttaaagatattaatgatctctcaagaattttacatttagcttttgaagttgcaacaacaggtagacctggacctgtgcttgtagatattcctaaggatatccaatttaaaaaaggcaaatataaatttatcaagaatgtatttaaaaaaaaattaaacggaaaaattcaaaataataaagtatccaactctgagttagataaatttattgaactgatgaaaaaatcttctaaacctattttttatacaggtggaggagttataaattcaggaccagaggctagtaaatatttaagagaacttgtttctttaactggattccctattacttcaactttgcaggggctaggcgcttatcctggtgatgacccacaatttttaggaatgctaggcatgcacggtacttatgaagcaaataatgcaatgcatgactgtgatttaatgataaatattggtgctagatttgatgatagaattacaggaaaggtagatgaattttcacctggttcaaaaaaaattcatgtggatatagatccatcgtcaattggaaaaaatatcaaagtagatctagctatagtaagtgatgttgcaggacttttgaaatctttgattaaaagatttaaagaaaaaaataaaaactttcttaactctaataaacaaaaaacctctaattggtgggaacaaattggaaaatggagagaaaaaaagtctttaaacttaattaatagtgacaaagttataaaaccccaacatgcggtgcaaagactat

SEQ ID NO: 231571 - DNA, 964 bp, Unknown
  Bacterial polypeptide expressing nucleotide sequence isolated from the Sargasso Sea
cgttgaaaccatttttggttacagcgggggggccattttacctacgtacgatgaagtctttaaatacaacgaggctaatcccgaaaatccaatgccattaattgtgccttcaaatgaacaaggcgctggtttcatggcttcaggatatgcacgatcaacaggaaaaccaggagtggtaatggtcacttcaggtccgggtgcaaccaatactgtgactccagtaagagatgccatggccgattctattccgatggttatcatatgcggacaagtcagcaggcaagcaattgggagcgatgcttttcaagaggcgccggtaacaagcgtaatgggatctgttgcgaagcatgtttttttagtcacagatgaaaataagctcgctgcaactttaaaagcagcatttgaagttgccacatctggaaggccagggcctgttgttgtggatattccaaaggatgttcaaacagctgagatatccgaagaagattatgaggacgctaatatttcagcttattctaatagaatattggccattgaaaaatcgcgcctgaaccaagaaaaatcatccgaattctttacacatcttggcaattcaaagaggccactgatttactttggaggtggtgtaatctcagcgagtgcatcaaaagagctgagagaatttgttgattattttaatctgccggctgtttcaaccctgatgggactaggtgcagtggatactcgacatccctcatctctgcacatgcttggcatgcatgggactccttatgcaaactatgccgttcaagaaagcgacttcttgatagcgataggttctcgttttgacgatcgtgttgcaggtgtgcctgaaaaatttgccccgaaagccaaagtcattgcacactttgatgtcgatccctccgagatcaataagtcaagaatgctgctgggtctcatctcggagtattgtcattggcactga

SEQ ID NO: 231572 - DNA, 470 bp, Unknown
  Bacterial polypeptide expressing nucleotide sequence isolated from the Sargasso Sea
gatgaaaaagttatcaggcgcaagaatagtcattgaagcattaattcaagaaaatgttaaagtaattttcggttatccaggaggtgctgttcttccaatttatgatgagttgtttaaacagaataaaataagacatattcttgtaagacacgaacaagcagccgttcacgctgctgagggctacgcaagatcaactggtaaagtaggtgttgtcttagtaacatctggtccaggagccactaatacggttacaggtttaacagatgctatgatggattcagttccagtagtttgtatttctggtcaagttcctacacatatgataggcaatgatgcttttcaggaggctgatattgtaggcataaccagaccgtgtacaaaacacaattacttggtaaaagaaatatcaaagttagctgagtcaattcattctgcatttcatatttccaagaacggtaggccaggtcccg

SEQ ID NO: 231573 - DNA, 553 bp, Unknown
  Bacterial polypeptide expressing nucleotide sequence isolated from the Sargasso Sea
aatgtgggctgctcaacattataaatttgacaaacctaatcgttggatgacctcaggaggtttgggaaccatgggatatggattgccttctgccattggtgttcaggttgctaatcccgataagttggtaatagatatagctggagaagcttcggttttaatgacaatgcaagaaatgtctacggcagttcagtataagcttccaataaaaatatttattctaaataatcaatggatgggtatggtgagacagtggcaagaactattgcatgaaaaaaattattcagaaagttatactgcggcattaccagattttgtaaaattagcagaagcttatggatgtacggggattagagcaaaaaaaccagatgaactagatacaaaaattgctgagatgctttcaataaatggaccggttatttttgattgtgtagttgataaagcagaaaattgttaccctatgatcccttcgggaaaaccacataatcaaatgttattgggtgaccaagatgaagaagagaaaatttctgatgaaggaaaggtgttggtttag

SEQ ID NO: 231574 - DNA, 556 bp, Unknown
  Bacterial polypeptide expressing nucleotide sequence isolated from the Sargasso Sea
aatgtgggctgctcaacattataaattcgacaaacctaacagatggatgacttcaggtggattaggtacaatgggatatggtttaccctcagctgttggagttcaggttgctcatccaaataaattagttattgatatagcaggagaagcttcagttttaatgactatgcaagaaatgtctactgcagttcaatatagtctacctattaaaattttcattttaaataatgaatacatggggatggttcgtcaatggcaagaactattacatgataaaaattattcagaaagttatacagcagcattaccagattttgttaagttagcagaagcttatggatgcgttggtttaagagcatcaaccccagaagaacttgatgataaaattattgaaatgattaacacggaaagaccagtgatttttgattgtcgcgtagataaagttgaaaattgctttccaatgataccttcaggaaaagcccataatcaaatgttacttggtccaaatgatcaaaaagaaaataaaattaccggtaaaggaaaaactttagtataa

SEQ ID NO: 231575 - DNA, 768 bp, Unknown
  Bacterial polypeptide expressing nucleotide sequence isolated from the Sargasso Sea
ataaaaatattgaagttgatgttgccttaattgggaatgcaaaagatattttgaaacaaatgttaccaaaattaaaaagaaaaacacatattgattggattagtcatattgaaaaactaaaagaagatcatccttcattgaaattaaaaaagtcatcagatttgaccggacaatatgttattaagtctctttctgatgaaactgagggcaaatcagtaattgttactggtgttgggcagcatcaaatgtgggcagcacaacattattcttattgttctcaaaattcatggatttcatcaggtggcttagggacaatgggttttgaagttcctgctgcattaggtgctaaagttggggctccagataaaaatgtatggtccatagcaggtgatggcggttttcagatgacattatgtgaacttgcaacaattgttgaaaataatattaaagtgaagtttgcattgttaaataataatcaccttggcatgataactcagtggcagggaatgttttttaatgaggattatcaagcaaatgcttacaccgcaaatccagactttgtaaagctagctaatgcatatggcatgaaggcgctcagcgttaataataatgaggatgttcgacctgcgataagagaagctaatagtcatgacggtccctttttgattgattttaaaataaagaaagaagaaaatgtttttcctatgataccttctggtcaaagtgtaaatgaattgttagaggagcctatagatggtagcaattaac

SEQ ID NO: 231576 - DNA, 685 bp, Unknown
  Bacterial polypeptide expressing nucleotide sequence isolated from the Sargasso Sea
ggaaaaagccgcggaattgatttcatcctccaaaaaacctctcctatatgtaggcgccggtgcggtcattgcccaggcatcaaggcaggtcattggacttgcagaaaaacttcaggcacctgtcactaccaccttgttgggtaagggagcatttccggaaacccatccgctttccgtgggcatgctgggaatgcatggaaccgcctatgccaacaaaacagttgtggattgtgacctgatcatggccatcggtgcacgttgggatgaccgaatcacaggcaaggttagcgaattctgccctgatgcgaccaagatccacatcgatgttgacccggcagaattcggtaagatcattgatccggatgtctcaattgcaggagacgcaaaactggttcttgaagatctgatcccgttggtcagcaaactggacagccaaccctggctgaaacagatagaaaagtggaaaaagaaatatcctttgaaattcccaaaacgcggagggctgagagcccaacaggttcttaaggaactggacacgctaaccgactcaaaggcaatcatcagtaccgatgttggacagcatcaaatgtggaccgcacaattttgcaaaaccaatgaagagcgaaaatggctttcgagtgggggtgcgggaacgatgggttatggcctgccttcggcaattgga

SEQ ID NO: 231577 - DNA, 178 bp, Unknown
  Bacterial polypeptide expressing nucleotide sequence isolated from the Sargasso Sea
aatgccaaaattatttagcggagcagaaattgtatttaaagcactagaggaccaaaaagttgaatatatttttggttatcctggaggcgctgtattgccaatttatgatgaattaaaaaatcataaatctataaaacatattttagcaagacacgagcaaggcgcaggtcattccgca

SEQ ID NO: 231578 - DNA, 400 bp, Unknown
  Bacterial polypeptide expressing nucleotide sequence isolated from the Sargasso Sea
atgaatgaaactatgatcggcgctactgcgctaatgaaagcattggaaaaagaaggagtaaaggaggtcttcggtctaccgggaggtgcgaaccttccaatgtatgacgagttgggtaaaagtaacattcgtcatattttggtcagacatgaacaatctgctgcacatatggcagatggttttggtagagttagtcgaaaacctggtgtatgttttgcaacctctggtcctggcgcaacaaatttgttaactggaattgcaactgctcaagcagattctgcaccaatggttgcagttactggacaggtacctgttgcaatgattggaaaagatgcatttcaagaaagtgatataattggaatggcaaatcctgctttgaaatattcatatcaacctagaa

SEQ ID NO: 231579 - DNA, 769 bp, Unknown
  Bacterial polypeptide expressing nucleotide sequence isolated from the Sargasso Sea
aatgaataatgaaattactggttctgaaatagttttaaaaagtcttgtagaacaaggtgtagaagttgtttttggttatcctggaggagcagttttaccaatttatgatacattttttaaacaaaattcaatcaaacatattcttgtaagacaagagggtggagcaattcatgctgcagagggttatgcaagatcaactggtaaaacaggtgttgtgcttgttacgtcaggtccaggagctacaaatgttgtaaccggtttaactgatgcaatgatggacagtgttcctatagtatgtattacaggacaggtacctcaacatttaattggtagtgatgcatttcaggaatgtgatacaacaggtattactcggccatgtacaaaacataattacctagttaaagatgtaaataagctatcatcagtatttcatgaagcattcacaattgcacaaaatggaagaccaggaccagttgttattgatattccaaaagatgtgcaatttgcaaaagggtcttacgttgaaaaaaataaaattgttattccatctcatagactttttgaaccaagtccaagttttgaaacaaaaaaaattgaagatgctattgaaataatttctaaatctaaaaaacccattttttatattggtggtggttgtataaattctggaccaaaagcttctaaattggttagggaatttataaatatagtaggatctccagctactatgacattaatgggtttaggagtagttgccgcatcagataaa

SEQ ID NO: 231580 - DNA, 844 bp, Unknown
  Bacterial polypeptide expressing nucleotide sequence isolated from the Sargasso Sea
ggattcgatcccgatggtgatcatcagcggccaggtgccgactgccgcgatcggtcaggatgcgttccaggagtgcgatacggtcggcatcacgcgtccttgcgtgaagcacaacttcctcgtgaaggacgtgcgcgatctcgccgctaccgtcaagaaagctttctatatcgcccgcactggccgtcctggcccggtgctgatcgacattccgaaagacgtctcgaagatgccgtgccagtacgaaccgctcaagaacgtttcgctgcgctcgtacaacccggtcacgaaaggtcactccggccagatccgcaaggccgtggccttgttgctgtcggccaaacgtccttatatctacaccggcggcggcatcatcctcgcggatgcatcgcgcgagctgaaccagttcgccgatctgctcggctatccgatcacgaatacgttgatgggtctgggcggctaccgcgcgagcgacaagaaattcctcggcatgctcggcatgcacggtacgtacgaagccaacatggcgatgcagcactgcgacgtgctgatcgcgatcggtgcgcgcttcgacgaccgtgtgatcggcgacccggcgcacttcgcgtcgcgcccgcgcaagatcatccatatcgacatcgatccttcctccatctccaagcgcgtcaaggtcgacattccgatcgtcggcgacgtgaaggaagtgctgaaggaactgatcgagcagttgcagacggccgagcatggcccggacaccgcggcgctcgccgactggtggaaggacatcgaagcctggcgcgccaaagactgcctcaagttcgaccgtaagagcgacatcatcaag

SEQ ID NO: 231581 - DNA, 568 bp, Unknown
  Bacterial polypeptide expressing nucleotide sequence isolated from the Sargasso Sea
aaggtgaccaagggggaggcgttcgtggcctccgacgtgggccagcaccagatgtttgccgccctctactacccgtttgccaaaccgcgccaatggatcaactccggcggtctcggcaccatgggctttggcattcccgccgccatgggggcccagtttgccaacccggaagccgtggtctgctgcgtcaccggcgacggctcggtgcagatgaacatccaggagctctccacctgcatgcagtacggggtgcccatcaagatcatctccatcaacaaccgggcgctgggcatggtcaagcagtggcagaagatgttctacggtggccgccacagccactcctacatggagtcgctgcctgacttcgtcaagctggcggaagcctatggccacgtcggcatcgcggtgagcgatccggccgagctggagagcgccatggagaaggccttcgccatgaaggatcggctggtgttcatggacatctcggtcgacccggatgagcacgtctatccgatgcagataaagttcggtgccatggacgagatgtggctgagcaagacggagagaa

SEQ ID NO: 231582 - DNA, 655 bp, Unknown
  Bacterial polypeptide expressing nucleotide sequence isolated from the Sargasso Sea
tgtggtggacattccaaaagacatcacagacccaagctccagtgtgccttatgtctggcctaaaacagtctcttttcgttcttatcagccttctcagcgaggtcacaaaggacagataaagcgagcggtaaaaactctgttacaagcggaaaaaccggtgatatatgcaggtggcggagtcgttatcgataatgcgtccgattttttgattgatttggctagacatttaaactttcccgtgacaaacactcttatgggccttggggcgtttccgggcagtgatcctcaatttctgggaatgctaggaatgcacggtacttatgaggctaacatggccatgcatgaggccgatgtgatttttgcggtgggtgctcgatttgatgaccgcgttactaatgatcttgacaagttttgcccttcggccaaaatcattcaaattgatgtagatccaacctctatttccaagaatgtaaagtctgacatcccgatagtagggacttgcacgtcagtgctcgcagagatgatcggcatgatcaaggatgcaaaatgcgatggaaatgaggaggccttggaggactggtggttaaaaataaatcaatggcggcatgatcatggaatttacactaaagctagatatgagccaagccaaggaggt

SEQ ID NO: 231583 - DNA, 543 bp, Unknown
  Bacterial polypeptide expressing nucleotide sequence isolated from the Sargasso Sea
aatactacaaatttgaagaacctaatagatggctaacatctggaggtttaggtaccatgggttatggttttcctgccgcaataggagcacaaatagctaacccagactctttagttgtagatattgctggagatgcttcaattttaatgaatattcaagaaatgagtactgctgtacagcatcgacttccagttaaaatttttattttaaataacgaatacatgggaatggttaggcaatggcaagaattattgcatggaggaagatattctgagagttatactgatagtttaccagattttgtaaaacttgctgaaagttttaaagctaaaggtttaagagctaaaaatgttaaagaacttgatgatgttattttagaaatgattgcttctaaagaaacagttattgctgatatatgggtagataaagaagaaaattgctttcctatgattcaaagcggatctgcacataatgaaatgctattaaataagtaccagaagcaagatgaaacatctgctgaaaaaggcaaggtattagtataat

SEQ ID NO: 231584 - DNA, 571 bp, Unknown
  Bacterial polypeptide expressing nucleotide sequence isolated from the Sargasso Sea
ttggtcagcatcaaatggtgggccgctcaatatttttggattttcaaaatctaatcattggatgacttcaggcggattaggaactatgggttatgggttaccttcatcaataggtgttcaaatagctcatccaaaatcattggttatagacatttctggtgaagcctcatttttaatgaacatgcaagagttatcaacaattgttcaatataaattgcctgtaaaagtatttatacttaacaatcaatggatgggtatggtaagacaatggcaagagttaattcatggttctcgttatagcgagagctatacagcatctttaccagatttcgtaaaattagctgagagttttggaataaagggtttgcgtgcagaaaaatcagaagatttaaatagtgtgattgatgagatgttaaaatatgagggacctgtattagcagacatatgcgtagaaaaagaagaaaattgctttccaatgattccttcagggtcagcacattatgaaatgattttaagtaaagaagatgaaaagaacaaaaaaatttcaaataagggattagctctggtttaa

SEQ ID NO: 231585 - DNA, 543 bp, Unknown
  Bacterial polypeptide expressing nucleotide sequence isolated from the Sargasso Sea
atgttggtcagcatcagatgtttgctgctcagtattatcactttgatgaaccaagaaaatggataaattctggcggtcttggaactatgggatttggtctgccatcagcaatgggggttaaattagcttatcctgatgaagaagtaatttgcatcactggagaaggaagtattcaaatgtgcattcaagaactttcaacatgttctcaatataaactgccaataaagatatttaatataaataacttggctcttggtatggtaaagcagtggcaagatatgaactacgatggaagacattcctcaatcagctatgaagactctcttccagactttgttggacttgctgagtcttatggtcatgttggaattaaaataactaaaaactcagaacttaaaaaaggaatagcaaaagctctatccataaaggataggttagtttttgtcgatatttatgttgatcctgatgagcatgtttatcctatgcaagttgcaaacggcagccttaaagatttatggcttagtaaaggagaaaaaacatgat

SEQ ID NO: 231586 - DNA, 178 bp, Unknown
  Bacterial polypeptide expressing nucleotide sequence isolated from the Sargasso Sea
atgtctaaattatattcaggagctgaaattgtattcaaatgtcttgaggatcaagatgttaagtttatttttggatatccaggtggtgcagttttaccaatttacgatgaactaaaaaatcactcctctattaaacatattttggttagacatgaacaaggagcaggacatgctgccg

SEQ ID NO: 231587 - DNA, 755 bp, Unknown
  Bacterial polypeptide expressing nucleotide sequence isolated from the Sargasso Sea
agaaattgtattgcaatctcttgtagatcaaggggttgaggtggtttttggatacccgggtggtgcagtattgccaatctatgatactctattcaaacaaaactccataaagcatgttttggtacgtcaagagggtggtgccattcatgctgctgaaggttatgcgcgctcaacaggtaaagttggcgtagtattagtaacctcaggtcctggcgcaacaaatgttgttacaggtcttacagatgcaatgatggatagtattccaattgtctgtataactggtcaagttccacaacatttaattggcagtgatgcatttcaagaatgtgatacaactggaattacaagaccttgcacaaaacacaattatctagttaaagatccaaataaattatcacctgtgtttcatgaggcttttacaattgctcaagatggaagaccgggccccgttttaattgatattcctaaagatgttcagtttgcaaaaggtaattatattgaaaaagaaaaaattataattccatcacatagattatttgagcctgagatttttcataatgataataaaatcaatgaagttgttgacttaatttcaaaagcaaaaaaaccaatattttatattggtggaggatgtattaattctggtccaaaggcctctgcgttagtatcccagtttgtggaaatgacaggcgctcctgcaacgatgactttaatgggtcttggagtaattggttcttcacatccaaattctcttg

SEQ ID NO: 231588 - DNA, 247 bp, Unknown
  Bacterial polypeptide expressing nucleotide sequence isolated from the Sargasso Sea
aatgcaactgacaggagctcaaatagtttgtgagagtttattgcaagagggagtagacaccatatttggaatacccggtggcgcaatccttcccttgtaccaaactttaccggaatattctggcttgaagcatatattggttaggcatgagcaaggtgcagcgcatgccgcagatggttattcgagagcgacaggaaagcctggaatatgttgggctacatcaggcccaggcgcaacaatctggtaa

SEQ ID NO: 231589 - DNA, 163 bp, Unknown
  Bacterial polypeptide expressing nucleotide sequence isolated from the Sargasso Sea
aatgcctaaattatattcaggagctgaaattgtatttaaatgtcttgaggaccagaatgttgaatttatttttggatatcctggaggtgctgtattaccaatctatgatgaattaaaaaatcattcatcaattaaacatatcctagtaagacatgaacaggga

SEQ ID NO: 231590 - DNA, 408 bp, Unknown
  Bacterial polypeptide expressing nucleotide sequence isolated from the Sargasso Sea
aatgaaaaaaaacaaaaaaatatctggagcagaggcagtaattaaatcactaattaaagagaatgttgatcttgtttatggatacccaggtggagctataatgccagtatatgatgaattctttaaatttcaaaataaagttcatcatgttttaactagacatgaacaaggagctgttcacgctgctcaaggatatgcaaggtcttctggaagggttggtgttgcaattgctacttcaggtccaggagctactaacttagtaacaggaattgctgatgctcagattgattcaactcccatagtctgtattactggtcaggttccggctcatttattaggttctgatgcatttccagaaactgatattataggtatctcaatgccagtaacaaagtggagctatcagat

SEQ ID NO: 231591 - DNA, 904 bp, Unknown
  Bacterial polypeptide expressing nucleotide sequence isolated from the Sargasso Sea
gggagctagatttgatgatcgaattactaacacgcctgagaagtttgctccaaaagcaaaagttattcactttgatgtagatcattcatcagtatcaaagataattgaggcagatattgctgtattcggacaagtcaaggactcattgaaagctattaataactatttaaggtcgagaaaggatgaaataaatagagaaaagctttctccgtggcatcagcaaataagagaatggaaagaaaagcatggccttaatcatgaactctacaagaatgattcagacgagcatccaattttacctcaggcagccgtgcaacatatatatcaagaatctgaaggcaaagcatttgttacatcagatgttggtcagcaccaaatgtttgctgctcagtactatcactttgatgaaccaagaaaatggataaattctggcggtcttgggactatgggttttggtcttccgtcagcaatgggagttaaactggcttatcctgaagaagaagtaatttgcatcactggagaaggaagtatacaaatgtgtatacaagaactctcaacatgctcacaatataaattaccaataaaaatatttaatataaataatctttccctcggtatggtaaagcaatggcaagatatgaactatgaaggtagacactcatctattagctatgaggattcattaccagattttgttgggctagcagaatcttatgggcatgttggcattaaaatcactaaaaattctgaactcaaagaaggaattgctaaagcaatagccattaaagataagttggtttttgttgatatatatgttgatccaaatgagcatgtgtatccaatgcttgtcgctcctaacggaagcttaaaagatatgtggttaggtaaaggtgaaaaaacatga

SEQ ID NO: 231592 - DNA, 540 bp, Unknown
  Bacterial polypeptide expressing nucleotide sequence isolated from the Sargasso Sea
attataaattcaataaaccaaatagatggatgacctctggtggtttaggaactatgggttatggattaccagcagctgttggcgtacaaattgctcatcctgaaaaactagtaattgatattgctggggaagcatcagttttaatgactatgcaagaaatgtctacagctgttcaatataacttaccaataaagatatttattttaaataatcaatatatgggcatggtaagacaatggcaggaactattacatgaaaagaattattctgaaagttactcagaggcactcccagattttttgaaaatggcagatgcttacggttgtaaaggaattaaagcagataatcctttagatctagatagtaaaatccaagaaatgattgattataatggtccagtcatttttgactgtcatgtagatccaaatgaaaattgtttccctatgatcccttctggaaaaccacataaccaaatgatattaggcccaaatgaacaggaaaagaataaaattaaaggaaaaggcaaagctttagtctaat

SEQ ID NO: 231593 - DNA, 421 bp, Unknown
  Bacterial polypeptide expressing nucleotide sequence isolated from the Sargasso Sea
aatgaattatgaaattactggagctgaaatagttttaaaaagtcttgcagaacaaggcgtagaggttgtttttggttatcctggtggagcagtattgccaatctatgatacactttttaaacaaaattctattaagcatgttcttgtcagacaagaaggcggcgctattcatgcagcagaaggatatgcaagatcaactggtaaaacaggtgttgttttagttacttctggcccaggtgcaacaaacgttgtaaccggtttaacagatgctatgatggatagtgttccaattgtttgtataacaggacaagtacctcaacacttaattggcagtgatgcatttcaagaatgtgacacaacaggtattaccagaccttgtacaaaacataattacttagttaaagatgcaaataaattatca

SEQ ID NO: 231594 - DNA, 894 bp, Unknown
  Bacterial polypeptide expressing nucleotide sequence isolated from the Sargasso Sea
cgcatctcattctgcagagggatatgctagatcaagtggcaaagttggggtcatgtttgttacttctggtcctggggttactaattcggttaccggtttaactgatgccatgatggactctataccaattgtttgcataagcgggcaagtacccacccacctaattggcactgatgcttttcaagaatgtgatgctgtaggcatcacaagaccttgtacaaaacataattggcttgttaaagatatcaatgatctctctagaattctgcacgaagctttttacgttgcttcaagtggaaggccaggaccagttttagttgatataccaaaagatattcaatttcagacaggaacatatataggacctgaaactgtaaaacataaatcgtatagaccaaagttaaaggcaaatattgatcaaattgatgatgcactaaaattaattgcagaagctgaaaaacctattttttatactggtggaggagtgattaattctggtaatgctgctgttcaattactaagagaattcgttcggctaaccggttttcctattacatctacgttacagggattaggagcctatcctggtgatgactcacagtttattggcatgttaggcatgcacggcacttacgaagctaatatggctatgaacgaatgtgacttaatgattaacattggagccaggtttgacgatagaataactggtaaaatagatgatttttctccaaactcgaaaaaaatacatattgatattgatccttcatcaatcaacaagattgttaaagttgatgtgccattaataggtgatgttgctcatgtactagaagactcaataaaattatggaaatctaaagtttataaaattattaagactcctcttaaggagtggtg

SEQ ID NO: 231595 - DNA, 211 bp, Unknown
  Bacterial polypeptide expressing nucleotide sequence isolated from the Sargasso Sea
aatgccaaaattatttactggagcagaaatagtatttaagtgtcttgaagatcaaaaggtagagcatatctttggttatccgggtggtgcagttttaccaatttatgatgaactaaaaaatcatccttcgataaaacatattttagttagacacgaacaaggagctggtcatgcagccgaaggatatgcaagatcctctggaaaaccagga

SEQ ID NO: 231596 - DNA, 547 bp, Unknown
  Bacterial polypeptide expressing nucleotide sequence isolated from the Sargasso Sea
ggctgctcaatatttagatttctataaaccaaatagatggatgacgtcaggtggtttgggtaccatgggatatggttttcctgcagccattggagttcaagttgctcatcctaaaaagccagtaatttgtgttgctggagaggcatcttttttaatgaatatgcaagaattatcttctttgagacaacttaatattcctgtaaaaatatttattttgaataacgaatatatgggtatggttagacagtggcaacagtttttccatggaggtagatatgcagaatcatatacagattctttacctgattttatatccttagctaattcgtttggaataaaaggaatgagagttatggaccctagtaaattaaaaagttctataaaagaaatgttagatcatgatggtcctgtgttgatggatgtttgtgttgcaaaaatggaaaatgtttttcccatgattcctgccggtgcagctcataatgagatgaaattaagtgacaaagatgataaagagacgcaaactgctgagggattagctttattataa

SEQ ID NO: 231597 - DNA, 341 bp, Unknown
  Bacterial polypeptide expressing nucleotide sequence isolated from the Sargasso Sea
aatgaataatattatgtcaggagctcaaattgtagttgaagcattacttgaacaaaaagttgatacagtgttcggatatccagggggtgccgttcttcctatatatgatgaaatttttaaacaaagtaaaataaagcatgttcttgtaaggcatgagcaaggagcgattcatgctgcagaaggatattctagatcaacgggaaaacctggtgttgctcttgtgacgtcaggggcaggagcaactaattcagttactggcctaactgatgcacttatggatagtattccaataattgtattaacaggacaggtacctacattcatgatcggcaatgatgctt

SEQ ID NO: 231598 - DNA, 553 bp, Unknown
  Bacterial polypeptide expressing nucleotide sequence isolated from the Sargasso Sea
tgggctgctcaacattacaaatttaataaaccatatcgttggatgacttcaggaggattaggcacgatggggtatggcttaccagctgcagttggtgtacaaatagcacatccagaaaaattggttattgatattgctggggaggcttcagtattaatgaccatgcaagaaatgtctactgctgttcaatatagtttgccaattaaaatttttatattaaacaaccaatacatgggaatggttagacaatggcaagaattattacatgaaaaaaattattcagaaagttattcagaagcattgcctgattttataaaacttgcagaagcgtatggctgtaaaggaattttagcagaaaaacctagtgaactagacgaaaagataaaagaaatggttaattttaatggtccagttatttttgattgtcgcgtagatcctaatgaaaattgttttccgatgataccatctggcaaacctcataatcaaatgatattaggtccaaatgaaaaagaggaaaataaaattactggtaagggaaaagcattagtttagt

SEQ ID NO: 231599 - DNA, 886 bp, Unknown
  Bacterial polypeptide expressing nucleotide sequence isolated from the Sargasso Sea
tggccctggagcaacaaacttaattacaccattggctaatgctttaatggactccactcctcttctagcgattaccggacaagttgcctctactgcaataggtaatgatgcttttcaagaagcttatactgtaggtctttcaatggcagctactaaacacaactacctgatcacagatgcttcagagattccacaggttttaaaggaagcaaaatttattgctactactggtagacctggtccggttttggttgatataccaaaggatattttaaaccaaataactgcttgggttgagcccagtgatcttgatttacctggttacaagcctacaacagagccaaatccaaaaatggttcaacaagcttctgctttaataaaaaaatcaaagaagccaattctttatgtgggtggaggaattattcattcaaaagctaataatgaactttttgaactagctactaaatttagtatacctgttgttacaactcttatgggaagaggtgcttttcctgatggtcatgaattgtgtcttgaaatgcctggtatgcatggaaattatacagctactacttcaattcaaaatgctgacttgttaattgcaataggtgtaaggtttgatgatagagttactgcaaatccgtcattttttgcgcaaaatgcaaaagttattcatgctgatattgatccagcagaaattggaaaagtccgtgatgcacaagttcctattgtaggtgatgcaaaaagtgtcattaaaggacttattgaagctttgggagatgaaaaattagaaactgaaagttgggtttcagaacttaaagaaatgaagactgaatttcctttgtcttataaacaagaagaaaaaggccctcttaaagttccctat

SEQ ID NO: 231600 - DNA, 637 bp, Unknown
  Bacterial polypeptide expressing nucleotide sequence isolated from the Sargasso Sea
gttagtaaaagatgtaaatgatcttgctaaaattttacatttagcttttgaggttgctactactggaagacctggaccagtcttagttgatattcctaaagatattcagtttaaaaaaggtaaatataaatttacaaagaatgttttaaagaaaaaactgaatggcaaagctacgcataaattatctaacaaagaattagataagtttattgaattgataaaaaaatcatcaaaaccaatcttttatacaggaggcggagttataaattctggtccagaagcgagtaaacacttaagagaattaatttcattaaccggctttccaattacatctaccttgcaaggacttggtgcataccctggagatgatcctcaatttttaggaatgttaggaatgcacggaacttatgaagcaaataatgcaatgcatgattgtgacttaatgattaatataggagcaaggttcgacgatagaattactggtaaagttgacgagttttctcctaaatcaaaaaagatacatgttgatatagatccatcttcaataggaaaaaatataaaagttgatttagcagttgttagcgatgtatcagaacttttgcaaagtttaattaaaagatttaaagaaaaaaataaa

SEQ ID NO: 231601 - DNA, 511 bp, Unknown
  Bacterial polypeptide expressing nucleotide sequence isolated from the Sargasso Sea
atgacctcaggtggtcttggaacaatgggatatggtttacctgctgctgtaggtgtacaagttgctcatcctaataaattagtaattgatatagctggagaagcttctgttttgatgacaatgcaagaaatgtcaacagccgttcaatatagtttaccaattaaaatatttattttaaacaatgagtacatgggtatggttagacaatggcaagagttgctccatgataaaaattattcagaaagttataccgcagctttgccagactttgttaagttagcagaggcatatggttgtgtaggtattagagcaaaaagaccagaagaacttgatgataagataattgaaatgttaaataccgataggcctgttatttttgattgtatggtggataagcaagaaaattgttttccaatgattccatcaggaaagccccataatcaaatgctattaggccccaaagatcaagaagaaaagaaaattaccggcaaaggaagaactctagtctaat

SEQ ID NO: 231602 - DNA, 180 bp, Unknown
  Bacterial polypeptide expressing nucleotide sequence isolated from the Sargasso Sea
gatgtcaaaattatattcaggggcagaaatagtatttaaatgtttggaagatcaggatgttaatgttgtttttggttacccaggtggagcagttttaccaatttatgatgaattaaaaaattttccatcgattaaacattatttggttaggcatgaacagggtgctggtcatgcagcaga

SEQ ID NO: 231603 - DNA, 668 bp, Unknown
  Bacterial polypeptide expressing nucleotide sequence isolated from the Sargasso Sea
caagtcagcaggcaagcaattggggagcgatgcttttcaagaggcgccggtaacaagcgtaatgggatctgttgcgaagcatgtttttttagtcacagatgaaaataagctcgctgcaactttaaaagcagcatttgaagttgccacatctggaaggccagggcctgttgttgtggatattccaaaggatgttcaaacagctgagatatccgaagaagattatgaggacaccaatatctcagcttactctaatagaatattggccattgaaaaatcgcgcctgaacgaagaaaaatcatccaaattctttacacatctcggcaattcaaagaggccactgatttactttggaggcggtgtaatctcagcgagtgcatcaaaagagctcagagaatttgttgattattttaatctgccggctgtttcaaccctgatggggctaggtgcagtggatactcgacatccctcatctctgcacatgcttggcatgcatgggactccttatgcaaactatgccgttcaagaaagcgacttcttgatagcgataggttctcgttttgacgatcgtgttgcaggcgtgcctgaaaaatttgcaccgaaagccaaagtcattgcacactttgatgtcgatccctccgagatcaataaagtcaagaacgctgcttggt

SEQ ID NO: 231604 - DNA, 856 bp, Unknown
  Bacterial polypeptide expressing nucleotide sequence isolated from the Sargasso Sea
tcttgggatgcttggaatgacggaacttatgaagccaatatggcaatgcatgaagctgatttaattatcgcagtaggagcaaggtttgatgatcgaataaccaatgatccaaaacaatttgcgttgggtgctaaaaaaattcatattgatgtagatcccgcttctttatctaaaattattcatgcagatgttccgatagctggatctgctaaagaatgtttgtcagctttaattagcgaattaagtaaagaagagatagataccaataaattagagccttggttacaaaaaattactaactggagagaagagcacggactgaatcactccatgttagaactagtcccagaaaatggaaaaatactgcctcaacaagttattcaatccctttacaaagaaactgaaggaaaagctttcattacttcggacgtgggtcagcatcagatgtttgctgctcaatattacttttttgataaaccaaggcaatggattaattccggtggtttaggaactatgggctttggcttgccttctgctatgggagtgcagtttgcctttccaaaagaaactgttgcatgcgttacgggtgaaggcagtattcaaatgtgtatacaagaactatctacgtgctttcaatatgggctacccataaaaataataaacttaaataatgcggctttaggaatggttaaacaatggcaagatatgcaatacggaggaaggcattcttcaagtacttacgaaaactcattgccagatttttgtgccctgtcagagtcttatggtcatgttggcataaaagtaactaaattgtccgaattggagtctgcaatgaaagaatgcatttccatggaag

SEQ ID NO: 231605 - DNA, 277 bp, Unknown
  Bacterial polypeptide expressing nucleotide sequence isolated from the Sargasso Sea
atgacattaaattatataagtggagcagaggccgtaatcaaagccttagtcgataatgaagttgaggtaatctttggttatcctggtggagccgtacttcctctctacgatgctttatttgaaaataaaaaaattaaacacatattagttaggcacgaacaggcagctgttcatgctgcagaaggttatgctagatcaacaggcaaggttggatgtgttttagttacttctggtccgggtgcaaataatgcaataactggactaacagatgcattaa

SEQ ID NO: 231606 - DNA, 609 bp, Unknown
  Bacterial polypeptide expressing nucleotide sequence isolated from the Sargasso Sea
tcgacagactcacaaattcaaatgctatcatttcaacagatgttggacaacatcaaatgtgggctgctcaattctgcaaatctattcgtgagaaccaatggctctcaagtggtggtgctgggacaatgggatacggattccctgctgctataggagcacaattgggcaaaccaaaggatatagttgttgccgttgttggtgatggaggatttcaaatgactatggctgaacttgcaacagcagcaattcaaaaattaccaataaaaattctaattattaataaccgctacttaggaatggttagacaatggcaagaattattttttgagaatcgtgaaagcggtgtagacatggaaggaaatccagattttgtaaaaattggagaggcgtatggaataaagggatttcatttaagacgtgcaggagatgttacaaaagtgttaaaaaaagctcttgggtataatgatggtccatgtattatagatgctgaggtcgtgaaagctgataatgtcttcccaatgataccggctggtgctgcagtcagtgaaatgttaatagatgagccccccaaaacaaaaaaacttaaaaaaccagttggaagtacttaaa

SEQ ID NO: 231607 - DNA, 790 bp, Unknown
  Bacterial polypeptide expressing nucleotide sequence isolated from the Sargasso Sea
aaagatatcaaatttgctaaggtagttatttcgaaaccaaaaatagaaaaaaaatctaatggcaagtggcacaataaattttttcaaaatgatatagatgaattgattaatttaatttctaaagcaaaaaaacctgtaatctatacaggaggtggagttattaattctggaccaaaagcaagtgaaacattaagagaatttgttagactaattggttttccaattacatcaactttacaaggacttggtgcatttcctggtgatgataatcagtttattggaatgctagggatgcatggaacttacgaggcaaacaatgctatgcatgactgtgatttattaattaatataggagcaagatttgacgataggataacaggtaagatagatgaattttcacctaaatctaaaaaagttcatatcgatattgatccatcttcaataaataaaattataaaagtagatttagcaattgtaggtgatgttaacgaagttcttaaaacggttataaaaaagatcaataaaaaacataatggctttaaagcttctaataaacagaatacatcaaagtggtgggaacagatccaaaaatggagaacaaaagactctcttggatttattaatagtgaagaaactataaaacctcaacatgctgtccaaagattatatgaattaacaaaagatcaagatacttttattactactgaagttggtcaacatcaaatgtgggctgctcaacattacaaatttaataaacctaacagatggatgacttctggtggacttggga

SEQ ID NO: 231608 - DNA, 754 bp, Unknown
  Bacterial polypeptide expressing nucleotide sequence isolated from the Sargasso Sea
catgcccagcgcggaattctccacgtcggaacccctttcccctcccgatagcgactccatcggcggtaccgtgctcatgaaggcactggccgatgaaaacgtcgaattcatctggggctaccccggcggctcggtactctacatctacgacgagctttacaagcaggacaagattcagcacgtgctggtgcgccacgaacaggcggccgtgcacgcagccgatgcgtatgcgcgttccaccggcaatgtcggcgtctgtctcgtgacgtcgggccccggtgtcaccaacgcggtgaccggcatcgccacggcgtacatggattcgattccgatggtcgtgatcagcggccaggtgcccacggccgcgatcggccaggatgccttccaggagtgcgacaccgtcggcatcacgcgtccgtgcgtgaagcacaacttcctcgtgaaggacgtgcgcgacctcgcggaaaccgtcaagaaggcgttttatatcgcccgcaccggccgtccgggcccggtgctgatcgacatcccgaaggacatctcgaagacgccgtgcgaatacgagcccgtcaagagcgtgtcgctgcgttcgtacaacccggtcacgaagggccattcgggccagatccgcaaggccgtgtcgctgctgttgacggcgaagcgtccgtacatctacacgggtggcggcatcatcctcgccgacgcatcgcgcgaaactgaacagttcgcggacctgctcggctacccggtcacg

SEQ ID NO: 231609 - DNA, 337 bp, Unknown
  Bacterial polypeptide expressing nucleotide sequence isolated from the Sargasso Sea
aatgaataacgaaataactggtgctgaaattgttcttaaaagtcttgctgaacaaggcgtagaagtagtttttggataccctggtggagcggtgttgccaatttacgatactctttttaaacaaaattcaattaaacatgtacttgtaagacaagaaggtggagcaattcatgctgcagaaggatatgctagatctacaggtaaaacaggtgttgttcttgttacttcaggcccaggtgcaacaaatgtagtgactggactaactgatgcaatgatggatagtgttcctatagtttgtataacaggccaagtacctcaacatttaatttggaagtga

SEQ ID NO: 231610 - DNA, 405 bp, Unknown
  Bacterial polypeptide expressing nucleotide sequence isolated from the Sargasso Sea
attcagatgtaatttgcatagcaggagatgcaagtgttttaatgaatattcaagaattaggtactttgtcccaatatggtttaaaagttaagttgatcataattaataatcgctggcaagggatggtaagacaatggcaggaaagcttctacgatgaaagatattcatcatctgacatgagttgtggtgaacctgattttgtaaaacttgctgagtcttttggagttaaaggatacctaatttctgatagaaaacagttaaagaatgaattacaacatgcgtttgattatgacggtcctgccttgattaatattcttgttagaagaggtgaaaattgctacccaatggtacctccaggtaaaagtaatgctcaaatggttggatatgttaattgtgaagaataat

SEQ ID NO: 231611 - DNA, 639 bp, Unknown
  Bacterial polypeptide expressing nucleotide sequence isolated from the Sargasso Sea
ttaagccccaatatgcactagaacgcctgagagaaatagtgaatggggacgatgtctatgttacaactgatgttggacagcaccaaatgtgggctgcacaatttttgcattttgaggagccaaataggtggatgacttcaggtggtctgggaaccatgggctatggggttccagcggctatgggggtacaagtagcgcaccctaattcgaaggtaatttgtgtcactagtgaagggtcgctaatgatgaatatacaggaaatggctactatttctaaatataacttgccagttaagatttttaatttgaacaacaaggttcttggtatgattcgtcagtggcaagagttgtttcacggcaataatgagagtgagtgtgacctatcaagtggtgtagactttattgccttagcaaaagcgtttggtttcacggctatcaatattgttgatccagcagaggtggattctggaatttctcaaatgcttgaaatagagggaccagtttttttaaatatagcagttgaccgtaacgaaaatgtgttccccatgattccagctggagcagcgcataatgagatagttttgggtcctaatcagagcatccagaatgttggggcagaaaacaatgtgatggcttaga

SEQ ID NO: 231612 - DNA, 205 bp, Unknown
  Bacterial polypeptide expressing nucleotide sequence isolated from the Sargasso Sea
tatgtctaaattaattactggggcagaaatagtttttaaagcattagaggatcaaaaagtggaatatatttttggctaccctggaggtgcagttcttcctatctatgatgagtttaagaatcataaatctatcaaacatattttagcacgacatgagcaaggggcaggccatgctgcaaaaggttatgctagatcaagtggtaaa

SEQ ID NO: 231613 - DNA, 502 bp, Unknown
  Bacterial polypeptide expressing nucleotide sequence isolated from the Sargasso Sea
ggcagcacaactatataagtttaataaaccaaaaagatggataaattctggaggcttaggaacaatgggttttggtttgccttctgccatgggcgtacaatttgcaaacccgaattcactagtatgttgtgttacaggagaagcaagtattcaaatgtgtattcaagaattatctacatgtttgcaatatgggttaccaataaaaattataaatttaaataatagatatatgggtatggtaagacaatggcaggagtttttttatgaaaagagatatgctatgtcatatatggatgctttacctgattttgttaagcttactgaaagttatggtcatataggctataagattgaaaaaccatcagatgtagacaatgcaataataaatgcaattgaacaaaaagataaattagtatttttagacttcataacagaccctaacgaaaatgtttttcctatgattgctactggcgcagcacataataaaatgatactttcttaa

SEQ ID NO: 231614 - DNA, 827 bp, Unknown
  Bacterial polypeptide expressing nucleotide sequence isolated from the Sargasso Sea
ttcttcagtttttcatgaggctttttctattgcagcaaatggtagacccggacctgttttaattgatattccaaaagatgttcaatttgctaagggtagttatcaaagttctaaagaagtaaagattgactcccatagattatttgaatcaagaattagagctaatgatcaaaacatagaagaagcaacaaagttaatagcaaatgcaaaaaaaccaatattttatattggtggaggatgtataaattctggtccaaaagcttcacaactagttacaaaatttgtagaagaaacaaaagctcctgcaacaatgactctaatgggacttggcgtaataggtgctaaaaataaatattctttaggaatgttaggaatgcatggaatgtatgaagctaatatggctatgcatgaatgtgatgtaatgattaatattggagccagatttgatgatagagttacaggaagacttgatgcttttgctcctaattctaaaaaaatacatattgatatagatcctagcaatattaataaaactataaaaatagatgttcctattattggagatattgaatctgttatgaatcaaattttttcatcttggaaaaataataattataaaagtcaaaaagacaatttaataaaatggtgggataaaatagaagaatggaaaaaagttgattgtttaaattataatcaaggtgaaggatcaattaaaccccaacatgctataaaaagattatatgaactgacgaaagataagaaaacttttattacaacagaggtaggccaacatcaaatgtgggctgcccaaatattacaaatttgaa

SEQ ID NO: 231615 - DNA, 942 bp, Unknown
  Bacterial polypeptide expressing nucleotide sequence isolated from the Sargasso Sea
tgcaacaaatgtagtaactgctttaacagatgcatatatggattctgttccattagtttgtatttcaggacaagtaccaactcatttaattggaactgatgcatttcaggagtgtgataccacaggaatcactagaccttgtacaaaacataattggttagtaaaagatattaaagatttatcaaaaactattcatgaagcttttagagtagcaacaactggaagacctggacctgttttagttgatattccaaaagatattcaatttgcaaaaattagttattcaaaaccaaaaatggaaagtaaattaaatggtaagtcgttaaaccatttttcagaaaaagaaattgataagctaattgatttaatgaacaaatcaaaaaaacctataatatattctggtggtggtgtaataaactcaggccctgaagcaagtgaagttttaagagaacttgttcagctaacaggttttccaattacctcaactctacaaggtttaggagcgtatccaggagatgataatcaatttttaggaatgcttggtatgcatggaacctatgaagcaaataatgcaatgcatgattgtgatttgttaattaatattggagcaagatttgatgataggattacaggaaagattgatgaattttctccaaattcaaaaaaaatacacattgatattgatccatcatccattaataaaattataaaagttgacttagccttagttggagatgttaaagatattcttaaaggagtaaacaaaactctaaaaaagaaaaatattgatttaaagaaatcaaacaaacaaaaaatatcaaaatggtgggaacaaattcaaaaatggagaacgaaaaattcattacattttcaaaatagcgatgaaacaattaaacctcaacatgcagttcaaagattatacgagcttactaaagataaaga

SEQ ID NO: 231616 - DNA, 848 bp, Unknown
  Bacterial polypeptide expressing nucleotide sequence isolated from the Sargasso Sea
tttcaagaatgtgacacaactgggaattacgcgaccttgcacaaaacataattggttagttaaagatgtaaatgatttggccaaagtaatggatttagcatttgaagttgcaacaaccggtagacctggaccagtcttagtcgacataccaaaagatattcaatttaaaaaaacaaattttgttttaaaaagttcaagtaagaaaaaactaaatggaaaatctaaaccaaatggaaaaacaagctctagtgatttagacaaagttataaatttgatgaagaggtcatcaaaaccaattttttatactggaggaggtgtaattaattcaggtcctgaggcaagcaaatcattaagagaacttgtttcaataactggtttcccaataacctctaccttacaaggtctcggcgcttaccctggagacgatcctttatttttaggaatgctgggaatgcacggaacatatgaggcaaacaattccatgtatagctgtgacctgatgataaatatcggtgcgaggttcgatgatagaataacgggaaaagtggatgagttttcgcctaaatcaaaaaagattcatatagatattgatccatcatctattggtaaaaacattaaagtagatttagctgttatcagtgatgttggcagttttttaaaagccttaaataaaagaataaaagaaaaacataaagattttttaaactccaataaacaaaatatatctaaatggtggaaggatatagataagtggagacaaaaaaaatctttaagcttcaaaaacagcaaagaagtaataaaaccacagtatgcagtgcaaagactttatgagttatcaaaaaatcaag

SEQ ID NO: 231617 - DNA, 829 bp, Unknown
  Bacterial polypeptide expressing nucleotide sequence isolated from the Sargasso Sea
atgacaagccaaaacacccaaccagaactgctgtctggtggagccatgctgatccgcgccttagctgacgaaggcgtagagtatgtctatggttaccccggcggtgccgtgttacacatttacgatgcgatgtttcaacagcatcaggtgaaacacgtgctggtccgccatgagcaagccgcgacccatatggcggacgcctacgcaagagcaagcggcaaagcaggtgtagtgctcgttacctccggccctggtgctactaatgcggttactggcatagccactgcttatatggattctattcctatggtggtgatctgtggtcaggtgatgagtcacctgattggcgatgatgcctttcaggaaaccgatatgctgggcatttcccgccctatcgtgaaacacaatatgtcggtgcgccgccccgaagatattccgtatttagtcaaaaaagccttttatatagcgcaaagtggcaggccaggccctgtggtattggatattccaaaggatatgacgataccaagccagaagttcccgtacgagtatccaaaagaaatcaaactgcgctcttataacccgaacgcgaaaggccatccgggccagattaaaaaagccctgaccactttattagcggcgaaaaaacctgtgctttatgctggcggtggtgtgattttaggccaggcctcagatgagctgactctgttagcccgcaagctgaatttaccagtcactaacacattaatgggtttgggtgcttatcctgcgtccgatacacaatttattggtatgctgggtatgcacggcagttatgaagccaatcaggtga

SEQ ID NO: 231618 - DNA, 808 bp, Unknown
  Bacterial polypeptide expressing nucleotide sequence isolated from the Sargasso Sea
aaattatcttccgtatttcatgaagcatttactattgctcaaaatggaagaccaggccctgtattaattgatataccaaaagatgtccaatttgcttcaggaacttatgaagaaaaaaataaaattattattccttctcatagattatttgaaccaagtcctgattttgaaaaaaataaaattgaagaagcagtagaattaatttctaaagctaaaaaaccaattttttatattgggggtggatgtattaattctggtccaaaagcttcaaaattagttagagaattcataagtatggttgggtcaccagttacgatgacattaatgggtcttggtgtggtaggttcatcagataaaaactcacttggcatgcttggtatgcacggaatgtatgaagctaatatggcaatgcatgaatgtgatgttatgattaatattggtgcaagatttgatgatcgtgttactggaaggcttgatgcattctctccaaattcaaaaaaaatccatattgatatcgatgaaagtaatattaataaaactataaatgtagatgttccaataataggtgatgttaagcaagttgttgaaaaaatgatttcagtctggaaagataacaaatataaaatagatactgagtcattaaaattatggtggaataaaataaataaatggaaagaagtagattgtttaaactataataatgaaggtaaacagattaagccccagtatgcagttcaaagactctatgagttaacaaaaaatacaaaaacatttattacaactgaagtaggtcagcatcaaatgtggg

SEQ ID NO: 231619 - DNA, 676 bp, Unknown
  Bacterial polypeptide expressing nucleotide sequence isolated from the Sargasso Sea
ggactgggggagccagatcggccagtggcgctcgcgcaactgcctggcctacgagacccaccccaccctgatcaagccgcagcaggtgatcgagaccctctacaaggtgaccaagggggaggcgttcgtggcctccgacgtgggccagcaccagatgtttgccgccctctactacccgtttgccaagccgcgccagtggatcaactccgggggcctgggcaccatggggttcggcattccggccgccatgggcgcccagtttgccaacccggatgcggtggtctgctgcgtgaccggcgacggttcggtgcagatgaacattcaggagctctccacctgcatgcagtacggggtgcccatcaagatcatctccatcaacaaccgggcgctgggcatggtcaagcagtggcagaagatgttctacggcggccgtcacagtcactcctacatggagtcgctgccagacttcgtcaaactggcggaagcctacggccacgtcggcatcgcggtgagcgatccggccgagctggagagcgccatggagaaggccttcgccatgaaggatcggctggtgttcatggacatctcggttgacccggatgagcacgtttatccgatgcagataaagttcggcgccatggacgagatgtggctgagcaagacggagagaacctga

SEQ ID NO: 231620 - DNA, 517 bp, Unknown
  Bacterial polypeptide expressing nucleotide sequence isolated from the Sargasso Sea
ggcggtaccgtgctcatgaaggcactggccgatgaaaacgtcgaattcatctggggctaccccggcggctcggtactctacatctacgacgagctttacaagcaggacaagattcagcacgtgctggtgcgccacgaacaggcggccgtgcacgcagccgatgcgtatgcgcgttccaccggcaatgtcggcgtctgtctcgtgacgtcgggccccggtgtcaccaacgcggtgaccggcatcgccacggcgtacatggattcgattccgatggtcgtgatcagcggccaggtgcccacggccgcgatcggccaggatgccttccaggagtgcgacaccgtcggcatcacgcgtccgtgcgtgaagcacaacttcctcgtgaaggacgtgcgcgacctcgcggaaaccgtcaagaaggcgttttatatcgcccgcaccggccgtccgggcccggtgctgatcgacatcccgaaggacatctcgaagacgccgtgcgaatacgagcccgtcaagagcg

SEQ ID NO: 231621 - DNA, 924 bp, Unknown
  Bacterial polypeptide expressing nucleotide sequence isolated from the Sargasso Sea
tggaccgggagcaacaaattgcgtaaccggcatagccactgctcatatggattcgattccgttgatagtctttactggtcaggtttcaactagtctaattggaaacgatgctttccaagaagttgacgcgataggtataactaggccatgcgttaagcacaactttttagtggaaagcgcagccgatctggcgcttacaattaagaaggcattttatatagccactagtggccgtccaggtccagttgtcgtcgacatccctaaggatataggtgtcgagttagccgagtaccaatatcctgacgatgttgagcttcgatcctatcaacctactttgagaggtcaccccggtcagataaagcgggcctatcagcttattgctggtgcaaaaaaacccatgatctattccggaggtggagcaattacagacaacgcctcggaagagctgacggtgtttgcgcgaaaattaggttttcccgtcacaaatactcttatgggtttgggcgcattccctgggactgatcaccagttcgtgggcatgctgggtatgcatggtacatatgaagcgaacatggcgatgcacaactgtgacgtgctcatagcgatcggtgctcgctttgacgatcgggtcacaggcgaattggataagttttgccctaaggcaaagatcattcacatagatatagatcctgcatcaatagcaaagaatgttgaggttgatgtcccgattgttggctctgtaaaaaatgttctgacagagcttaaccagttgctggagaggaataattatcctgcggtagatagagaacatgactcttggtggcaaactatagacgaatggcgttctgaagattgtctaaaatacgataggggcagcagcaagataaaacctcaggctgtaatagagactctatatgaagtgac

SEQ ID NO: 231622 - DNA, 615 bp, Unknown
  Bacterial polypeptide expressing nucleotide sequence isolated from the Sargasso Sea
catgcccagcgcggaattctccacgtcggaacccctttcccctcccgatagcgactccatcggcggtaccgtgctcatgaaggcactggccgatgaaaacgtcgaattcatctggggctaccccggcggctcggtactctacatctacgacgagctttacaagcaggacaagattcagcacgtgctggtgcgccacgaacaggcggccgtgcacgcagccgatgcgtatgcgcgttccaccggcaatgtcggcgtctgtctcgtgacgtcgggccccggtgtcaccaacgcggtgaccggcatcgccacggcgtacatggattcgattccgatggtcgtgatcagcggccaggtgcccacggccgcgatcggccaggatgccttccaggagtgcgacaccgtcggcatcacgcgtccgtgcgtgaagcacaacttcctcgtgaaggacgtgcgcgacctcgcggaaaccgtcaagaaggcgttttatatcgcccgcaccggccgtccgggcccggtgctgatcgacatcccgaaggacatctcgaagacgccgtgcgaatacgagcccgtcaagagcgtgtcgctgcgttcgtacaacccggtcacgaagggcca

SEQ ID NO: 231623 - DNA, 712 bp, Unknown
  Bacterial polypeptide expressing nucleotide sequence isolated from the Sargasso Sea
ggctttgcagcggaaggctatgcaagagcttcgggaaaattaggcgtggctttgaccatgagtggccccggagcaacaaatcttgtgactccaatttctgatgcttactttgattcagtgccagtgctttttttaacgggacaggtcacaataccaacgtacaagtcagaccgacctgtcagacaaatgggataccaggaagctgacatcgttgccgtaacaaagcctattacaaaggctgccatgatggccagaacagaaaaagagttgcccgtaatgcttcgacaaagtgtctccatggccatgtctgatagacaaggacctgttctcttagatattcctaccgatatccaacgtaaagatgtcccaaaagtagagtttgagtgtaaaccgatttacaaaagcccctcttcccttagcgacactgacatcaataagatattttctttaattaaagaagcctctcggccggtcattattgctggtggcggtattcgtatcacagaaacaacaacacagttaatagattttgccaatcgctttcaaattcctgtggccattactatgagaggaaaggattgttttcctaatgacaatccattgtatcttggttttcttggtgcttatggaaaccgttatacaaatttagccgtggccaatagtgatcttgtgatagcattgggctcacgtttagatagcagacaaaccgcaa

SEQ ID NO: 231624 - DNA, 568 bp, Unknown
  Bacterial polypeptide expressing nucleotide sequence isolated from the Sargasso Sea
ggtcagcatcaaatgtgggctgctcaattctataaatttgaggaaccaaatagatggcttacatcaggtggtttgggcactatgggatatggatttcctgctgcaattggagctcaagttggacatccagatgcattagtagtcgatatagcaggagatgcatccatactaatgaacatacaagaaatgagtacagctgtacaatatagattgcctgtaaaaatatttattttaaataatgaatacatggggatggtaaggcaatggcaagaacttttacatggtggaagatattctgaaagttatactgatagtttacccgattttgtaaagttagctgagagttataaagctgttggtttaagagcaaagacaactgatgaacttgatgatgttataactcaaatgattgaaacaaaaaatacagttattgctgatatttgggtaactaaagaagaaaattgctttccaatgattcaaagtggttccgcccacaatgaaatgctgttaagtaaagatcaaaaacaagataaaaaatcagccgaaaaaggaaaaattttagtttaat

SEQ ID NO: 231625 - DNA, 757 bp, Unknown
  Bacterial polypeptide expressing nucleotide sequence isolated from the Sargasso Sea
ggcatttctcgacccattgtaaaacatagtttttcagttgaatcagcagaggatattcctgaagtagtgaaacaagctttttatatagcaacttcaggaagaccgggtcctgttgtaatagatgtcccaaaagatacaacttctcctgatgagcttttcgattttgtatatccagattcggctcacataagatcctataatcctccagtttctccagaaaaaaagcagattgagagagctgtagaagctattcttcaagcaaagcagcctgtgatttatgcaggtggtggagccattaacagtaatgcctcatctgaactaataaaaattaatgatatcttagattttccagtgacaaataccttgatgggtctcggagtttatccagcaactcacaaaagatttttaggaatgctaggtatgcatggaacctatcaagctaatatggctatgcataatgcagacctcattatcgctattggggcaagatttgatgacaggataactaatactccaaaactttttgctccaaatgcaaaaattattcattttgatgttgatcaatcatcagtttcaaaaattattgaagcaaacattgcagtatttgggcaagtaaaagattcactacaagaaatattaattgagcttgagactagaagaaatgaaatagatgaaaacaaattggatgattggaagcaacaaatcaaactatggaaagagaagcatggtttagatcacaaaaatgtatttatctgaa

SEQ ID NO: 231626 - DNA, 781 bp, Unknown
  Bacterial polypeptide expressing nucleotide sequence isolated from the Sargasso Sea
gtagtgacagcactaacagatgcatatatggactcggtacctttagtttgtatatctggacaagtacctactcatttaattgggactgatgcatttcaagagtgtgatacaactggaattacaagaccatgtactaaacataattggttagttaaagatataaaagatctatcaaaaattattcacaaagcttttgaggttgcaactactggaagaccaggaccagttttggtcgatatacctaaggatattcaatttcaaaaaacaaattattcaaaatttaaaaaagaaaataaatctaatggaaaaatacacaataattttaaccataaggatatcgatgagttagttaaacttatgtctaaagcaaaaaaaccaatcttttatacaggtggtggtgtaattaactctggtccaaaagcaagtgaactactgagagaacttgtatctattacgggtttcccaattacttccacattacaaggtctaggttgttaccctggagatgataatttatttttaggaatgttaggtatgcatggaacatatgaagcaaacaatgcaatgcatgattgtgatttgatgataaacataggtgcaagatttgacgataggataacaggaaaaatcgacgagttttctccaaagtcaaaaaaagttcacatagatatagacccatcatctataaataaaaatgttaaagttgatttaccaatagttggagacgttcaaagtgtaatttcagcaatagttaaaacaataaaaaaaaacaaaacctaat

SEQ ID NO: 231627 - DNA, 276 bp, Unknown
  Bacterial polypeptide expressing nucleotide sequence isolated from the Sargasso Sea
tatgaagaaaattactggtgcaagaatagttattgaagctttaattcaggaaaaagttgaaataatttttggttatcctggaggtgctgttctaccaatttatgatgaattatttaaacaagataagattagacatattcttgtaagacatgaacaagctgctgtgcatgctgctgaaggttatgcaaggtcaacaggaaaagttggtgttgtttcttgtacatcaggaccaggagctacaaataccgtaactggtttaactgatgcgatgatgga

SEQ ID NO: 231628 - DNA, 922 bp, Unknown
  Bacterial polypeptide expressing nucleotide sequence isolated from the Sargasso Sea
tgtaaccatgccgatagtaaaacacagttatctggtcagagatgttaaggatttatcaagggtagtgaatgaggctttccatcttgcatcaacaggacgtccggggccagtactgatagatttgcctaaggatgtggtatcaaatgaatgggatgaagatttttctgcagacttagaccttccgggatataaagttcagataagcggtagcactgatgggatcgaatatgcttcggaactactctcaaaatcaaaacagccgttgctttatgttggggctggcgcagttatttcgggagcaggtaagcaggttcaaaatctagctgaaaagctgcaggcgcctgttaccacaactttgctgggcaaaggtgctttttccgaaatgcatccactttctgtaggaatgctggggatgcacggtactgcatatgccaataaggcagtaattaattgtgacctgattatggctatcggagcacgttgggatgaccgcataactggtaaagtcagtgaattttgtccaaatgcaacaaaaattcatattgatattgatcctgcagaatttggaaaaatcattcagcctgacgtaagcgttaatggagatgcttccgaagtgctttcaaaattgatcccgcttgtggataagcttgacacttcagcatggcttaaaaagattgaaaattggaaaattaaatatcctctaaaattcccaaagcggggcggtttaagggcgcagcatgtattatccgaattagatcgtttgactgactctaacgcgattatttcaactgatgttggtcagcaccagatgtgggccgcccaattctgtaaatcaattagagagcgtcaatggctctccagtggaggtgctggaaccatgggctatggattccctgctgcaattggggcgcagcttggcaaa

SEQ ID NO: 231629 - DNA, 500 bp, Unknown
  Bacterial polypeptide expressing nucleotide sequence isolated from the Sargasso Sea
aatgaataatgaaataacaggtgctgaaattgtcctaaaaagcttggctgaacaaggagtagaagttgtatttggatatcctggtggtgcggtattgcccatatacgatactttatttaaacagaattcaattaagcacgttttagtaagacaagagggtggcgctatacatgcagctgagggttatgctaggtcgactggtaaaactggagtagttctagtaacatcaggacctggcgcaacaaatgttgtaactggtttaactgacgccatgatggatagcgtaccaatcgtatgtattactggacaagtaccacagcacttaattggcagtgatgcatttcaagaatgtgataccacaggtataaccagaccttgtactaaacataattacttagttaaggatgttaataaattatcttctgtatttcacgaggcatttaccattgctcaaaatggaagaccaggtcctgtattaattgatatacctaaagacgttc

SEQ ID NO: 231630 - DNA, 164 bp, Unknown
  Bacterial polypeptide expressing nucleotide sequence isolated from the Sargasso Sea
aatgtcaaaattatactcaggtgctgaaattgtatttaagtgtttggaggatcaaaatgttgaccatattttcggttatccaggtggtgcagttctaccaatttatgacgaattacagaattttaaatcgatcaaacatgttttggttagacatgaacagggcg

SEQ ID NO: 231631 - DNA, 511 bp, Unknown
  Bacterial polypeptide expressing nucleotide sequence isolated from the Sargasso Sea
gatgacttctggaggtcttggtacgatgggatatggattaccagcagcagttggggttcaaattgcacatccaaagaaattagtaattgatattgccggagaggcttctgttctgatgactatgcaggaaatgtcaactgcagttcagtacaatttacctataaaaatatttattttgaataatgagtacatgggaatggtaagacaatggcaggaattactccatgataaaaattattcagagagctatacagctgcattgcctgattttgtcaaaatggcagaagcatatgggtgtgttggtataagagcaaaaacacctgaggagttagatgataagattattgagatgttaaacacagatcgtccagttatatttgattgtcttgtagacaagcaagaaaactgctttccaatgataccttctggaaaacctcataatcaaatgttgcttggtcccaaagatcaaaaagaaaaaaagataacaggaaagggtagaatactggtttaa

SEQ ID NO: 231632 - DNA, 571 bp, Unknown
  Bacterial polypeptide expressing nucleotide sequence isolated from the Sargasso Sea
gttggccaacatcaaatggtgggctgcacaacattataaatttaataaacctaatagatggatgacatctggaggacttggaactatgggttatggacttccagctgcagtcggtgttcaaattgcacatccagataaactcgtgattgacattgctggggaggcatcagttttgatgacgatgcaagaaatgtctactgcagttcaatataatttaccaattaaaatttttgttttaaacaaccaatatatggggatggtaagacaatggcaggaactacttcatgaaaagaattattcagaaagctattctgaagcattacctgattttgttaaattagctgaagcatatggatgtaaaggtatcaaagcagataatccagatgaattagattttaagattgaagaaatgattaatcataatggtccagtaatatttgattgccaagtagaccccaatgagaattgttttccaatgataccttcaggaaaacctcataatcaaatgattttaggaccaaatgataaagaagaaaaaaagattactggtaaaggaaaaactttagtttaa

SEQ ID NO: 231633 - DNA, 532 bp, Unknown
  Bacterial polypeptide expressing nucleotide sequence isolated from the Sargasso Sea
ggaaaaattaatattgttacagcaaggcatgagcagggtgcaggctatatggcttccgggtatgcattagcaacaggtagtataggtgttgttttttctggagcacctggaccaggtgctacaaatcttgtcacatcaattgcaaatgcaatggcagattccataccgctacttgttctttcagcacaggtagataaaagatatttacaccgtaatattttacagtactgcaataatgtaaaattatttgaacctttttgtaagagttcaatagagttaaattcactggaagaattaccaaacatgcttgctacaagtattcagatagccctttccggaaaacctggtcctgtacatattgcattaccacagaatctgcaggcagaaactgtaacatctaaaaaaataatcccgtttcaatcaatcagttcaggtgaaccgtgtgaattagatataaatagattgctggaaaaattaaaaagttgcgaaaggcctgccattatagctggacatggaataataagagacaggg

SEQ ID NO: 231634 - DNA, 679 bp, Unknown
  Bacterial polypeptide expressing nucleotide sequence isolated from the Sargasso Sea
taaaaactggcgagatgcacatggcctgaaccattctctattagagatgggagcacaaaatggaaagatactacctcagcaagttatacaatctctctataaagaaacaaatggggaggctttcgtaacatcagatgtgggtcaacatcagatgtttgctgctcagtactatcattttgataaaccaagacagtggataaattctggaggtcttggcacgatgggctttgggcttccatcggcaatgggtgttcagctggcataccccgagtctatagtctcatgtgttactggtgaaggaagtatacagatgtgcatccaagaactttcaacatgtcttcaatatggattgcctataaaaataattaatcttaataacgctgcattgggaatggtaaaacaatggcaagacatgcaatacggaggtaggcattcatctagtacatatgaaaattcactaccagattttgtagcacttacagagtcatatggacatgtaggtataaaagtctctaaattcgatgagctagaatcagccatgaaagagtgcatatcccttaaagataaactggtatttttagatgtggatgttgatccaaatgaacatgtttatcctatgctagaggctggcaatgcgatggatcacatgcgtcttagtaaagacgaaaagacttggtaa

SEQ ID NO: 231635 - DNA, 808 bp, Unknown
  Bacterial polypeptide expressing nucleotide sequence isolated from the Sargasso Sea
aatattcagcaacaaaccgcccaaccggtgtggcccaccaaaattgatctgcccggctaccgacctgacccgaaagcggacgatctggagctgaacgaaatcatcggtctgatcgagaaagccgagcgcccagtgctctatgtcggcggcggcatcatcaccggcgaagcctctaaggaactgcgggccttttccgaagccaccaaaatccctgtcaccaccaccatcatgggtgtgggcgcgttcccggaggatcacaaactctccctgcgctggctcggcatgcacggcgccgcctacgccaactgggccgtgagcggcgaactccgtaaagacgccaagggcaatacccgaaaaatcgccgatggcgccgatctcctcctcgcttttggcgtgcgatttgatgaccgcgtcaccggcaaggtggagaaattctgtgaaaccggcaccattgtgcatgtggatctcgatcgctcggagcacaacaaaaacaggcacgtgcagctgcccattcacagcgatgtgaaatacgccctcggcaaattggtcaagatggtcaaagcccgcccaatcaaggcccgctacaccaaatggcacaagcagatcgccgaatggaaacaacgcgccccactcggctacaaagtaaccgacgaggtgatgaattccatgcacatgaaggatcacctcaaggggaaggaagaccaggtgatcctgccgcaacacgccattgccactctgttcaaggaaagcaaaggcgacgccctcatcaccaccggcgtgggccagcaccagatgtgggccggccaac

SEQ ID NO: 231636 - DNA, 844 bp, Unknown
  Bacterial polypeptide expressing nucleotide sequence isolated from the Sargasso Sea
ccatttgtctgtatatccggacaagtgcccacccatttaatcgggactgatgcatttcaagaatgtgacacaacaggaattactcggccatgcacaaaacacaattggcttgttaaggatgttaatgaactttcaaagattttacatttagcatttgaagtagctactactgggagacccggccctgttttagtagatatacctaaagatatacaatttaaaaaaggaaaatataactttaagaaaaattctttaaagaaaaaattaaacggtaaagctactcataaaatttcaagtcacgaacttgataaattcattgaaatgataaaggactcaagaaaacctattctgtatactggtggtggtgttattaactcaggcccagaggcaagtgaacatttgagagaattagtttcattgacaggctttccaataacttcaaccttacaaggtttgggtgcatacccaggagatgatccacaatttttaggaatgctaggcatgcatggaactttcgaagcgaacaatgctatgcatgattgcgacttaatgataaatattggtgctagatttgatgacaggatcactgggaaagttgatgagttttcaccaaactcaaaaaaaattcatatcgatatagatccttcttcaattggaaaaaacataaaagtagatttagctatagtaagtgatgtagctgaacttttaaagtctttaaataaaaggtttaaagaaaaaaataaaaattttttagagtcaaataagcaaaaaacttctaaatggtgggaacaaatagcaaaatggagaaataaaaaatcgttacattttaaaaatagtgataaaa

SEQ ID NO: 231637 - DNA, 766 bp, Unknown
  Bacterial polypeptide expressing nucleotide sequence isolated from the Sargasso Sea
aaattgacaggcggtcaaatagtttgcgaaagcctcataagggaaggagtagatacaatttttggtcttcctggaggagcgatattgccactctatcaaactttatctcacttcccccaactaaaacatatacttgtacgacatgagcaaggtgcggcacatgctgcagatggatatgccagagttacaggaaaacctggagtagcttgggccacgtctgggccaggcgctacaaatttaatcaccggaatgatgtccgcatatatggattcaataccaatggttttaattacagggcaagttggtagagctgctattggctcagatgcattccaagaatgtgatattcagggaatttctctccctgtaactaaacacaactatctagtcatggaagttgatgaaattgccgaaaccatcaacgaagcatttcatattgcaaatacaggacgaccgggtccagtacatattgatatcccaaaagatatttttacagaaattacggaatttgagtatcccgaaattcctgaccttcctggatatagaccaaatattaatcctcatccaaaacaaattaaacgtgcagtacaactaattgaacatgctcaaaaacctgtaatccttgctggacacggtgttctaatttcaaaagctcaaaacgaattgttagagttagctgaaaaagcccaaatccctgtaatcaacacgctaatgggtgtaagcaacttccctagtaaccatatcttgtatggaggatggccaggaa

SEQ ID NO: 231638 - DNA, 891 bp, Unknown
  Bacterial polypeptide expressing nucleotide sequence isolated from the Sargasso Sea
gatgccttatttcaacaaaataagataagacatattttagtaaggcaagagggaggcgctgtacatgcagcagaggggtacgctcgttccacaggtaaagtaggagttgttttagtgacctctgggccaggagcaacaaacgctgtaacaggtcttctagacgctttcatggacagcattcccattatttgtcttacagggcaggtacctactcatttaattggtaacgacgcgtttcaagaagctgatactaccggaattacgaggccatgcactaagcataattatcttgtaaaaaatattgaagatttagcgcgcattatgcatgaagcctttcatgttgctcgaagtggtcggccaggcccagttgtaattgatttaccaaaagatattctgatggcattgggaagctacgttgagaaaaatactgtgaagcgaagcgcgtataaaccccaagttaagggtgataaaacaaaaattagggacgccattaaattaattaagaatgcaaaaaaaccaattatttatgcaggcggaggggtaataaattcggggcctttggcttcaaaatatcttagtagatttgtgaaaatgactggatttccatgtactttgacccttatggggttaggcgcatatccagcatcggataggcaatttgttggaatgttgggtatgcatggcacttatgaagctaatctgtgtatgaacgaatgcgacctcatgatagcaattggggcgagatttgacgaccgaattaccggtagattagattctttttctcctgggtccaaaaaaatacagatagatattgatccctcttcaataaataaaaatgtgcctgttgatattggaattattggcgatattagtaacgtgcttaaagatgtt

SEQ ID NO: 231639 - DNA, 622 bp, Unknown
  Bacterial polypeptide expressing nucleotide sequence isolated from the Sargasso Sea
atggaaaaatccttccacaaacaagtgattcaatctctttacaaagaaactgaaggtgaagctttcatcacttctgacgtaggtcaacatcagatgttcgctgcgcaatattacttttttgataagcctagacaatggataaactcgggaggtctaggaaccatgggatttggtttgccatctgctatgggagttcaatttgcctttccagaagaaactgttgcttgtgttacgggcgagggcagtattcaaatgtgtatacaagaattatctacgtgctttcaatatgggctacccataaaaataataaacttaaataatgcagctttaggaatggttaaacaatggcaagatatgcaatacggaggaaggcattcttctagtacttatgaaaattcattacctgacttttgtgctttatcagagtcttatggacatgttggaataaaagtaaccaaattagctgaattagagtctgctatgaaagaatgtatttccatgaaagataaattagttttcctagatgtggatgtagatcctgatgaacatgtatatccaatgttagaagcaggaaatgcaatggatttcatgcacttgagcaaagataaaaaaacttggtaat

SEQ ID NO: 231640 - DNA, 808 bp, Unknown
  Bacterial polypeptide expressing nucleotide sequence isolated from the Sargasso Sea
tcaggtcctgggagcaacaaatactgtaacaccgatacgtgattgtatggctgattctatcccaattgttgtgatatcaggtcaagtccctacaacagcaattggtactgatgcatttcaggaggcacctgtttccgcgataatgggagctgtctccaaacatatttttcttgtcacagacccgctccttcttgaatctacaatccgctctgcgtttgaattagcaaaaacaggtaggccaggaccagtggtagttgatataccaaaggatattcagaattgggagggtgagttcctcggctcgggatcactccctttgactggctaccgaaacagactagaaactgtaatgaataataaccttaacgaagaattggctaaaaacttctataaattacttagcaagtcaaaaaaacccctcatctatgctggtggaggagtaataaatgcagatgctagctcgcaattgaggcagttttctgaaacttataaaataccaattgtcaccacactaatggcattgggtgcaagtgatacgacaaaatcattatcacttcacatgttgggaatgcatggcttagcttcagcaaattatgcagttgaggattgtgactttttgattgccataggagctagatttgatgatagagttgctggagatccaaagggttttgcgccaaatgctaaaaaaattgctcattttgatatcgatatatcagaaataaacaaagtaaagagtgtagattggtaccatgtaggtagcctcaaaaaagatttaaatgatctgattgcattagggaaaaaatag

SEQ ID NO: 231641 - DNA, 523 bp, Unknown
  Bacterial polypeptide expressing nucleotide sequence isolated from the Sargasso Sea
taataaaccaaacagatggatgacatctggtggccttggaacaatgggttacggtctcccagcagcagtaggagtacaagttgctaaccctgataaattagttatcgatattgccggtgaggcgtctgtattgatgacaatgcaagagatgtctacagcagttcaatacaatctaccaattaagatatttattttaaacaaccagtacatgggaatggttagacagtggcaagaactccttcatgaaaaaaattattctgaaagttatactgcggcattaccagattttgtaaaacttgccgaagcatatggttgtgttggtatacaagcaaaaaaaccagatgagctagatgaaaaaattaaagaaatgttgaatgttaataaaccagttatttttgattgtttagttgatccgaatgaaaattgttttcccatgataccttcggggaagcctcataaccaaatgcttcttggaccagatgacgaggaagaaatttctagcgaaggaaaggtattagtttag

SEQ ID NO: 231642 - DNA, 754 bp, Unknown
  Bacterial polypeptide expressing nucleotide sequence isolated from the Sargasso Sea
atgactgataatttaacaggttcggaaatagtattaaaatctcttttagatcaaggagttgaaacagtatttggctatcctggtggagctgttttaccaatatatgatagtttatttaaacaaaattctattagacatattttagttcgacaagaaggaggagctattcatgccgcagaaggatatgcaagatcatctggaaaaacaggagtagtacttgttacttctggtccaggagcgactaatgtagttacaggtcttactgatgcaatgatggatagtataccaattgtttgtataacaggacaggtacctcaacatttaattggaagtgatgcttttcaagagtgtgatactacaggaattactagaccttgtactaaacataattatttggttaaagatgcaaacgaacttgcaaaagtttttcatgaagcatttataattgcaaaagatggtaggccaggtcctgtgcttatagacattccaaaagatgttcaatttgctaaaggaaaatatttaaaaccaaaagaaataacaattaaacctcatagaatatttaatccaattattaaagataatgataaaaatattgaagaagcaactaaactaattgccaatgcaaaaaaacctattttttatattggaggaggatgtattaattcaggtacaaaagcatcagaatttgttaggcaatttgttaaagaaactaatattccttcaactatgacattgatgggactgggcgtattac

SEQ ID NO: 231643 - DNA, 180 bp, Unknown
  Bacterial polypeptide expressing nucleotide sequence isolated from the Sargasso Sea
aatgaaacaaactattgataataaacaaaaatatactggcgctgaaatttttgtaaaatgccttgaggcagaaggcattgatttagtcttcggatacccaggcggcgcagtattgcatatatatgatgagcttcacaagcaaaatgatgtttctcatattctcgtcagacacgaacaagg

SEQ ID NO: 231644 - DNA, 194 bp, Unknown
  Bacterial polypeptide expressing nucleotide sequence isolated from the Sargasso Sea
aatgggaaaattaatatcaggcgcagaaatagtttttaaagttttagagcatcataaagttgagcatatatttggatatccaggtggagctgttttaccaatttatgatgaattaaaaaatcataaaactataaaacatattttagctcgtcatgaacaaggcgcaggacatgcggctgagggatatgcacgtt

SEQ ID NO: 231645 - DNA, 550 bp, Unknown
  Bacterial polypeptide expressing nucleotide sequence isolated from the Sargasso Sea
gatgtgggcagcacaacactataaatttaatcaacctaatagatggatgacatctgggggtctgggtactatgggttatggtttaccagctgctattggtgttcaaatagcaaatcctggtaaattggttgttgatatcgctggagaagcatcagttttaatgacaatgcaagaaatgtctactgcagtgcaatataagttaccgataaagatatttattttaaataatgaatacatgggcatggttagacaatggcaagaactattacatgaaaaaaattattctgaaagttataccgcagcattgccagattttgtaaaacttgcagagtcttatggatgcgttggtatgagagctaaaactcctgacgaacttgatgaaaagattaaagagatggttgatatagatagacctgtaatctttgattgtttagttgataaagctgaaaattgctttccaatgataccttcgggcaaaccacataatcaaatgattttgggaccagaagaagaagaagaaatttcagatgaaggaaagattttagtataa

SEQ ID NO: 231646 - DNA, 952 bp, Unknown
  Bacterial polypeptide expressing nucleotide sequence isolated from the Sargasso Sea
gtgcttgttcctcaggcccgggagcacaaatgtagtaacagctttaacagatgcttatatggattcggttccattagtttgtatctcaggccaagtgccaactcatttgatagggacagatgcttttcaagaatgtgataccacaggaataactagaccatgcactaaacataattggttagttaaagatattaaagatttgtcaaaaattttacatgaagcttttatagttgctactacaggaagaccaggtccagtattagttgacatccctaaagatattcaatttgctaaaacaaattattttaaaactaaaaaagaaaaaaataagaaagaaaaagttcataataagttttcccaaaatgaaatagatgagttaattaatcttatttctaaggctaagaaacccgtaatttatacaggtggtggagttataaactctggacctaaagcaagtgaatcattaagagaatttgtcagattaattgggtttccgattacttctacattacaaggtcttggtgcattcccaggagatgataatcaattcataggaatgttaggcatgcatggaacttacgaagcaaataatgcaatgcatgattgtgatttactgataaatattggagcaagatttgatgatagaataacaggtaagattgatgaattttcacctaagtcaaaaaaggttcacattgatattgatccatcatcaattaataaaatcataaaagtagatctagctattgttggtgatgttaatgaagttcttaaatctgctataaaaaagattagtaaaaaacaaaatggttttaaagtttcaaataaacaaaatacctccaagtggtgggaacaaaattcaaaatggagaatgaaaaactctcttggttttattaatagtgaaaaaaccataaaaacctcacatgccgttcaaagattatatgaattaaca

SEQ ID NO: 231647 - DNA, 760 bp, Unknown
  Bacterial polypeptide expressing nucleotide sequence isolated from the Sargasso Sea
attaccggacaggtaggcagtcgggccatcgggactgatgcatttcaggaaactgacgtgactggtgtgacgttgcccattacaaaacataactatcttgtgtctgacgttgatgacattgcttcgacgattcacgaagcaatgtatgttgcccgttctgggcgtccaggtcctgtacttgttgatattacgaaggatgcgcagcaattatcgacagaacttgagtgggacccgagcgatgtgaagttgcctggctatgcccccgatcttcgtgcaacagaggctgagtaccaacgggctgcggatttgatcaatagagcgaaacgacccgttatttttgccgggcatggcgtgatgttatccggggcgatgcgtcaggtcctcgaccttgctgaacgagcgaatatcccgattgccatgacgttgcttggtatcggtggcgtgccggcccagcatccgctgaatatggggatgatggggatgcacggtgaggcatgggttaacgaagcgattcaggaggccgatctcctgttggcttttggtatgcggtttgatgatcgtgtgaccggcaatctgaagacttatgctcccaacgcgcgaaaaattcacatcgatatcgacccggctgaattcaataagaacgttaaggtcgacgtggctttagctggtgatttatcaatggttctttcggatttaagtccactggttgaatccggcgatcgaaccgattggctgcacacgattcacgatatgaagggcg

SEQ ID NO: 231648 - DNA, 415 bp, Unknown
  Bacterial polypeptide expressing nucleotide sequence isolated from the Sargasso Sea
gtaatagcagccttacctaatgcagatgttatttgtattgcaggagatgcaagtgtcttaatgaatattcaagaattgggaactttatctcaatatggtctaaaagtgaaattgattattatcaataatcgctggcaagggatggtaagacaatggcaggaaagtttctacgatgaaagatattcctcatctgatatgagttgtggtgaacctgattttgtaaaacttgctgagtcttttggagttaaaggatatttaatttctgatagaaaacaattacataatgacttaaaaaatgcgcttgatcatgatggtcctgccttgattaatatccttgtaagaagaggtgaaaattgttatccaatggttcctcccggtaaaagtaatgctcaaatggttggatatgttaattgtg

SEQ ID NO: 231649 - DNA, 586 bp, Unknown
  Bacterial polypeptide expressing nucleotide sequence isolated from the Sargasso Sea
atgaataacgaaatcacaggtgcggaaattgttcttaaaagtcttgcagaacaaggcgttgaagtagttttcggatatccaggaggtgccgttcttcctatctatgatactttattcaaacaaaattcaatcaaacatgttttagttagacaagagggtggagcaatacatgcagcagagggatatgctcgctctactggtaaaactggagtagtacttgtaacttcgggacctggagcaacaaacgtagtaactggtttaactgatgccatgatggatagtgttccagtcgtatgtataacaggtcaagttccgcaacatttaattggaagtgatgcgtttcaagaatgtgatactaccggtattactagaccatgtactaaacacaactacttagtaaaagatgtaaataaattatcctctgtatttcatgaggcttttacaattgcacaaaatggaagaccaggccccgttctcatagatattcctaaagatgttcaatttgctaaaggcaattatgaggaaaaaaataaaatagttattccttctcaaagattatttgaaccaagtcctgatttagaaatta

SEQ ID NO: 231650 - DNA, 509 bp, Unknown
  Bacterial polypeptide expressing nucleotide sequence isolated from the Sargasso Sea
gacctcaggtgggcttggaacaatggggtatggtctacctgcagctatcggtgttcaaatagcaaatccaaataaattagtaattgatattgcaggagaagcatccgttctaatgactatgcaagaaatttcaaccgcagttcaatatagccttccaatcaaaatattcattttaaataatgaatacatgggaatggttagacagtggcaagaattattacatgataaaaattattcagagagctatacagctgcactgccagattttgtaaaattagctgaggcttacggatgtgtagggatcagagcaaaaacaccagaagaattagatgacaagattattgaaatgattaatacagatagaccagtaatttttgattgtttagttgataaaatagagaattgttttccaatgataccgtctggaaaaccacacaatcaaatgcttttaggtcctaaagatcaaaaagaaaataaaattactggaaaaggaaagaccctggtttaat

SEQ ID NO: 231651 - DNA, 940 bp, Unknown
  Bacterial polypeptide expressing nucleotide sequence isolated from the Sargasso Sea
aatgcataatgctgatttaattattgctgtgggagctagatttgatgatcgaattactaacacgccagagaagtttgctccaaaagcaaaagttattcactttgatgtggatcattcatcagtatcaaagataattgaggcagatattgctgtattcgggcaagtcaaggactcattgaaagctattaataactatttaaggtcgagaaaggatgaaattaataaagaaaagctttctccgtggcaccagcaaataaaagaatggaaagaaaagcatggtcttaatcatgaactctataagagtgattcagacgagcatccaattctacctcaagcagctgtacaacatatttatcaagaatctgaaggcaaagcatttgttacatcagatgttggtcagcaccaaatgtttgctgctcagtactatcactttgatgaaccaagaaaatggataaattctggtggtcttggcactatgggttttggtcttccatcagcaatgggagttaaactggcttatcctgaagaagaagtaatttgcattactggagaaggaagtatacaaatgtgtatacaagaactctcaacatgctcacaatataaattaccaataaaaatatttaatataaataatcttgccctcggtatggtaaagcaatggcaagatatgaactatgacggtagacactcatctattagctatgaggattcattgccagattttgttgggctagcagaatcttacgggcatgttggcattaaaatcactaaaaattctgaactcaaagaaggaattgctaaagcactagccattaaagataagttggtttttgttgatatatatgttgatccaaatgagcatgtgtatccaatgcttgtcgctcctaacggaagcttaaagatatgtggttgggtaaaggtgaaaaacatgatccaaaga

SEQ ID NO: 231652 - DNA, 371 bp, Unknown
  Bacterial polypeptide expressing nucleotide sequence isolated from the Sargasso Sea
tcaacattacaaattcaataaaccaaacagatggatgacttcaggcggacttggcaccatggggtacggtttacctgcagcagtgggagttcaaattgcgcacccagataaactagttatcgatatcgcgggagaagcatctgttttgatgacaatgcaagaaatgtcaaatgctgtgcagtacaaattaccaattaaaatatttattttaaataatcaatacatgggaatggttagacaatggcaagaacttttacacgaaaaaaattattctgaaagatataccgcagctctacctgattttgttaaattagcagaagcatacggttgtgttggaatacaagcaacaaaaccagatgagcttagatgat

SEQ ID NO: 231653 - DNA, 781 bp, Unknown
  Bacterial polypeptide expressing nucleotide sequence isolated from the Sargasso Sea
agtttttggttatccaggcggtgcagtattaccaatctatgacactctatttaaacaaaattctattaaacatgttttggtacgtcaagaaggtggagcgatacatgctgctgagggttatgcacgttcaactggaaaagttggtgttgtattagttacatctggacctggggcaacaaatgtagttacaggattaacagatgcaatgatggatagtattccaattgtatgtattactggtcaagtacctcaacatttaattggtagtgatgcatttcaagaatgtgacaccactggaattactagaccttgcactaagcacaactatctagttaaagatcctaataaattatctcctgtttttcatgaagctttcacaatagcacaaaatggaagaccaggccctgtcttaatagatattcctaaagatgttcaatttgccaatggacattacacaaataaagaaaaaataattattccatcgcatcgattatttgagcctgagatttttaaaaataatgaaaaaattaatcaagttgttgatttgatttcaaaagccaagaaacctattttttatataggtggaggatgtattaattctggaccaaaagcttctgaacttgtaactcaatttgtagaaatgactggagcacctgctacaatgactcttatgggtctaggtgttttgggatcctcacatgcaaattcacttggtatgcttggaatgcacggtatgtatgaagcaaatatggcaatgaacgaatgtgatgtaatgataaat

SEQ ID NO: 231654 - DNA, 779 bp, Unknown
  Bacterial polypeptide expressing nucleotide sequence isolated from the Sargasso Sea
aatgacaagccaaaacacccaaccagaactgctgtctggtggagccatgctgatccgcgccttagctgacgaaggcgtagagtatgtctatggttaccccggcggtgccgtgttacacatttacgatgcgatgtttcaacagcatcaggtgaaacacgtgctggtccgccatgagcaagccgcgacccatatggcggacgcctacgcaagagcaagcggcaaagctggtgtagtgctcgtcacctctggccctggcgctacaaatgcggtcaccggcatagctactgcttatatggattctattcctatggtggtgatctgtggtcaggtgatgagccatctgattggcgacgatgcctttcaggaaaccgatatgctgggtatttcccgccctatcgtgaagcacaatatgtcggtgcgtcggcctgaagatattccgtatttagtaaaaaaagccttttatatagcgcaaagcggccgtcctggtcctgtggtattggatattccaaaggatatgaccataccaagtcagaaattcccgtacgagtatccaaaagagatcaagctgcgctcttataacccgaacgctaaaggccatccgggccagatcaaaaaagccctgaccactttattagcggccaaaagacctgtgctgtatgcaggtggcggtgtgattttaggccgggcttcagacgaactgacagtgctcgcccgcaagctgaatttacctgtcaccaataccttaatgggcttaggtgcttatccggcttccgatccac

SEQ ID NO: 231655 - DNA, 760 bp, Unknown
  Bacterial polypeptide expressing nucleotide sequence isolated from the Sargasso Sea
agatttgacgatcgtataacgaacaatccaagtaaatttggcttggcagcaaagaaaatccatatcgattcagatccgtcttcaatcgataagattattggagatgatttagcaatagaaggcgatgctaagttggtgatgcaacaattaatagagcaagtaaaagctagtggtttcgatcaagccatttataaagattggtggagtaaagttgaagcttggagaaaggcgcatggtttaaaccacgacatgcttaatctcaaaaatgatcagaatataattctgccgcagcaagttatccagtctttataccaaactaccaaaggtgatgcttatgtaacttctgacgttggtcagcaccagatgtttgcagcccaatattataaatttaaagaccctagaaaatggatcaactcaggcggtctgggaactatgggctttggtcttccatcagctatgggagttaaatttgcatttcctgaagctgacgttgcttgcgtgacaggggaaggcagcattcaaatgtgtattcaagaattatcaacttgtggacaatatggtcttccaatcaagatcattaatttgaataacagagctttaggaatggtaaagcaatggcaggatatgcaatatggaggaagatattcaagtatctcatacgaagattctctcccagattttgtgaagcttgcagaatcttttggacatgttggaatcaaagtagataagttttcagaacttaatgatgctatgaaagaaa

SEQ ID NO: 231656 - DNA, 886 bp, Unknown
  Bacterial polypeptide expressing nucleotide sequence isolated from the Sargasso Sea
tttgcgaaagcattttatattgcaaaatctggtagaccaggtcctgtattgattgacattacaaaagatgcgcaatttgagctttttgaatatgattataaaaaatgtaatggaattagaagctatattccttatcctgaagttaatgatgattcgatagatcatgctgtaaagctaattaatcaagcaaaaaagccattgattgtatgggggcaaggggtaatcctaggaaacgctgaagaagaatttaaaaattttgttgaaaaaagtgggattcctgcagcatggacaattcttggtttgtcagctttaccaacttcacatgagttaaatgttggtatggtgggtatgcatggaaattatggacctaacattctgactaataagtgtgatcttttgattgctgttgggatgagatttgatgatcgtgttactggtgaccccggttcatatgcatctcaagctaaagttatacatcttgaaattgatcctgcagaggttgataagaatataaaggttgatgtaccggtaattggtaactgtaaagaatctcttcaaatgattaccaataaaatagataaaagatcccataaaaaatggatttcaaaatttgatgatttaatgaaaattgagtttgataaagtaattaaatcagatttaagtccaaataaaaaaggactaactatgggagagtcaattattgccataaatgaatttactaacggtgatgcgattattgtcacagatgttggacagcaccaaatggtagcatgtagatatgctaattttataaaatcaaagagtaatattacatctggaggccttggtactatgggatttgctcttcctgctgcgatgggagctaaaatgggagcaatgaaagaga

SEQ ID NO: 231657 - DNA, 883 bp, Unknown
  Bacterial polypeptide expressing nucleotide sequence isolated from the Sargasso Sea
gggcgtcccggagtcgccatggtgaccagtgggcccgcggctaccaacatcgttacgccgttatgcgacgcctacctcgattcggtgcccatggtcgtggtgaccggacaggtgccctacgcagcgatcggaaccgatgccttccaggagtgcgatacgacgggcatcactcagtcgatcaccaagcacaactttctcgtcaccgaggcccaggacatcccgcggattatcaaggaggcgttccacatcgcgaccacgggacgtcccgggccggtgctggtcgacatccccaaggacatcgtggacccgaccaacccccggtcggctatgacgtggactgacggtgtcgagatggatctgccgggctaccacccgcagaccgaggtcgacgtcgacctcatcgcggcagcggccgacctcatccggaccgccgagcgaccagttctctacgtgggtggtgggatccttaaggctcgggctgccgatgcgctgcgagccctggccgaactgaccggtattggggtggtcaccacactgatggcccgtgggtcctttcccgacagccacgaactctgccttggcatgccagggatgcatggcaactacacggcggtcaccgctatgcaggagtcggacctgctggttgccctcggtgcccggttcgacgatcgcgtcactggaaagctggacggcttcgctcccgaagcgaagatcatccacgtcgatatcgatccggccgaactaggcaaagttcggcggcccgacgtggccatccagggcgacgttcgactggccatcgaagctctatgcgccgagttgtcggataacggcatcggcgatactgaccggtcggcctggcggtcgcgcatcagcggtggcagga

SEQ ID NO: 231658 - DNA, 854 bp, Unknown
  Bacterial polypeptide expressing nucleotide sequence isolated from the Sargasso Sea
acaagtgccaacacacttaattggaactgatgcatttcaagaatgtgatacaacaggaataacgagaccttgcaccaagcataactggctcgttaaagatgtaaataaattatcatccgtaatgcacaaggcatttgaagtagctacaagtggaagaccaggtcctgttttaattgatattccaaaagacattcagtttgcaaaaggaaaatatattaaatttaaaaaaataaaaaatggaaatatagatattaaatctaacggatggaaccaagatattgatgctgctcttaaattaattaaaaaatcttcaaaaccaattttttataccggaggaggagtcattaattctggaccaagagcaaccgaactacttcgagagctggtttctttaacaggatttccaattacatctacccttcaagggctaggtgcttatcctggcaatgaccaacagtttttaggaatgttgggtatgcacggaacttacgaagcaaacaatgcgatgcatgactgtgatttaatgataaacattggtgcccgttttgatgatagaataaccggaaagatcgatgaattctctccaaattcaaaaaaaattcatattgatattgatccgtcttcaattaataaaaatgtagctgtagacttggctatagttggtgatgttaaatttgtactagagcaagtagttgcagcaataaaaaaaaaagaaccaaactttgctaattctaataaacaaaatatttcagcttggtggagtcaaatagaaacttggagaaagaaaaattcacttagctttaaaaatagtaatgagataataaagcctcagtttgcggtacaaagactttaga

SEQ ID NO: 231659 - DNA, 961 bp, Unknown
  Bacterial polypeptide expressing nucleotide sequence isolated from the Sargasso Sea
caagttccacaacacttaattggtagtgatgcattccaagaatgtgataccacaggaattacaagaccttgtacaaaacataattacttagttaaagatgtaaataaattatcatctgtatttcatgaggcatttacaattgcacaaaatggaagacctggtccggtactgatagatattccaaaagatgtgcagtttgctaaaggatcctatattgaaaaaaataaaatagttattccttcccataggcttttcgaaccaagtccaagttttgaaacaaaaaaaattgaagaagcagttgagattatttctaaatcaaaaaaaccaattttttatattgggggaggttgtataaattctggtccaaaagcatcaaaacttgttagagaatttattaatttagttggatcaccagcaactatgactttaatgggtctaggagtcttgggatcatcagataaaaactctctaggtatgctgggtatgcacggtatgtacgaagcaaatatggcaatgcatgaatgcgatgttatgatcaatattggtgctcgatttgatgatagagtaacaggtagattagatgcattttcacctaattcaaaaaaaattcatattgatatagatgctagcaacatcaataaaacaataaatgttgatgttccaataattggagatgtaaaacaagttattgagcagatgatagcaatttggaaaaataaaaattataatctcaataaagaagatttaagtcaatggtggaataaaatcaaaaaatggaaagcagtagattgcttaaattataataatgataataaacaaattaaaccgcaatatgctgttcagagactttatgaattaacaaagaatataaaaacatttgttacaactgaagttggacagcatcaaatgtgggctgctcaatattataagtttgaagaacctaatagatggttaacttcag

SEQ ID NO: 231660 - DNA, 808 bp, Unknown
  Bacterial polypeptide expressing nucleotide sequence isolated from the Sargasso Sea
tacaaatgcattaacagctttaacagatgcatatatggattctgtccctttagtttgtatttctggacaagttccaacacatttgattggaactgatgcatttcaagaagctgatacaactggaataacaagaccatgtacgaaacacaattggttagttaaagatataaaagatttagaaaaaacaattcacaaagcttttgaggttgctacaacaggaagaccaggacctgttttagttgatatccctaaagatattcaatttttaaaaacaagttacacaaaatataaaaaacaaaaaaaaccaaacggtaaagttcataatcgtttttcacaaaaagatattgatgaattgataaaattaatgagcaaagcttctaaaccaattttttatactggtggaggagttattaactcaggtccaaaagctagtgaacttttaagagagttggtaaacatgactggctttcctataacaactacattacaaggacttggatcatatcctggtgaagatagtcaattcttgggaatgcttggtatgcacggatcatatgaagcgaacaatgccatgcatgactgcgatctaatgataaacattggggcaagattcgatgatcgaataacaggaaagatagatgaattttcacctaaatcaaaaaaagttcatattgatatagatccatcttcaataaacaaaaatgttaaagtagatttaccaataataggagatgttactgaagttattaattctacaattaaaactataaaaaaagctaaacctgattttgtaaaatctaacaaacaa

SEQ ID NO: 231661 - DNA, 626 bp, Unknown
  Bacterial polypeptide expressing nucleotide sequence isolated from the Sargasso Sea
catgcccagcgcggaattctccacgtcggaacccctttcccctcccgatagcgactccatcggcggtaccgtgctcatgaaggcactggccgatgaaaacgtcgaattcatctggggctaccccggcggctcggtactctacatctacgacgagctttacaagcaggacaagattcagcacgtgctggtgcgccacgaacaggcggccgtgcacgcagccgatgcgtatgcgcgttccaccggcaatgtcggcgtctgtctcgtgacgtcgggccccggtgtcaccaacgcggtgaccggcatcgccacggcgtacatggattcgattccgatggtcgtgatcagcggccaggtgcccacggccgcgatcggccaggatgccttccaggagtgcgacaccgtcggcatcacgcgtccgtgcgtgaagcacaacttcctcgtgaaggacgtgcgcgacctcgcggaaaccgtcaagaaggcgttttatatcgcccgcaccggccgtccgggcccggtgctgatcgacatcccgaaggacatctcgaagacgccgtgcgaatacgagcccgtcaagagcgtgtcgctgcgttcgtacaacccggtcacgaagggccattcgggccaga

SEQ ID NO: 231662 - DNA, 322 bp, Unknown
  Bacterial polypeptide expressing nucleotide sequence isolated from the Sargasso Sea
atgaaaaataaaaaaattagtggtgctgaagctgtaatccattgtttattaaacgagggagtagaccttgtctggggatatcctggaggtgctataatgcctgtatacgatgaattttacaaatttcaagataagctaaaacatgttcttgctagacatgagcaaggtgctattcatgcagctcagggatatgcaagatcctctggtagagttggggttgcaattgctacatctggtcctggtgcaactaatcttgttactggtattgcagatgctcaaattgattcaacacctgttgtgtgtataaccggtcaaaagtagc

SEQ ID NO: 231663 - DNA, 800 bp, Unknown
  Bacterial polypeptide expressing nucleotide sequence isolated from the Sargasso Sea
agaccaggcccagtcttggttgacattacaaaagacgcacaatttgaattgcttgaatatagctataagaaatgtgaaaaaataagaagctatattccttctcccccaccaaacattaataaaatagaagaggctgcaactctaataaatgaagcgaaaaaaccattgatagtatttggtcaaggagtaataattgctgaagctgaaaaggaatttaaaaaatttattgaaaaaactggtataccagcagcatggacaattcttggattatctgcgttacctactgaacattacttaaatgttggtatggtaggaatgcacggaaactatggaccaaatgttttgaccaatgaatgtgatttgcttattgcaatgggaatgagatttgacgacagagtaactgggaatttagacttttacgctaaacaagctaagaaaattcactttgaaattgatccagctgaaataaataaaaacgtagatgtagatgttccaattttaggaaatataaaagaaacgcttcccttaattattgaaagagtaaaagaaaataaacatgaaaaatggttggaaaaattcaacaaccacatggatattgaatacgataaagtaataaaaaacgatttattcccgacaaaagacagcctaacaatgggtgaagtattgaaagaaatcaatgctgcaacaaatggagatgccgttatagtaagtgatgttggtcagcatcaaatggttgcatgtagatacgctaaatttaacgaaaccaaatcaaacgttacatcaggaggattaggaacaat

SEQ ID NO: 231664 - DNA, 412 bp, Unknown
  Bacterial polypeptide expressing nucleotide sequence isolated from the Sargasso Sea
atgaaaaaaaaacttacaggagctaaattagtaataaactgtttaatcgaagagggagtcaaagttatatttggttatcccggaggcgcggttctcccaatatacgatgaattatttaaacaaaaaaaaattagacatattttagttagacatgaacaagctgctgttcacgcagccgaggggtacgcgagatcaactggaaaaactggggttgtattagtaacttcaggtcctggagcaacaaatactgtaactggtctgacggatgctatgatggattcagttcctgttgtttgtatttcaggacaagtaccaactcacatgattggaaatgatgcttttcaagaagcagatattgttggaataactagaccatgcacaaaacataactatttggtaaaagaatgttaat

SEQ ID NO: 231665 - DNA, 754 bp, Unknown
  Bacterial polypeptide expressing nucleotide sequence isolated from the Sargasso Sea
ccaaaagatatattaaatcaaaaatctgattggattgaaccaggtcctcttgaactaccgggatataaaccaacattagatcctaatccaaaaatgatacagcaagcagcaaatttaattaaaaattcaaaaaaacccatactctacgttggtggtggaattatacattcaaaagccaacaaagagctttttgatctggcaactaaatttaacatccctgttgtcacaacattaatgggtagaggtgcattccctgacggtcatgagttatgtctggaaatgcccgggatgcacggaaattatacagcaacaacatctatacagaagtcagatttacttatagctataggtgtccgatttgatgatagagtaaccgctaatccatcattttttgcacaaaatgcaaaagtaattcatgccgatatagaccctgctgaaataggaaaagtaagagaagctcaagtacccatagttggagatgcaaaaagtgtgatattagggcttattgatgcactgcaagatgaagaacttgatacgaaaaattggataaacgaactgaatagtatgaaaactgaacatccgctttcttatgatcaagatgaaaatggtcccttgaaagttccatttgtacttgaagagctgcaagatcttactgaagatggagcaatagttgtttcaggggttggccaacatcaaatgtggatatcacaacactggaatttcacagaaccaaacacatggttaaattcaggcg

SEQ ID NO: 231666 - DNA, 391 bp, Unknown
  Bacterial polypeptide expressing nucleotide sequence isolated from the Sargasso Sea
atgacacgtcagatgaccggagcaaaaatcgtggtgcaagcgctcaaggaccagggcgttgaagtcgtctttggctatcctggcggcgcggtactaccgatatatgacgagatctttcagcaaaacgccattcggcacatccttgtccgccacgagcaagccgcgattcacgctgccgaaggctatgcccgttcgaccggcaaaccaggcgtggcgcttgtgacctcgggtccgggcgcgaccaatgcggtgaccggattgaccgacgcgctgctcgacagcatcccgatcatcgtattctcgggtcaagttccgacattcatgatcggcaatgacgcctttcaagaggccgataccgtcggcatcacccgtccctgcaccaaacacaatt

SEQ ID NO: 231667 - DNA, 271 bp, Unknown
  Bacterial polypeptide expressing nucleotide sequence isolated from the Sargasso Sea
tatgaagaaagaatcaggtggatctgcacttattagagctttggcagatgaaaatgtagaccttctctttggatatcctggaggagctgcccttcatatttatgatgcaatttatcaacaggataaagttcagcatattttagtaaggcacgagcaggcagcagtccatgcagctgatggatatgccagagctaccggaaaagttggaactgttcttgtaacatctggtccaggagcaacaaacgcaatcactggtatcgcaactgcatat

SEQ ID NO: 231668 - DNA, 811 bp, Unknown
  Bacterial polypeptide expressing nucleotide sequence isolated from the Sargasso Sea
atcaagaataattgaggcagatattgctgtattcgggcaagtaaaggattcattgaaagctattaataactatttaaggtcgagaaaggatgaaattaataaagaaaagctttctccgtggcaccagcaaataaaagaatggaaagaaaagcatggtcttaatcatgaactctataagaatgattcagacgagcatccaattttacctcaagcagctgtgcaacatatatatcaagaatctgaaggcaaagcatttgttacatcagatgttggtcagcaccaaatgtttgctgctcagtactatcactttgatgaacctagaaaatggataaattctggtggtcttgggactatgggttttggtcttccgtcagcaatgggagttaaactggcttatcctgaagaagaagtaatctgcattactggagaaggaagtattcaaatgtgtattcaagaactctcaacatgctcacaatacaaactaccagtaaaaatatttaacattaataatcttgcactcggcatggtaaagcaatggcaagacatgaattatgaaggcagacattcatctattagctatgaggactcattaccagattttgttggacttgcagaatcttatgggcatgttggtattaaaatcacaaaaaattctgaacttaaagaaggaattgctaaagcaatagctatcaaagataagttggtctttgttgatatatatgttgatccaaatgagcatgtatatccaatgcttgttgctcctaatggaagtttaaaagatatgtggctgggtaaaggtaaaaaaacatga

SEQ ID NO: 231669 - DNA, 511 bp, Unknown
  Bacterial polypeptide expressing nucleotide sequence isolated from the Sargasso Sea
atgacctcgggtggtttagggactatgggttatggattaccagctgcggttggtgttcaaattgcacatccaaataaattagttattgatatcgcgggagaagcatcagttttaatgactatgcaagaaatgtctacagctgttcaatatagtttaccaattaaaatatttattttaaacaatgagtatatgggaatggttagacaatggcaggaacttttacatgataagaattactcagaaagttatacagcagcacttccagatttcgtaaaattagcagaagcttatggatgtgttggtataagagcaaaaactccagacgaattagacgataaaataattgaaatgttaaatacagatagaccagtaatatttgattgtttagttgataaacaagaaaactgttttccgatgataccttcaggaaaacctcataatcaaatgattttgggacctgaagatgagaaagataataaaattacaggtaaaggaaaagcattagtttaat

SEQ ID NO: 231670 - DNA, 577 bp, Unknown
  Bacterial polypeptide expressing nucleotide sequence isolated from the Sargasso Sea
actgaagttggccagcatcaaatggtgggcagcacagcattataaattcagtaaaccaaatagatggatgacatctgggggtcttggaactatgggttatggtctccctgcagcagtaggagttcaaattgcccacccagataaacttgtaattgatatcgctggtgaagcttctgtattaatgacaatgcaagagatgtctactgcagtacaatataatttgcctataaagatatttgtgttgaataatcagtatatgggaatggttagacaatggcaggaattacttcatgaaaaaaattattcggagagttattctgaagcattaccagattttgtaaaattagcagaagcttatggatgtaaaggaataaaagctaataatccaaatgaattagatgaaaaattaagtgaaatgatcaatcataatggtccagtaatatttgattgccaagtcgatcctaatgaaaattgttttccaatgataccttcaggaaaaccacataatcaaatgatcttgggtcctaatgatcaagaggaaaataagattacaggaaaagggaagtcgttagtttaa

SEQ ID NO: 231671 - DNA, 211 bp, Unknown
  Bacterial polypeptide expressing nucleotide sequence isolated from the Sargasso Sea
atgaagttagctggaaatgacatattaattcaatcgctcattgaagagggggttgagtatatttttggttatccaggaggagcatccttgcatatttatgatgcgatctttaatcaaaaagaaatgcaacatattcttgttaggcatgaacaaggcgcgactcatgctgctgatgggtatgcacgagccactggtaagcccggggtttaat

SEQ ID NO: 231672 - DNA, 852 bp, Unknown
  Bacterial polypeptide expressing nucleotide sequence isolated from the Sargasso Sea
catgaaagcgtccgacttatttgttaaagcattagaagcagaaggcgtggaatacgtctttggtatcccaggcgaagaaaatctcgacttattagagtcgttacgtgaatcctccattaaattagtgctgactcgccatgagcaaggcgccggtttcatggccgctacctatggaaggcttaccggaaaggtgggggtgtgcttatctactcttgggccaggcgccactaatctggtaacccccgcggcatatgcccaacttggcgcaatgcctatgttgatgatcacggggcaaaagccgattaaaaccagcaagcaaggtcgttttcaggttatcgatattgtggacatgatgcggcccatcacgaaattcaccagccaaattgtgagtggcgatagaattccttctactgttcgagaggcctttcggttagcccatgaagagcgccctggcgctgtacacattgaattgcccgaagacattgctgcagaacaaaccagtgcccagatactgacgccgagcatggctcgtcgacctatcgccgaatacaaagcgattgctgctgcgattactatgattgaagaagcccagtcgccattgttattgattggcgccggagcaaacagaaagcttacagcgaaaatgctcagggagtttgttgataaaacctgcattccttttgttaccacccaaatgggtaaaggtgtactaaacgaaagtgacccgcgctttgcagggaatactgccctgtctgacggtgattttgtacacagagcgatagagcgtgccgatcttattatcaacgtgggccatgatgttgtggagaagcaccgtttctcatgcatcacaac

SEQ ID NO: 231673 - DNA, 707 bp, Unknown
  Bacterial polypeptide expressing nucleotide sequence isolated from the Sargasso Sea
aactaatgcagttactgctttaacagatgcttatttggactcaatcccacttgtttgtatatcgggtcaagtccccacgcatttaattggaacagacgcctttcaagaatgcgatacaacaggaataacaagaccatgtacgaaacacaattggctagttaaagatgtaaaagatttacaaaaaacaattcataaagcttttgaggttgctacaacaggaagaccaggaccagttttagttgatatcccaaaagatgttcaatttcaaaagacaggatactcaaaatttaaaaaacaaaaaaaattaaatggtaaagttaaaaatcaattttcccaaaaagacattaatgaactgataaatttgatgaataaagcttcgaggccaattttttatactggtggaggagttattaactcaggaccaaaagcaagtcagcttttaagagaactagttaatacaactggctttcctataacaacaactttacaaggacttggatcttttcctggtgatgatagtcaatttttaggtatgcttggtatgcatggttcatatgaagctaataatgcaatgcatgactgtgacttaatgataaatattggtgctagatttgatgatagaattacaggaaaaattgatgagttttctccaaattcaaagaaagttcatattgatattgatccatcttcaattaataaaaatgtta

SEQ ID NO: 231674 - DNA, 595 bp, Unknown
  Bacterial polypeptide expressing nucleotide sequence isolated from the Sargasso Sea
atgatgtcggaccaaaagatgaatggctcggaaataatcataaaggccttgatcaacgagggtgttgataccgttttcggttatccgggtggcgcagtgcttccgatttacgatgccatattccagcagaaccaacttcggcatgttctggtacggcaggaaggcggcgccgtccacatggccgagggctatgcgcgttcgaccggtaacgtcggcgtggtactggtgacgtccgggccaggtgcgacaaacgccgtgacgggtctgaccgatgccctgatggatagtattccgattgtttgtctgaccggtcaggttcccacgcatctgatcgggaacgatgcgttccaggaagctgataccaccggcatcacccgcccttgcacaaagcataactaccttgtgaaggatatggctgatctgcctcgggtcatgcacgaagcattttatgttgcccgtagcggccggccgggcccggtcgtgatcgacctgcccaaggatatcctgatgggtgagggcacttacgaagatttcagtagcgtcgaacacaggacatatcagcctcgttttaaagcggacaaaaccgaaatcgatc

SEQ ID NO: 231675 - DNA, 655 bp, Unknown
  Bacterial polypeptide expressing nucleotide sequence isolated from the Sargasso Sea
ttacggttctatagaaaaaattataaatgtcgatgtatctctaaatggagatgctaaaaagattcttaatcaaattctcaataaaatagatcaaaaaaatattgataaagcatcaattgatctctggaataacgagattctaaattggagagaaactcatggtcttaatcatgatcttctggataagaaatttcatcagaagcaaattcttcctcaacaagtaatacagtctctttacaagtctacaaacggtaaggcatttataacttctgatgttggccaacaccaaatgttcgctgctcaatattataaatttgatgaaccaagaaaatggattaactctggcggtcttggaactatgggatttggtctgccttctgccatgggagttaaatttgctttccctgatgaggatgttgtttgtgtaaccggtgaaggcagcattcaaatgtgtattcaggagctatctacttgcatgcagtatggactgcctgtgaaaataattaatctcaataatagagctttaggaatggttaagcagtggcaggatatgcaatacggtggaaggtattccagtattctctacgaagattctttacctgatttcgtcaagcttgcagaatcttatggacatgtaggtatgaaggtagaggat

SEQ ID NO: 231676 - DNA, 538 bp, Unknown
  Bacterial polypeptide expressing nucleotide sequence isolated from the Sargasso Sea
atgacaaaattatcaggtgcaagaattgttatcgaaactttaattcaagaaaaagtgaaagtgatatttggttatccaggtggagctgtgttaccgatttatgatgaattatttaaacaaaaaaaaataagacatatccttgttagacacgagcaggctgctgttcacgctgcagagggttatgcaagatctacaggtaaagttggagttgttttagtaacatctgggcctggagcaacaaatacagttacaggtctcaccgatgcaatgatggactccattcctgttgtatgtatttccggacaagtccctacacacatgattggaaatgatgcatttcaagaggctgatattgtaggcattacaagaccatgcactaaacataattatctagtcaaggatatatcaaaattagcaagttgcatccattctgcatttcatattgccaaaaatggaagacctggaccagttttagttgatattcctaaaagatattcaaacattcaaaagtacttacaatggaaaaaagttaactaaa

SEQ ID NO: 231677 - DNA, 698 bp, Unknown
  Bacterial polypeptide expressing nucleotide sequence isolated from the Sargasso Sea
ggaccagtagtcgttgatattccaaaagacatacaatttgctaagggaaattatgaaagtttagaagatagtaaaataaaaaatcacagggtttataaacctcagatgactggagatgaaaaaaagattgaagaagcattacatgctatcgcttcagcaaaaaaacccattttttatgtaggtggaggatgcataaattcaggatcatcaacatcagaattattattaaagtttataagattaacaggatttccagttactatgactttaatgggccttggggcgtttccagccggcgataaacaatctcttggaatgctaggaatgcacggtatgtatgaatcaaatcttgcaatgcatgactgtgatgtaatgattaatttaggggcaagatttgatgatagagttacaggtagacttgatgctttctctccgaactcgataaaaatacatatcgatatagattctagcagtataaataaaaatgttaaggtggatattcccattataggcgatatggaaacagttttaaaacaaatgttaaaaatatggaaaaataaaaatttatctgtcaataagatttcaattgatgattggtggaaaaaaatcgaaaaatggaaagaaattgattgtcttaaatacactctttcagatgaaattattaaaccacaatacgcaattgaaagactgtacgaact

SEQ ID NO: 231678 - DNA, 800 bp, Unknown
  Bacterial polypeptide expressing nucleotide sequence isolated from the Sargasso Sea
aatcatagaagctgatgttgcagtttttggtcaagtaaaagaatctttaagtgcgattaataaacttttagaggcatccgagtctcaatgccaagatttgtcagcatggcatgaacaaattcaagaatggagaagcaagcatgggctgaatcataacctttttaagaataaagatgatgagcatcccattttacctcaagcagctgttcaacacatatatcaagcctctgagggtaaagcttttgtaacatcagatgttggtcaacatcaaatgtttactgctcagtactatcattttgatgaacctagaaaatggataaattcaggtggcttgggaacaatgggtttcggtttaccctctgctatgggtgcaaaattggcatttcctgaagaggaagttatttgcatcacaggagagggaagcatccaaatgtgtatccaagaattatctacttgtgctcaatataagttaccaataaaaatttttaatattaataatcttgctttgggtatggttaagcaatggcaagacatgaattatgatggacgtcattcatcgataagttatgaagattctctccctgacttcgtgaaacttgcagagtcttttgggcatgtaggtataaagattaccaaaaattctcaactacaagatggcatcgaagaagcactatcttacaaagataaattagtttttgttgatatctatgtagatccagatgaacatgtttatcccatgcttgttgctccagagggtagcatgaaagatatgtggttagataaagacttaaagacatgat

SEQ ID NO: 231679 - DNA, 192 bp, Unknown
  Bacterial polypeptide expressing nucleotide sequence isolated from the Sargasso Sea
aatgccaaaattattaactggagcagaaattgtattcaaatgtcttgaggaccaaaaggtagaacatatctttggctatccaggtggtgcagtattaccaatttatgatgaattaaaaaaccatccttcaataaaacatattttggtaagacacgaacaaggcgctggtcacgcggcagaaggttattctag

SEQ ID NO: 231680 - DNA, 859 bp, Unknown
  Bacterial polypeptide expressing nucleotide sequence isolated from the Sargasso Sea
aactgatgctttccaagaatgtgacacgaccggtataacaagaccatgcacaaaacataactggttggtaaaagacattaaagatttatctaaaatcattcatgaagcttttgaagtagcaacaactggaagaccaggacctgtactagttgatattccaaaggatatccaatttcaaaaagctgcttacacaaaaccaaaaaaagagaaaaaactaaatggtaaacatcataagagatttaatcaaaaagatattgatgagttgattaaactaatgtcaaaggctaacaaaccaattttttacacaggtggtggagtaattaactccggacctaaagctagcatgttactaagagagttagttcaagcaacaggttttcctataacttcaaccttgcaaggattaggatcattccctggagatgataattcttttttaggcatgcttgggatgcacggaacatatgaagcaaacaatgctatgcatgattgtgatctaatgattaatattggggcaagatttgatgatcgtataactggaaaaatcgatgaattctcaccgaagtctaaaaaagttcatatcgatattgacccatcatcaattaataaaaatgttaaagtcgatttaccaattgttggcgatgtccaagatgttatttcatccactataaaaactataaaaaaaactaaacctaattttgcacattctaataagcaaaaaatttcaaaatggtgggaaacaatacaaaaatggagagaaaaaaaatctttagattatgttaatagtacagaaaccattaaacctcagtatgcagtccaaagactatatgaattaacaaaaaataaggatacttacatt

SEQ ID NO: 231681 - DNA, 689 bp, Unknown
  Bacterial polypeptide expressing nucleotide sequence isolated from the Sargasso Sea
aattgaaacttggaaaattaaatatccactaaaattcccaaaacggggaggtttacgtgcgcagcatgtattatcagaacttgatcgtctgacggactctaatgcaattatttcaactgatgttggtcagcatcaaatgtgggccgctcaattctgcaaatcaatcagagagcgccaatggctgtccagtggaggagctggtaccatgggctatggattccccgccgcaattggtgctcagcttggtaagcctgatgatcttgtagtagctgttgttggtgatggaggattccagatgacaatgagtgaactagctacagcagcaattaataagctgccaataaaaatcataattatcaataacagttatcttggaatggtcagacaatggcaggagttgttttttgataatcgtgaaagcggagtggacatggaagggaatcctaattttgttaaaattggtgaggcttttggaataaaaggatttcaccttagaagagcaggagatgttgaaaaagtactaaaaaaagcgctagattataatgatgggccctgcatagtcgacgctcaagttgttaaagctgataatgtttttccaatgatcccagcaggagctgcagtatcagacatgcttattgatgagcctcctaaaagccaaaaaatgcaaaaaccagttggaagtacctgat

SEQ ID NO: 231682 - DNA, 169 bp, Unknown
  Bacterial polypeptide expressing nucleotide sequence isolated from the Sargasso Sea
aatgccaaaattatacacaggagcagaaattgtttttaaatgccttgaagatcaaaaggtagaacatatttttggatatcctggtggagcagttttaccaatttatgatgaacttaaaaatcatacttctattaagcatattttagtgagacacgaacaaggtgctggt

SEQ ID NO: 231683 - DNA, 880 bp, Unknown
  Bacterial polypeptide expressing nucleotide sequence isolated from the Sargasso Sea
gacacaatacacgaggcttttcaagtcgcacaagaaggtagacctggaccggtcttaatagacatacctcgggatgtccaattagaactagcggaattcaattatcctgaaataacacctgtctcaattccctctatcagtgaagacactagagcaaaactaccagatgcagctcggctaattaaccaggcggaaagacctgtaatcattgctggacatggcgtccttatctcaaaagctgaccaagaactcctggatttgtcctcaaagactggaatccctgtgataaacaccctactaggattaagtaactttccacgtaataatgatatgtcgctaggcatgctcggtatgcacggaatgtactggtctaacatggcaacagaccaagcagacgtcatctttggagtaggcatgcgattcgatgatcgggttactggcaatacttctgcctttgcccctcacgcacgaataatccacatagatatcgaaccttctcaaataggacgaaacgtcccaacagaagttggattacccggagacgctaaggcagttttaacagaactgttgcctttgttagaccacgcaaatcatagtgattgggtgtcttcaatcaagaagatcaaagaagaacatccttcattagcaatacccaaaacggaaaaactgctcgctcaacatgtactcaaggatctcaatgatattattcaaaacaatccaaacacgaatgtggtgaccggagttgggcaacatcaaatgtgggctgctcaattcctttttctcgataaattcaacacttttatatcttcaggcggcctcggagcaatggggtttgaaatccctgccgcattgggagcacaagtagcagctccagattcga

SEQ ID NO: 231684 - DNA, 304 bp, Unknown
  Bacterial polypeptide expressing nucleotide sequence isolated from the Sargasso Sea
tatgaaaaataaaaaaattagtggtgctgaagctgtaatccattgtttattaaatgagggagtagaccttgtctggggatatcctggaggtgctataatgcctgtatacgatgagttttataaatttcaagataagctaaaacatgttcttgctagacacgagcaaggtgctattcatgcagctcagggatatgctagatcctctggtagagtaggggttgcaattgctacatctggtcctggtgcaactaatcttgttactggtattgcagatgctcaaatagattcaacacctgttgtatgc

SEQ ID NO: 231685 - DNA, 539 bp, Unknown
  Bacterial polypeptide expressing nucleotide sequence isolated from the Sargasso Sea
ttataaatttaataaacttaatagatggatgacatcaggtggattaggtacgatgggttatggtcttcctgctgcagttggtgtacaaatcgcacacccagataaacttgttattgatatagctggtgaggcttcagttttgatgacaatgcaagaaatgtctactgcagttcaatataatttacctatcaaaatatttgtcttaaataatcaatacatgggaatggtaagacaatggcaggaacttcttcatgagaaaaattactctgaaagttactcagaggcattgcctgattttgttaaattagctgaagcttatggatgtaaagggattatagcaaaaaatcctgaagaactagatagcaaaataaaagaaatggttgatcataatggtccagtaatatttgactgtcatgttgatcctaacgaaaattgttttccaatgataccttcaggaaaaccacataatcagatgattttaggacccaatgataaaaaagacaacaagatcactagtaaaggaaaagctttagtttaat

SEQ ID NO: 231686 - DNA, 226 bp, Unknown
  Bacterial polypeptide expressing nucleotide sequence isolated from the Sargasso Sea
aatggacaaaagtaataaatctggtgctgaagcattaatccattctcttcatcttgagggggtagatcttatgtttgggtacccaggcggagcagcactgcatatctatgatgcaatatttaatcaaaactatgttgatcatattcttgtaagacatgaacaaggagctgttcatgctgatgatggatacgcgagagcaactggaaaaccaggcgtcgcattagtc

SEQ ID NO: 231687 - DNA, 223 bp, Unknown
  Bacterial polypeptide expressing nucleotide sequence isolated from the Sargasso Sea
atgactggtgcacaaatggttcttaaggccttggaagatcaaaaagttgatacaatatttggctatcctggtggcgcagttttgccaatatatgatgaattagcaaaaactaaggatacaaaccatcaaatacgccattttttagtaaggcatgaacaaggtgcatcccatgctgctgaagggtatgcaaggtcaagtggtaaagttggagtaatgttagtta

SEQ ID NO: 231688 - DNA, 899 bp, Unknown
  Bacterial polypeptide expressing nucleotide sequence isolated from the Sargasso Sea
tggcagtgatgcatttcaagaatgtgacacaacaggaattacaagaccgtgcacgaagcacaattatcttgttaaagatcctaataaattatctcctgtttttcatgaagcatttaaaatagcaaaagatggtagaccaggacctgttttaattgacatacctaaagatgttcaatttgcaaaagggaattatatagaaaaagataaagtaattattccttctcatagattatttgaaccagaaatttttaaaaatgatgaaaaaattaatgaagttgttgatttaatttcaaaagctaaaaaacctattttttatataggtggtggatgtattaattctggaccaaaagcttctgagttagtttctaagtttgtagaaatgacaggagcacctgctacaatgacattaatgggattgggtgttcttggttcttctcatccaaattctttaggaatgcttggtatgcatggtatgtacgaagctaatatggcaatgcatgattgcgatgtcatgattaatataggtgcacgttttgatgatagggtaacaggcagattagatgctttttccccatattctaaaaaaattcatatagatattgatgaaagtaatatcaacaaaactattaaagtagatgttccagttgttggagatgttaccagtgttataaataaaattattaatacatggaaagatcaaaatctaaaaacaaatcaatcagatattaaattatggtggaataaaataaataattggaaaaaaatagactgcttacattttactaataatacaaaagaaataaaaccacagtatgctgttcaaagattatatgaattaactaaagataaaaaaacatttatcactactgaagttggtcaacatcaaatgtgggctgcgc

SEQ ID NO: 231689 - DNA, 430 bp, Unknown
  Bacterial polypeptide expressing nucleotide sequence isolated from the Sargasso Sea
aatgacagataatattacaggggctgaaattgtacttaaatctttaacggagcaaggagttgaagttgtatttggttatccgggaggagcggtattgcctatttatgatagtttatttaaacaaaattctatccgtcatattttagttaggcaagaagcaggcgctattcatgctgctgaaggatatgctagatcatcaggaaaaattggagttgttttagtaacttctggtcctggagcaacaaacgtagttacaggattaactgactctatgatggatagcattcctattgtttgcattactggtcaagtacctcaacatttaattggaagtgatgcatttcaagaatgtgataccactggaattacaagaccttgtactaaacacaattatttggttaagagatgtaaacgaaactttcttcagttt

SEQ ID NO: 231690 - DNA, 791 bp, Unknown
  Bacterial polypeptide expressing nucleotide sequence isolated from the Sargasso Sea
tataatttgtttgagtggacaagtccctactcatttaattggtacagatgcttttcaagaggctgatactacaggaatttctagaccttgtactaagcacaattatctcgtaaaagacgcagatttattatgtggtattatacatgaatcgtttgatattgcttcgacaggaagacctgggcctgtcttagttgatttaccgaaagatattcagttaactaaaataaaatatgaacaaaaaccagtaaagataaaaaaaaatgtaactgctaatcttccaaaaattgatagtaaaataattaataaggttgttgatttgcttattaatgcaaaaaaaccaataatttatggaggtggaggtgttattaatgctggtcctaaagcatctacacttttaacggaattagtagatttgttgaacatcccggtgacattaacattaatgggattaggagctgtttcgaataaaaataaaaattttttaggtatgttgggtatgcatggcacatacgaagcaaatttagcaatgcataattgcgatgttatgttaaatgttggtgctagatttgatgatagggtaactggtaggttaaatgcttttgctcctaaatcaaaaaaaattcatattgatattgataaatcatctataaataaagtcgtttcagtagattatggtatagtaggagattgtgaagatgttctcttagcattagtgcaacaggttaagaaacttcataatcaaaaaaatcaaaaatctaatacaaactggtggtctcagatcagtgaatgga

SEQ ID NO: 231691 - DNA, 682 bp, Unknown
  Bacterial polypeptide expressing nucleotide sequence isolated from the Sargasso Sea
cttgtccgatcgaggaactgtcatgcagttaacaggaagtgaaattatagtaaaaacccttgtggatcagggtgcggataccatttttgggtatcctgggggtgccgtcctgcccatctatgatgcgatttttaagcaaaatgaattgaggcacattcttgttcgccacgagcaggcagccgttcatgctgccgagggttatgctcgatcgacaggaaaagtgggtgtagtattagtaacttcgggtccgggtgccacaaatgcagttacgggtttgaccgatgctctaatggactctgttcccattgtttgtttgactgggcaggtgccgactcatcttattggcaacgacgcctttcaagaggcagacacggtcggtattactcgtccttgcaccaagcataattatcttgttaaagcagcagatgatttatctaagaccattacggaagcattttttgtggccagcacgggtcgcccaggcccggtggttgtggacttgccgaaggacgtagtgaactcttccgccgagtacagaaaaattggtggtgtggtaaggcaaagttatagccctgttgtgaaagtagagcagggtttggttgattcagcggtaacccttctggcagaagcggaacagccaatagtgtactcgggagggggtgtaatcaactctgggatagag

SEQ ID NO: 231692 - DNA, 259 bp, Unknown
  Bacterial polypeptide expressing nucleotide sequence isolated from the Sargasso Sea
atgactgataatattacaggggctgaaattgtacttaaatctttgacggagcaaggagttgaagttgtatttggttatccaggaggagcggtattacctatttatgatagtttatttaaacaaaattcaatccgtcatattttagttagacaggaagcaggtgctattcatgctgctgaaggatatgctagatcatcaggaaaaattggagttgttttagtaacttctggtcctggagctacaaatgtagttacaggat

SEQ ID NO: 231693 - DNA, 811 bp, Unknown
  Bacterial polypeptide expressing nucleotide sequence isolated from the Sargasso Sea
actggagcacaattactttgtgagggaataattcatcacggaggtacaaaaatttttggtatcccaggtggagctatattacctttgtatgggacgctatctcaataccctgaacttgaacacatattagttagacacgaacaaggtgcttctcatgctgcagatggattttctagagcttcaggaaaacctggtatatgttttgctacttcaggcccgggcgcaacaaatttaataactggaatggcgaccgcaatgatggattcttctcctatgattgcaattacagggcaggtttcaaggcctggaattggaaaagattcttttcaagaaatagatataacaggggcttccttgcctgtaactaagcataattatcttgtgatgaatgcatctgagataccccaagttgttaaagaagctttccatattgctactactggtagaccaggtcctgtacttattgatattcctagagatgtttttttagaggaggtagaattcgatagttctttttggaaagaagatatagaaattctaggatataatccgccaaagtttgctcatgattaccaaatagaaaaggctattaaattaatagaacagtctaaaagacctgttatattagctggacacggagtgattatttctcatgcttatgaagagctacttaaattagcagaaagtgctcaaattccagttgtaactactttattaggcataagttcatttccagaaaatcatgttttgagcttaagttttcctggtatgcatggtgttgcttgggcaagtttagctttagatcaggcag

SEQ ID NO: 231694 - DNA, 760 bp, Unknown
  Bacterial polypeptide expressing nucleotide sequence isolated from the Sargasso Sea
aatgaaaaaaagaatacttacaggggcagaaataatttgggagtgccttattaaagaaggtgtagaagtggtctttggatatccaggaggagctatccttccaacgtatgatgcacttagtaaatatagtgatagcgtacaccatgttcttactaggcatgagcagggcgccacacatatggcggatggatatgcaagggctagtggtaaggtaggagttgcaatagcgacatcaggtccaggggcagcaaatatgattacaggcttagcaacagctatgatggactcatctcccattgtttgcgttactgggcaagttcctagacctgcaatcgggagtgacgcttttcaggaaatggacatctctggtgcggtaattcccgtaacaaaacatagctatttagttatggaaatcaaggatcttgcaaagacaatcaaagaggcctttgcaatcgcacgctcaggaagacctggacctgtcctaatagatattccaaaagatttacaagctgaggaatttgaatttatatatccagaagaaaaagttaccatacctggagaaaatccgattaaaagtgatataagcagcgttgatttggatagtgccgttaagatgattgctaatgcaaaaaaacctgtcatattagcgggacatggggttttactatcaggtgcttcagatgaagtaatcagtttatcagaaaaaagtagtattcctatcagttggacgctacttggttcaggtgcggtgcctgctagc

SEQ ID NO: 231695 - DNA, 746 bp, Unknown
  Bacterial polypeptide expressing nucleotide sequence isolated from the Sargasso Sea
tttgactgatgcttatatggattcagttccattagtttgtatttcaggacaagtgccaacccatttaattggaacagatgcttttcaagaatgtgataccactggaattaccagaccatgcacaaaacacaattggttagttaaagacatcaaagatttatcaaaaactcttcatgaggcttttagagttgcaaccactggaagacctggtccagttttagtggatattcccaaagatatacagtttgctaaaactagttattcaaagcctaaagttcaaaaaaaattaaatggaagatctttaaatcttttctcacaaaaagaaattgatgaattaattaatttaatggataaatctaaaaagccaattatatattctggaggtggggtaattaattcaggtcctgaggcaagcgacgtattaagagaactcgtccagttaactggttttccaattacatcaactcttcaaggtttaggtgcatatccaggagatgacaatcaatttttaggaatgctaggaatgcatggaacatatgaagctaataatgccatgcatgattgtgacttgttaataaacattggcgcaagatttgatgatagaattacaggaaagatcgatgaattttctcctaattcaaaaaaagttcatatagatattgatccttcttctattaacaaaataattaaagttgatttagctttagttggtgatgttaaagatattttaaaaggtataaataaaa

SEQ ID NO: 231696 - DNA, 856 bp, Unknown
  Bacterial polypeptide expressing nucleotide sequence isolated from the Sargasso Sea
gtttggtctggaagcaaaaaaaattcatattgattttgatccttcttcgatagataaaataattaatgtcgatgttgctttacaaggcgatgcaaaacttgttttgtcacaactttgtaaagaatttgagaattccaaattggaaaacacagatcttaagccttggtggggtcagattaatgagtggaaggaaaagcatggtttgaatcacgacatgcttaatttagaaaatcaaaaagaaataattcttccacaacaagtaattcagtcgctctataaagttacaaaaggaaaagcttttataacttctgacgttgggcaacatcaaatgttcgctgctcagtactacaaatttgacgaaccaagaaaatggataaactcagggggtctgggaactatgggatttgggttgccctcagcaatgggagtcaagtttgcgtttccagatgcagatgtcgcttgcgtcactggagaaggtagcattcaaatgtgtattcaagagctttcaacctgcagtcaatacggacttcccgtaaaaattataaaccttaataatagggcattgggtatggtcaagcagtggcaagatatgcaatacggaggcagatattcaagtatttcttacgaagattctcttccagatttcgttaaattagctgaatcgtttgggcatgtgggcttgaaggtagaaaagttttctgaattaaatgaggccatggaggaagctttttcccttaaagataaattggtttttttagatgttttaattgacccagatgaacatgtttatccaatgttagaagccggtggctcaatgtcagaaatgagaatcagtaaaaaagataaaactttctaa

SEQ ID NO: 231697 - DNA, 463 bp, Unknown
  Bacterial polypeptide expressing nucleotide sequence isolated from the Sargasso Sea
catgcctaaatctgcccccaatgatgcttctgaacaattgatgcctggcgcagaagtgcttctcaaagcgcttgaagatgagggagtcgaggttgtatttggctatccaggtggtgctgtactgccgatttatgatgcgcttttcaagaataacaagatcaagcatatccttgtgcgtcatgaacaggcggctgttcatgctgccgagggctatgcccgttcaactggcaagaccggcgtggtcctcgtaacgtctggaccgggtgcaaccaatgcggtaaccggtctgaccgatgcgctgatggattctgttcctgttgtctgtctcaccggtcaggtgccaacgcatctgattggcaatgatgcctttcaggaagccgacaccaccggtatcacccgtgcttgcacaaaacataattacctggttaaggagggcaacaggctgcaagaaatcgtgatgaag

SEQ ID NO: 231698 - DNA, 824 bp, Unknown
  Bacterial polypeptide expressing nucleotide sequence isolated from the Sargasso Sea
gcgccagtaacaagcgtaatgggatctgttgcgaagcatgtttttttagtcacagatgaaaataagctcgctgcaactttaaaagcagcatttgaagttgccacatctggaaggccagggcctgttgttgtggatattccaaaggatgttcaaacagctgagatatccgaagaagattatgaggacaccaatatctcagcttattctaatagaatattggccattgaaaaatcgcgcctgaacgaagaaaaatcatccgaattctttacacatctcgggaattcaaagaggccactgatttactttggaggcggtgtaatctcagcgagtgcatcaaaagagctgagagaatttgttgattattttaatctgccggctgtttcaaccctgatggggctaggtgcagtggatactcgacatccctcatctctgcacatgcttggcatgcatgggactccttatgcaaactatgccgttcaagaaagcgacttcttgatagcgataggttctcgttttgacgatcgtgttgcaggcgtgcctgaaaaatttgccccgaaagccaaagtcattgcacactttgatgtcgatccctccgagatcaataaagtcaagaacgctgcttggtctcatctcggagtattgtcattggcactgaaagatctcataaaacatgccaaatcaaatgatcttgagtttaattttggagattggctcagtcacacaggcgaactaaaatcaaaatatcctttaaacttcaatcgctcatccgatttgattcagccggaacatgtcattgagtgcatcaataagatcacaaagggtga

SEQ ID NO: 231699 - DNA, 859 bp, Unknown
  Bacterial polypeptide expressing nucleotide sequence isolated from the Sargasso Sea
cccggcacggggattaactgaagatctggaaaaagccgcggaattgatttcatcctccaaaaaacctcttctttatgtaggtgccggtgcggtcattgcccaggcatcaaggcaggtcattggacttgcagaaaaacttcaggcacctgtcaccaccaccttgttgggtaagggagcatttccggaaacccatccgctttcggtgggtatgctgggaatgcatgggaccgcctatgccaacaaaacggtcgtcgattgtgacctaatcatggccatcggtgcacgttgggatgaccgaatcacgggcaaggttagcgaattttgtcctgatgcgaccaagatccacatcgatgttgacccggcagaattcggtaagatcattgatccggatgtctcaattgcaggagacgccaaactggttcttgaagatctgatcccgttggtcagcaaactggacagccaatcctggctgaaacagatagagaagtggaaaaagaaatatcctttgaaatttccaaaacgcggagggctgagagcccagcaggttcttaaggaactggacacgctcaccgactcaaaggcaatcatcagtaccgatgttggtcagcatcaaatgtggactgcacaattttgcaaaaccaatgaagagcgaaaatggctttccagtgggggtgcgggaacgatgggttatggcctgccttcggcgattggagcccagttgggatgccccgatgaacttgttgttgcggtggtcggagacggtggatttcagatgacgatgccggaacttgcgacggctgccattcataaattgccgataaaaattttaatcatcaacaaccgctacctcggtatggtc

SEQ ID NO: 231700 - DNA, 796 bp, Unknown
  Bacterial polypeptide expressing nucleotide sequence isolated from the Sargasso Sea
taccggagaacttggtgttgtaatagctacttctggacctggagcaacaaacttgataactcctttagctaatgctttgatggactccactcctcttctagcgattactggacaggttgcctcaactgcaataggtaatgatgcgtttcaggaagcttatactgtaggactttcgatggcagctactaaacacaattacttaatcacagatgcttcagaaattcctcaagttttaaaggaagcaaaatttattgctactactggtagaccgggtccagttttggttgatataccaaaggatatactaaaccaagtggcttcttgggttgagccaggcgatcttgacttaccaggatacaagcctacaacagagccaaatccaaaaatggttcagcaagcttcttctttaattaaaaagtcaaagaagccaattctttatgtcggtggaggaattattcattcgaaagctaataatgaactctttgaactagctactaaatttaatattccagttgttacaacacttatgggaagaggtgctttccctgatggtcatgaattgtgtcttgaaatgccaggtatgcacggcaattatacagctaccacttcaattcaaaatgctgacctgttaattgcaataggcgtaaggtttgatgatagagttactgcaaatccctcattttttgctcagaatgcaaaagttattcatgctgatattgatccagcggaaattggaaaagtacgtgatgcacaagtacctattgtaggtgatgcaaaaagtgtaattaaaggggac

SEQ ID NO: 231701 - DNA, 463 bp, Unknown
  Bacterial polypeptide expressing nucleotide sequence isolated from the Sargasso Sea
agtaatattacttctggaggtttaggaacaatgggatttgcacttccagcagcaatcggagcaaaaatgggaagacctgatcgtgaagttgttgcaatcattggagacggtggtttccaaatgacaattcaggaattaggaacaattttccaaactcaggttccggttaagattgttattttaaataatgaatttttaggaatggtacgtcaatggcaggaattgttttttgacaaccgatatgcatcaacaaaaatgattaatccaaattttgttgctattgcagaaggatatcatattaaatctaaaaaagttacacaaagagaagatttggacgaagctgttgcagaaatgctggcttctaaagattcttacttcttagaagtcatggtggagaaggaaaacaacgttttcccaatgattccaaccggagcatgtgtttcagaaattagattaagctaaa

SEQ ID NO: 231702 - DNA, 526 bp, Unknown
  Bacterial polypeptide expressing nucleotide sequence isolated from the Sargasso Sea
aaacccaatagatggatgacatctggaggtctaggaactatgggatatggacttccagccgcagttggtgttcaaattgctcatccagataaacttgtgatcgatattgcaggtgaagcatctgtattaatgacaatgcaagaaatgtctacagcagttcagtacaatttgcctataaagatattcattttgaataatcagtacatgggaatggttagacagtggcaagaacttttacacgaaaaaaattattcagaaagttattctgaggctttacctgactttgtaaagctagctgaggcttatggatgtaagggtatcaaagccgataatcctgacgaattagattttaaaattaaagagatgatagattataatggtccagtaatatttgactgtcacgtagacccaaatgaaaattgttttccaatgataccatctggaaaaccacataatcagatgattttaggtcctaatgacaaagaggaaaataagattactggtaaagggaaatcattagtttaat

SEQ ID NO: 231703 - DNA, 181 bp, Unknown
  Bacterial polypeptide expressing nucleotide sequence isolated from the Sargasso Sea
aatgtcaaaattatattcaggtgctgaaattgtatttaaatgtcttgaagatcatggcgttgaagtggtttttggatacccgggcggggcagtacttccaatatacgatgagttaaaaaattttccatcggttaaacattatcttgttagacatgagcaaggcgctggacatgctgcagag

SEQ ID NO: 231704 - DNA, 523 bp, Unknown
  Bacterial polypeptide expressing nucleotide sequence isolated from the Sargasso Sea
aatgacaggtgcagaaatagtattgcaatctcttgcagatcaaggagtagaggtagtttttggttacccaggtggtgcagtattaccaatctacgatactttgtttaaacaaaattctattaaacatgttttggtacgtcaagaaggtggagccatacatgctgctgaaggttatgcgcgttcaacaggtaaagttggagttgtattagttacatctggtcctggggcaacaaatgtagtcaccggtttaactgatgcaatgatggatagcattccaattgtttgtattactggtcaagtacctcaacatttgataggtagcgacgcatttcaagagtgtgatactacaggaattacaagaccatgtactaagcacaattatcttgttaaagatccaaataaattatctcctgtctttcatgaagcttttactattgctcaagatggcagaccaggacctgtcttaattgatattcctaaggatgtgcaatttgcaaaaggtaattatacaaataaagaaaaa

SEQ ID NO: 231705 - DNA, 838 bp, Unknown
  Bacterial polypeptide expressing nucleotide sequence isolated from the Sargasso Sea
catggactcagttccattggtttgcatttctggtcaagtcccaacccatttaataggaactgatgcatttcaagaatgtgataccaccggtattactaggccctgcacaaaacataattggttagtaaaagatataaatgatttatcagaaataatgcatgaagcatttaaagttgcaaccacaggaagaccgggccctgttttagttgatattccaaaagatattcaatttgcaaaagctaaatataaaaaacctaaaaaagaaaaaaaactaaatggaaaatcaaataataaattttctcaaaaacaaatagatcaattaattgatttattaaaaaatactaaaaaaccagttatttatagtggtggtggagtaattaattcaggacctaaggcaagtgacgcattaagagagtttgtagaattaacaggatttccaattacttccacccttcagggtttaggtgcatatcctggtgatgataatcaattccttggaatgttaggcatgcatggaacttatgaagcaaacaatgctatgcatgattgcgatcttttaataaacattggtgctagatttgatgatcgtatcacaggaaaaatagatgaattttcgccaaactccaaaaaagttcatattgatatagatccttcgtctataaataaaattataaaagttgatcttgctatagtaggagatgttacgaaggtaattggtaaagtaaataaaacaatcttaaagaaaaaaaatggtcatagtaaatccaataaatcaaatattgcaaagtggtgggaacaaatacaaaaatggagaggcaaagactcccttaattttgta

SEQ ID NO: 231706 - DNA, 549 bp, Unknown
  Bacterial polypeptide expressing nucleotide sequence isolated from the Sargasso Sea
gatgttgtccggtgccgccatggtaattcgcgcccttgccgatgaaggcgttgaatatctgtacggctacccgggtggcgctgtattacatatctatgacgcgctgtttcagcaaaataaagtcaaacacgtgctggtacggcatgagcaagctgccacgcacatggccgatgcttatgcccgtgccagtggtaaagccggtgtcgtcctggtgacgtccggccccggtgccaccaatgccgtcaccggcattgcgaccgcctacatggactctattccaatggtagtgttaaccggccaggtcatgagtcatctgattggcggcgacgcctttcaggaaacagatatgctgggtatttcacggcctatctgcaaacacaatatgtcggtacgccggccggaagacatcccgctgttaattaaaaaggcgtttcatatcgcccaaagtggccgcccgggcccggtagtgctggacatcccaaaagacatgacgatgcctgatcagaagtttccgtatcattaccccagcgatgttagcctgcgctctta

SEQ ID NO: 231707 - DNA, 619 bp, Unknown
  Bacterial polypeptide expressing nucleotide sequence isolated from the Sargasso Sea
atcctgggcgatttaatttatgccccagccatgttacgccgtttggccaacaagttaccagaagacagtgtcgttgcatgcgatgtgggtcagcatcaaatgtgggttgcgcagcatatgtggtttagacgccctgaagatcatttatcgagtgctggccttggcactatgggatttgggttaccagccgccattggcgcccaagtggctcgcccagatgccaccgtagttaccgtttctggtgacggttcatttatgatgaatgttcaggagttgacgacgattaaacgtcgtaaattaccggtgaaaattttactcatagataaccagaaattaggtatggttaaacaatggcaacagctgttttttgaagagcgttacagtgagacagatttatctgacaaccctaattttgtattaatggcatcggcttttgatattccaggccgcaccattaatcatgctgatcaagtagagcaagcattagatgaaatgcttaacagcagcggcccttacatgctgcacgtcgcaattgatgacgcctttaatgtctggccgttagttccacccggagccagtaacagtgacatgatggatcaaatggagaagcaaacatgat

SEQ ID NO: 231708 - DNA, 1084 bp, Unknown
  Bacterial polypeptide expressing nucleotide sequence isolated from the Sargasso Sea
tatggttggtaaccgcctcactggtggggaaattattttacgagctctaggtgaccaggatgtagatgtactatttggttatcctggaggcgttactctacctctttatgacaaaatttttcaacaaaataagatcagacatattcttgttggacatgagcagggtggtgtacacgcagctgaaggttatgcgcgttctactggtaagacgggagtagttttggcaacttctggtccgggagctaccaatacagtcacaggattagtggacgctatgatggatagtatcccacttgtttgtatcactggccaagttgttagttctctcataggcaatgatgcttttcaggaggcagatactactgggataactagagctgcaaccaaacataattatttggttagatcgacagatgatttggcgagaatcatacacgaggcattttacgtagcaaagaatggtaggcctggtccggttcttattgatatacctaaagatgttattttagatacaggtgagtatgttgtacctgaggatgtttctcccagaaattataagccaaaaacagagggtgatgaagacaaaatcaaggaagctgtagatttgctggctggagcacgaaagccaataatttatgttgggggaggcgttattaactctggtcctgaagcctctaagttagttgagaaattggtagatttaacgggttatccctgtacaacgacactaatggctttaggtgccttgccggcttctcatcccaatttcttagggatgccgggtatgcacggcacttatgaagcaaacatggtaatgcatgagtgtgatgtaatgttaaacataggtgctcgatttgatgatagagtaactggaaaagtagacggcttttcgccacaatcaaaaaaaatacatatcgatatcgacccgtcatctataaataaaaatgtatttgtagacataggtatcataggtgatgcccacggtatcgtgaaaaagttgatagagggttggagtgagaaagatatagagaaatcgtctgatttaaagccttggtggaataagataaaagcttggcgagaaatt

SEQ ID NO: 231709 - DNA, 790 bp, Unknown
  Bacterial polypeptide expressing nucleotide sequence isolated from the Sargasso Sea
atgtaccaattgtggttctgcaaaagaatcattaactgcacttattgaagaacttaaatctagagatctaaagactaatgaatctgatatttctgagtggaatcaacagattgcaaactggcgagatgcacacggcttgaatcattctttattagagatgggagcacagaatggcaagatacttcctcagcaagtcatacaatctctttataaagaaacaaatggagaggctttcgtcacatcagatgtgggtcaacatcagatgtttgctgctcagtattatcattttgataagccaagacaatggataaattctggaggtcttggcaccatgggctttggacttccctcggcaatgggagttcagctggcataccccgactctatagtctcatgtgttactggtgaaggaagtatacagatgtgtatccaagaactttcaacatgtcttcaatatgggttgcctataaaaatcattaatcttaataacgccgcattgggaatggtaaaacaatggcaagacatgcaatacggaggtaggcattcatctagtacatatgaaaattcactaccagattttgtggcacttacagagtcatatggacatgtaggtattaaagtttcaaaattcgatgagctagaatcagccatgaaagagtgcatatcccttaaagataaactggtatttttagatgtggatgttgatccgaatgaacatgtttatcctatgcttgaggctggcaatgcgatggatcacatgcgtcttagtaaagacgaaaagacttggtaa

SEQ ID NO: 231710 - DNA, 574 bp, Unknown
  Bacterial polypeptide expressing nucleotide sequence isolated from the Sargasso Sea
atgaaagcgtccgatttatttgttaaagcgttagaagcagaaggcgtggaatacgtctttggtatcccaggtgaagaaaacctcgacttacttgagtcgtttcgcgagtcctctattaaactggtgctgacgcgtcacgagcaaggtgctggttttatggctgctacttacggcaggcttaccggaaaagtgggagtgtgcctttcgaccttaggacctggggccactaatctagttactcccgcggcttatgctcaactcggcgctatgccaatgttgatgattaccgggcaaaagccgatcaaaaccagcaaacaaggtcgctttcaagttatcgacatcgttgacatgatgcggccgatcactaaattcaccaaccagattgtgagtggcgatagaattccttctactgtacgagaggcatttcgtttagcccatgaagagcgcccgggcgctgtacacattgaactgccagaagacattgccgcagaacaaaccagtgcccaaatactaacacctagcatggcccgtcgacctatcgccgaatacaagcaattgctgctgcggttactat

SEQ ID NO: 231711 - DNA, 556 bp, Unknown
  Bacterial polypeptide expressing nucleotide sequence isolated from the Sargasso Sea
aatgtgggctgcacaacattataaatttaacaaaccaaatagatggatgacttcaggaggacttggtaccatgggctatggattaccagctgccgttggagttcaagttgctcatcctaataaattagtaatcgatattgctggagaagcttctgttttgatgacaatgcaagaaatgtctacagcggttcaatatagtttgccaattaaaatatttattttaaataatgaatacatgggaatggttagacagtggcaagaattattacatgataaaaattattcagaaagttatacagctgctctacctgattttgtaaaattagcagaagcatatggctgtgtaggaattagagccaaaagacctgaagaacttgatgacaagattattgaaatgttaaacactgataggccagttatatttgattgtatggtcgacaaacaagaaaattgttttccaatgataccatctggaaaacctcataatcaaatgttgttaggtcccaaagaccaagaagaaaagaaaattacaggtaaaggaagaacattagtctaa

SEQ ID NO: 231712 - DNA, 880 bp, Unknown
  Bacterial polypeptide expressing nucleotide sequence isolated from the Sargasso Sea
aatgaaaacgggctcagaaataattgtagatgttctcgcagatgaaggcgttgaaaccatttttggttacagcgggggagccattttacctacgtacgatgaagtctttaaatacaacgaggctaatcccgaaaatccaatgccattaattgtgccttcaaatgaacaaggcgccggtttcatggcttcaggatatgcacgatcaacaggaaaaccaggagtggtaatggtcacttcaggtccgggtgcaaccaatactgtgactccagtaagagatgccatggccgattctattccgatggttatcatatgcggacaagtcagcaggcaagcaattgggagcgatgcttttcaagaggcgccagtaacaagcgtaatgggatctgttgcgaagcatgtttttttagtcacagatgaaaataagctcgctgcaactttaaaagcagcatttgaagttgccacatctggaaggccagggcctgttgttgtggatattccaaaggatgttcaaacagctgagatatccgaagaagattatgaggacaccaatatctcagcttattctaatagaatattggccattgaaaaatcgcgcctgaacgaagaaaaatcatccgaattctttacacatctcagcaattcaaagaggccactgatttactttggaggcggtgtaatctcagcgagtgcatcaaaagagctgagagaatttgttgattattttaatctgccggctgtttcaaccctgatggggctaggtgcagtggatactcgacatccctcatctctgcacatgcttggcatgcatgggactccttatgcaaactatgccgttcaagaaagcgacttcttgatagcgataggttctcgtttgacgatc

SEQ ID NO: 231713 - DNA, 865 bp, Unknown
  Bacterial polypeptide expressing nucleotide sequence isolated from the Sargasso Sea
atgaataatgaaataacaggcgctgaaattgtcttaaaaagcttagctgaacaaggcgtagaagttgtatttgggtatcctggtggtgcagtattacccatatacgatactttatttaaacagaattcaattaagcacgttttagtaagacaagaaggtggtgctatacatgcagctgaaggttatgctaggtctactggtaaaactggagtagttcttgtaacgtcaggacctggcgcaacaaatgttgtaactggtttaactgatgcaatgatggacagtgtcccagttgtttgcattacaggacaagtaccaactcatttaattggaagcgatgcatttcaagaatgtgatactactggaattacaagaccatgcacaaaacataactatttagtgaaggatgtaaataaattatcatctgtttttcatgaagcttttacaattgcacaaaatggaagaccaggacctgtattaattgatattccaaaagatgttcaatttgctaaaggttcttatgaagaaaaaaataaaattataattccatctcatagattgtttgagccaagtccagattttgaaaaaagtaaaattgatgaagctgttgaattaattgccaaatcaaaaaaaccaattttttatatcggtggtggatgtattaattctggtccaaaagcttcaagattagttagacaatttattaatatggttggatcgcctgtaacaatgactttaatgggtcttggtgtagtaggttcatcagataaaaattcacttggcatgctcggtatgcacggaatgtatgaagctaatatggctatgcatgaatgtgatgttatgattaatattggcgctagatttgatg

SEQ ID NO: 231714 - DNA, 563 bp, Unknown
  Bacterial polypeptide expressing nucleotide sequence isolated from the Sargasso Sea
gcatcaaatgtgggctgctcaattctataaatttgaggagccaaatagatggcttacatcaggtggtttgggaactatgggttatggatttcccgctgcaattggagcccaggttggacacccagatgccttagtagtcgatatagcgggagatgcctctatactcatgaacattcaagaaatgagtacagctgttcaatatagattacctgtaaaaatatttattttaaacaatgaatacatgggaatggtaaggcaatggcaagaacttttacatggaggaagatattctgaaagttatactgatagtttacctgattttgtaaagttagctgaaagttataaagctgttggattaagagcaaagacaactgatgaacttgatgatgtaataactgaaatgattgaaacaaaaaatacagttattgctgatatttgggtaactaaagaagagaattgctttccaatgattcaaagtggttctgctcataatgaaatgatgttaagtaaagatcaaaaacaagataaaaaatcagccgaaaaaggaaaaattttagtttaat

SEQ ID NO: 231715 - DNA, 363 bp, Unknown
  Bacterial polypeptide expressing nucleotide sequence isolated from the Sargasso Sea
aatgaaaaaaagaatacttacaggagcagaaataatttgggagtgccttattaaagaaggtgtagaagtggtcttcggatacccgggaggagctattcttccaacatatgatgcacttagtaaatatagtgatagcattcaccatgttcttactaggcatgagcagggcgccacacatatggcggatggatatgcaagggctagtggtaaggtaggcgttgcgatagcgacatcaggtccaggggcagcaaatatgattacaggcttagcaacagctatgatggactcatcccctattgtttgtattaccgggcaagtgcctaggcctgcaattgggagtgatgcttttcaggaaatggacat

SEQ ID NO: 231716 - DNA, 169 bp, Unknown
  Bacterial polypeptide expressing nucleotide sequence isolated from the Sargasso Sea
tatgaaattagcaggcaatgacatattaattcaatcgctcatcaatgaggacgttgaatatatttttggctatcccgggggtgctgcacttcatatttatgatgcaatttttaagcaaaataaaatggagcatattttagtaagacatgagcaaggtgcaacacacgct

SEQ ID NO: 231717 - DNA, 543 bp, Unknown
  Bacterial polypeptide expressing nucleotide sequence isolated from the Sargasso Sea
aacattataaatttaataaacctaatagatggatgacctctggaggtcttggaactatgggctatggtcttcctgctgctgtaggagtacagattgctcatccagataaattagttattgacattgctggtgaagcatcaattttaatgaccatgcaagaaatgtctactgcagttcaatacaatcttcctataaaaatatttattttgaataatcagtacatgggaatggttagacaatggcaggagttactacacgaaaaaaattactctgaaagttactcggaggctttacctgattttgttaaactagcagaggcttatggatgcaaaggaattaaagctgaaaatcctaatgaattagatactaaaattagtgaaatggttaatcataatggaccggttatatttgactgtcatgttgatcctagtgaaaattgttttccaatgatcccatcaggcaaacctcataatcagatgattttaggtcccaatgataaaaaagaaaataagatcacaggaaaaggaaaagctttagtttaat

SEQ ID NO: 231718 - DNA, 478 bp, Unknown
  Bacterial polypeptide expressing nucleotide sequence isolated from the Sargasso Sea
tctggtggtcttgggactatgggttttggtcttccgtcagcaatgggagtgaaactggcttatccagaagaagaagtaatttgcattacaggagagggaagtatacaaatgtgtattcaagaactctcaacatgttcacaatataaactaccaataaaaatatttaatataaataatcttgccctcggcatggtaaagcaatggcaagatatgaattatgatggtagacactcatctattagctatgaggattcattaccagattttgttgggctagccgaatcttatgggcatgttggcattaaaatcactaaaaattctgaacttaaagaaggaattgctaaagcattagctatcaaagataagttggtttttgttgatatatatgttgatccaaatgagcatgtgtatccaatgcttgtcgctcctaatggaagtttaaaagatatgtggttgggtaaaggtgaaaaaacgtgat

SEQ ID NO: 231719 - DNA, 292 bp, Unknown
  Bacterial polypeptide expressing nucleotide sequence isolated from the Sargasso Sea
atgatcggcgctactgcgctaatgaaagcattggaaaaagaaggagtaaaggaggtcttcggtctaccgggaggtgcgaaccttccaatgtatgacgagttgggtaaaagtaacattcgtcatattttggtcagacatgaacaatctgctgcacatatggcagatggttttggtagagttagtcgaaaacctggtgtatgttttgcaacctctggtcctggcgcaacaaatttgttaactggaattgcaactgctcaggcagattctgcaccaatggttgcagttactggac

SEQ ID NO: 231720 - DNA, 527 bp, Unknown
  Bacterial polypeptide expressing nucleotide sequence isolated from the Sargasso Sea
gtttgctgctcagtattatcattttgatgagccaagaaaatggataaattctggtggattaggaaccatgggctttggtttaccatctgcaatgggtgtcaaactagcgtacccagatgaggaggtaatttgtattactggagagggcagcattcaaatgtgtattcaagagttgtctacatgtgcacaatataagttgcctattaagatttttaatataaacaatcttgctttgggaatggttaagcaatggcaggatatgaattatgacggtcgccattcatctattagttatgaggattcattaccagactttaaggaattggttgagtcttatggacatgttggaattaagatcaccaaaaattcagatcttaagaaaggcattgaagaggcattttcaattaaagataaacttgtatttgttgacatatatgtagatcctaatgagcatgtctatcctatgttagtagcaccaaatggaagcttaaaagatatgtggttagcaaaaggaagcaaaacatgat

SEQ ID NO: 231721 - DNA, 694 bp, Unknown
  Bacterial polypeptide expressing nucleotide sequence isolated from the Sargasso Sea
atgaaattaagcggatcagaaataataattgagtgcctaaaaaaagaaggtgtagaatttatcttcggctatcctggcggtgcggtgctacatatttatgatgctttatttaatgcaaaaaagattaagcatgttctcgcaagacatgagcagggagccacgcatgctgcagatggttatgcgagagcatgtgggaaaccaggtgttgtcttggttacctctggtcctgggataacaaactgtgtaactggtttagctactgctcacatggattctatacctatgattataatctcaggacaggtatctaggcagtatgttggtagtgatgcatttcaagaggctgatgctactggcatcacaaggcctgttacaaagcataactttcttgttgatagtcgagagtctattgctgatgtatttaaaaaggcttttacaatagcaacaaccggtaggccgggaccagtattgatagatataccaaaagatctaacagatccaagtgttaaaattgaatttacttatccaaagaaggtcaaaattagatcttataagcctatcccgagagaatctgaagataaaatatctacagcagctaagttattatgctctgcaaaaaaacctatgatttatacgggtggtggtattatattgggcaatgcttataaagaattaaataagctagtaagagtta

SEQ ID NO: 231722 - DNA, 454 bp, Unknown
  Bacterial polypeptide expressing nucleotide sequence isolated from the Sargasso Sea
atgggttttggattgccagcagcaattggagtgaaggcagctttacctaactcagatgtcatttgcatagcaggagatgcaagcgttttaatgaatattcaagaattagggactctgtcccaatatggtttaaatgtaaagttggtcatcattaataatcgctggcaaggtatggtaagacaatggcaggaaagtttctacgatgagagatattcctcttctgatatgagttgtggtgaacctgatttcgtaaaacttgctgagtctttcggagttaagggatacctaatttctgatagaaaacagttacagaatgaattgcaacatgcgtttgatcatgacggtcctgccttgattaacatacttgttagaagaggtgaaaattgctatccaatggtacctcctggcaaaagtaatgctcaaatggttggatatgttaattgtgaagaataat

SEQ ID NO: 231723 - DNA, 535 bp, Unknown
  Bacterial polypeptide expressing nucleotide sequence isolated from the Sargasso Sea
tataaatttaatcaaccaaatagatggatgacttcaggcggacttggtactatgggatacggtttaccagctgctgttggggttcaaattgctcacccagataaattagttgtcgatattgccggagaagcctctgttttgatgactatgcaagaaatgtcaactgctgtgcaatacaaattaccaattaaaatatttatcttaaataatcaatacatgggaatggtcagacaatggcaagaacttttacatgaaaaaaattattctgaaagttataccgcagctctacctgattttgttaaattagcagaagcatacggttgtgttggtatacaagctacaaaaccagatgaattagacgaaaaaataaacgaaatgataaatacaaaagaaccagttatatttgactgtagagttgatccaaatgagaattgctatccaatgataccatctggaaaacctcataaccaaatgcttttaggtcctgaagatgataaagaagaagtaacagatgaaggcaagactttagtataat

SEQ ID NO: 231724 - DNA, 501 bp, Unknown
  Bacterial polypeptide expressing nucleotide sequence isolated from the Sargasso Sea
actccggcggcttgggcacgatgggctttgggttaccctcggcaatgggtgttcaactggctcacccggaggcggcagtggcctgcgtgaccggagaagccagcatcatcatgtgcatccaggagttatctacctgcaagcaatatgacttacccatcaagatcatcaatctgaacaaccgttacatgggaatggtccgacaatggcaggaattcttctatgatcggcgttactcccactcctacatggattcactgccggactttgtggagttggcatccagtttcggccacaccggtctgcggattgaaaaaccatcagacgtcgaaggcgccctgcgcgaagcgttcgccaaaaaagatcagcttttcttcctggactttgtcacggatcagacggaaaacgtgtaccccatgattgccgccggtgccggccacaacgaaatggtactaaagcctttgccggacggttctgcgcctgcagaacgggagcttgcatagc

SEQ ID NO: 231725 - DNA, 1123 bp, Unknown
  Bacterial polypeptide expressing nucleotide sequence isolated from the Sargasso Sea
atgaaagcgtccgacttatttgtcaaagcattagaagctgaaggtgttgaatacgtctttggtatccccggcgaagaaaacctcgacttactagagtctttgcgtgcgtcctcaattaaattggtactcacccgtcatgagcagggggccgggtttatggctgccacttacggcaggctaaccggaaaagttggcgtgtgtttatcgaccctaggtcccggcgcaacaaacttagtcacgcccgcggcttacgcccaacttggcgctatgccaatgctcatgatcacaggccaaaaaccgatcaaaacaagtaagcaaggtcgcttccaagtgattgacattgttgacatgatgcgacccataaccaagtttactaatcaaattgtaagtggcgacagaattccttccacggttcgtgaagcctttaggttagcccacgaagaacgccccggcgccgttcatattgaattacctgaggacattgctgccgaggaaactagcgagcaaattttatcgcccagcatgacgcgcagaccaattgcggagtacaaagcaattgctgcagctatttccatgattgaagaagcacagtcgccactactgctaataggcgcaggggccaatcgcaaactcactgcgaagatgctcagagagtttgttgataaaacctgcattccgtttgtgactacgcagatgggtaagggcgtgctcaatgaaagcgatcctcgctttgcagggaatacggccctttctgacggcgactttgtgcatcgcgccattgaaagagcggaccttattatcaatgtgggccatgatgtagtagagaagccgccatttttcatgcatcacaacgataagaaggtgatacacgtcaactttgattcggccgctgtcgaccctgtttactttccacatttagaggtcgttggcgatattgccaatagcatttggcagattaaagaaggcattacgcctcaggacgattggaaattagacttctacaaagatgtacaccaagcctatgttgagcaccgcgccgaagcagaagacgacaaccgctttcccattttacctgaaagactggttcgcgatattcgtaaagtgatgcctgataatggtattg

SEQ ID NO: 231726 - DNA, 922 bp, Unknown
  Bacterial polypeptide expressing nucleotide sequence isolated from the Sargasso Sea
atgaatgccaaaagacctattgtatttggcggtggtggaatagtaatatctgaagcaacgaaagttttacaaaaattcgcaaacagattgaagattcctgttacgcttactctgatgggccttggtggatatccgccagatgatccaatgagagttagctggattggaatgcatggttcctatttcgctaatatggctgttcatcacagtgatttagtcatttgtattggagctagatttgatgataggtcaacaggtggagtttttgataaattcgcacctaatgcaaaagtaattcatatagatattgacccctctactctaaataaaaatataaaagttcattgcccgatagttggagatgcgaaatctgttataacacagttagatgaatcaattcctttggaatttaaaccagattctaagactaggaaagattggtttaatcagataaaagaatgggaattgcatcaccctactgtagctagccaaaatggaaaacatattaaaactagttttgctattgatacaatttctaagattactaagggtaaggctgtcgttgtaactgatgttgggcaacatcaaatgtgggtagcacaatattatcaatttgaaaatcctagaaatcaaattacttctggaggcctgggtacaatgggctttggctttcctgcagctattggcgcaaagcttggcagacccaacgacatggttttggcaatttgtggagatggcagctttcaaatgaatatgcaagaattttcaacagctgtagaaaacaatcttgatttaaaaataattctaataaataatggtcaccatggaatggtgagacaatggcaaacattattttttaataaaaattattcttgttgtaaatttgatttgaatccagaattatgtaaagattgcccaatct

SEQ ID NO: 231727 - DNA, 295 bp, Unknown
  Bacterial polypeptide expressing nucleotide sequence isolated from the Sargasso Sea
tatgaagctaagtggatcagaaataataatcgaatgtctaaaaaaagagggcgttgagtttatctttggatatcctggtggagcagtattgcatatttatgatgcattattcaatgcaaaaaaaatcaaacatgtgcttgccagacatgagcaaggtgctactcatgctgcagatggatatgctagagcatgtggaaaacctggtgtagtcttagttacatctggcccaggtataacaaattgtgtaacaggcttagcaacagctcacatggattcaataccgatgattattatt

SEQ ID NO: 231728 - DNA, 820 bp, Unknown
  Bacterial polypeptide expressing nucleotide sequence isolated from the Sargasso Sea
ttccgtaatattcgaccggcgttgaagacgctgaacaagctcatctcgcaagagaagcacttaccggacttttcggagtggcgcgcggacattgaagtccagcgcaaggagtttccgtttccgattcccgaacaagtcggcgacgtcatcgccccgcaggcggcgatcgagctcttgtgcaagatgacggagggcaaggcgatcatctccacgggcgtcggtcagcaccaaatgtgggcggcgcagcactacaagtttgacgagccgcgcaactggttgacgtctggcggtttgggttcgatgggtttcggtttacccgccgccatcggagcccaggcggcgcgtccggatgagctcgtcgtcgacatcgacggcgacggctccttcgtcatgaacgttcaagagctcgctacgttgcacgcggagaatttgcccgtcaagtgcttcgttttgaacaaccaatacctcggcatggttgtccagtgggaggatcgattttacaaggcgaaccgcgggcacacctacctcggatcgccggacgatgacttccaagtctccaaggaggaggcgcacattttcccggatttcgtcaccatcgccaacggattccgcatcccggccgagcgcgtcatgcgcatgagcgatctcgagggcgccatcaagcgcatgattgaggcggatggtccgtatttgctcgacgtcatggtgccgcacgtcgagcacgtgttgcccatggttccgggcggcgggacatttaaggacaccatcaccaccggtgacggcagaaatccggaggagaaagacatgaagaccttgtaga

SEQ ID NO: 231729 - DNA, 756 bp, Unknown
  Bacterial polypeptide expressing nucleotide sequence isolated from the Sargasso Sea
aagctattaataactatttaaggtcgagaaaggatgaaataaatagagaaaagctttctccgtggcatcagcaaataagagaatggaaagaaaagcatggccttaatcatgaactctacaagaatgattcagacgagcatccaattttaccacaggcagccgtgcaacatatatatcaagaatctggaggcaaagcatttgttacatcagatgttggtcagcaccaaatgtttgctgctcagtactatcactttgatgaaccaagaaaatggataaattctggcggtcttggcactatgggttttggtcttccgtcagcaatgggagttaaactggcttatcctgaagaagaagtaatttgcatcactggagaaggaagtatacaaatgtgtatacaagaactctcaacatgctcacaatataaattaccaataaaaatatttagtataaataatcttgccctcggtatggtaaagcaatggcaagatatgaactatgacggtagacactcatctattagctatgaggattcattgccagattttgttgggctagcagaatcttacgggcatgttggcattaaaatcactaaaaattctgaactcaaagaaggaattgctaaagcactagccattaaagatcagttggtttttgttgatatatatgttgatccaaatgagcatgtgtatccaatgcttgtcgctcctaacggaagcttaaaagatatgtggttaggtaaaggtgaaaaaacatgat

SEQ ID NO: 231730 - DNA, 1348 bp, Unknown
  Bacterial polypeptide expressing nucleotide sequence isolated from the Sargasso Sea
caatctgctgcacatatggcagatggttttggtagagttagtagaaaacctggcgtatgttttgcaacttctggtcctggtgcaactaatttgttaactggaattgcaactgcacaagcagattctgcacctatggttgcagttactggtcaagtacctgttgcaatgattggaaaagacgcattccaagaaagtgatataattggaatggcaaatcctgctttgaaatattcatatcaacctagaacccctgaagaaattccaaccatggttaaacaaggattctacattgcagaaactggaagacctggacctgtattgttagatattcctaaagatgttcaacaaaatgaagcaaacattccatttccagatgaagttcgagttcctggatatcatccatggacagatcctgatatgcaaaatactggacgtgcagtagaattactattatccgcacaaaaaccaataattcttgcaggtggtggtgtaatcatttcatctgcatttgcagaattacaatcaatagctgagttgttaatgattcctgtggtaaccacattcaaaggtaaaggtgcatttcctgaagatcatccattatcattaggtccaattggaatgcatggacatgctgaagccaataaattaatgactgaagctgattgtgtattagcaatcggaacaagattctccgaccgttctgtaggaacatttgaagagtttgaaaagaacttgaaaattattcatatggatgttgaccctgcagaaattggaaagaatcaaacaacatctgtagctgttgtaggtgacgttcgtacatcactaagaatatttggaaaattattgatggataaagcagttagaccttctgatgacaatccttggttaaaacatgttaaagaaacaaaacaatattggcgtgaaaatctaaaattacatcctggagaaatgggtgcagcaaaaattcttagaaaattaagagaattacttccaaaggaatctatagttacaactgaagtaggacaacaccaaatgtgggcatcattattctttgatgcaattcatcctggaactttctttagttctactggcttgggtactatgggatggggattcccagctgctattggtgcaaaaactgcccgtcctgatgtacctgtagttgacattgcaggtgatggtagcttcaacatgactgaacattcactagcaacagcagtcttagaagatttacctgtaattgtattcttgattaacaattattctttaggaatggttgctcaatggcagagaactttctatgaccgacgcatggttggtgtcgaccttaagaaatgtcctgattatg

SEQ ID NO: 231731 - DNA, 541 bp, Unknown
  Bacterial polypeptide expressing nucleotide sequence isolated from the Sargasso Sea
catggagatgttgtctggagccgagatggtcgtccgatcgctcatcgatcagggtgtgaagcaggtattcggttatcccgggggggccgtcctcgatatttatgatgccctgcatacggtcggcggtattgatcatgtgctggtccgccatgaacaagcggcggtacatatggctgatggccttgcgcgtgccacgggagaagtgggggtcgtattggtcacctcagggccgggggcgaccaacgcgattaccgggatcgcaacggcttacatggattccattccgctggtgatcctctccggacaggtcgcaacgtcgctgattggctacgatgccttccaggagtgcgacatggtaggtatatcccgcccggtggtgaaacatagcttcctggtcaaacaaacggaagatatcccgcaggtgctgaaaaaagccttctggctggcagcaagcggtcgtccggggccagtggtggtggatttgccgaaggatattctgaatccggcgaagaactgccttatagctggccggactcggtga

SEQ ID NO: 231732 - DNA, 972 bp, Unknown
  Bacterial polypeptide expressing nucleotide sequence isolated from the Sargasso Sea
aacaaactttcttcagtttttcatgaggctttttctattgctgcaaatggtagacctggacctgttttaattgatattccaaaagatgttcaatttgcaaaaggtaattatcaaagttctaaagaagtaaagattgattcccatagattatttgaaccaaaaattaaagctaatgatcgaaacatagaagaggcaacaaagttaattgcaaatgcaaaaaaaccaatattttatattggtggaggatgtataaattctggtccaaaagcttctaaactagttacaaaatttgttgaggaaaccaaagctcctgcaacaatgacgctaatgggacttggtgtaataggagctaaaaataaatattctttgggaatgctaggaatgcatggaatgtatgaagctaatatggccatgcatgaatgcgatgtaatgattaatattggagctagatttgatgatagggttactggaagacttgatgcttttgctccaaattctaaaaaaatacatattgatatagatcctagcaacattaataaaactataaaaatagatgttcctattattggtgatattgaatctgttatgaatcaaattttttcatcttggaaaaataataattataaaagtcaaaaagaagatttaataaaatggtggaataaaatagaagaatggaaaaaagttgattgtttaaattataatcaaggtgaaggatcaattaaaccacaacatgctataaaaagattatatgaattgacgaaagataagaaaacttttattacaacagaggtaggccaacatcaaatgtgggcagctcaatactacaaatttgaagaacctaatagatggctaacatctggaggtttaggtactatgggttatggttttcctgccgcaataggagcacaaatagctaacccagactccttagttgtagatattgctggagatgcttccattttaatgaatatt

SEQ ID NO: 231733 - DNA, 649 bp, Unknown
  Bacterial polypeptide expressing nucleotide sequence isolated from the Sargasso Sea
atgtctaaattatacactggtgcagaaattgtatttaaatgtcttgaagatcaagacgttgaatatatttttggttatccaggtggagcggttttaccaatttatgatgagcttaaaaatcattcaacaattaaacatatattagttagacatgaacagggagcaggtcatgcagcagaaggatatgctagatcatcaggcaagcctggagttgttttagtaacatcaggaccgggcgctactaatgttgttactgctctaaccgatgcttacatggactcaattccgttggtttgtatttctggtcaggtaccaactcatttaataggaacagatgcatttcaagaatgtgatacgacaggaattacaagaccttgcacaaaacataattggttagttaaagatattaaagatttatcaaaagttatgcatgaggcttttaaagttgcaacaacaggaagacctggacctgtattaattgatattcctaaagatatccaatttgcaaaaactaattatacaaaatttaaaaaagaaaaaaaattaaatggaaaaatacataataaattttctgaaaaagaaattgatcaattaattgatttaatttcaaaagcaaaaaaaccagtgtttataccggaggtggagtaat

SEQ ID NO: 231734 - DNA, 877 bp, Unknown
  Bacterial polypeptide expressing nucleotide sequence isolated from the Sargasso Sea
gttgttatatctggtcaagtgcaaagtcatttaattggaactgatgcttttcaagagacagatatgataggagtatcaagacctatagtaaaacatagctttacagtggataaacaagaaaatattgcacaaattgttaaggaagcttttcatatagcaacttccggaagacaaggcccagtagttattgatgtgccaaaagatttaacaaatcctgatgaattatttgattttaactatcccgaaaaagctaacatcagatcctataatcccccagtgaaaccagaaaatcatcaagtttctcgggctgtagatgcaatactaactgctgagaggccagtaatttatgctggcggtggaacaatctcgagcaatgcatctgatgaattaagagagctaaatgaactgcttgattttccagtaacaaatactttgatgggtttgggagtctacccaggaacaggaaaaagatttttaggcatgctgggtatgcatggaacttatcaagcaaatatggcaatgcataatgctgatttaattattgctgtgggagctagatttgatgatcgaattactaacacgccagagaagtttgctccaaaagcaaaagttattcactttgatgtagatcattcatcagtatcaaagataattgaggcagatattgctgtattcgggcaagtcaaggactcattgaaagctattaataactacctaaggtcgagaaaagatgaaattaatagagaaaagctttctccgtggcatcagcaaataagagaatggaaagaaaagcatggccttaatcatgaactctacaagaatgattcagacagcatccaattttacctcaggcagccgtgcaacatatatatcaaga

SEQ ID NO: 231735 - DNA, 850 bp, Unknown
  Bacterial polypeptide expressing nucleotide sequence isolated from the Sargasso Sea
atgaaaattgcaggaaacgacatattaattcagtccctgataaatgagggagtggaatatatctttggttaccctgggggtgctgctcttcatatctatgatgcaatctttaatcaaaaagagatgcaacatattttagtaaggcatgagcaaggagctacacatgctgctgatggttacgcaagagctactggtaagcccggcgtagttttagttacctctgggccgggagctacaaatgcaataaccgggattgcaacagcctttatggattcaattcctatggttgttatatctggtcaagtgcaaagtcatttaattggaactgatgcttttcaagagacagatatgataggagtatcaagacctatagtaaaacatagctttacagtggataaacaagaaaatattgcacaaattgttaaggaagcttttcatatagcaacttccggaagacaaggcccagtagttattgatgtgccaaaagatttaacaaatcctgatgaattatttgattttaactatcccgaaaaagctaacatcagatcctataatcccccagtgaaaccagaaaatcatcaagtttctcgggctgtagatgcaatactaactgctgagaggccagtaatttatgctggcggtggaacaatttcgagcaatgcatctgatgaattaagagagctaaatgaactgcttgattttccagtaacaaatactttgatgggtttgggagtctacccaggaacaggaaaaagatttttaggcatgctgggtatgcatggaacttatcaagcaaatatggcaatgcataatgctgatttaattattgctgtgggagctagatttgatg

SEQ ID NO: 231736 - DNA, 996 bp, Unknown
  Bacterial polypeptide expressing nucleotide sequence isolated from the Sargasso Sea
aactcttccaatagtaaaacattcatgggtaataagagatccttcagatattgcgaaagtagtttctgaagctttttttatagcctcatctggaagacctggccctgttttaattgatatacccaaagatgtaggtcaggagttctttaattaccaaagagttttgcctggtgagattattcctaaaggatttaaaaggaatggagaaattaatgattgcgatatcaataaagcaattaaattaatagaagattctgaaagacctcttctatacgtaggaggtggggcaatatcttcaggggctcatgatgaaataaaaactttggcaaagaattatcaaataccagttaccacaaccttaatggggaagggtgcttttgatgaaaaagataatttatcagtagggatgttaggaatgcatggaactgcttacgcaaatttcgctgttacagaatgcgatcttttaattgctattggagctagattcgatgatagggtgacaggaaaattagatacttttgcacctaatgcaaaggtaattcatatagatatcgacccagcagaagttaataaaaatagacgtgtagatgttgcaattgtttctgatgtttcaaaagctgttctcaaaattaatgaacaatctctaaaaaacaaatttacttgtcagacgaaaaactggttagaaaaaattgatttttggaaaaataaacaccctttatatgacccgcctaaagaaggagaaatttatcctcaggaggttcttttaaaagtgagggaactttcaccagaagcttatgtaactacagatgtaggacaacatcagatgtgggctgctcaataccttaggaattctccaagaaaatggattagtagtgcaggcttaggaactatgggttttggattgccagcggcaattggagtaaaagcagccttacctaattcagatgtaatttgtattgcaggagatgcaagtgtcttaatgaatattcaagagta

SEQ ID NO: 231737 - DNA, 594 bp, Unknown
  Bacterial polypeptide expressing nucleotide sequence isolated from the Sargasso Sea
aagatacttatgtaacaacagaagttggtcaacatcaaatgtgggcagcacaacattacaaatttaataaaccaaatagatggatgacatctggaggtttaggcacaatgggctatgggttaccagcagcagtaggtgtgcaaattgcccaccctgaaaaattagtagttgatattgctggtgaagcctctgtattaatgacaatgcaagaaatgtccactgcagttcaatacaacttaccaattaaaatttttattttaaataatcagtacatgggaatggttagacaatggcaagagctgttacatgaaaaaaattactcagagagttactctgaagcacttcctgattttttaaaaatggctgaggcttatggttgtaagggaattaaagcagaaaacccttccgaattagatgagaaaattcaagaaatgatagattataaaggtccagttatttttgattgtcatgttgatcctaatgaaaattgttttccaatgataccttcaggaaaacctcacaatcagatgatcttaggacctaatgaacaggaagagaacaaaatcaagggtaaaggcaaagccttagtttaga

SEQ ID NO: 231738 - DNA, 1063 bp, Unknown
  Bacterial polypeptide expressing nucleotide sequence isolated from the Sargasso Sea
caggcagctacccatgcggcagatggctatgcgcgtgccaccggtaagcccggtgttgtgttggtgacttcggggcctggcgcgaccaacgcgattaccggcattgccacggcctacatggactcgatacccctggtcgtgatctcgggtcaggtccagagtcatctcattggtgaggatgcgtttcaggagaccgacatgatcggtgtctctcgccccatcgtgaaacacagctttctggtgcagaagccggaggacattccttcgaccatcaagaaggccttttttatcgcctctacgggccgccccgggccggttgtggtcgacatccccaaagatctgacccacccggagcataagttcgaatacgagtaccccgaaacggtcagcatgcgctcctatcagccgtcttccaaaggccactcgggccagattcgcaaagctgcgcgcatgctgctcagcgccaggcgacccgtgatctatgccgggggcggggttattcagggtgagggctctgcgcaaatgaccgctctggcgcgccggctgaattaccccgtgacaaatacgctaatgggtttgggtgcgtatccgggcagcgaccggcagttcctgggcatgctcggtatgcatggcttctacgaggccaacatggcaatgcaccactcggatgtaatcctagcagtgggtgcccgctttgatgaccgcgtcaccaatacggtctcgaagttctgcccgggcgccaaaatcattcatgtggatatcgacccggcgtcgatcgccaagatcgtgcctgtcgacatcccgattgttggtccggtggataccatcctcgaggagttggacaagcaggttgcactgcagatgaagagcgccgagcgcgcattgcccgatccagaggcattggcgcagtggtggcaacaaatcgacagctggcgagaggcacacggtctttggcacgggcgccggtatggcgagtctgcatcgatcatgccccaagacgcgatctgtgcgctttatgaagcgaccaacggcgaggcttacgtcacatcagatgtcggacaac

SEQ ID NO: 231739 - DNA, 1003 bp, Unknown
  Bacterial polypeptide expressing nucleotide sequence isolated from the Sargasso Sea
acgtcatgaacagggtgccacacatatggcagatggttacgcaaaggccacaggtaagcctggagtggtactggttacttccggtccgggtgcaaccaacactgtgacaggtattctaactgctcaaatggattctgtaccgctcgttatactgaccggacaaactattactcctaatttaggaaaagatgcatttcaggaagcagacgtgtttggggtaaccatgccgatagtaaaacacagttatttggtcagggatgttaaggatttatcaagggtagtgaatgaggctttccatcttgcgtcaacaggacgtccgggaccagtattagtagatttgcctaaggatgtggtatcaaacgaatgggatgaagatttctctgcagaccttgaccttccaggatataaagtccagacaagaggcagcactgatggaatcgaatatgctgcggaattactcacaaaatcaaaacagccattgctttatgtgggggccggtgcggttatttcaggagctggcaggcaggttaaaaatcttgctgaaaagctacaggctcctgttactacaactttgctgggcaaaggagctttttccgaaatgcatcctctttctgtaggaatgttgggtatgcatggtactgcatatgccaataaagcagtaattaattgtgaccttattatggctataggagcacgctgggatgaccgcataactggtaaagtcagtgaattttgtcctaatgcaaccaaaattcatattgatatagacccagctgaatttggaaaaatcattcagcctgacgtaagcgttaatggagacgcggccgatgtacttgcagaattaataccgcttgtggataagcttgacacgtcagcatggcttaaaaagattgaaaattggaaaattaagtatccgcttaaattcccaaagcggggcggtttaagggcgcagcatgtattagcagaattagatcgcttaactggctctaacgcgattatttca

SEQ ID NO: 231740 - DNA, 445 bp, Unknown
  Bacterial polypeptide expressing nucleotide sequence isolated from the Sargasso Sea
aatgcctaaattatttactggtgctgaaatagtttttaaagctttagaggatcaaaaagttgaatatatttttggttatcctggaggagcggttctccctatttatgatgaactgaaaaaccataaatcgataaaacatattttagctagacatgaacaaggcgcaggacatgctgccgaaggttatgctagatcaagtggtaaacccggtatcttgttagttacatctggtccaggtgcaacaaatgctgttacagctttgacggatgcatatatggattcaattcctttagtttgtatctctggtcaagtcccaacacatttaattggaacagatgcttttcaagaatgtgacacaacaggtatcactcgaccatgcacaaaacataattggcttgtaaaagatgttaacgatcttgctagagttttgcatttagcttttgaa

SEQ ID NO: 231741 - DNA, 1096 bp, Unknown
  Bacterial polypeptide expressing nucleotide sequence isolated from the Sargasso Sea
ggcagaaggttatgctagatcatcaggtaagcctggtgttgttttagttacatccgggcctggagcaactaatgttgttacagctttaactgatgcatatatggactctgttcctttagtttgtatttcaggtcaagtaccaacacatttaattggtacagatgcttttcaagaatgtgatactactggaattactagaccgtgtacaaaacataattggttagtaaaagatataaaagatttatcaaaaattattcacgaagcttttaaagttgctacaactgggagacccggaccagtattagtagatattcctaaagatatacagtttgcaaaagcaacttattcaaaacctaaaattgaaaaaaaactgaatggcaaatcaaaaaattattattcacaaaaagatatcgataatttgatacatttaataaataaatcgaaaaaaccaataatttattctgggggaggagtaattaactcagggccagaggccagtgaagctttaagagaatttgttcaatcaacgggttttccaataacatcaactttacaaggattaggagcatatcctggagatgataatcaatttttaggaatgcttgggatgcatggtacctacgaagctaataacgcgatgcatgattgtgatcttttgataaacattggtgcaagatttgatgacagaattactggaaagatagatgaattttctccaaaatcaaaaaaagttcatatagatattgacccttcatctattaacaagataatcaaagttgatttagcattagttggggatgttaaagaagttttaaaatctatcaataaaacttttaagaaaaaaaatcatgattttaaaaaatcaaataagcaaaatatttccaattggtgggaacaaattcaaaaatggagaacaaaaaattcactacattttaaaaatagtgatgaaacaattaaacctcaacacgctgttcaacggctttatgaactcactaaaaataatgatgtatttataacaacagaagttggtcaacatcaaatgtgggcagcacaacattataagtttaataaaccgaatagatggatgacttcggga

SEQ ID NO: 231742 - DNA, 645 bp, Unknown
  Bacterial polypeptide expressing nucleotide sequence isolated from the Sargasso Sea
ataagataataaaacctcagcatgcagttcaaagactttatgaattaacaaaagatcaagatacttttattactactgaagttggtcaacaccaaatgtgggctgctcaacattacaaatttaataaacctaatcgatggatgacatctggggggctaggaacaatgggttatggacttccagcagcgatcggtgttcaaatagcaaatccagggaaattagttgttgatatagccggtgaagcatcagttttaatgactatgcaagaaatgtcgacagcagttcagtatagattaccaataaaaatatttatcttaaacaatgaatatatgggtatggtgagacagtggcaggaacttttgcatgaaaaaaattattctgaaagctataccgcagcccttcctgattttgttaagcttgcagagtcatacggttgtgttggtattagagctaaaacaccagatgaattagatgaaaagattaaagaaatgattagtgttcaaaagccagtaatatttgattgtgtggtagataaatcagaaaattgtttcccaatgataccatcgggaaaaccgcataaccaaatgcttttaggaccagaagaggatgaagaaatttctgatgaaggaaagattttagtctaat

SEQ ID NO: 231743 - DNA, 329 bp, Unknown
  Bacterial polypeptide expressing nucleotide sequence isolated from the Sargasso Sea
tatgaagaaagaatcaggcggatctgcgcttatcagagctttggcagatgaaaatgtagaccttctctttggatatcctggaggagctgctcttcatatttacgatgcaatctatcaacaggataaagttcagcatattttagttaggcatgaacaggctgcagtccatgcagctgatggatatgccagagctacagggaaagttggaactgttcttgtaacatctggtccaggagcaacaaacgcaatcactggtattgcaactgcatatatggactctattccattggtagtaatttccggtcaggttgcaagccatttaataagga

SEQ ID NO: 231744 - DNA, 676 bp, Unknown
  Bacterial polypeptide expressing nucleotide sequence isolated from the Sargasso Sea
gattggaaatcacaacatggtttaaatcatgaaatgcacttatgtgaaacggacgataaaccaataatgccacaagcagttgttcaacatttatacaacattacaaatggaaaagcatttataacttctgatgtaggacaacatcaaatgtttgccgctcagtattatcattttgatgaaccaagaaaatggatcaattctggtggcttgggaacaatgggctttggtttacctgctgcaatgggcgcaaaacttgcatatccaaatgatgaagtaatttgtattacaggcgagggtagtattcaaatgtgtattcaggaattatctacatgcactcaatataatttacctataaaaataattaatattaataatgaggctcttgggatggttaaacaatggcaagacatgaattatggaggacgtcattcagctagcacctatcagagctcattacctaactttgttgagctagcagaatcatatggacatgttggaataaaaattgtaaaaaattctgaattaaaaagtggactcgaaaaggcactttctatgaaagatagattggtatttgtagatgtttatgttgaccctaacgagcatgtttatccaatgcttgttgcgccaaacggtagtttaaaagatatgtggctagataaagagactaaaacatgat

SEQ ID NO: 231745 - DNA, 853 bp, Unknown
  Bacterial polypeptide expressing nucleotide sequence isolated from the Sargasso Sea
gttaaaaagttttgccctaatgcaactattgttcacgtagatgtagaccctacctctatttctaaaaccattaaggcgcatatacctgtggtaggttgtttagacactgtacttaaacaactacaagatggaatagacaaaagcacaattcaaatagatcgcagtgcacaagaagattggtggcgacaaattattagctggcgcgaacaaaaatgtttgggttacaaacaaagcccttcagaaaaaatcaagcctcaagctgtcattgaagcgctttataaagcaacagacggcgaagcatacatcagctctgatgtagggcagcatcaaatgtttgcagcacagtattacccatttaaataccctcgccaatggatcaattcaggcggattaggcactatgggctttggtttaccggctgccatgggcgttaagctcgcatttcctgataaagagtcggtgtgcgtaactggcgatggttctattcaaatgaacattcaagagctttctacgtgcttgcagtacaacttagccgttaaagtcgtctctcttaacaaccgctcattaggaatggtacgccaatggcaagatatggtgtacggcggtcgtcattcatcatcttacatggactcactacctgactttataaaattagttgaaagctatggccacgttggtattcaggtaaacacacttgacgagcttcaacccgcgattgacaaagcaatgagcataacggatcgtctagtatttttagacatacttgtcgacgaaaaagaacatgtgtacccaatgcaaattaaattaggtggcattgacgaaatgtggttacgtaaaggagttaaagcataat

SEQ ID NO: 231746 - DNA, 909 bp, Unknown
  Bacterial polypeptide expressing nucleotide sequence isolated from the Sargasso Sea
tgatattgatccatcatcaataaataaaaatgtaaaagtcgatataccaattgtgggagatgttaaaacagtaatcgcatcaacgcttaaatctttggagaaaaaaaaaccaaattttttaaaatcaaataagcaacatgtttcaaaatggtgggaaaaaattgaaaagtggagatctaaaaaatctttagattatattggcagtgaagaaacaataaaaccacaatatgctatagaaagattatatgaactaacaaaagataaagatacttacataactacagaagtgggtcagcaccaaatgtgggctgctcaacattataagtttaataaaccaaatagatggatgacctcaggaggtttaggtacaatgggttatggtttgccagctgcagtaggtgttcaaatagcacatcctaaaaaattagtcattgatattgcgggtgaagcatcagtcctaatgacaatgcaagaaatgtctacagctgttcaatatagtttgccaattaaaatatttattttaaacaatgagtacatgggaatggttagacaatggcaagaattattgcatgataaaaattattctgaaagttatacagctgcacttccagattttgttaaactagctgaagcatatggatgtgttggcattagggctaaaacaccagaggaattagacgataaaattatagaaatgctgaatacagataggccagtaatatttgattgtatggtcgacaaacaagaaaattgctttcctatgataccatcaggaaaacctcacaatcaaatgctattaggacccaaagaccaagaagaaaagaaaataactggaaaaaggaagaactttagtttgatggcaactttcaaatcagcttacagtagtgcaggtaaaaaacaaaacttgat

SEQ ID NO: 231747 - DNA, 969 bp, Unknown
  Bacterial polypeptide expressing nucleotide sequence isolated from the Sargasso Sea
ggagaaattaatggttgcgatatcaataaagcaattaaattaatagaagattctgaaagacctcttctttacgtaggaggtggggcaatatcttcaggagctcatgatgaaataaaaactttggcaaagaattatcaaataccagttaccacaaccttaatggggaagggtgcttttgatgaaaaagataatttatcagtagggatgttaggaatgcatggaactgcttatgcaaattttgctgttacagaatgcgatcttttaattgctattggggctagattcgatgatagggtgacaggaaaattagatacttttgcacctaatgcaaaggtaattcatatagatatcgacccagcagaagttaataaaaatagacgtgtagatgttgcaattgttgctgatgtttcaaaagctgttctgaaaattaatgaacaatctctaaaaaacaaatttacttgtcagacgaaaaactggttagaaaaaattgatttttggaaacataaacaccctttatatgacccgcctaaagaaggagaaatttatcctcaggaagttcttttaaaagtgagggaactttcaccagaagcttatataactacagatgtaggacaacatcagatgtgggctgctcaatatcttaggaattctccaagaaaatggattagtagtgcaggcttaggaactatgggttttggattgccagcggcaattggagtaaaagcagccttacctaattcagatgtaatttgtattgcaggagatgcaagtgtcttaatgaatattcaagaattaggaaccttatctcaatatggtctaaaggtgaaattgattattatcaataatcgctggcaaggtatggtaagacaatggcaggaaagtttctatgatgaaagatattcctcatctgatatgagttgtggagaacctgattttgtaaaacttgctgagtcttttggagttaaggga

SEQ ID NO: 231748 - DNA, 970 bp, Unknown
  Bacterial polypeptide expressing nucleotide sequence isolated from the Sargasso Sea
ttttatactggaggtggagtaattaattcaggacctaaagcaagtgattttttaagagagctagtacactcaactggctttccaattactagcaccttacaaggtttaggttcatacccagcagatgataatcaatttttaggcatgttgggtatgcacggaacttacgaagctaacaatgcaatgtatgaatgtgatttgatgataaatatcggcgcaagatttgatgatcgtataacaggaaaaattgatgaattttctccaaaatcaaaaaaggtacatattgatattgatccttcatcaattaataaaaatgtgaaagtggacttagcaattgttggggatgttaaaacggtagttgcatcaaccataaaaactttaaacaagaaaaaaccaaattttgttaaatcaaataaacaaaagacttctaagtggtgggaaaaaattcaaaagtggagatcaaaaagatctttagattatattggtagtgaagaaacaatcaaaccacaatatgctattgaaagactgtatgaacttactaaagataaagatacttatatcactacagaggtaggtcaacatcaaatgtgggcagcccaacattataaatttaataaaccaaatagatggatgacatcaggtggattaggtaccatgggatatggtttgccagctgctgttggagttcaagttgcacatccaaaaaaattagttatcgatatagcaggagaagcatctgtattaatgacaatgcaagaaatgtcaactgccgttcaatatggtttgccaattaaaatttttattttaaataatgaatacatggggatggtaagacaatggcaagaattactccacgaaaaaaattattccgaaagctatacagctgcactcccagattttgtgaaattagctgaggcatatggctgtgttggattaagagcaaaaactccagaagaaattagacgataag

SEQ ID NO: 231749 - DNA, 667 bp, Unknown
  Bacterial polypeptide expressing nucleotide sequence isolated from the Sargasso Sea
ttggaatcgagagtttaaaattttagaaaaacaagaactcaatcaggtgatttacaaatcaattaggccgaaatctggaaaaataaaaatggccgaagttataaatttactatctaaaaaagcagacaagaaaaccattgtaacaaccgatgttgggcaacatcaaatggtcacttcaagatattataaatatgaaaatacaagatcaaatataacatcaggaggtttaggcacaatgggctttgctcttccagcagcaattggcgcaaagttaggagcaaaaaacaaaacagtaattgcgattataggagatggagggtttcaaatgaacatacaagaacttggaacaataatgcaatcaaatattgatattaaaataatcattttaaacaataattttttgggaatggttaggcaatggcaagaaatgttttttaataaaaggtattcttttacagacatacaaaacccaaattttataaaaattgccgaaggatatggtatcaaggggaataaaatagaaaaaagatctttattagatagcggaattaatcaattacttaaaagcaaaggatcatttattctagaggttatttgtgaaaaagaagaaaatgtttttccaatggtaaaaacaggcagtagtgtctctgaaattattttaaaatga

SEQ ID NO: 231750 - DNA, 626 bp, Unknown
  Bacterial polypeptide expressing nucleotide sequence isolated from the Sargasso Sea
atacgcaattcaaagactatatgaattgactaaggataaagacacttatgtaacaacagaggttggtcaacatcaaatgtgggcagcacaacattataaatttgataaaccaaatcgatggatgacctctggagggttaggaacgatgggatatggcttacccgctgcaattggagttcaaatagcaaatcctggtaaattagtcgtagatattgctggagaggcctctgttttaatgacaatgcaagaaatgtcaacagcagtgcaatataggttgcctataaagatatttatattgaataacgagtatatgggaatggttaggcagtggcaggaacttttacatgaaaaaaattattctgaaagttatactgcagcattacctgattttgttaaactcgcagagtcgtatggctgcgttggtataagggcaaaaactccaagtgagctcgatgacaaaataaaggaaatgatagatgtagacaaaccagtaatatttgattgtttagttgacaaaacagaaaactgttttccaatgataccatctggcaaaccccataatcaaatgattttagggcctgaagaagaagaagaaatttcagatgagggaaaaattttagtttgat

SEQ ID NO: 231751 - DNA, 882 bp, Unknown
  Bacterial polypeptide expressing nucleotide sequence isolated from the Sargasso Sea
atgctttctcgcttaattcaaagaaaattcatattgatattgatgaaagtaatatcaacaaaacaataaatgttgatgttccaataataggtgatgttaaacaagttgtcgaaaaaatgatttcaatttggaaagacaaaaaatataaaatagatactgattcattaaaattgtggtgggataaaattaataaatggaaagaagtagattgcttaaactacaataatgaaggcaaacagattaaacctcagtatgcggtccaaagactctatgaattaacaaaaaatacaaaaacatttgttactactgaagtaggtcagcatcaaatgtgggctgctcaattctataaatttgaggaaccaaacagatggcttacatcaggtggtttaggaactatgggatatggttttcctgctgctattggagctcaaattgggcatccagatgctctagtagtagatatagcaggagatgcctctatactaatgaacattcaagaaatgagcacggctgtacaatatagattacctgtaaaaatatttattttaaataatgaatacatgggaatggtaagacaatggcaagaacttttacatggtggaagatattctgaaagttacactgatagcttgcctgattttgttaaattggctgaaagttataaagctgttggtttaagagcaaaaacaactgatgaacttgatgatgtcataactcaaatgatagaaacaaaaaatacagtaatagcagatatttgggttactaaagaagaaaattgcttcccaatgattcaaagtggttcagctcataatgaaatgatgttaagtaaagatcaaaaacaagataaaagatcagccgaaaaaggaaaaattttagtttaat

SEQ ID NO: 231752 - DNA, 529 bp, Unknown
  Bacterial polypeptide expressing nucleotide sequence isolated from the Sargasso Sea
atgccaaaattatattcaggagctgaaatagtattcaaatgtttggaagatcaaaatgttagccacatatttggttatcctggaggagcagtccttccaatatatgatgaattaaaaaattttaattcaataaaacatattttagtaagacatgaacagggtgcaggacatgcagcagaaggatatgcaagatcaactgggaaaccaggtgtattgttagtaacttcaggtcctggcgccaccaatgctgttactgccttaacagatgcttacatggactctgtgccgttagtttgcataacaggtcaagttccaacacatttaattggtaccgatgcatttcaagaatgcgacacaacaggaattactagaccttgtactaaacataactggttagtaaaagatgtaaatgacttagctgaaataatgcataaagcttttgaagtagcgacaacaggtagaccaggaccagttttagtcgatatacctaaagatattcaatttcaaaaagctaaatacaaaaattata

SEQ ID NO: 231753 - DNA, 417 bp, Unknown
  Bacterial polypeptide expressing nucleotide sequence isolated from the Sargasso Sea
aatgccaaaattatattcaggagccgaaatagtattcaagtgtcttaaagaccaaggtgtgtccaatatctttggttatccaggtggagccgtccttccaatatatgatgaattaaaaaattttaattcaattaagcatattttagtgaggcatgaacaaggagcaggccatgcagcagaaggttatgcaagatcatcaggaaaaccaggagtgctattagtaacttctggaccaggagcaactaatgccgttacagcattaacagatgcatatatggattctattcctttagtttgtatatctggacaagtgccaactcatttaattggaacagatgcgtttcaagaatgtgatacaacaggtatcactcgtccatgtacaaaacataattggcttgttaaagatataaaagattt

SEQ ID NO: 231754 - DNA, 337 bp, Unknown
  Bacterial polypeptide expressing nucleotide sequence isolated from the Sargasso Sea
aatgtcaaaattatttacaggagcagaaattgtatttaagtgtctggaagaccaaaaggtagagtacatttttggatatcctggtggagcagtgttaccgatttatgatgaattaaagaatcattcttctattaaacatattttagttagacacgaacaaggtgctggacatgcggctgaaggttatgcaagatcttccggaaagcctggagtagttttagtaacttctggaccaggagctactaatgttgtaacagctttaacagatgcatacatggactcagttccgttagtatgtatatcaggacaagtacctactcatctaataggtaatgat

SEQ ID NO: 231755 - DNA, 910 bp, Unknown
  Bacterial polypeptide expressing nucleotide sequence isolated from the Sargasso Sea
tatgaagctaatatggctatgcatgattgtgatttacttatcaatgtcggcgcacgttttgatgacagaataactggtaaggtagatgaattttcgcctaactcaaaaaagatacatatagatattgatccatcatcaattaataaaactattgatgtcgatgttgcacttgttggcgatgttgctcatgttcttgaggatgctattaaactttggaaatctaatgtctataagaccgataaacctgcagttaaaagctggtggagtatgattgataagtggaaagaaaaagactcgcttagctttaatgactctaaaacaactataaaacctcaatttgcaattcaacggctttatgaattaacgaaagaaaaagacacttatgtcacaactgaagttggacagcatcaaatgtgggctgcacaattttataagtttaataagccaaatagatggataacctctggaggacttggaaccatgggctttggtttacctgcggcaataggagcgcaagttgcccatcctgataaactagtaattgatattgcaggtgaagcatctattttgatgtgtatacaagaaatgtcgacggctattcaacacaagcttccagtaaaaatatttattatcaataatcaatacatgggaatggttagacaatggcaagagctacttcatgataaaagatactctcatagttatacagatgctttgcctgattttgttaaattagctgaagcttatggcgcaaaaggaataagagttcaaaaaccatctgagttagataaaggtattcaagaaatgattgattatgacggaccagttatttttgattgtgtagttgacgaaaatgaaaacgtttatccaatgataccgtctggaaaggcgcataatgaaatgttactag

SEQ ID NO: 231756 - DNA, 736 bp, Unknown
  Bacterial polypeptide expressing nucleotide sequence isolated from the Sargasso Sea
aaatcaaacaaacaaaaaatttcaaaatggtgggaaaaaattgaaaaatggagatctattaaatcttttaattttgttaacagtacagagactataaaaccacaatatgctgttcaaaaactatatgaattaacaaaaaataaggacacatatataacaacagaagtaggccaacatcaaatgtgggcagcgcaacactacaagtttgataagcctaatcgctggatgacatctggtggacttggtacaatgggatatggtttgccagcagctgttggagtacaagtagctcaccctgagaaattggttattgatatagctggagaagcatcagtgttaatgacaatgcaagagatgtcaacagcagtgcaatacaaccttccaattaaaatttttattttaaataatgaatacatgggaatggttagacagtggcaagaattacttcatgataaaaattattcagaaagttataccgctgcattacctgactttgtaaaattagcagaagcttatggatgtgttggtataagagctactaagccagatgagctggatgataaaatattagaaatgattaatataaataaacccgttatcttcgattgcttagttgataaggaagagaactgttttccaatgattccatcaggaaaacctcataatcaaatgcttttgggtccaaaagatcagaaggagaataaaataaaaggcaaaggaaagactctagtttaat

SEQ ID NO: 231757 - DNA, 636 bp, Unknown
  Bacterial polypeptide expressing nucleotide sequence isolated from the Sargasso Sea
ttaagccacaacatgctgttaaaagattgtatgaattatctaaacataaagatgcctatataaccactgaagttggccagcatcaaatgtgggcagcacagcattacaaatttaataaaccaaatagatggatgacatctggtggccttggaacaatgggttacggtcttccagcagcagtcggagtacaagtcgctaatcctgataaactagttatcgatatagcaggtgaggcgtctgttttaatgacaatgcaagagatgtcgacagcggttcaatataatctaccgattaagatatttattttaaataatcagtacatgggaatggttagacaatggcaagaacttctccatgaaaaaaattattctgaaagttatacagcagcactaccagattttgtaaaacttgcagaggcatacggatgcataggcatacaagcaaaaaaaccggatgagttagatgaaaaaattaatgaaatgttgaacgttaacaaacctgttatttttgattgcgtagttgatccaaacgaaaattgtttccctatgataccttcaggaaaacctcacaatcaaatgcttcttggaccagaagacgaggaagagatttcaagtgaaggaaaggttttagtttaaa

SEQ ID NO: 231758 - DNA, 403 bp, Unknown
  Bacterial polypeptide expressing nucleotide sequence isolated from the Sargasso Sea
catgactagccaaatgaccggagccaaaatggtagtaaaagcccttaaggatcaaggggtggatactgtgtttggatatccgggtggagcagtactgccaatctacgatgaaattttccaacaaaatgagataaggcatatcctagttagacatgaacaaggagcagttcatgcggctgaaggatacgctaggtcaactggaaaacctggagtggttttagtaacatctggaccaggcgcgaccaacgctgttacaggattgaccgacgctttaatggattctattcctttagttgttcttactggacaggtacctacctttatgatcggctcagacgcttttcaggaagcagatacggttgggatcacaagaccatgtactaaacacaatttgggctgttaa

SEQ ID NO: 231759 - DNA, 915 bp, Unknown
  Bacterial polypeptide expressing nucleotide sequence isolated from the Sargasso Sea
cagtttcctggtgcagtcactggaagagctgccgcgcatcatggctgaagcttttgctgtggcgaattccggtcgtccggggccggttctggttgatatcccgaaagacatccaattggccagcggtacgctggagccgtattttacgacagtcaaaaacgtagaggttttcccgcacgctgacgttgagcaggcgcgtaaaatgctggcacaagcgcagaaacctatcctgtacgtaggtggcggcgttggtatggcgcaggcggtcccggccctgcgtgaatttatcgcggtaacccaaatgccggtcgcctgcacgttgaaggggctgggcgcagtagaggctgactacccatactatttgggtatgttgggaatgcacggcactaaagcggcaaatttcgcggtgcaagaatgtgatttactgattgcagtgggcgcgcgttttgatgaccgggtaaccggcaagctgaataccttcgcaccaaacgccagcgtgatccacatggatatcgaccctgcggaaatgaacaagctgcgccaggcgcacgtagcattgcagggtgatttaaattctctgctgccggcattgcagcaatcgctgaagattgacgcatggcgtcagcatagtgctgaactgcgcacagagcatacctggcgctatgatcatcccggtgaggctatctacgcgccactgttgttgaagcagttgtccgatcgcaaacccgcggacagcgtagtgacaacggatgttggccagcatcagatgtggtcggcgcagcatatgacctacacccgcccggaaaattttatcacctcgagcggcctgggcacgatgggctttggcttgccagcagcggttggcgcgcaggttgctcgcccgaacgatacggtaatctgtatctccggtgacgg

SEQ ID NO: 231760 - DNA, 509 bp, Unknown
  Bacterial polypeptide expressing nucleotide sequence isolated from the Sargasso Sea
aatgccaaaattatattcaggagctgagattgtatttaaatgtttagaggatcagggcgtcagtcatatttttggatatcctggaggagcagttcttccaatttatgatgaattaaaaaattttaattttatcaaacatattttagtaaggcacgaacaaggtgccggacatgctgcggaaggttatgcaagatcaacaggtaaaccaggtgttttattggtaacatctggacctggcgcaacaaatgccgttactgcattgacagatgcatatatggactctgtcccgttagtttgtattacaggacaagttccaactcatctaattggaactgatgcatttcaagagtgtgacacaactggaattactagaccttgcactaaacataattggctagttaaagatattaatgatctatcagagataatgcataaagctttcgaagtggcaaccactggtagaccaggaccagtgttagttgatattccaaaggatatacaatttcaaa

SEQ ID NO: 231761 - DNA, 957 bp, Unknown
  Bacterial polypeptide expressing nucleotide sequence isolated from the Sargasso Sea
aattaaacatattattagtaagacatgaacaaggtgcatgtcatgctgcagagggttatgctagatcttctggaaagcccggagtagttttagtaacctctggaccaggcgctactaatgttgtaacagctttaactgatgcatacatggactcagttccattagtctgtatatcaggacaagtacctactcatctaattggtactgatgcatttcaagaatgtgatacaacaggaatcactagaccttgtacaaaacataattggttagtaaaagatgttaaagatttatcaaaaatcattcatgaggcttttagagttgcaactacaggcagaccaggtcctgttttagtagatattccaaaagatattcaatttgctaaggttagttattcgaaaccaaaaaaagagaaaaaatcaaatgttaagttgcataataaattttctcaaaatgatatagatgaattaattaatctaatttctaatgcaaaaaaacctgtaatctatacaggaggtggagttatcaattctggaccaaaagcaagtgaaacattaagagaatttgttagactaattggttttccaattacatcaactttacaaggtcttggtgcatttccaggtgatgacagtcagtttataggaatgctaggcatgcatggaacttatgaggcaaacaatgctatgcatgactgtgatttattaattaatataggagcaagatttgatgataggataacaggtaagatagatgaattttcacccaaatctaaaaaagttcatattgatattgatccatcttcaataaataaaattataaaagtagatttagcaattgtaggggatgttaatgaagttcttaaaacagttataaaaaaaatcaataaaaaacataatggctttaaaacttctaataaacaaaatacatcaaagtggtgggaacagatccaaaaatgag

SEQ ID NO: 231762 - DNA, 436 bp, Unknown
  Bacterial polypeptide expressing nucleotide sequence isolated from the Sargasso Sea
aatgccaaaattattaactggagcagaaatcgtattcaagtgtcttgaagatcaaaaggtaaaccatatttttggttatcctggtggagctgtgcttccaatatatgatgagttaaaaaatcatccttctattaaacatattcttgtaagacacgaacaaggagcaggtcatgcagcagaaggttatgcaagatcatcaggaaaacctggtgttgttttagttacttcaggacctggtgctactaacgtcgtaacagctttaactgatgcatacatggactcagttccaatggtttgtatttcgggccaagtaccaacacacctaattggtacggatgcatttcaagaatgtgacacaacaggaattacaagaccatgcacaaagcataactggttagtcaaagatattaatgaactttcagaatgttatgcatga

SEQ ID NO: 231763 - DNA, 958 bp, Unknown
  Bacterial polypeptide expressing nucleotide sequence isolated from the Sargasso Sea
ttgcacttctgggagacctggccctgtcgtaatagacgttcctaaagatactactgcgccagataagttatatgaatttaaatatcctaatgatgtaaatattagatcttataaacctccaattgatcctgatccaagacaaattgaaagagccgtagatgcaatcatagaatcaaataaacctgttatttatgctggaggtggtgcaataaatagcaatgcctctgaagagcttattcgattaaatgaaatcttagattttccagttaccaatactcttatgggattaggtgtttatcctgctactcataaaagattcttgggaatgcttggcatgcatgggacataccaagcgaatatgtcaatgcataatgcagatttgataattgcaattggagcaagattcgatgacaggattaccaacacaccaaaattatttgctcctaaagcaaaaataatacatttagatgttgattactcatcagtatctaaaattattgaggcaaatattgcagtatttggtcaagttaaaaacgcattattagagatgattaaattattagaagttaaaaaagaattaattgacccaaaaaagattctcccttggaaagaacaaatttcggattggaaatcacaatatggtttaaatcatgaaatgcacttatatgaaacggacgataaaccaataatgccacaagcagttgttcaacatttatacaacattacaaatggaaaagcatttataacttctgatgtaggacaacatcaaatgtttgccgctcagtattatcattttgatgaaccaagaaaatggatcaattctggtggcttgggcacaatgggctttggtttacctgctgcaatgggcgcaaaacttgcatatccaaatgatgaagtaatttgtattacaggcgagggtagcattcaaatgtgcattcaggaattatctacatgcact

SEQ ID NO: 231764 - DNA, 415 bp, Unknown
  Bacterial polypeptide expressing nucleotide sequence isolated from the Sargasso Sea
atgccaaaattattgagtggagcagaaattgtatttaaagcactagaagaccaaaaagttgaatatatttttggctaccctggaggtgctgtattgccgatttatgatgaattaaaaaatcataaatctataaaacatattttagcgagacacgaacaaggtgcaggtcactccgcagaggggtacgcgcggtcaagtggtaagccaggagttttgttagttacttctggacccggcgctaccaacgcagtaacagctttaacagatgcttatatggactcagtacctcttgtttgcatatcaggacaagtaccaactcatttaataggaactgatgcatttcaagaatgtgatacaactggaataactcgaccatgtacaaaacataattggcttgtgaaagacgtaaaatgat

SEQ ID NO: 231765 - DNA, 907 bp, Unknown
  Bacterial polypeptide expressing nucleotide sequence isolated from the Sargasso Sea
tttatagacgtaccaaaagatacaactgctccagataaactttttgaatttaattatcctgatgaagtaaatattagatcttacagcccaccgattgacccagaaaaaaatcaaatagaaagagctgttgaagccataattgcaagtgaaaaaccagtaatctatgcaggtggaggagcaattaatagtaatgcatcttcagaacttattaaattgaatgaaattttagattttccagttactaacaccttgatgggacttggagtatatccagccacagatgagagattccttggaatgttaggaatgcatggaacttatcaggcaaatatggcaatgcataatgcagatttaattattgctattggggcaagatttgatgacagaatcacaaacacaccaaaattatttgcaccaaatgcaaaaattattcattttgatgttgatcattcttctgtttcaaaaatcattgaagcaaacattgctgtttttggacaggttaaaaactccttaaatgaaataattaaattgtgtgaactaaaaaaagaaatgattaatacaaaaaaaattagctcatggaaaaatcaaattgaggaatggaaaaaatctcatggtttgaatcacgacatgtatcttgaagattcagatgattctccaataatgcctcaggttgtagttcaacatgtttacaacataacaaagggaaaggcatttgttacatctgacgtcggccaacatcagatgtttgctgcccaatattatcattttgatgaaccaagaaaatggataaactctggtggtttaggaacaatgggttttggtctgccgtcagcaatgggggtcaaacttgcttttccaaatgatgaggttgtctgcattacaggcgagggcagtattcaaatgtgta

SEQ ID NO: 231766 - DNA, 955 bp, Unknown
  Bacterial polypeptide expressing nucleotide sequence isolated from the Sargasso Sea
ataggaatgttaggaatgcatggtacatatgaagcaaatatggctatgcatgattgtgatgtaatgctatgcgtaggtgctagatttgatgataggataactggcaatttaaaatatttctctcctaattctaagaaaatacatattgatatagatccatcttcaataaataaaaacgttaaagtggacatagctctagtgggtgattgttattttgtattagatatgatgttgaaggaattaaaaataaataaaagtaaacttgatacaaaaagtatagataaatggtggcatactataaataaatggaagaaaaaagactgcttgtcttttactgactctgataaaattattaaacctcaaaaagctcttaaggttctaaatgaagctttaaaaggcaaagatgcattcattactacggaggtaggacaacaccagatgtgggctgctcaatatttagatttttataaacctaatagatggatgacgtcaggcggtttgggtaccatgggatatggcttccctgcggccataggagttcaagttgctcatcctaaaaagccagtaatttgtgttgcgggcgaggcatcttttttaatgaatatgcaagaattatcttctttgagacaacttaatattcctgtaaaaatatttattttgaataatgaatatatgggtatggttagacagtggcaacagttttttcatggaggtagatatgcagaatcgtatacggattccttacctgattttatatccttagctaattcttttggaataaaaggaatgagagttatggatccaaataaattaaaaagttctataaaagaaatgttagatcatgacggccctgtactgatggatgtttgtgttgcaaaaatggaaaatgtttttcctatgattcctgctggtgcagcccataatgagatgaaattaagtgacaaagatgataaag

SEQ ID NO: 231767 - DNA, 863 bp, Unknown
  Bacterial polypeptide expressing nucleotide sequence isolated from the Sargasso Sea
cggaaagctcgacaccttcgccccccgggccagggtgatccactttgagattgacccggccgaaatcggcaagacccgccgccccgatgtggcggtgctcggtgatctgggcctgagcgtggcgcgcttggtggagctgagcctgcagcagcaggtgcaacccagcacggccccttggttggcgcgcatcgccgagtggaaacagacctatcccctcaccgtgcctcccgccgaaggccccctcttccctcaggaggtgctgctggccgttcgcgagctggcaccgaatgccatcgtcaccacggacgtgggccagcaccagatgtgggcggcccagtacctgcgcaatgggccccggggctggatcagcagtgccggtcttggcaccatgggcttcggcatgccggccgccatgggcgcccaggtggcttgccccgatcgtcaggtggtgtgcatcgcgggtgacgccagcatcctgatgaacattcaggagttgggaaccctggcggcctatggccttccggtgaaggtggtgatcgtcaacaaccactggcagggcatggtgcgtcagtggcaggagagcttctacgaggagcgttattcggcctccgacatgctcaatggcatgccggacttcgtggctcttgcccgctccttcggtgtggatggcgtgcacatccgcgagcgggagtcgttgaagcgtgatctcgaggcggcgctcaaggcccccggtccgatgttgatcgacatccacgtgcgtcgtggtgagaactgctatccgatggttcccccgggcaaaagcaatgctgaaatggtgggccttccggctcccatgccggttcttaatgccccgacctcttgat

SEQ ID NO: 231768 - DNA, 592 bp, Unknown
  Bacterial polypeptide expressing nucleotide sequence isolated from the Sargasso Sea
aatgactttaatgggtctgggtgttattgcatcctcagacaaaaattctttagggatgttaggtatgcacggtatgtatgaagcaaatatggcaatgcatgaatgtgatgttatgattaacattggtgctcgatttgatgatagagtaactggaagattggatgcattttcacctaactcaaaaaaaattcacatagatattgatgcaagtaatattaataaaacaataaatgttgacgttccaataataggtgatgttaaaaatgtagttgaacagatgattagtatgtggaaaaataaaaaatatcaacttgataaaaatacattaaacgaatggtgggataaaattaataaatggaaagaggttgattgtttaagttataataataatagcaagcaaattaaacctcaatatgcagtacaaagactttacgaattaacaaaaaacacaaaaacttttgttacgactgaagtgggtcagcatcaaatgtgggcagcacaatactataaatttgaagaaccgaacagatggttaacttctggtgggcttggaacaatgggctatggttttccagccgcgataggcgcacaa

SEQ ID NO: 231769 - DNA, 1030 bp, Unknown
  Bacterial polypeptide expressing nucleotide sequence isolated from the Sargasso Sea
aacaaatacattgatgggtctgggagtttacccaggaacaggaaaaagatttttaggtatgcttggtatgcatggaacttatcaagcaaatatggcaatgcataacgctgatttaataattgcagtgggagctagatttgatgaccgcattaccaatacgccagagaaatttgctccaaaagcaaaagttattcattttgacgtagaccattcatcggtatcaaaaataattgaggcagatattgcagtatttggacaagtcaaggactccttgcaagccattaataaccatttaaagtcgagaaaggatgaaataaagaaggaaaagctttctccttggcatcagcaaataagcgaatggaaagaaaagcatggccttgatcatgaactctacaagaataattcagatgagcatccaattttacctcaagcagttgtgcaacacatatatcaagaatctgaaggcaaagcgtttgttacatcagatgttggtcagcatcagatgtttgctgctcagtattatcactttgatgaaccaagaaaatggataaattctggcggtcttggaactatgggttttggtcttccttcagcaatgggagttaaattggcttatccagaagaagaagtaatttgcattactggagagggaagtatccaaatgtgtattcaagaactatcaacatgttcacaatataaattaccaataaaaatatttaacattaataatcttgccctcggcatggtaaagcaatggcaagacatgaattatgaaggcagacattcatctattagctatgaggactcattaccagattttgttggactagcagaatcttatgggcatgtaggtattaaaattacaaaaaattctgaacttaaagagggaattgctaaagcactatctatgaaagatcagttggtctttgttgatatatatgttgatccaaatgagcatgtatatccaatgcttgttgctcctaatggaagtttaaaagatatgtggctgggtaaaggtaaaaaaacatga

SEQ ID NO: 231770 - DNA, 958 bp, Unknown
  Bacterial polypeptide expressing nucleotide sequence isolated from the Sargasso Sea
tttttccaaattccggtaacaacgacacttatggggaaaggagcttttgaagatcaagatcaattagctcttggaatgcttgggatgcatggcacggcttatgctaatttctcagtaagtgaatgcgatttattattagctgtaggggcacgctttgatgatcgagttacgggtaaattagatgattttgcttgccatgctcaagttattcatattgatattgatccagcggaaataagtaagaatcgaattcctcagatttctttggttggagatgtaaaggttatattacaagaattattaaaagaacagctttatgaatctgattttgatttagctcaaacagatccatggagaaaacgaatttcacgttggaagcagacctatccattgattgttccgtctaatgagaattctttatctcctcagaaggttatttctttagttaatctttttaaaaaagatgctttctttacaactgatgtaggacaacatcaaatgtggtccgcacaatttttaaattgtgaacctcgtcattgggcatcaagtgcgggtctcggtacaatgggatttggtttacctgctgcaataggtattcaagttgcctttccaaacgagagtgttgtctgtattacgggagattcaagtttccaaatgaatatacaagaattaggtactattgcacagtatgatttaccgattaagattgtaattgttaataatcattggcaaggtatggtaagacaatggcaacaatcgttctatggtgagcgatattcgcattctaacatggagaagggagcccctaatttttctttagttgcggaatcatatggtattaaaggtgtaaagctagcaaaaacagaaacttttgaagaagattttttacaagctctatctttgccaggtccagttctcattgatgttgttgtaactgaggatgaaaattgttacccaa

SEQ ID NO: 231771 - DNA, 413 bp, Unknown
  Bacterial polypeptide expressing nucleotide sequence isolated from the Sargasso Sea
aatgaaaaaagggaaaagcaatactaaaaaatattcaaattctggagaatcaatcatttctggtgcagaggcagttattcgctctttattatcagaaaaagttgatttgttatatggttatcctggaggtgctatcatgccagtatatgatgaattatttaagtatagggataagcttaatcatattttagttcgacatgagcaaggtgctactcatgctgcgcaaggttatgctcgcgcctcaggtaaagttggagtagtaatagcaacctcaggacctggagcaacaaatttggttactggcattactgatgcccagattgattccaccccattagtatgcattactggtcaagttgcctcacatttacttggatcagatgcttttcaagaaactgatattataggtattt

SEQ ID NO: 231772 - DNA, 520 bp, Unknown
  Bacterial polypeptide expressing nucleotide sequence isolated from the Sargasso Sea
aatgtctaaattatattcaggtgcagaaattgttttcaaatgtcttgaggctcaagatgtagaatatatatttggatatcctggtggtgcggttcttccaatttatgatgaattaaaaaatcatgaaagtataaaacatattttagcaagacatgaacaaggtgcaggacatgcagctgaaggttatgcaagatcctcgggtaagcctggtgttgtattagttacttctggaccaggagcaacaaatgctgtcaccgctttgacagatgcatacatggactctataccgttagtttgtatatctggacaagttccaacacatttaattggaacagatgcatttcaggaatgcgatacaacaggaataacaagaccatgtacaaaacataattggcttgtaaaggatgtaaaagatttatctaaaattatacataaagcttttgaagttgccacgactggaagaccaggacctgttctagttgatataccaaaagatattcagtttcaaaaaacaaaatat

SEQ ID NO: 231773 - DNA, 319 bp, Unknown
  Bacterial polypeptide expressing nucleotide sequence isolated from the Sargasso Sea
aatgtcaaaattatatacaggcgcagaaatagtttttaaatgtatggaggatcaaaaagttgaatttatttttggttatcctggtggcgccgtattaccaatttacgacgaattaaaaaatcatgatagcattaaacatatacttgcacgacacgagcaaggagcaggacatgctgctgaaggttatgcaagatcatgtggaaaacctggtgtagttttagttacatctggtcctggtgcaacaaatgttgttactgccttaacagacgcatacatggattctattccattagtatgtatttcaggacaagttccaaca

SEQ ID NO: 231774 - DNA, 813 bp, Unknown
  Bacterial polypeptide expressing nucleotide sequence isolated from the Sargasso Sea
tatgctaagcaagcaaaaataattcattttgagattgatccagctgaggtaaataaaaatgtaaaagttgatttagctattttgggtgattgtaataaaacattaaatgagataattccttatgttaaaaataaagatcactccatttggattaatcgatttgattcattgatgaaaattgagaaaaaaaaggttattcaagatgatttatttcctaaaaaaaatggattaacaatgggtgagtctataaatgcaataaataaagttacaaatggaaatgctattatcgtaactgatgttggacagcatcaaatggcagcatgtagatatgcaaaatttacaaaatctaagagcaatattacttcagggggacttggaacaatgggttttgctttacctgcagcgatcggagctaagatgggagatcctaaaaggcaagtggtagcagtgattggtgatggtggatatcaaatgacgattcaagaacttggaacgatatttcaatacaaagttgctgttaagattgttgttttaaataatgattttttaggaatggttagacaatggcagcaaatgttttttgaaaaaagatatgcatcaactgaaatggtaaatccagattttgttgctattgcgaaaggttactatataaaggctgaaagggtaacaaaaagaaatgacttagactcagccataaatagaatgctgttaaatgatgagccatattttcttgaaatatgcgttgaaaaagaggataatgtttttcctatgattccatctggagcatctgtttccgaatataagattatcata

SEQ ID NO: 231775 - DNA, 301 bp, Unknown
  Bacterial polypeptide expressing nucleotide sequence isolated from the Sargasso Sea
atggcaaatttaatgagtggagcagaaatagtcttcaaagttttggaagaccaaggtgtaagacatatctttggttatccaggaggagctgtactacctatttatgacgaactaaaaaatcataacaaaataaaacatatattagttcgtcacgaacaaggagctggtcacgctgcagaaggatatgcaagatcttctggtaaacctggagtgctgcttgtaacttcaggacctggtgcaaccaatgcagttactgctttgacagatgcgtatatggattcagtaccaatagtttgtatta

SEQ ID NO: 231776 - DNA, 826 bp, Unknown
  Bacterial polypeptide expressing nucleotide sequence isolated from the Sargasso Sea
atcacaaaaaaaacttaacggtaaaactcataataatttttcacaaaaagaaattgatgaattaattaaattaatgagcaaatcatcaaaaccaattttttatactgggggtggagttgtgaactctggtccaagagcaagtgaacttttaagagaacttgtagatttgacaggttttccaattacttcaacattacaaggtcttggatcatttccaggggatgataaccaatttttaggaatgcttggtatgcacggctcttacgaagcaaataatgctatgcatgattgtgatttgatgattaacattggggcgagatttgatgatagaattacaggaaagatagatgaattttcacctaattcaaaaaaagttcatatagacattgatccctcatcgattaataaaaatgtaaaagttgatttaccaattgtaggagatgtagctgaagttattggatcaacaatgaaaactataaagaaagtgaaaccaaattttgcaaaatcaaataaacaaaagatatctaaatggtgggaaaaaatccaaaaatggagatctgtaaattcattcaattttataaatagttctgagaccataaaacctcaatatgctattcaaagactttatgaactaactaaaaataaagaaacttatgtaactaccgaagtaggtcagcaccagatgtgggccgcacaacattataagttcaataaacctaatcggtggatgacttcgggaggtctaggcaccatgggatatggtttgccagcagctgtaggagttcaagtggctcacccaaataaactagttattgatattgcagga

SEQ ID NO: 231777 - DNA, 856 bp, Unknown
  Bacterial polypeptide expressing nucleotide sequence isolated from the Sargasso Sea
aaaaaaacttaatggcaaagcaactcataaaatatctaatttagaattagataaatttataaatcttattaaaaaatcatcaaaacctattttttatacaggcggaggagtaataaattctggtcctgaagctagcaaatatttaagagagttagtttcattaactggctttccaataacttcaactctacagggactaggagcataccctggggatgatccacaatttttaggaatgcttggtatgcacggaacttatgaagcaaataatgcaatgcatgattgcgatttaatgataaatattggtgcaagatttgatgatagaattacaggtaaagtggatgaattttcaccaggatcaaaaaaaattcatgtagatatcgatccatcttcaattggaaaaaatataaaagttgatctagcaatagttagcgatgtaacagaacttttgaaatctttaattaaaagatttaaagaaaaaaataaaaacttttccagttctaataagcaaaaaatatcaaactggtgggagcaaataggaaaatggagagaaaaaaagtctttaaatttcataaatagcgataaagttattaaaccacagcatgctgtacaaaggctttatgagctaacaaaaaatcaggatacctttatcactaccgaggttggccaacatcagatgtgggcagcacaacattacaaatttaataaacctaatagatggatgacatctggaggtcttggaacaatgggatatgggcttccagcagcaattggcgttcaaattgcaaaccctaaaaaattagttgttgatattgctggagaagcatctgttttaatgactatgcaagaaatgtct

SEQ ID NO: 231778 - DNA, 648 bp, Unknown
  Bacterial polypeptide expressing nucleotide sequence isolated from the Sargasso Sea
aaactataaaacctcaatatgctattcagagattatatgaattgacaaaaaataaagatacctatgtaacaactgaggtgggacaacatcaaatgtgggcagcccaacattacaaatttaataaacctaatcgttggatgacttcaggaggtcttggtactatgggttacggtttacctgcagcagttggagttcaagtggctcatccgaataaattagttatagatattgcaggagaggcatctgtacttatgactatgcaagaaatgtcaacagcagttcaatacagtttaccaattaaaatatttatattaaataatgaatacatgggaatggttcgacaatggcaggagcttcttcatgacaaaaactattcagaaagttatacagccgcacttccagattttgtaaaactagcagaagcttatggatgtgttggtattagagctacaaaacctgaagaacttgacgataaaattattgaaatgataaacactgatagacctgtaatatttgattgtttagtcgataaggaagaaaattgttttccaatgataccttctggaaaacctcacaaccaaatgcttttagggcctaaagatcaaaaagaaaaaaaaataaccgggaaaggaaaaacattagtttaat

SEQ ID NO: 231779 - DNA, 797 bp, Unknown
  Bacterial polypeptide expressing nucleotide sequence isolated from the Sargasso Sea
aatgtcaaaattgtattcaggagctgaaattgtttttaaatgtatggaagaccaaggtgtagaaactatttttggttatccaggtggtgcagtattgcctatatacgatgaactaaaaaaccataaatttgtaaaacatattttggttcgtcatgaacaaggcgcaggacatgctgcagaaggatatgcaaggtcatctggtaaaccaggagtgcttttagttacgtcaggtcctggagcaacaaacgcagtgactgctttaaccgatgcttacatggattccgtacccttagtttgtatatcaggtcaagttccaacgcatttaattggaactgatgcatttcaagaatgtgatacaactgggataacaagaccttgtacaaaacataattggttagtaaaaaatgtagatgatttagcaaaaacaatacacaaagcttttgaagttgccaccacaggaagaccagggccagtactggttgatatacctaaggatgtacagtttcaaaaaacaaaatatacaaaatataaaaaacaaaaaaaacttaatggaaaaaaacatagtcagttttcaaaagaagttattgatgaattaataaaattgatgattaaatcatctaaaccaatcttttatactggcgggggagtaattaattctggacctaaagctagcgagcttttaagagaacttgtaaatttaacaggttttccaattacttctactttgcaagggcttggatcttatccaggtggagataatcaatttttaggcatgctcggcatgcatggatcatatg

SEQ ID NO: 231780 - DNA, 919 bp, Unknown
  Bacterial polypeptide expressing nucleotide sequence isolated from the Sargasso Sea
acatgataacaagttttttcttggaatgcttggaatgcatggtacttatgaagcaaatctttctatgtataattgtgatgttatgctcaatattggagcaaggtttgatgacaggattacaggaaatcttaaagagttttcaccttactcaaaaaaaattcatattgatatagatccatcttctattaataagtcagttcctgttgatatccctataatttcagatgctggtagtgcattaaaagagttaatatatgaattaaaaaaattaaaatttaaaaactctgaaaatagaataggagtttggctaagacaaataaatgaatggagatctaagaaatgcttagatttcaatcaaaaaggaaagattataaaaccacaatacgcaattaaaagactttttgaaaaaaccaaaaatattgaaacatatataaccactgaagttggtcagcatcagatgtgggctgcccaatattatggtttttcaaagcctaacagatggatgacttctggtggattaggaaccatgggttatggattaccttccgctatgggtgttcaaattgcacacccagaaaaacttgtcattgatatttcaggtgaggcttcttttctgatgaatatgcaagaattatcaacgcttaagcaatataaattacctgttaaagtttttataataaataaccaatggatgggtatggttaggcaatggcaacaactaattcatgggggaagatattcagaaagctatacagattctttgcctgactttaagtctcttgctgagtcttttgggctcgaaggattgagagcagaaaatgttgatcaactagatgatgttatagatcaaatgatggcgtctaaatctgcagttttgtgtgacatacaagttgccaaagaagaaaattgctttcctatg

SEQ ID NO: 231781 - DNA, 877 bp, Unknown
  Bacterial polypeptide expressing nucleotide sequence isolated from the Sargasso Sea
ggtcttggatcaattcctcaagatcatgttctctcctatggaatgatggggatgcacggatcttattgggccaaccacgctgcatcaaatgcagatcttataataggattaggtatgcgcatggatgatcgtgcattaggtcgctttgccgatctcaaccctacggcaaatgtcatacatgtagacatagatccagcagaacataacaaaaacataatcaccaccacgccaattgtaggtaacgtccgggaagtattaaaaatactaatcacacaattcgagccattatcacacattgattggatccattggatcgatgaattacgtagagatcataaggattcatttaaagtacctgaggtagacgagctaactcctcaatacattgaatctcgaatagctgaaaaaattgggaatgaaggagttgtagtaacaggagttggacagcaccaaatgtgggccgcacaactaatgaatatttcaaggcctcgtcagctaattacttctggtggtttaggtactatgggcttcgaggttcctgcagcgttaggagctcaagttgccgaaccaaacagaaccgtttggacaatttgtggtgatggtggatttcaaatgactaatcaagaaattgccacaatgatcgatgaaaatttacctgtcaaaatggcaatcatgaacaatggattcttgggaatggttcgacaatggcaagaacttttttatgggaataactatgtttccgtcaatatgtcacagccagactttgttaaacttggtgaagcatatggtataaaatcacttcgtgtaagccataagtcagaagttgatgatgtgattaaagaagcaaataatcatcccggtcccgttttaattgatt

SEQ ID NO: 231782 - DNA, 824 bp, Unknown
  Bacterial polypeptide expressing nucleotide sequence isolated from the Sargasso Sea
taagaagcctgtcatttattctggcggtggagttaatcaaaataatgcttctgaagaattaactgccttagccaaacttctaaattttccagtaacaaatactttgatggggttaggtgcatttcctggttcagatccgcaatttatgggaatgctgggtatgcatggaacttatcaagcaaatatggcaatgcataacgcagacctaataattgctgtaggcgcaaggttcgatgacagaattacaaatgatccaaaacaatttgccctaagtgcaaaaaaaattcatattgatgtagatccagcatctgtttcaaaaataattcacgctgatattccaattgttggttctgctaaggaatctttgaccgcacttattgaagaattgaaatctagagatctaaaaacaaatgaacctgctatttcggaatggaatcagcaaataattgattggacagatgctcatggcttaaatcattctctcttagaagtgggatcgcagaatggaaagatacttcctcagcaagttattcaatctctgtataaagaaacaaaaggcgaggcatttattacttcagatgttggtcaacatcaaatgtttgctgctcagtactatcattttgacaagcctagacaatggatcaattctggaggtcttgggacaatgggttttggtttaccttcagccatgggagtgcaactagcatttccagattctactgtagcttgcgttactggtgagggaagtattcaaatgtgtattcaagaattatcaacatgccttcaatatggattgcctataaaaataataaatcttaataatg

SEQ ID NO: 231783 - DNA, 700 bp, Unknown
  Bacterial polypeptide expressing nucleotide sequence isolated from the Sargasso Sea
ttgtacaaatactttaatgggccttggttgttatccagcaattgataaacaatttataggtatgttaggaatgcacggtacatacgaagcaaatcttgctatgcatgatagtgatttgataattgctgttggatcaagatttgatgatagagtaactggaaatttatcaaaattttctccttatgcaaaaaaagtacatattgatatcgacccttcgtctattaataaaaatgtaaaagtagatgtagctttaattggtgatgttaaaacaatagtaaattctatttatttagaattaaaaaaaaataaaaattttttaaaatatgaaaatataaataaatggtggttacaaatagatctttggaaaaaaaagaattgtttagggtataaaaaagttaattatcctataaaacctcaatatgcgattgaaagattatatgaacttacaaaaaataaagattgttttataactactggagttggacagcaccaaatgtgggctgctcaatattataaatttaataaaccaaatagatggatgacatctggaggtctaggtacaatgggatatggattgcctgcagctattggagctcaaatagcaaacccaaaaaaattagttattgatatagatggagaagcttcttttttaatgacaatgcaagaattatctacaatatgtcaatataaactcccagta

SEQ ID NO: 231784 - DNA, 388 bp, Unknown
  Bacterial polypeptide expressing nucleotide sequence isolated from the Sargasso Sea
atgtctaaattatattcaggtgcagaaattgttttcaaatgtcttgaggatcaagatgttgaatatatatttggttatcctggtggagctgttcttccaatttacgacgaattaaaaaatcacgaaagtataaaacatattttagtaagacatgaacaaggtgcgggacatgctgcagaagggtatgcaagatcttcaggtaagcccggtgtagtattagttacttctggaccaggtgcaacaaatgctgttacagctttaacagatgcttacatggactctataccattagtttgcatatcaggacaagttccaacacatttaatcgggacagatgcatttcaggaatgcgatacaactggaattacaaggccgtgcacaaaacata

SEQ ID NO: 231785 - DNA, 856 bp, Unknown
  Bacterial polypeptide expressing nucleotide sequence isolated from the Sargasso Sea
aatgtctaaattatattcaggtgcagaaattgtattcaaatgtcttgaagatcaaaaggttgaatttatctttgggtatcctggtggagctgttttaccaatttacgatgaattaaaaaatcattcatcaataaaacatatcctagtaagacacgaacaaggcgcaggacatgctgctgagggttatgctaggtcttcaggaaaaccgggtgtggttttagttacttcaggaccaggagcaacaaatgttgtaactgctttaacagatgcttatatggactctgtccctttagtttgtatttctggacaagtacccactcatttaattggtactgatgcatttcaagaatgtgatactaccgggatcacaagaccatgtacaaaacataactggttggtaaaagatattaaagatttatctaaaactctacatgaagcttttagagttgctacaacaggaagacctggacctgttttagtagacattccaaaagatattcaatttgccaaaattagttattctaaaccaaaaattagaaataaactgaatggaaaatctttaaataatttttctcaaaaaaatatagatgaattaattagtttgatgaaccaatcaaaaagaccaattatctattcaggtggtggtgtaataaattcaggtccagaggcaagtgatgctcttagagaacttgctcaattaacaggttttccaattacatcaacactgcagggtttaggagcctatccaggagatgataatcaattcttaggaatgttaggaatgcatggaacttatgaagctaataatgcaatgcatgattgtgatttattaataaatattggagcaagattcgat

SEQ ID NO: 231786 - DNA, 614 bp, Unknown
  Bacterial polypeptide expressing nucleotide sequence isolated from the Sargasso Sea
catggagatgttgtcaggagccgaaatggtcgtccagtcgctggtcgatcagggcgtcaagcaggtgttcggttatcccgggggcgcggtcctcgatatctatgatgcgttacatacccttggcggaatcgatcacgtactggtccgccatgagcaagctgccgtgcatatggcggatggccttgcgcgcgcaacgggcgaggtcggggtagtcctggtgacctcgggtccgggggcgactaacgcgattaccggcattgcgacggcttatatggattccattccgctggtgattctttccggccaggtcgcgacgtccttaattggctacgatgctttccaggagtgcgacatggtggggatctcccgaccggtggtaaaacacagctttctggttaagcaaaccgaagatattcccggcgtgctgaaaaaagcgttctggctggcggccagcgggcgtcccggcccggtcgtcgtggatctaccgaaagatattctcaatccggcgaaaaaactgccgtacgcctgggcagatacggtcagcatgcgctcttataatccgacgacgtcgggtcataaagggcagattaaacgtgcgctgcagacgctggtgg

SEQ ID NO: 231787 - DNA, 859 bp, Unknown
  Bacterial polypeptide expressing nucleotide sequence isolated from the Sargasso Sea
aaaggttcactttgatattgatgcatcttctttcaataaaagtgtaaatgttgatttaactgttcaaggtgatttatcaaaaattttacaaattataaataaaaaaattgaagagaaaaaaataatttttaaacaaaaaaaaattaaaaattggtggttacagataaataaatggaggtctaaagattgtttaaagtttaaaaattcagataaaattattaaacctcaacatgcacttaaaaggttagatcatcttacaaaaaactataacccatacatcaccacagaagtaggacagcatcaaatgtgggcagcacaatttctgacttttaacaaaccaaagcattggatgacatctggaggtttaggaaccatgggttacggtcttccggctgcaatgggagtacaaattgcccatccaaaatcgttggtaattgatgttgcaggagaggcttccatcctcatgaatattcaagaaatgtcaacaattaaacagttcaaattgccggtaaaggtttttattttaaataatcattacatgggaatggtaaggcaatggcaagaactcttgcatggaaatagattatctgaatcttatatggattctttacctgattttgtaaaactagctgagtcatttggagcaactggactgagaactgagaaaccaagcgaaattgacgatttgattaaagaaatgattaaaattaatggttcggtaatttgtgacataatagttgacccaggcgaaaattgttttccaatgattccctcaggctccacacataatcagatgttattaggacctgatgataaaagtgatggtgagatatctgaagacggaatggttttggtttaa

SEQ ID NO: 231788 - DNA, 884 bp, Unknown
  Bacterial polypeptide expressing nucleotide sequence isolated from the Sargasso Sea
aaaaaattttaattcagtaaaacatatattagttcgtcacgaacaatgcgcaggtcatgctgccgaaggatacgcaagatcaagtggaaaaccaggtgtacttttagttacatcgggccctggtgccacaaatgcagtaaccgctttaacagatgcttatatggattctgttcctttagtatgtatttctggacaagttcctactcacttaataggtaccgatgcatttcaagaatgtgatactacaggaataacaagaccttgtaccaaacataattggctagttaaagatgtaaaacatttagaaaaaacaattcataaagcttttgaagttgccacaactggtagaccaggacctgtattagttgatataccgaaagatgttcagtttcaaaaaacaagttatactaaattcaaaaaacaaaaaaaattaaacggtaaagttaataatcaattttctcaaaaagatattgatgaactgattaaattgatgagtaaagcatcaaagccagttttctatactggtggaggtgttataaactctggaccaaaagctagcgaacttctaagagaactagtgaatatgaccggttttcctataacatctacactacaagggttaggttcttatccaggcgaagatagtcaatttttaggtatgcttggtatgcatggatcatatgaagctaacaatgcaatgcatgattgtgatcttatgataaacatcggtgctagatttgatgatcgaataactggaaagatagatgaattctctcctaaatcaaaaaaagttcatatagatattgatccgtcttcaattaataaaaatgttaaagtagatttaccaattgtaggagatgttgctgaagttattacctctacaa

SEQ ID NO: 231789 - DNA, 667 bp, Unknown
  Bacterial polypeptide expressing nucleotide sequence isolated from the Sargasso Sea
ggtaagattgatgagttctcacctaagtctaaaaaagttcatattgatatagatccatcctcaataaataaaaatgtaaaagtagatttagcaattgtaggagatattaagtcggttttaacatcaacattaaaaactttaaaaaaatctaaaaataatttttctaaatcaaacaaacatcaaatatcaaattggtgggaacaaattcagaaatggagatctaaaagatcattagactacattggtagtgaagaaactattaaacctcaatatgcgattgaaagattatatgaactgactaaagataaagatacatatataacaactgaagtaggccaacatcaaatgtgggctgctcaacactacaaattcaataaaccaaatagatggatgacttctggaggtcttggtacgatgggatatggtttacctgcagctgttggagttcagattgcacatcctaaaaaattagtaattgatattgccggcgaggcgtctgttttgatgactatgcaggaaatgtcaagtgcagttcagtacaatttgcctataaaaatatttattttgaataatgagtacatgggaatggtaagacaatggcaggaattattacatgataaaaattattctgataagttatacagccgcattgccagattttgttaaa

SEQ ID NO: 231790 - DNA, 628 bp, Unknown
  Bacterial polypeptide expressing nucleotide sequence isolated from the Sargasso Sea
tgcaattgaaagattgtacgaattaacaaaagataaagattcttatattacaactgaggttggacaacatcagatgtgggcagcacaacactataaatttaataaaccaaatcgttggatgacatctggtggtttaggaacaatgggatacggtctacctgcagcagttggtgtacaagttgctcatccaaaaaaattagttattgatattgctggagaagcatcagtactaatgacacttcaagaaatgtcaacagctgtgcaatataatcttccaattaaaatatttatattaaacaatgaatacatggggatggttagacaatggcaagagcttttacatgataaaaattattctgaaagttatactgccgcccttccagattttgtgaaattagcagaagcatataattgtgttggtataagagcaaaaacaccagaagagctagatgataaaattacagaaatgttaaatacgaataggcctgtaatatttgattgtatggtagataaagttgaaaattgctttccaatgataccatcaggaaaaccccataatcagatgattttaggacccaaagatcaagaaagtaataaaattacaggtaaaggcaagtctttagtctaa

SEQ ID NO: 231791 - DNA, 638 bp, Unknown
  Bacterial polypeptide expressing nucleotide sequence isolated from the Sargasso Sea
accacagtatgcagttcaaagactttatgaattaacaaaaaataaaaaaacatttattacaacagaagttggtcagcatcaaatgtgggcagctcaatattataaatttgaagaaccaaacagatggcttacttcaggcggtttaggaacaatgggttatggttttccagctgcaataggagctcaggttggtaatcctgatgctttagtagtagatatagcaggtgatgcttctatacttatgaatattcaagaaatgagtactgctattcaatatagacttcctgtaaaaatatttattttaaataatgaatatatgggaatggtaagacagtggcaggaattacttcatggtggtagatattcagagagttatacagatagtttacctgactttgtaaaattagcagaaagttataaggctgttggtttaagagcaaaaacaactgatgaacttgatggagttattgctgagatgatggatactgataatactgttattgctgatatctgggttacaaaagaagaaaattgttttccaatgatacaaagtggatctgcacataatgaaatgctgttaagtaaagatcaaaaacaagataaaaaatcagcagaaaaaggaaagattttagtttaat

SEQ ID NO: 231792 - DNA, 726 bp, Unknown
  Bacterial polypeptide expressing nucleotide sequence isolated from the Sargasso Sea
ccggatgctagcaagttattacgagagctcgtggacaaaacgaattttccaataacttcaacattaatggggctgggctgttatcctgcatcaggaaagagatggctgggcatgcttggaatgcatggtctgtatgaagccaacttggctatgcatgattgcgatcttatgattaatataggtgccaggtttgatgacagaataacgggcaggattgacgcattcagcccaaattctaaaaaagcgcatgtagatatcgatccctcttcaataaataaggtgataagcgttgatattcccatcattggcgacgttggtagtgttctccaagatgtgctagaactatggaagtccagaggacaaaaaactaatgtagaagaaattagcagctggtggaaagagatcgaaaattggaaatccattgactgtctagcattcagtcaagaaggtaagacgatcaaacctcaatttgcaatttctcgactagaggaactgacaaaaaaatataaaaaacgctttattgctaccgaagtgggtcaacatcaaatgtgggccgctcaataccttggttttgaagaaccaaatcaatggatgacatcaggtggattgggcacaatgggttatggctttcctgcttcaataggggttcaaatcgcccatcctaattcattagtaatcaacgttgctggcgaagctagctggcttatgaacatgcaggaattggga

SEQ ID NO: 231793 - DNA, 930 bp, Unknown
  Bacterial polypeptide expressing nucleotide sequence isolated from the Sargasso Sea
gcctgttgttgtagatattccaaaggatgttcaaacagctgatatatccgaagaagattatgaggacaccaatatctcagcttactctaatagaatattggccattgaaaaatcgcgcctgaacgaagaaaaatcatccgaattctttacacatctcggcaattcaaagaggccactgatttactttggaggcggtgtaatctcagcgagtgcatcaaaagagctcagagaatttgttgattattttaatctgccggctgtttcaaccctgatggggctaggtgcagtggatactcgacatccctcatctctgcacatgcttggtatgcatgggactccttatgcaaactatgccgttcaagaaagcgacttcttgatagcgataggttctcgttttgacgatcgtgttgcaggcgtgcctgaaaaatttgccccgaaagccaaagtcattgcacactttgatgtcgatgcctcagagatcaataaagtcaagaacgctgcttggtctcatctcggagtattgtcattggcactgaaagatctaataaaacatgccaaatcaaatgatcttgagtttaattttggagattggctcagtcacacaggcgaactaaaatcaaaatatcctttaaacttcaatcgctcatccgatttgattcagccggaacatgtcattgagtgcatcaataagatcacaaagggtgacgcaatcgtcacaaccggtgtaggtcaacaccaaatgtgggcagcgcagtactttgacttcaaagagcccaggctttggctaacatctggcagcatgggaacaatgggttttggtatacctgctgcgatcggcgctcaaattgcacatcccgataaaacagtcattgatgtggatggcgatggaagcattaggatgaacttaggagacttagaaaccattacaaa

SEQ ID NO: 231794 - DNA, 888 bp, Unknown
  Bacterial polypeptide expressing nucleotide sequence isolated from the Sargasso Sea
tttggttatcctggtggcgctgtacttccaatatacgatgaattgaaacatcataaaagtattaaacatatattagccagacatgagcaaggtgctggacatgctgcagagggttatgctagatcatcaggaaagcctggtgttgtattggtaacatccggccctggcgcaacaaatgttgtaactgcattaaccgatgcctacatggactctgtacctttggtttgtatttctggacaagtaccaactcatttaattggaactgatgctttccaagaatgcgatacaactggaattaccagaccttgtactaaacataattggttaattaaagatgtcaaagatttggcaaaaacaattcataaagcttttgaagttgcaacaacagggagaccaggtcctgtactagttgatattccaaaagacattcagtttaataaattttcttattcaaaatttaaaaaacaaaaaaaactaaatggaaaagctcataattattattcacaaaaagaaatcgatgaattgattaaattaattattaaatcaaaaaaaccaattatctattcaggtggtggtgtaattaattctggaatagaagcaagtaagttattgagggaattagtagatgctaccgggttcccaattacttcaacacttcaaggacttggtgcatacccaggcgaagataatcaatttttaggaatgctaggtatgcatggaacctatgaagccaataatgcaatgcatggatgtgatcttatgataaatataggcgcaagatttgatgataggataactggtaagattgatgaattttcacccaaatcaaaaaaagttcatattgatattgatccatcatcaataaataaaaatgtaaaagttgattta

SEQ ID NO: 231795 - DNA, 733 bp, Unknown
  Bacterial polypeptide expressing nucleotide sequence isolated from the Sargasso Sea
tttggcggtaaagattatagtaattgggtggagccaaattaatgagtggagaaaaaaagaatgtcttcactacgaacaaggtgatgaagtgatcaaacctcaacatgctatctccagactttacgaattaacaaaacaaaaagacacttacgttactacagaagttggtcagcatcaaatgtgggcagctcaatattataagttttcaaaaccaaatagatggattacatcgggtggtttaggcacaatgggtttcggtatgcctgctgcagttggtgcacaaatggcaaatccagactctctagttatagacatagctggcgaggcatcttttcttatgaacattcaggaaattgccaccgctgttcaatataagttacctatcaaaatttttatcctgaataatgaatatatgggaatggttagacagtggcaggaactattgcacggtagtagatactcagagagttacgtggatgctcttcctgattttaaaaaattagcagagagtttcaatgctgttggagttagggcaaaaaatatttctgaattagatgatacaattaatgaaatgatttcaattgacaggccagttatagcggatatttgggttgataaaaaagaaaattgttttcctatgatacctagcggagctgcgcatcatgaaatgttactatctaaatacgataaagaaaatcctgaaaatcaggaaaaaggaaaagtactagtttaa

SEQ ID NO: 231796 - DNA, 957 bp, Unknown
  Bacterial polypeptide expressing nucleotide sequence isolated from the Sargasso Sea
atattacatttagctttcgaagtagcaactacaggtagacctggaccagttttagtcgatattccaaaagatatacaatttaaaaaaggtaaatataaattttttaaaaacacacttaaaaaaaagcttaacggcaaggcgattcataaaatatctaattcagaactagataaatttattaatctaattaaaaaatcatcgaaacctattttttacacaggcgggggagttataaattctggacccgaagctagcaaatatttaagagagttagtttcattaacaggcttcccaataacttctactttgcaaggtcttggcgcatatccaggtgatgatccacaatttttaggaatgcttggtatgcatggaacttatgaagcaaataatgcgatgcatgattgtgacttaatgataaatattggcgcaagatttgatgatagaattactggaaaggtagatgaattttctccagggtcaaaaaaaatacatgttgatattgatccatcttcaattggaaaaaatatcaaagttgatttagctatagtaagcgacgtaacacaacttttaagatcactgataaaaaggtttaaggaaaaaaataaaaactttgctaattctaataaacaaaaaacatcaaaatggtgggagcagattgagaaatggagagaaaaaaaatctttaaactataataatagcgacaagattattaaacctcaatatgcagttcaaagattgtatgaattaacaaaaaatcaagatacgtttataacaactgaggtaggtcaacatcaaatgtgggctgctcaacattataaatttaataaacctaatagatggatgacatcaggaggtcttggcacaatgggatatgggcttccagctgcaattggtgttcaaattgccaatccaggtagattagtggttgatattgccggagaagcatccgttttaatg

SEQ ID NO: 231797 - DNA, 859 bp, Unknown
  Bacterial polypeptide expressing nucleotide sequence isolated from the Sargasso Sea
ggcgctgaaattgtttttaaatgtatggaggatcaaggagtagaaactatctttggttatcctggtggtgcggtgcttccaatctatgatgaattaaaaaatcatagttctgtaaaacatattttagttcgtcacgaacaaggagcaggccacgcggctgaaggttatgcgagatcttctggaaaacctggggttcttttggttacttcgggtccaggtgcaactaatgctgtaacagctttaaccgatgcatatatggactctgttcctttagtttgtatttcaggacaagttcctactcacctaattggcacagatgcttttcaagaatgtgacacaacaggaataacaagaccatgtactaagcataattggttggttaaaaatattgaagatttagcaaagactgtacataaagcttttgaagttgcaacatctggaagaccgggtccagtactggttgatataccgaaagatgttcagtttcaaaaagcaaaatacactaaatttacaaaaccaaaaaagcttaatggaaaaaaaaatattaaattttcaaataatgaaattgatgaattaatgaaattaatggttaaatcatccaagcctattttttatacaggaggtggggtaataaactctggtcctagggctagtgaacttttaagagaacttgtaaatctaaccggttttccaattacttcaactttgcagggtctagggtcttatcctggtgatgataatcaatttttaggcatgcttggcatgcatggatcttacgaagcaaacaatgcaatgcatgattgtgatttaatgattaacattggagcaagatttgatgatagaattactggtaagattg

SEQ ID NO: 231798 - DNA, 802 bp, Unknown
  Bacterial polypeptide expressing nucleotide sequence isolated from the Sargasso Sea
tctaactcgctaggaatgcttggaatgcacggtatgtatgaggcaaatatggcgatgcacgaatgtgatttattaattaacatcggagcacgttttgatgatagagtaacaggaaggcttgatgcattctcaccaaattctaaaaaaattcatattgatattgatgagagtaatattaataaaacaattaaagttgatgtgccagttgttggtgatgtaacaagtattttaaatagagttgtaaaggtttggaaagataataatttaaaaacaaataaatctgatctgaaattatggtgggacaaaattaataattggaaaaaaatagattgcttgcattttacaaataatgaaaaagaaataaagccacagtatgctatccaacgattatatgaattaactaaagataagaaaacattcatcactacggaagttgggcaacatcaaatgtgggctgctcagtattataaatttgaaaaaccaaatagatggcttacctcaggtggattgggaacaatgggctatggttttccagcagctattggagcacaagtagctaatccagatgccttggtcattgatgtagctggcgacgcttcaattcttatgaatattcaagaaatgagtacagctgttcaatatagattaccggtaaaaatttttattcttaataacgaatatatgggcatggtaagacaatggcaggagcttttacatggaggtcgttattcagaaagctatactgacagtctaccagattttgtaaagttagcagagagttataaagcacattggtcttaga

SEQ ID NO: 231799 - DNA, 759 bp, Unknown
  Bacterial polypeptide expressing nucleotide sequence isolated from the Sargasso Sea
atgcccgcctggtgctggatcagatgctcgaactactggagcaggagaaatctcagcagccgctggatgataatcgtgactggtggcaacagattgagcactggcgcgcccgtcagtgtctgaaatacgacacgcaaagcgaaagtattaagccgcaggcggtgattgaaaccatctggcgtctgacgaaaggggaggcgtatgtgacttctgacgttggccagcaccagatgtttgccgcactttactatccgtttgataaaccgcgtcgctggattaactcaggcggcctcggcactatgggattcggtttacctgcggcgttaggggtgaaaatggctttgccggatgaaacggtagtgtgcgtcaccggggatggcagcattcagatgaatatccaggaactgtcgacggcgctgcaatatgaactgccggtgctggtactcaaccttaacaaccgttatctcggcatggtcaaacagtggcaggacatgatctactccgggcgtcactcacagtcttacatgcagtcgctgcccgatttcgtgcgccttgctgaggcttatgggcatatcggtatccagattaatcggcctgaagaacttgagagcaagctgggcgaagcgcttgaacatgtgcgtaaccatcgtctggtgtttgtcgatgtcaccgtcgatggcagtgaacatgtctacccgatgcagattcgtgggggtgggatggatgaaatgtggttaagcaaaacggagaggacctgat

SEQ ID NO: 231800 - DNA, 544 bp, Unknown
  Bacterial polypeptide expressing nucleotide sequence isolated from the Sargasso Sea
atgccaaaattatattcaggagcagaaattgtatttaaatgccttgaggatcagggtgttactaatatttttggttatcctggtggagcagttctaccaatatatgatgaattaaaaaattttaaatcaataaaacatattttagttagacatgaacaaggagcaggtcacgcagctgaaggatatgctagatcatcaggcaaggctggagtattattggtaacatcagggcctggagcaaccaatgctgtaacagcattaacagatgcgtatatggattcagttcctttagtttgtataactggtcaagttccaacacatttaatcgggacagacgcttttcaagaatgcgacacaaccggcatcacaagaccatgcacaaaacataattggttagtgaaagatgtaaaagatttggctaaagttattcataaagcatttgaagtcgctactactgggaggcctggtccagttttagttgatattcctaaagatattcagtttcaaaaagttgcttataaaaattataagaaacaaaaaaaat

SEQ ID NO: 231801 - DNA, 313 bp, Unknown
  Bacterial polypeptide expressing nucleotide sequence isolated from the Sargasso Sea
aatgcctaaattatttactggtgcagaaatagtttttaaagctctggaggatcaaaaagtcgaatatatttttggttatcctggaggagctgttctccctatttatgatgaattaaaaaatcataaatctattaaacatatattagcaagacatgaacaaggtgctggacatgctgcagaagggtacgctagatcaagtggaaaacctggcatcttactagttacatctggtccgggtgcaacaaatgctgttacagctttaacagatgcttatatggattcagttccgctagtttgtatttctggacaagta

SEQ ID NO: 231802 - DNA, 344 bp, Unknown
  Bacterial polypeptide expressing nucleotide sequence isolated from the Sargasso Sea
aatgtcaaaattgttatcaggttcagaaatagtatttaaatgtcttgaggaccagaatgtagattttatttttggttatcctggtggagctgttttgccaatctatgatgagctaaaaaatcataactcaataaaacatattttagtaagacatgagcagggcgctggacacgctgcagaggggtatgctagatcttcgggaaaacctggtgtagctttggttacatctggaccaggagctacaaatattgtaacagcgttaactgatgcatatatggactccatcccaattgtttgtatatctggacaagttcccacacatttaattggaacagatgcatttc

SEQ ID NO: 231803 - DNA, 925 bp, Unknown
  Bacterial polypeptide expressing nucleotide sequence isolated from the Sargasso Sea
tctggtaagccaggtgttgttcttgttacatcagggccaggtgcaacaaatgttgttacagctcttacagatgcttatatggactcagttcccttagtttgtatttcaggccaagttccaacacatttaattggaacagacgcctttcaagaatgtgatacaacaggaataacaagaccttgcacaaaacataattggctagtcaaagacgtgagggatttagcaaaaacaattcataaagcatttgaagttgcaacaacaggaagaccgggtccagttttagttgatatcccaaaagatattcaattcaataaattttcttattcgaatgaaaaaaagcaaaaaaaaacaaatggaaaaactcacaatttatattctcaaaaagaaatagatgatttaattaacttaatcataaagtcgaagaaaccaataatttattcaggtggtggagtaataaattcaggtgtagaggctagcaaacttctaagagagtttgtggaggctactggatttccaattacttcaactcttcagggacttggcgcatatccaggtgaagataatcaatttttaggaatgcttggaatgcacggaacttatgaagcaaataatgcaatgtatggatgtgacctaatgataaatgttggggcaaggtttgatgataggataacaggtaaaattgacgagttttctcctaaatcaaaaaaagttcatattgatattgatccttcttcaattaataaaaatgtaaaagttgatttagcaattgtaggagatgttgcttttgttttaaaaaatataattaaaacattaaataaacaaaaacctaatttttctaaatcaaataaatcaaatatttcgaaatggtgggagcaaattcaaaaatggcgatctgtaaattctcttggatatattaacagcgatg

SEQ ID NO: 231804 - DNA, 835 bp, Unknown
  Bacterial polypeptide expressing nucleotide sequence isolated from the Sargasso Sea
aaagggtcttttccagaaaaccatgacctttctgtcggtatgctcggtatgcatggcaccgcttatgccagtaaagcagtggcggcctgtgatcttattttctcgattggttctcgctgggatgatcgtattacacccgccaatatccaacggttctgtcccgacgctattaagcttcatattgatattgatcctgctgagatcaacaagatcgtagtccccgacgggcatgcaatcggtgatgctaaagccgtattaaaaaagcttattccgcttatcaaacctcttgaaaccaagccatggctaaaagaagtatccgctaataaaaaaaagttcccccttacgtataaaaaacagggtggcctgaaagcacaatttgtgattgatgaactctatcgaattacaaaagggcaggccattgtcactaccgatgttggacaacaccaaatgtgggctgcccaattctaccccactatcttacctaatggttggatctcatctgggggtgccggtacgatggggtatggactcccctctgctattggtgcgcagtttggatgccctgatgataccgttgtcgccattgtgggtgacggtgggtttcagatgacactctgtgagcttgctacagccgctatccataaactacctgtaaaaatacttatcctggataacaagtacttgggaatggtgcgacaatggcaaggcatgttctatgataacagactcagtggtgttgaccttcacggaaaccccgacttcttaaagttaggccaagcctatgggatcgctggataccgaatcaaaagggccgctgatgtgaaaaaatcctaaa

SEQ ID NO: 231805 - DNA, 670 bp, Unknown
  Bacterial polypeptide expressing nucleotide sequence isolated from the Sargasso Sea
atgaaattaccaggaaatgacattcttattcagtcccttcttaatgaaggcgttgagtatatatttggttatccaggtggggcagctcttcatatttatgatgcaatttttaatcaaaacgaaattgaacatattctcgtgagacatgaacagggagcaacccatgcagctgatgggtatgctagagcaacaggaaaacctggagtagttttggttacttctggaccaggagcaactaatgcaattactggaattgctactgcctttatggactcaattcccatggttgtattatctggtcaggtcgcgactcatctaataggaaccgacgcatttcaggaaactgatatgataggtatttccagaccaattgttaaacatagttttacagttgaaagcgcagacaaaatatcagaagtaatcaaacaggctttttttatagctacctcaggtagaccaggaccagtggtaatagatataccaaaagatacaacagctccagataaattatttgattttgtattgccagaatcaattaatataagatcctataatccaccaattgaacctgaaataaagcaaattaaaagagctgctgaagcaataattgatgcagaaaagcctgtgatttatgctggcggtggctcaattaacagcaatgcatctgaag

SEQ ID NO: 231806 - DNA, 849 bp, Unknown
  Bacterial polypeptide expressing nucleotide sequence isolated from the Sargasso Sea
aatgacacgccaaatgacgggtgcaaaaatggttgttcaagccttgaaagatcaaggcgtagatacggtctttggttatcctggtggagcagttttacctatttatgatgaggttttcctgcaaaatgatattagacatatcctggtacgccatgagcaaggtgcagttcatgcggctgaaggttatgctcgatcatcaggaaagccaggtgtagttcttgttacttctgggccgggcgctacaaatgcggtaacaggccttacagacgcattaatggatagcatccccctagtcgtattaacgggtcaagttccaacctttatgattggctcagatgcttttcaagaagcggatacggtgggcattacccgtccttgcactaaacataactggttagttaaagatacaaatcagttagccgaaacaattcatgaagcttttcacgtggcaacttctggcaggccaggaccagtattggttgacattccaaaagatgtacaatttgccacatccaaatatattgaaaagtccaaaattccggtttcaaattatcaacctcgcgtaaagggtgacgcagaccagatcacaagattagttgatgctatagaaagtgctaaaaggccaatattttatactggaggcggtgtaataaattcaggaccgcatgctagtaagttattaagagagctcgtggacaaaacgaattttccaataacttcaacattaatggggctgggctgttatcctgcatctggaaagagatggctgggcatgcttggaatgcatggtctgtatgaagccaatttggctatgcatgattgcgatcttatgattaatataggtgcaag

SEQ ID NO: 231807 - DNA, 694 bp, Unknown
  Bacterial polypeptide expressing nucleotide sequence isolated from the Sargasso Sea
aatgccaaaattattaactggagcagaaattgtttttaaatgtcttaaagaccaaaaggtagaacatatctttggttatccaggtggtgcagtattacctatttatgatgaattaaaaaatcatccttctataaaacatattttagttagacacgagcaaggcgctggtcatgcagccgaaggttatgctagatcatcaggaaaaccaggtgtggttttagtgacatcaggtcctggagctactaatgttgttacagcattaactgatgcgtatatggactctgtcccactagtttgtatttctggtcaagttccaacacatttaattggaacagatgcttttcaagaatgtgacaccacaggaattacaagaccttgtacgaaacacaattggttagttaaagatattaatgatctttctaaggtcattcatgaggcttttagagttgcaacaactggaagaccagggccagttttaattgatattccaaaagatattcagtttgcaaaaacaaaatatataaaaccaaacaaagaaaaaaaattaaatggaaaatctcacaataaattttctcaagatcagattgatgaattagtaaaattattaagcaaggctaaaaaacctattatttatagtggtggaggagtaattaactcaggtccaaaagcaagtcaggctctaagagaatttgtt

SEQ ID NO: 231808 - DNA, 583 bp, Unknown
  Bacterial polypeptide expressing nucleotide sequence isolated from the Sargasso Sea
tatggggaaattattttcaggtgcagaaattgtttttaaggttttggagcatcataaagtagagcacatatttggttatccaggtggtgctgtgctgccaatttatgatgaattaaaaaatcataaaacaataaaacatattttagctcgtcatgagcaaggagcaggacatgctgcagaagggtatgcacgctcttctggaaagcctggtgtaatgctagttacatctgggcctggagctactaatgcagtaacagcactaaccgatgcttacatggactcggttcccattgtttgtataagtggtcaagtaccaactcacttgatcggaacagatgcatttcaagaatgcgacacaacaggaatcactagaccttgtacaaaacataattggctagtgaaagatgtaaaagatttagccgacgtgatggatcgtgcgtttgaaattgcaacaacaggaagacctgggccagttttagtggatataccaaaagatattcaattcaaaaaaacagaatttattttaaaaaataaaaaaaagaaacaggttaatggaacactaaatggaaaagttagcaataca

SEQ ID NO: 231809 - DNA, 756 bp, Unknown
  Bacterial polypeptide expressing nucleotide sequence isolated from the Sargasso Sea
tttaaataaaagatttaaagataaaaataaagattttttaaattcaaataaatcaaatacatcaaaatggtggaaagatattgataagtggagacaaaaaaaatctttaggttttaaaaatagtaatcaagtaattaaacctcagcatgctgttcaaagactttatgagttatctaagcacaaagacacctatatcaccacagaagttggtcaacatcaaatgtgggcagctcaacattataaatttaacaaaccaaatagatggatgacttcaggaggtctaggaactatgggttatggtttgccagccgcagtaggtgtccaagttgctaatccagataaattagtcattgatattgctggtgaagcatctgttttaatgacaatgcaagagatgtcaacagcagtgcaatataatctaccaataaaaatatttattttaaacaaccaatacatggggatggttagacaatggcaagaactacttcatgaaaaaaattattccgaaagttatacagctgcattacctgattttgttaaacttgccgaagcatatggttgtgttggtatacaggcaaaaaaaccagatgagttagatgaaaaaattaaagaaatgattgctataaacaaacctgttatttttgattgcgtagtagatcctaatgaaaattgtttccctatgattccttcaggaaaacctcataatcaaatgctacttggacctgaggatgatgaagaaatttctagtgaaggaaa

SEQ ID NO: 231810 - DNA, 821 bp, Unknown
  Bacterial polypeptide expressing nucleotide sequence isolated from the Sargasso Sea
taagattgttaaagttgacgtaccattaataggtgatgttgcacatgtgttggaagattcaattaaattatggaagtctaaagtttataaaatcaataaatcccctcttaaggagtggtggaaaacaattgataaatggaaagagaaagactcacttaaatatgcaagcgataaaaatataataaaaccacaacacgcaatccaaagattgtatgagttaactaaggataaagatgtatttgttacgactgaagttggtcaacatcaaatgtgggctgctcaatattataaattttcaaagcctaatcgatggataacatcaggtggattaggaacaatgggtttcggtttacctgcagcaattggagcacaggtggctcatcctgataaattagttattgatattgccggagaagcatcaatattgatgtgtattcaggaaatgtccacagccattcaacacaaattacctgtaaagatttttattattaataatcagtacatgggaatggttaggcaatggcaggaactgcttcatgataagagatattctcatagttatacagatgcattgccagactttgttaaactagcagaagcttatggagccaaaggtataagggtacaaaaacctaatgagttagataaagctataaatgaaatgattgaatatgatgggccggtaatatttgactgtgttgtagaacagaatgaaaatgtgtttccaatgattccatcaggtaaggcccataatgaaatgctacttggggacgaaactgtaaaagaagaaatttcagatgaaggaaaagttttagtttaat

SEQ ID NO: 231811 - DNA, 922 bp, Unknown
  Bacterial polypeptide expressing nucleotide sequence isolated from the Sargasso Sea
ccaggagatgataatcaatttatcggaatgctaggtatgcatggaacttatgaagctaataatgcaatgcatgactgtgatttgttaattaatattggtgcgagatttgatgatagaataacaggtaagatcgatgagttttctccgaaatcaaaaaaagttcatattgatattgatccatcatcaataaataaaataattaaagtagatcttgctatagtaggagatgttaatgaagtaataaaatcagcgattaagaaaataaatacgaaacaaaatggattgaaagattctaataaacaaaaaatttccaaatggtgggaacaaatccaaaagtggagaacaaaggactccttaggttttgtaaatagtgataaagagatcaaacctcagcatgctgtaaaaagattatatgaattaacaaaaaatcaagatacatttattacaactgaggtaggacagcatcaaatgtgggctgcacaacattataaatttaataaacctaacagatggatgacatcaggaggtcttggaaccatggggtatggtcttccagctgcagtaggtgttcaaattgctcatccagataaacttgtgatcgatattgctggtgaagcatccgtattgatgacaatgcaagaaatgtccacagccgttcagtataatttgcctataaagatattcattttaaataatcaatacatgggaatggttagacaatggcaagaacttctccacgaaaaaaactactcagagagttattctgaagctttacctgattttgtaaaattagcagaggcttatggatgcaagggtattaaggctgataaccctcaagaattagatgataaaattcaggagatgattgattataaaggtccagtaatatttgactgtcatgtagatcctaatgaaaattgtt

SEQ ID NO: 231812 - DNA, 958 bp, Unknown
  Bacterial polypeptide expressing nucleotide sequence isolated from the Sargasso Sea
attataaatcctgacaaaagtaagattattgaggtagccaaactacttgtaaatgctaagaagccgataatttatggaggtggtggaattattaattcaggaccagaagcctcgaatttattaagggaattagttgatttggttgaaatacctacaactcttacactaatgggtcttggtgctttaccacatgataataaattttttcttggaatgcttgggatgcatggcacttatgaagcaaatctttcaatgtataattgtgatgttatgctcaacattggagcaaggtttgatgacagaattacaggaaatcttaaagagttctcgcctaactcaaaaaaaattcatattgatatagacccatcttcgattaataagtcagttcctgttgatatccctataatttcagatgctggcagtgcattaaaagagttaatatatgaactaaaaaaattaaaatttaaagactctgaaaatcgaattggagtttggcttacacaaatagatgagtggagatctaagaagtgcttagattttaatcaaacaggaaagattataaaaccacaatacgcaattaaaagactttttgaaaaaaccaaaaacattgaaacatttataacaactgaagttggccagcatcaaatgtgggctgcccagtattatggtttttcaaagcctaacagatggatgacgtctggtggattaggaaccatgggttatgggttaccttcggctatgggtgttcaaattgcacacccagaaaaacttgtcattgatatttcaggtgaggcttcttttctgatgaatatgcaagaattatcaacgcttaagcaatataaattacctgttaaagtgtttattataaataatcaatggatgggcatggttagacaatggcaacaactaatacatggaggaaggtactcagaaagttatacagattcttttgcctgac

SEQ ID NO: 231813 - DNA, 910 bp, Unknown
  Bacterial polypeptide expressing nucleotide sequence isolated from the Sargasso Sea
ctctcaagaattttacatttggcctttgaagttgctacaacaggaagacctggtcccgttttagttgatattccaaaagatattcaatttaaaaaaggtaaatataaattttttaaaaatacacttaaaaagaaacttaatggtaaagcaacacgtaagatatctaatttagaattagataagtttattagtcttatcaaaaaatcatctaaacctattttttataccggtggaggagttataaattctggacctgaagctagcaaatatttaagagaattagtttcattaactggctttccaataacttctacattacaaggacttggagcatatcctggagatgatccacaatttttagggatgcttggcatgcacggaacttatgaagctaataatgcgatgcatgattgtgatttgatgattaatattggtgcaaggtttgatgacagaattaccggaaaggtagatgaattttcaccaggatcaaaaaaaattcatgttgatattgacccatcctcaattgggaagaatataaaagttgatttagcgattgttagcgatgtgacatcacttttgaaatctttgataaaaagatttaaagaaaaaaataaaaatttcgtaagttctaataagcaaaaaacatcaaaatggtgggagcaaatcggaaaatggagagaaaaaaagtccctaaactttatcaacagcgataagattataaaacctcaacatgcagttcaaagactatatgagcttacaaaaaatcaggatacttttataacaactgaagtaggtcaacatcaaatgtgggctgctcaacattataaatttaataaacctaatagatggatgacatctgggggtcttggtacgatgggttatgggcttccagccagcccattggtgtaca

SEQ ID NO: 231814 - DNA, 364 bp, Unknown
  Bacterial polypeptide expressing nucleotide sequence isolated from the Sargasso Sea
aatgccaaaattatattcaggagccgagatagtattcaaatgtttggaagatcaaaatgttagtcacatatttggttatcctggaggagcagtccttccaatatatgatgaattaaaaaattttaattcaataaaacatattttagtaagacatgaacagggcgctgggcacgcagcagaaggctatgcaagatcaactggcaaaccaggtgtattgttagtaacttcaggtcctggagctaccaatgctgttactgccttaacagacgcgtacatggactctggttccgttagtttgcatcacaggacaagttccaacgcatttaattggtacagatgcatttttcagaatgtgacacaacag

SEQ ID NO: 231815 - DNA, 815 bp, Unknown
  Bacterial polypeptide expressing nucleotide sequence isolated from the Sargasso Sea
tcttgcaatagtgggtgatgttccaagcgtaataagtaaaattaataagacatttactaaaggtaaaaatggtcatatcaaatcaaataaatcaaatattgctaagtggtgggagcaaattgaaaaatggagagaaaaaaattctctcaattttgtcaatagcgatgaaagtattaaaccacaacatgctgttcaaagactttatgaattaactaagaataaagacacttatgttaccactgaggtggggcaacatcaaatgtgggcagctcagcattataaatttaataaaccaaacagatggatgacatctggaggtttaggaacgatgggatatggtttaccagcagctgttggtgtacaaattgctcatcctgaaaaactagtaattgatattgctggagaagcttcagttttaatgaccatgcaagaaatgtctactgcagttcagtacaatcttcctataaaaatttttattttaaacaatcaatatatgggaatggtaagacaatggcaggagttacttcatgaaaagaattattctgagagttattctgaagcgttaccagattttatgaaaatggctgaagcttatggatgtaaaggaattaaatcagacaatccatctgatctggatgaaaaaattcaggaaatgattgattatgatggaccagttatatttgattgtcatgtagatcctaatgaaaattgttttccaatgatcccatctggaaaacctcataaccaaatgatcttaggtccaaatgatcaagaggataataaaattaaaggaaaaggcaaagctttagtataat

SEQ ID NO: 231816 - DNA, 874 bp, Unknown
  Bacterial polypeptide expressing nucleotide sequence isolated from the Sargasso Sea
tcaggaagacccggacctgttttaattgacatacctaaagatatacaatttgcaaaagcaaaatatataaaaccgaaagaaactaaaaataacaatcaaacaaatataaaatttaatggactagataaaaatattgatattgctgttgaacttataaaaaaatcttccaaacctattttatatactggcggaggtgtaattaattctggaccgaaggctacggaactacttagagaattagtttctttaactgggtttccaataacttctaccctccaagggttgggagcatttcctggagatgaccaacaatttttaggaatgctaggaatgcacggaacttacgaagcaaataatgcgatgcacgattgtgatttaatgataaatattggagcacggtttgacgatagaataacaggaaaaattgatgaattttctccaaattcaaaaaaaatacatattgatattgacccttcttcaataaataaaaatgtagctgttgacctagctttagttggggatgttaaaaatgttttggaaaaattagttgtagctgtaaaaaaacagaacccgaacttcggacagtcaaataagcaaaaaatttcagcttggtggaatcaaattgatttatggagaaagaaaaactcccttggttataaaaatagtaatgaagtaataaaacctcagtatgctgttcaaagactatatgaattaactaaagcacaagatgcttttataacaacagaagttggtcaacatcaaatgtgggcagctcaacattataaatttgataaacctaatcgatggatgacatcaggaggccttggaaccatgggctatggactaccagcagcaattggcgtccaagttgcca

SEQ ID NO: 231817 - DNA, 916 bp, Unknown
  Bacterial polypeptide expressing nucleotide sequence isolated from the Sargasso Sea
gcatttcaagagtgtgatacaactggaattacaagaccttgtaccaaacataattggttagtaaaagatgtaaaagatttatcaaaaactcttcatgaagcttttaaagttgcaacgactggaagaccaggaccagttttagtagatattccaaaagatattcaattcgcaaaaattaattattcaaagccaaaaattgaaaaaaaacttaatggcaagtcaataaattatttttctcaaaaaaatattgatgaattaatcaacttaatgaataaatcaaaaaaacctattatttattctggaggtggagtgattaattccggtccagaggcaagcgatgctttaagagagcttgttcaattgactggtttcccaatcacatcaacacttcaaggtctgggagcataccctggagatgacaatcaatttttagggatgttgggtatgcatggaacttatgaggcaaacaatgcaatgcatgattgtgatttattgataaatattggagctaggttcgatgacagaattacaggaaagattgatgaattttcaccaaggtcaaaaaaagttcatatagatattgatccttcttctatcaataagataataaaagttgatttagctttagttggagatgtaaaagacgtacttaaaagtatcaataaaactttaaagaaaaaaaacattgatttgaaaaaatcaaataagcaaaaaatatctaagtggtgggaacaaattcaaaaatggagaacaaagaattcgctgcactttaaaaacagtgatgaaactataaagccacaacatgctgttcaaagactttatgaacttacaaaagataaagatgtatttataacaactgaagttggtcaacaccagatgtgggctgctcagcattataaatttaataaacctaatc

SEQ ID NO: 231818 - DNA, 549 bp, Unknown
  Bacterial polypeptide expressing nucleotide sequence isolated from the Sargasso Sea
aatgccaaaattgtattcaggtgctgaaatattatttaaatgtttggaagatcaagatgtggaattcatctttggttatcctggtggagctgttttgccaatttacgatgaattaaaaaattttaattttttaaaacatattttggttcgtcatgaacaaggggcgggacatgcagcagaaggatatgcaagatctacaggaaaacctggtgtactattagttacctcaggtccaggagcaactaatgctgtaactgccttaacagatgcttacatggattcaattccattagtttgtatttcaggacaagttcctacacaccttatcggaactgatgcttttcaagagtgtgatacaactggaataactagaccatgcacaaaacataattggctagtaaaagatataaaaaatttagaaaagacaattcacaaagcatttgaagttgcaacaacaggaagaccagggccagtattagttgatattccaaaagatgttcaatttcaaaaaacaagttatacaaaatataaaaaacaaaaaaaattaaa

SEQ ID NO: 231819 - DNA, 841 bp, Unknown
  Bacterial polypeptide expressing nucleotide sequence isolated from the Sargasso Sea
attaccaatttacgacgaattacaaaattttaaatcaattaaacatgttttggttagacacgaacaaggtgctggtcatgcagcagaaggatatgcaagatcatcaggtaaacctggtgttattttagtaacttcaggtccaggtgcaacaaatgtagttacagctttgacagatgcatatatggactctattccattggtttgtatttctggacaagttccaactcatttaattggcacagatgcatttcaagaatgtgatacaactggaataaccagaccttgcactaaacataattggttagtcaaagatataaatgatttagctaacacaatacataaagcatttgaggtagcaactaccggtagaccaggaccagttttagtcgatataccaaaagatattcaatttcaaaaaacaaaatacaacagaccaaaaaaagaaaaaaaatctaacggtaaatctcataaccattttaatcaaaacagcattgatgaattaattgaattaatgagtaaatcttcaaaacctattttttatactggtggtggagtaattaattctggacccaaggctagtgaacttttaagagaacttgtttatgcaacaggttttcctattacttcaactttacagggattaggatctttcccaggtgatgataatcaatttttgggaatgttgggtatgcatggaacttatgaagctaataatgcaatgcacgactgtgatttaatgattaatattggtgcacgttttgacgataggataacaggaaaaatagatgaattttctccaaaatcaaaaaaggttcatattgatatagatccatcatctatt

SEQ ID NO: 231820 - DNA, 914 bp, Unknown
  Bacterial polypeptide expressing nucleotide sequence isolated from the Sargasso Sea
ctctatgtgggtggcggcgtggtaaatgcaggcccggaagcgtcgcaaatggtgacgcatttggttcgtatgactggttttccgtgcacgacaacgctgatggcgctcggggcctttccggcatctgatccactatttattgggatgcccggcatgcacggtacgtatgaagccaacatggttatgcatgactgtgacgtcatgtttaacatcggtgcgcgatttgatgacagagtgaccggcaaggttaacgccttttcacccaactctaaaaaggtccatattgatatcgatccctcctccctcaataaaaacgtatcggtagacatcggtattatcggcgatgcagccagtgtgctcgaggatattctcgccatctgggatgaaaagcagccggtgatcgagtcaggggcgctgaagaactggtggaagcagattgatgagtggcggggtgtggattgcttggcttatgatcaaggacctgagatcatcaagcctcagttcgcacttgaaacactgaataatgctctaggcgggacagattattacgtgacgacggatgtcgggcaacaccagatgtggtcggctcagttcctgcactttgacgagcctaaccgctggatgacgtcgggcgggcttggaactatgggatacggtgttccagcggccatgggtgtccaggtcgctcacccagactcgtcggttatttgcgtaaccagcgagggctccttgatgatgaacattcaggagatgaacaccatcgctaaaaacggtttgccggtgaagatcctcaaccttaacaatcagattctcggtatgatccgccaatggcaagaattgttccatgataatcacgagtcagaatgcgatctatcgggcgggccagatttcatcaagcttgccgaggctttcgg

SEQ ID NO: 231821 - DNA, 975 bp, Unknown
  Bacterial polypeptide expressing nucleotide sequence isolated from the Sargasso Sea
gggaattacaagaccatgcacaaaacataactggcttgtaaaggatgttaaagacttatcaaaaattatacataaggcttttgaagttgccacaacaggaagaccaggacctgttctagttgatataccaaaagatattcagtttcaaaaaacaaaatatgttaattcaatcaaaagaaaaaaactaaacggcaaaatccataacaaatttaatcaaagtgaaattgatcaacttgtaaagttaatggtaaattcatcaagaccaatattatatactggcggaggtgtaattaactctgggccaaaagctagcgagttattaagagaacttgtatcacttacaggttttccaataacttctactttacagggcttaggatcatatcctggtgatgacaatcaatttttaggaatgcttggtatgcatggaacttatgaagcaaacaatgcaatgcatgattgtgatttgatgattaatattggtgcaaggtttgatgatagaataactggaaagatagatgagttttcaccaaaatcaaaaaaagtccatatagatatcgatccatcatctatcaataaaaatgtaaaagttgatttaccaattgtcggtgatgtttctgaggttatgctttcggtaataaagacactaaagaaaaagaatccgaattttgcaagttcaaataaagaaaaaacttcaaaatggtgggagaaaatttctgaatggagatcggtgaactcacttaattttataaacagtgataaaactataaaaccacaacacgctattcaaagattgtatgaacttacaaaagataaagatacttatataacaactgaagtgggccaacatcaaatgtgggcagcgcaacattataaatttaataaaccaaacagatggatgacatctggaggtttggaaacaatgggatacggtttgcctgcagcagttggtgttcaaaatgcacatcctgataa

SEQ ID NO: 231822 - DNA, 916 bp, Unknown
  Bacterial polypeptide expressing nucleotide sequence isolated from the Sargasso Sea
gctggcggtggaacaatctcgagtaatgcagctgatgaattaagagagctaaatgaactgattgattttccagtaacaaatactttgatgggtttgggagtctacccaggaacaggaaaaagatttttaggcatgctaggtatgcatggaacttatcaagcaaatatggcaatgcataatgctgatttaattattgctgtgggagctagatttgatgatcgaattactaacacgccaaagaagtttgctccaaaagcaaaagttattcactttgatgtagatcattcatcagtatcaaagataattgaggcagatattgctgtattcgggcaagtcaaggactcattgaaagctattaataactatttaaggtcgagaaaggatgaaattaataaagaaaagctttctccgtggcaccagcaaataaaagaatggaaagaaaagcatggtcttaatcatgaactctataagaatgattcagacgagcatccaattttacctcaagcagctgtgcaacatatatatcaagaatctgaaggcaaagcatttgttacctcagatgttggtcagcaccaaatgtttgctgctcagtactatcactttgatgaacctagaaaatggataaattctggtggtcttgggactatgggttttggtcttccgtcagcaatgggagttaaactggcttatcctgaagaagaagtaatctgcattactggagaaggaagtattcaaatgtgtattcaagaactctcaacatgctcacaatacaaactaccaataaaaatatttaacattaataatcttgcactcggcatggtaaagcaatggcaagatatgaactatgacggtagacactcatctattagttatgaagactcattgccagattttgttggacttgcagaatcctagg

SEQ ID NO: 231823 - DNA, 628 bp, Unknown
  Bacterial polypeptide expressing nucleotide sequence isolated from the Sargasso Sea
atgtctaaattatattcaggagctgaaattgtatttaaatgtcttgaggatcaagatgttgaatttatatttggatatcctggaggtgcagttttaccaatttatgatgaattaaaaaatcacaacacaattaaacatattttagtaagacatgaacaaggtgctggtcacgctgcagagggatatgcaagatcatctggaaaaccaggtgttgttttagtaacttcaggaccaggtgctactaatgttgttaccgcattaacagatgcatatatggattcagttccattagtttgtatttcaggacaagtaccaacacacttaattggaacagatgcatttcaagaatgtgatactacaggaattacaagaccttgtacgaaacataattggttagtaaaagacataaaagatttatcaaaaactcttcatgaagcttttagagttgcaacaacaggaagacctggaccagttctagttgatatcccaaaggatattcaatttgctaaagtcaattattcaaaacctaaaactcaaaaaaaacttaacggaggatcatctaaccatttttctcaaaaggatatcgataagttaatagatttaatgaataattcgaaaaaaccaatta

SEQ ID NO: 231824 - DNA, 937 bp, Unknown
  Bacterial polypeptide expressing nucleotide sequence isolated from the Sargasso Sea
atgtcaaaattgtattcaggtgcagaaattgtatttaagtgcttagaggatcaaggggtcaaatttatttttggctatcctggtggtgcggtgctgccaatctatgatgaactaaaaaactttgagtcaataaaacatatattagttcgtcatgagcaaggagctggacatgcagcggaaggatatgcaagatctacaggaaaacctggtgtacttctagttacatctggcccaggtgcaacaaatgctgtaactgcattaaccgatgcttacatggactcgatacctttagtttgtatttctggacaagtaccaactcatttaatcggaactgatgcttttcaagaagctgacacaaccggtattacaagaccgtgtacaaaacataattggcttgtaaaagatattaaagatttacctgaagtaattcacaaagctttcgaggttgcaacgactggaagacctggccctgtattagtcgatattccaaaagatattcaatttcaaaaaacaaattatataaaaaacaaaaagaaaaaaaaattaaatggaaaaaacaataataaattttctcaaaaagatattaatgaattaataaatttaatgaacaaagcaaacaaaccaatcttttacacaggtggaggggttataaattctggacctaaggctagtgaacttttaagagagcttgtacacatgagtggttttccaattacgtctactttacaagggttgggatcttatccaggagaggactcacaatttttaggcatgcttggaatgcatggatcttacgaagcaaataatgcaatgcatgattgcgatttaatgataaacattggcgctagatttgatgatcgaattaccggcaaaattgatgagttttcacctaattcaaaaaaagttcatatagatattgatccatcatccataaata

SEQ ID NO: 231825 - DNA, 742 bp, Unknown
  Bacterial polypeptide expressing nucleotide sequence isolated from the Sargasso Sea
agaccaatgatatatgctggaggtggagtaattctcgggaaagcaagcaatgatttagttaaattaactaaacatcttaattttcctatcactaatacgttgatgggattgggagcatatccatcatcggatgagcagtttttaggtatgcttggaatgcatggtacatatgaggcaaatatggctatgcatgaatgtgacgttctgcttgccattggtgctagatttgatgatagggtgaccggagatactaatcaattttgtccaaaagccaagatcatccacatcgatattgatccatcatcaatttcaaaaattattgaagtagatctatccttaattggcgacaccaaaaggatattgaaaaaacttttagaacaaacaaaaaattttgaaaaagatataaataaagatgctttgagtaaatggtggagtaaaataaattcatggcaaaagaagaaatgtttatcttataaaaaatctactaaagtgattaaaccccaatccgtaattgagtctcttcataagattacaaaaggaaaggcgtttgtgacttcagatgtagggcaacatcaaatgtgggttgctcaatattataaatttgacaaacctaatagatggattaattctggtggtctaggaacgatgggttttggcctaccagccgctataggagcgcaattagcttatcctaaagaacaagttatatgcgtaactggtgaagctagtattcttatgtgta

SEQ ID NO: 231826 - DNA, 841 bp, Unknown
  Bacterial polypeptide expressing nucleotide sequence isolated from the Sargasso Sea
tcaaaaaaaccactaattgtttggggtcaaggagtaatcttagctgaagctgaaaatgaatttagagaatttgtagaaaattcaggaatacctgctgtttggacaatcttaggcctatcagccctcccgaccgatcaccctctaaatatgggaatggttggaatgcatggtaattatggtccaaacatacttacaaatcaatgtgatgttttaatagctgtggggatgaggtttgacgatagagttaccggaaacctaaatacttatgcaaaacaagcaaaaatagttcatttggaaattgacccagctgaaatatccaaaaacgttttttctcattttccgattttaggtgattgtaaagaaagtttaaaaaaactttcaaatctaattaacaaaaagtcacttgatagttggattggtctttttgataagtatatgaaaattgagtataaatctgtaattgaaaaggatttgtttccaaacaaagatggacttacaatgggagaagtaattaattcaataaataaacactctaagggtgatgctattatagttacagatgttggtcaacatcaaatggttgcgtgtagatatgccaaatttaattcttcaaaaagtaatataacctctggtggattaggcactatgggttttgccttacctgccgccataggtgctaaaattggtgccagtcacagagaagttgttgctgtaattggtgatggtggatatcaaatgactattcaagaattgggaacaatttttcaaactaaagcggctgtaaaaatagttgtattaaacaacgattatcttgggatggtaaggcaatggcaacaattat

SEQ ID NO: 231827 - DNA, 800 bp, Unknown
  Bacterial polypeptide expressing nucleotide sequence isolated from the Sargasso Sea
aatgcctggtatgcatggtaattatacagctacaacctctatgcagaattctgacttacttatagctttaggagtgaggtttgatgaccgagttacggcaaatcctaaatattttgctcaaaaagccaaagttatccatgctgacatagatcctgctgaaatagggaaagtaagagaaccagaagttcctattgttggagatgcaaaaagtgtaattaaaggtttgattgaaacattaggagatacaaaagtagatacacaagattggcttaaagagataaaagaaatgaaaaaaagttatcctttaagttataaccaagaagaaaaaggtccacttaaagttccatatgttttagaagagctacaaaaaatgtcagaagaagattccatagttgtttctggagttggccaacaccaaatgtggatttctcttcattggaaatttacttcccctaacacttggttaaattcaggcggtttaggcacaatgggttattcacttcctgcagcaattggtgcaaaagctgcatttcccgagaagcaagttcttgctttagatggagatggttgtttccaaatgacttgccaagagttaattactgcatctactgaaaacataccattaaagatagtagtttttaacaatggaaatcacggaatggtaaggcaatggcaaaaaatattttataatcatagattctcagcttctgaactgactcatcatacaccagattatgtagctcttgctgaagcaatgggagcagttgggcttaggatggtcgaaaaatcagatgttaata

SEQ ID NO: 231828 - DNA, 931 bp, Unknown
  Bacterial polypeptide expressing nucleotide sequence isolated from the Sargasso Sea
tggttttccaaatacttctactcttcaaggtctgggcgcatacccaggagatgataatcaatttttaggaatgcttggaatgcatggcacttatgaagcaaataatgcaatgcatgattgtgatttattaattaatattggtgcaaggtttgatgatcgtattactggaaagatagatgagttttcaccaaattcaaaaaaggttcatattgatattgacccttcatcaattaataaaattatcaaggtcgatcttgcaatagttggagacgttacgagtgtcataagtaaaataaataaaacaattacaaaaagtaaaaatggtcatagtaaatcaaacaaatcaaacattgctaagtggtgggaacaaatagagaaatggagagaaaaagattctcttaattttataaatagcagcgagagtattaaaccacaacacgctgttcaaagactttatgaattaactaaggataaagatacttatgttaccactgaagttggacaacatcaaatgtgggctgcacagcattataaatttaataaaccaaatagatggatgacatctggtggcttaggaactatgggatatggattgccagcagcggttggtgtacaaattgctcatcctgaaaaacttgtaattgatattgcaggagaggcttcagtattaatgacgatgcaagaaatgtctacggcagttcaatataatcttcctattaaaatatttattttgaacaatcagtatatgggaatggttagacaatggcaggagttactacatgaaaaaaactattctgagagttactctgaagcattaccagattttatgaaaatggctgaagcatatggatgcaaaggaattaaagcagataatccagctgatatggatgacaaaattcaagaaatgattgattatgatgggcccagttat

SEQ ID NO: 231829 - DNA, 601 bp, Unknown
  Bacterial polypeptide expressing nucleotide sequence isolated from the Sargasso Sea
atgggaaaattaatatcaggcgctgaaatagtttttaaagttttagagcatcataaggtagaacatatattcgggtatccagggggagctgttttaccaatttatgatgaacttaaaaaccataaaacaataaaacatattttggctcgacacgaacaaggcgcagggcatgcagcagagggatacgcacgttcatctggaaagccaggagttttattagtcacttccgggcctggagctacaaacgctgtaactgctcttacagatgcttatatggactcagtcccattagtttgcataagtggtcaagtcccaactcatttaatcggaacagatgcatttcaagaatgtgatacgactggaattactagaccttgtacaaaacataattggttggttaaagatgtaaacgatttggcaaaaataatggatttagcatttgaagttgcaacaactggtagacctggaccagttcttgtagatataccaaaagatattcaatttaaaaaaacaaattttattttaaaaagttcaaacaagaaaaaattaaatggcaaatcaagtccgaatggaaaaataagctcaagtggatttagataat

SEQ ID NO: 231830 - DNA, 886 bp, Unknown
  Bacterial polypeptide expressing nucleotide sequence isolated from the Sargasso Sea
aaaaagccactgatctacgccggcggtggagtcattaattcgggccccgcggctagcaagctgctaacccagtttgtgaaaatgaccggtgtaccgtgtactctcacgctcatggggcttggagcgtttccggcgtcgaacaaacagttcatcggcatgcttggtatgcacggcacctacgaggcaaatctggctatgcacgattgcgatgttatggtttgcattggggctcggtttgatgatcgggtgaccggtcgcttggatgccttttcgccgggatcgaccaagattcacgtggatattgatccgtcctccatcaacaaaaatgttcgcgtcgacattcccattattggcgatgtgggtcatgtgcttgaagacatgattaagatctggaagggcactcaggcaaaggttgatacaaaggctttgaaggcctggtggaaaaaggttgatgcctggcgatccgtcaattgcctgaagttcaagcaggaaggcgaaattattaagccccagcatgccttgacccgtctttgggaattgtgccacgaggcgaagaaggagcccttcattacgaccgaggtcggccagcatcagatgtgggcggcccagtaccttgggttcgaaaagccgaaccagtggatgacctccggtggtctgggcaccatgggctatggactgccggccgcaatgggcgtgcaggtggcgcatcctaacgaattggtggtctgcgtcgctggagaagcctcttacctgatgaatgtccaggagttgtcgacaatctcgcaatacaagttgccggtgaagtcgttcattttgaataacttctatctgggcatggtgcgccaatggcaggaattgctgcatggccagcgctactcggagagct

SEQ ID NO: 231831 - DNA, 783 bp, Unknown
  Bacterial polypeptide expressing nucleotide sequence isolated from the Sargasso Sea
cctgacttctacgcctaatcaaatagaagattcacggccacaaactcaacatgagatgtcaggagctgatgccttgatggattctcttcgtaggcatggagtcgatactatttttggttatcctggcggagcaatcctcccaatatatgacgcggtttttaaagcggagcaagagggatggttaaaacacattcttgttcgacatgaacaaggtggaactcatgctgcagatggttttgctagagcgacggggaaagttggagtttgttttggtacatcaggtccaggcgctacgaatctagtcacaggaatagcaaccgctcagatggattctgtacctcttgtcgtcataacaggacaagttcctagacctgctattggcactgatgcttttcaagaaacagatatttttggaataacacttccaattgttaaacattcgtgggtcgtaagagatccatctgaaattgcaaaagttgtagcgcaagcctttctcattgcttcttcgggtagaccaggccctgttttgattgacataccgaaagatgttggacaagagatgtttaaatatcttcctgttgagcctggttcaataaagccactagggtttgaactgccaatcgcgccagaacataaagccataagttcagccatagatctaattgaaaatgctgagcaaccactcctttacgttggtggcggtgttatttcttcgggggcacatgaaactctggctgcgattgctaatagatatcaaatacccgtaacaacaactttgatggg

SEQ ID NO: 231832 - DNA, 943 bp, Unknown
  Bacterial polypeptide expressing nucleotide sequence isolated from the Sargasso Sea
atatttatgactcaatttttaagcaaaaggaaatgggaacatattctgtttagacatgagcaaggcgctactcatgctgctgatggatacgcaagagcaacaggaaagcctggagtagttttggttacttctggtcctggagctactaatgctataactggaatagcaactgcatttatggactctataccaatgattgttatatcgggccaagttgcaaaacatcttataggaacagatgcatttcaggaaactgatatgattggtatttcacgtcccatcgtgaaacacagcttcactgttgatagtgcagagaatataccagagattattaaacaagcctttcatattgcaacttctggaagacctggccctgtcgtaatagacgttcctaaagatactactgcgccagataagttatttgaatttaaatatcctaatgatgtagatattagatcttataaacctccaattgatcctgatccaagacaaattgaaagagctgtagatgcaatcatagaatcaaataaacctgttatttatgctggaggtggtgcaataaatagcaatgcctctgaagagcttattcgattaaatgaaatcttagattttccagttaccaatactcttatggggttaggtgtttatcctgctactcataaaagattcttgggaatgcttggcatgcatgggacataccaagcgaatatgtcgatgcataatgcagatttgataattgcaattggagcaagattcgatgacaggattaccaacacaccaaaattatttgctcctaatgcaaaaataatacatttagatgttgattactcatcagtatctaaaattattgaggcaaatattgcagtatttggtcaagttaaaaactcattattagagatgattaaattattagaagctaaaaaagaattaattgacccaaaaa

SEQ ID NO: 231833 - DNA, 901 bp, Unknown
  Bacterial polypeptide expressing nucleotide sequence isolated from the Sargasso Sea
aatgacaattaactatattagtggtgcagaggctgtaattaaagccctagtcgaaaacggtgttgaggtaatatttggatatcctggtggagctgtacttcctttgtatgatgctctattcgaaaacaaaaaaataaaacatatattagttaggcatgaacaagctgctgtacatgccgcagaaggttatgctagatcaactggaaaggttggatgtgttttagttacttctggaccaggtgcaaccaacgccatcactggattaacagatgcattaatggactctgttccaattatttgccttagtggtcaagtacctactcatttaatcggcacagatgcttttcaagaagctgatacaactggcatttcgagaccatgtacaaaacataattacttagtaaaagatgttaataggctatgtgagattattcataaatcattcgaaatagcttcatcaggaagacctggcccagttctcattgatcttccaaaagatatccaactatcaactttaaaatatgaaaataaaatttctaaaataaaaaaaattagcaatgattattcttcaaaaataaatgaagatttgattaataaagttgcaaaactgatattgcaggctgaacgtcctataatttatggtggtggaggtgtagtaaattctggaccaaaagcttctaaacttttgactgaattagtaaatatgttagattgcccagtaacacttactctcatgggcttaggttgtgtaccaaatacaaataaaaattttttaggtatgttaggaatgcacggaacatatgaagctaacttagctatgcataattgtgatgtcatgctcaatgtaggggcacgttttgatgatagagtaacaggtaagttaaatgcttttgcaccaaaa

SEQ ID NO: 231834 - DNA, 896 bp, Unknown
  Bacterial polypeptide expressing nucleotide sequence isolated from the Sargasso Sea
tttcgaagcaacaatgcaatgcatgattgtgatttaatgattaatataggagcaagatttgatgacagaatcacgggaaaagttgatgagttttctcctaaatcaaaaaagatacatgttgatatagatccttcctcaataggaaaaaatattaaggttgatttagcggtagtaagcgatgtttcagaacttttaaaaagtttaatcaaaaggtttaaagaaaagaataaaaactttttaaattctaataaacaaaaaacttctaaatggtgggaacagatcgataaatggagagagaaaaaatctttaaattttattaacagcagtaagataataaaacctcagtatgcagttcaaagactttatgaattaacaaaagatcaagatacttttattaccactgaggttggccaacaccaaatgtgggctgcacagcattataaatttaataaacctaatcgatggatgacgtctggcgggctaggtacaatgggctatgggcttccagcggcgattggagttcaaatagcaaatccaggaaaactagttgttgatatagcaggcgaagcatcagttttaatgaccatgcaagaaatgtcgacggcagttcagtatagattaccaataaaaatatttatcttaaataatgaatatatgggtatggtgaggcaatggcaggaacttttacatgaaaaaaactactcagaaagctacactgctgctctcccagactttgtgaagcttgcagagtcttatggttgcgttggtattagagctaaaacaccagatgaattagatgaaaagataaaagaaatgattgatattcaaaagccagtaatatttgattgtatggtagataaatctgaaaattgtttcccaatgataccatcaggaaa

SEQ ID NO: 231835 - DNA, 634 bp, Unknown
  Bacterial polypeptide expressing nucleotide sequence isolated from the Sargasso Sea
gatgatccacaatttttagggatgctaggcatgcatggaacttatgaagctaataatgctatgcatgattgtgatttaatgattaatataggtgcgcggtttgacgacagaatcactggtaaagtagatgaattttcaccaggatcaaaaaaaattcacgttgatattgacccatcttcaattgggaagaatataaaagttgatttagcaattgtaagtgatgtgactacacttttgaaatctttaattaaaagattcaaagaaaaaaataaaaactttgtaaattctaataaacaaaaaacatctaaatggtgggaacaaattgaaaaatggagagaaaaaaagtctctaaactttatcaatagcgataagattattaagccccaacacgcagttcaaagactatatgaactaacaaaaaatcaagatacgtttattactactgaggtgggccagcatcaaatgtgggctgctcaacattataaatttaataaaccaaatagatggatgacatctggtggcttaggaactatgggatatggactcccagcagcaatcggagttcaaatcgcaaatccagggaaattagttgttgatattgctggagaggcatctgttttgatgacaatgcaag

SEQ ID NO: 231836 - DNA, 907 bp, Unknown
  Bacterial polypeptide expressing nucleotide sequence isolated from the Sargasso Sea
gatgatagagttactgggaaacttatcaaaattttcaccatatgcaaaaaaagttcatattgatattgatccatcttctattaataaaaatgtaaaagttgatgtagcattaattggagatgttaaaactattattaactctatttattctcaattaaataaaagcaaatctatattagattttaataatataaagcaatggtggaataaaataaatatttggaaaaagaaaaattgtcttggttacaaaaaaattaattatcctattaaaccgcaatatgcagttgaaagactatatgaattaactaaaaataaagattgttttataacaaccggtgttggccaacatcaaatgtgggcagcgcaatattacaaatttaataaaccaaatagatggatgacctcaggcggtttaggaacaatgggctacgggttgccagctgcaattggagctcaaatagcaaatccaaataaattagttatcgatattgatggagaagcatcctttctaatgactatgcaagaattatcaacaatatctcaatataaattaccagtaaaaatttttattgttaataatagatggatgggaatggtcagacaatggcaagaattaatccatggaggaagatattctgaaagttacaccgagtcattgccagattttgtaaaattagcagaatcttttggaatagttggtttaaaagcaaacaaaagttcagaagtagataatacaattaaagaaatgcttagaataaaaaaaccagttttacttgatatggttgtagatcaaaaagaaaactgttttcctatgattccttcaggagctgcacataacgaaattttattgggacccgaggatcaaactgatgaaacaattaatgaagagggaatggttctggtttaa

SEQ ID NO: 231837 - DNA, 727 bp, Unknown
  Bacterial polypeptide expressing nucleotide sequence isolated from the Sargasso Sea
caaatattttgcgaagtggggtgggaacaaatacaaaaatggagaggcaaagactcccttaattttgttaacagtaatgatagcatcaagcctcaacatgcagttcaaaggctgtatgagttaacaaaagataaagatacttatgtaacaacagaagttggtcaacatcaaatgtgggcagcacaacattacaaatttaataaaccaaatagatggatgacatctggaggtttaggtacaatgggttatggattaccagcagcagtaggtgtgcaaattgcccaccctgaaaagttagtagttgatattgctggtgaagcctctgtattaatgacaatgcaagaaatgtccactgcagttcaatacaacttaccaattaaaatttttattttaaataatcagtacatgggaatggttagacagtggcaagaacttttacatgaaaaaaactactcagagagttattctgaagcacttcctgattttttaaaaatggctgaagcttatggctgtaagggaattaaagcagaaaacccttccgagctagatgagaaaattcaagaaatgatagattataaaggtccagttatttttgattgtcatgttgatcctaatgaaaattgttttccaatgataccttcaggaaaacctcacaatcagatgatcttaggacctaatgatcaggaagagaacaaaatcaagggtaaaggcaaagccttagtttaga

SEQ ID NO: 231838 - DNA, 481 bp, Unknown
  Bacterial polypeptide expressing nucleotide sequence isolated from the Sargasso Sea
atggaaaagtccaaaaggatttctggttcccaggttttctttgaatgcttaaaaaatgaaaaggtgacaaccatttttggttatcctggtggtgctgtccttcctttttacgatactctttacgacatcaaagacctggaacacatccttgttcggcatgaacaaggagctgttcatatggccgaaggttatgcaaaagcaacgggaaaaactggtgttgttttggtcacgtctggtccaggtgcaaccaatacagtaacaggaatcactgatgcctttatggactcagtccccattgtcgtatttactggccaagttccgcggccttttctagggctagactccttccaagaagctgatgtgataggtgtaacaagaccgatcacaaagtggaataagttggttaggtcgccccaagagcttcttgaggcaatacctaaggcctttgaaattgccaataaaggccgaccagggccagttc

SEQ ID NO: 231839 - DNA, 982 bp, Unknown
  Bacterial polypeptide expressing nucleotide sequence isolated from the Sargasso Sea
cgtcaggcgctggcatgtttgggtatgcatggtacctacgaagcgaatatgaccatgcatcattccgatgtgatctttgccgttggcgttcgctttgacgatcgaacgaccaataacctggcaaaatattgcccgaatgcgaccgtactgcatatcgacatcgatccgacctctatttcaaaaaccgtcacggcggatattccgatcgtcggcgatgcccggctggtgctggatcagatgcttgagctgctggagcaggagaaatcgcagcagccgctggacgataaccgtgactggtggcaacagattgagcactggcgtgcccgtcagtgtctgaaatacgacacgcaaagcgaaagtattaaaccgcaggcggtgattgaaaccatctggcgtctgacgaaaggggaggcgtatgtgacctctgacgttggccaacaccagatgtttgccgcactttactatccgttcgataaaccgcgtcgctggattaactcaggcggcctcgggactatgggattcggtttacctgcggcgttaggggtgaaaatggctttgccggatgaaacggtagtgtgcgtcaccggggatggcagcattcagatgaatatccaggagctgtcgacggcgctgcaatatgaactgccggtgctggtactcaaccttaacaaccgttatctcggcatggtcaaacagtggcaggacatgatctactccgggcgtcactcacagtcttacatgcagtcgctgcccgatttcgtgcgccttgctgaggcttatggacatatcggtatccagattaatcggcctgaagaacttgagagcaagttgggcgaagcgctggaacatgtgcgtaaccatcgtctggtgtttgtcgatgtcaccgtcgacggtagtgaacatgtctacccgatgcagatacgtgggggtgggatggatgaaatgtggttaagcaaaaccggagaggacctgattatgcgcc

SEQ ID NO: 231840 - DNA, 847 bp, Unknown
  Bacterial polypeptide expressing nucleotide sequence isolated from the Sargasso Sea
attacatctacattacaagggcttggagcatttcctggtgatgataatcagtttataggtatgttaggaatgcacggaacttacgaagcaaataacgcaatgcatgattgtgatttattaataaatataggggcaagatttgatgataggataacaggtaagatagatgaattttcaccaaaatcaaaaaaagttcatattgatattgatccatcttctatcaataaaattataaaagtagatttagcaattgtaggtgatgttaatgaagttcttaaagcaactataaaaaaaattaataaaaaacaaaacggtttaagaacatcaaataaacaaaatatatcaaaatggtgggaacaaattcaaaaatggagaacaaaaaattctttaggttttataaatagtgacaaaaatattaaacctcaacatgctgtgcaaagattatatgaattaacaaaagatcaagatacctttattacaactgaagttggtcaacaccaaatgtgggccgcacaacactataaatttaataaacctaatagatggatgacatctggtggacttggaactatgggttatggccttcctgcagcagtaggtgtacagattgcacatccagataaacttgtaatagacattgctggtgaggcatcagttttaatgacaatgcaagaaatgtccactgcagtccaatataatttacctataaaaatttttgttttaaataatcaatatatgggaatggttagacaatggcaggagttacttcatgaaaaaaactattcagagagttattctgaggcattacctgattttgttaaattagcagaggcttatgggtgcaaag

SEQ ID NO: 231841 - DNA, 847 bp, Unknown
  Bacterial polypeptide expressing nucleotide sequence isolated from the Sargasso Sea
ttggtaaaactgttacgtaaagcaaaaaaaccaatcatctatagtggtgggggagtgattaactcaggaccaaaagcaagccaggctttgagagaatttgtggatttaactggttttccaattacttctactcttcaaggtttgggtgcataccctggagatgataatcaatttttaggaatgcttggtatgcatggtacttatgaggcaaataatgctatgcatgattgcgatcttttaattaatattggcgcaaggtttgacgaccgtattacaggaaaaatagatgagttttcaccaaattcaaaaaaagttcatattgatatagatccttcatcaattaataaaattatcaaggtggatcttgcaatagttggagatgttacgagtgttataagtaaaattaataaaacaattataaaaagtaaaaatggtcacagcaagtcaaacaaatcaaatattgcaaaatggtgggaaaaaattgaaaaatggagaggaaaaaattctttaaattttgttaatagcgataaaagtatcaaacctcaacatgccgttcaaagactttatgaattaactaagaataaagacacctatgtaactaccgaggttgggcaacatcaaatgtgggctgctcagcattataaatttaataaaccaaacagatggatgacatctggtggcttaggtaccatgggctatggtttgccagcagcagtaggagtacaaattgctcatcctgaaaaattagtgattgatattgctggagaagcttctgttttaatgacattgcaagaaatgtctaccgcggtacaatacaatcttccaataaaaaaatatttattttaaa

SEQ ID NO: 231842 - DNA, 873 bp, Unknown
  Bacterial polypeptide expressing nucleotide sequence isolated from the Sargasso Sea
ttttggatatccaggcggagcagtgttaccaatttatgatgaattaaaaaatcactcgactattaagcatattttagtgagacatgaacaaggtgcaggacatgcagcagaaggttatgcaagatcatcaggaaagccaggtgtagttctagtaacttccggaccaggagctacgaacgtagtaacagctttgactgatgcgtatatggactcagtgccgttagtgtgtatatcaggacaagttcctacacatttaattggcacagatgctttccaagagtgcgacaccacaggaataactcgaccatgcacgaaacataattggttagttaaagatataaaagatttatcaaaaattttacatgaggcttttttagttgcaacaactggtagacccggccctgtcctagttgatattccaaaagatatccaatttgcaaagacaaattattcaaaaccaaaaaaaaagaataaagtgagaggtaaattaaataataaatttacacaaaatgaattagataaattaattgatttaatttcaaaagcaaaaagaccagtaatttatactggtggtggtgttattaattcgggaccagaggctagtgaaactcttagagaattcgttagacttataggatttccaattacatctactttacaaggattgggagctttcccaggagacgataatcaatttatagggatgcttgggatgcacggaacttatgaagctaataatgcaatgcatgattgtgatttactaattaacattggagcaaggtttgatgacagaataacaggaaagatagatgaattttcacctaaatcaaaaaaagttcatattgatattgatccctcttcgattaataaaat

SEQ ID NO: 231843 - DNA, 907 bp, Unknown
  Bacterial polypeptide expressing nucleotide sequence isolated from the Sargasso Sea
aaagttaacattaagtttaatggacaagataaaaaaattgatcatgcgattgaactaattaaaaaatcttcaaaaccaattttatatacaggtggaggagttataaattcaggaccgaaagccgctgaattacttcgtgagctagtatcgctaacaggatttccaattacttccacactacaggggttgggcgcctatcctggaaacgatccacagtttttaggtatgttaggcatgcacggaacttatgaagcaaataatgcaatgcatgattgtgatttgatgatcaacattggggcacgcttcgatgatagaataacaggaaaaattgacgagttttctcctaaatcaaaaaaaattcatattgatattgatccttcttcaatcaacaagaatgttaaagttgatatagcattagttggagatgttaaatttgttctagaaaagttagtttcgatagtaaaacaaagatatccagattttgaaaattctaataagcaaaagatagccgcttggtggggtaagattgaaaattggagaaagaaaaactctctaaattatataaatagcaaagaagtgattaaaccacaatttgcagttcaaagactttatgaattaactaaagcccaagatgcttttattacaacagaagtaggacaacatcagatgtgggcagcacaacattataaatttgataaacctaaccgatggatgacttctggtggtctcggaaccatgggttatggattaccagcggccgtgggggttcaagtagcacatccagacaaactagtgatagatattgcaggggaagcttctgttttgatgacaatgcaagaaatgtcaactgctgttcaatataaattaccaataaaaatatttattttgaataatgaatacatgggga

SEQ ID NO: 231844 - DNA, 878 bp, Unknown
  Bacterial polypeptide expressing nucleotide sequence isolated from the Sargasso Sea
aacagatccaaaagctacatttgcgtatgactatccaaaggaagtcaagatgcgctcctactcagttcctggtaaagggcattcgggtcaaattaagaaagcaatcgaattgcttttggatgcgaagcggcccatgatttatacaggaggtggggttatacaaggggagggatctgaacttcttacaaagctcactagaaaacttggtttcccgataactaacacactaatgggacttggcgcctttccagcctctgacaaacagtttcttggcatgttaggcatgcatggaacttatgaagccaatatggcgatgcataactgcgatgttttgctgtgtataggagctcgttttgatgatcgagttactaactcggacacgtcaaaattttgcccgaacgcaaaaatattacatgtagacattgatccagcggctatttcaaaaacggttacggcagatatcccgatagttggttcggtaaattcagtgcttgaagaaatgttacagctgttaaattcgtctaaaaaaacgataaatgccaaggagttggaagtttggtggtctcaaatagatgcgtggcgtgaaaaaaaatgccttgagataaattctcggtctgatggaatcattttaccgcaacaagctgtaagggcagttttcgaaattaccaagggggatgcatatgtatcatctgatgtcgggcagcatcaaatgtttgcggctcaacactacggctttgataagccacgtcgttggattaattctggtggactaggaactatgggttttgggtttcctgctgcgatgggagttcaatttgccttcccggatgaaatttctgtatgtattacaggagagggaagcttcttaatgaatcaac

SEQ ID NO: 231845 - DNA, 845 bp, Unknown
  Bacterial polypeptide expressing nucleotide sequence isolated from the Sargasso Sea
attcagtttcaaaaaaccacatacaaaaattataaaaaaataaataaatcaaatggtaaaactcacaatcatttttctcaaaatgatattgatcaactaattaatttaatgggtaaagcctcaaaacctattttttatactggaggaggtgtaataaactccggaccaagagcaagcgaattattaagggaattagtaaatgtaactggttttcccattacttctactttgcaaggactaggttcttatccagcagatgataatcaatttttaggaatgctaggtatgcatggaacgtacgaagcaaataatgcaatgtatgaatgtgatctaatgataaatatcggtgcaagatttgatgatcgtataacaggaaaaattgatgaattttcaccaaagtcaaaaaaaatacatatcgatatcgatccatcatcaataaataaaaatgtaaaagttgatttagctattgttggtgacgttaagacagttgtttcatctataataaaaactttaaagaataaaaaacctaattttataaagtcaaataaacacaaaatttctaagtggtgggaaaaaattcaaaaatggagatcaaaaaagtctctggattatattggaagtgaagaaactatcaaacctcagtatgcgattgaaagattatatgagctcactaaagaaaaggatgcttatataacaactgaagtgggacagcatcaaatgtgggctgcgcagcactataaatttagcaaaccaaatagatggatgacttccggaggattaggaacgatgggatatggcttaccagctgctgttggtgttcaagttgctcatccaaataaattagt

SEQ ID NO: 231846 - DNA, 913 bp, Unknown
  Bacterial polypeptide expressing nucleotide sequence isolated from the Sargasso Sea
tgcaagatcaagtgggaagccaggagtgttactagttacttcaggacctggcgcaactaatgccgtaacagctttgacagatgcctacatggactctgttcctttagtttgtatttcaggtcaagttccaactcacttaattggaacagatgcatttcaagaatgtgacacaactggtattactcgaccatgtacaaaacataattggttagtaaaagatgtaaatgatctttctagagttatgcatttagcttttgaagttgctacgactggaagacctggcccagtcttagttgatattcctaaagatgtacaatttaaaaaaggtaaatataaatttataaaaaatagcttgaagaaaaaacttaatggcaaaactactcacaagatatctaataaagatttagatgaatttatcgacttgatgaaaaattcatctaaaccaattttttatactggaggaggtgttataaactctggccctgatgctagtaaatatttaagagagttattatctttaacaggttttcctattacttctactctacaaggattgggagcgtatcctggagatgatcctcaatttttaggaatgttaggaatgcacggtactttcgaagcaaacaatgcaatgcatgactgtgatttaatgattaatataggagcaagatttgatgataggatcacaggaaaggttgatgagttttcacctaagtctaaaaagatacacgttgatatagacccttcctcaataggaaaaaatattaaggttgatttagctgtagtgagtgatgttacagaacttttgaaaaatttaatcaaaaggttcaaagaaaagaataaaaactttttaaactctaataaacaaaaaacatctaaatggtgggaacaaatgacaaatgagagaaaaaaa

SEQ ID NO: 231847 - DNA, 825 bp, Unknown
  Bacterial polypeptide expressing nucleotide sequence isolated from the Sargasso Sea
tatggctatgcatgaatgtgatgttatgattaatattggtgcaagatttgatgatcgagttactggaagactcgatgcattttctccaaattcaaaaaaaatccatattgatattgatgaaagtaatattaataaaactataaatgtcgatgttccaataataggtgatgttaaacaggttgttgaaaagatgatcgaagtttggaaagaaaaaaaatttaaaatagatgatgaggcactaaaattatggtgggataaaataaataaatggaaagaagtagattgtttaaactataataatgaaggtaagcagattaaacctcagtatgcggttcaaagactctatgagttaacaaaaaatacaaaaacatttattactactgaggtaggccagcatcaaatgtgggctgctcaattttataaatttgaggaaccaaacagatggctaacatcaggtggtttaggaactatgggatatggttttcctgctgcaattggagctcaagttggacatccagatgccttagtagttgatatagcaggagacgcttccatactcatgaatattcaagaaatgagcacggctgttcaatatagattgccagtaaaaatatttattcttaacaatgaatacatgggaatggtaagacaatggcaagaacttttacatggcggtagatattctgagagttatactgatagtttacctgattttgtaaagttagctgaaagttataaagctgttggcctaagagcaaaaacaactgacgagcttgatgatgttatatctgaaatgatagaaacaaaaaatacagttattgcaga

SEQ ID NO: 231848 - DNA, 541 bp, Unknown
  Bacterial polypeptide expressing nucleotide sequence isolated from the Sargasso Sea
aatgacaaaaaaaattacaggttctgaaattgtcttaaaagcccttcaagaacaaggggtagaggtagtatttggttatcctggtggagctgtactgccaatttatgatagtttatttaaacaaaactcaattagacatattttagttagacaagaagctggtgccattcatgctgctgaaggatatgcaagatcttcaggaaagattggtgttgttcttgttacctcaggacctggagcaacaaatgttgtaacaggcttaacagatgctatgatggatagtgttcctatagtatgtataacaggacaagttccacaacatctaatcggtacagatgcttttcaagaatgtgacacaactggtattacaagaccttgcactaaacataattatttagttaaagatgtaaataaacttgcatctacttttcatgaagcttttgaaattgcaaaagatggaagaccaggtcctgttttaattgatgtgccaaaagatgttcaatttgccgaaggaaattatacagaatcaaaagataacatt

SEQ ID NO: 231849 - DNA, 538 bp, Unknown
  Bacterial polypeptide expressing nucleotide sequence isolated from the Sargasso Sea
atgaaaaataatggtgcagaaataattattaaaacattagtagatttagatgttgaaataatatttggttatccgggaggagcagtattgcctatttatgattctatatttaagcaaaatagaattaggcatgttttggttaggcatgaacaagctgctgtccatatggcagagggatattctagatccactggtaaggtaggagttgtgctagttacttctggtccaggagctactaatgccgttactggattgactgatgcatttatggatagtatccctatactttgtttgactggacaggttcctacgcacctaattggtacggatgcatttcaagaagcggatacaattggaattacggcttcatgtactaaacataattatttagtaaaagatatatcaaaattagaagatactttgcatgaagcatattatatagctaaatcaggtaggcctggacctgtggttgttgatttgcctaaggatgtacaaaatagcaaaaaaacatataataaaagaaataacacaaagacaa

SEQ ID NO: 231850 - DNA, 781 bp, Unknown
  Bacterial polypeptide expressing nucleotide sequence isolated from the Sargasso Sea
ctgacacttaaagaaattaactcatttatagactccaataacattgattttggcggaaaagattatagcaattggtggggtcaaattaatgaatggagaaaaaaagaatgtcttcactacgaacaaggcgatgaagtgatcaaaccacaacatgctatttccagactttacgaattaaccaaacaaagagacacttttgttactacagaagttggtcagcatcaaatgtgggcagctcaatactataagttttcaaaaccaaatagatggatcacatcaggtggtttaggcacaatgggtttcggtatgccagctgcagtcggtgcacaaatggcaaatccagattcactagttatagatatagctggtgaggcatcttttctcatgaacattcaagaaatagctacagctgttcaatataagttacctatcaaaatttttatccttaataatgaatatatgggaatggttagacagtggcaggaattattacatggtagtagatattcagagagttacgtagatgccctccctgattttaaaaaattagcagagagcttcaatgctgttggagttagagcaaaaaacattgctgaattagatgatacaattaatgaaatgatctcaatagacaggccagttatagccgatatttgggtcgataaaaaagaaaattgttttcctatgataccaagtggagctgcacatcacgaaatgttactatctaaatacgataaagaaaatcctgaaaatcaggaaaaaggaaaagtactagtttaat

SEQ ID NO: 231851 - DNA, 796 bp, Unknown
  Bacterial polypeptide expressing nucleotide sequence isolated from the Sargasso Sea
agtgatgtttcagaacttttaaaatctttaataaaaagatttaaagaaaaaaataaaaattttcttaattcaaatagacaaaaaacttctaaatggtgggaacaaattgaaaaatggagagaaaaaaaatctttaaactttattaatagcgataaaattataaagcctcaacacgctgtacaaagactatatgaattaacaaagaatcaagatacttttattactactgaagtaggccaacatcaaatgtgggcagcacaacattacaaattcaataaacctaatagatggatgacatctggaggccttggcacaatgggttatggacttccagctgctatcggtgttcaaattgcaaatccagggaaattagtagttgatatcgcaggagaagcctcagttttaatgacaatgcaagaaatgtcgactgcagtgcaatacaggctaccaataaagatatttattttaaacaatgaatatatggggatggtaagacaatggcaggaacttcttcatgaaaaaaattactcagaaagttataccgctgcattacctgattttgttaagcttgcagagtcttacggttgtattggtataagggcaaaaacacctgatgaattggatgaaaaaattaaagagatgattaatatagataaaccagtaatatttgactgcgttgtagataaagcagaaaattgttttccaatgataccttcgggaaaaccacacaatcaaatgattttaggtcccgaggaagaggaagaaatttctgatgaagggaaaattttagtttaat

SEQ ID NO: 231852 - DNA, 919 bp, Unknown
  Bacterial polypeptide expressing nucleotide sequence isolated from the Sargasso Sea
cgttaagcataagtcatatcgtccaaagcttaaggcaaatatcgatataattgatgaggctttacaattaatttcttcagctgaaaagcctgttttttatacaggaggaggtgttattaactctggaaacgcagctgtacagttattgagggagtttgtgagactcactggatttcctattacgtctactttacaaggtttaggagcttttccaggagatgacaaccaatttataggaatgcttggaatgcatggaacatacgaagcgaatatgacgatgaatcaatgtgacttaatgatcaatattggagcacgatttgatgatcgaataactggaaaagttgatgaattttctcctaattctaaaaagatacatattgatattgatccatcatcaataaataaaactgttaatgtagatgtcccaattataggcgatgttgctcatgttctagaagatgcaataaaactatggaaaacaaaggtttacaaaacaaataaagctgagattaaaaattggtggaacacaattagtaattggagaaaaaaagactctttaaaatttgaccaaggcaataagactattaagcctcaatatgcgattcaaaggctttatgaactaacaaaggatcaagatacatttgttacaactgaagtcggacagcaccaaatgtgggctgcgcagcattacaaattttcaaaacccaatagatggattacttccggaggccttggaactatggggtttggttttcctgctgctttgggagttcaagtagcataccctgataagcttgtaattgatatagctggtgaagcatcgatacttatgtgtattcaagaaatgtcgactgctattcaacataaattgccagtaaaaatatttattatcaataatcaatacatgggtatggttcgt

SEQ ID NO: 231853 - DNA, 865 bp, Unknown
  Bacterial polypeptide expressing nucleotide sequence isolated from the Sargasso Sea
gtcagcaaaaaaaccgatgatttattcaggcggcggggtaattctcggtgaggcgagcagagaactgaccaaatttgcgcgaacactgaattttccaataactaatacacttatgggtcttggtgcatacccagctactgataaacagtttgttgggatgcttggtatgcatggaacatatgaagctaacatggcaatgcataactgcgatgttttaattgcaattggtgcgcgatttgatgatcgcgtcactggcgatcttgaaaagttttgtccttatgcaaaaattattcatatagatgttgatccatcgtctattgccaaaaatgttcctgttgatattccaattgttggtgatgtaaaacatgttttaaaagatttaaatgaaattttaaaaaatactagagataaacttcaagaaaacaaaaaagatttagattcttggtggaagcaaattgatgaatgggcaaaaattgattgtctcaaatatgatcgaacatcatctgtgataaaaccacaatttgttgttgaaaaattgtgggaattaacaaagggtgatgcatatgttacatcagatgttgggcaacatcagatgtgggctgcgcagttttataagtttgataaaccaagacgctggattaattctggtggtttagggaccatgggttttggattgcctgctgcgatgggagtcaaattggcctttccgaatgagacagttgcatgtattacaggcgaagcaagtctcgtaatgtgtattcaggagttatcgacttgtcttcaatatgggacaccagtaaaaattataaatctgaataatcgctatatggggatggttaggcaatggcaagagtttttttattct

SEQ ID NO: 231854 - DNA, 814 bp, Unknown
  Bacterial polypeptide expressing nucleotide sequence isolated from the Sargasso Sea
gtgaaggccgatatcccgattgtcgggccggttaaaacggtactgactgatatgttggctctgcttgatgaagcgctgggtggcaaagaagcaccgaatcaagacgcgattgccgcatggaatactcaaattgaacagtggaaagatgcgcacggtttctaccgtaagcccaattacaaacaggatcccaacggcgtcattaagccgcaggaagtgttgcgcgtgcttgagaaagtaaccggcggcgatgcttatgtttgttctgatgtaggccagcaccaaatgtttgccgcgcagtggtaccgctttaataaaccgcgccggtggattaattcgggtggcttgggcacgatgggcttcggcctgcctgcggccatgggctgcaagttggcggactatgacgctgatgttgtctgtgtgaccggcgaaggcagtattcagatgaatatccaagagcttgcgacctgtacacaatacggtttaccggtgaagattatcaacttgaataatgaagccttaggcatggtgaaacagtggcaagatatgcagtatgaaggccgctattcgcacagcactacctatgcggaatcgctacccgatttcgttaaattggctgagtcatacggccacgtaggtatggtgattgaaaagcacgaagaccttgagccgatgctcgcgaaagctatggccatgaaagataaattggtatttgttgatatcaaagtagaccctaaagaacacgtgtatccgatgcaaatcgcaccgacgggagcaatggatgatatgtggttaagcagaacggagcgcacctaat

SEQ ID NO: 231855 - DNA, 841 bp, Unknown
  Bacterial polypeptide expressing nucleotide sequence isolated from the Sargasso Sea
ggaatgcttggaatgcacggttcatatgaagctaataatgcaatgcatgactgtgatttaatgataaatattggtgcaagatttgatgatagaattacaggaaaaattgatgagttttctccaaaatcaaagaaagttcatattgatatcgatccatcttcaattaataaaaatgttaaagtagatttaccaatagtaggagatgttgcagaagttattacctctacaatcaaaactataaaaaaagtaaaacctaattttgcaaaatccaataaacaaaaaatttctaagtggtgggaaaaaattcagaaatggagatcagtcaattcttttgattttgttaatagcagtgaaacaatcaaaccacaatatgctattcagagactttatgagttaacaaaaaataaggatacatacattacaactgaagtgggtcaacatcaaatgtgggcagcacaacattataaatttgataaacccaatcgttggatgacttctggaggtttgggaacaatgggatatggtttgcctgctgcagtaggagtacaagttgcgcatccaaataagttagtgatagatatagcaggtgaagcatctgttttaatgactatgcaagaaatgtctactgcggttcaatatagtttaccaattaaaatatttattttaaataatgaatatatgggaatggttagacagtggcaggaattgttgcatgataaaaactattcagagagctatactgcagctctacctgactttgtaaaacttgcagaggcatatggttgtttaggaataaaagcaacttcaccagaagaattagatgacaaaataatgaaatgat

SEQ ID NO: 231856 - DNA, 944 bp, Unknown
  Bacterial polypeptide expressing nucleotide sequence isolated from the Sargasso Sea
aaacataactgagttagtaaaagatattaatgacttagctgaagtaatgcataaagcttttgaagtagcaactacaggtagaccaggaccagttctagttgatatacctaaagatattcaatttcaaaaagcaaaatataaactttatacaaaaccaaaaaaattaaatggtaaatcccatgataatttttcacaaaaaaatattgatgacttaattgaattaataagtaaatcaagaagaccaattttttatactggaggtggagtaataaattcaggagctaaagcaagtgatcttttaagagagcttgtatatgcaacaggttttccaataacttctacattacagggtttgggttgtttccctgctgatgataatcaatttttaggaatgttaggtatgcatggtacctatgaagcaaacaatgctatgtatagttgtgacttaatgataaacgttggcgcaaggtttgacgatagaattactggtaaaattgatgagttctctcctaaatctaaaaaagttcatattgatatagatccatcatctataaataaaaatgtaaaagtagacctcgcaattgttggagacattaaatcagttttaactacaacactaaaaacttttaaaaaatcaaaaaagaatttctctaaatcaaataaacatcaaatatctaattggtgggaacaaattcagaagtggagatctaaaagatcattagattatattggtagtgaagagacaataaaaccacagtatgcaatcgaaaggctatacgagctaactaaagataaagatacatatatcacaactgaagtaggtcaacatcaaatgtgggctgctcaacactataagttcaataaaccaaatagatggatgacctctggaggtcttggcactatgggatatggcttacctgcagctgttggagttcagattgcac

SEQ ID NO: 231857 - DNA, 445 bp, Unknown
  Bacterial polypeptide expressing nucleotide sequence isolated from the Sargasso Sea
aatgtcaaaattgtattcaggtgctgaaatagtatttaaatgtttggaagaccaagaggtggaatttatttttggttatccaggaggtgctgttcttccaatttatgatgaattaaaaaattttaattttttaaaacatattttagttcgtcatgaacaaggtgcaggacatgctgctgaaggatatgcaagatcttcaggtaagcctggcgtgcttttagttacttcaggtcctggagcaacaaatgctgtaactgctttaacagatgcatacatggactcaatcccattagtttgtatttcaggacaagttcctactcatttaattgggactgatgcttttcaagaatgtgacactactggaattactagaccctgtacaaaacacaattggctagtaaaagatgtaaataatttagaagaaacaatacataaagctttttga

SEQ ID NO: 231858 - DNA, 820 bp, Unknown
  Bacterial polypeptide expressing nucleotide sequence isolated from the Sargasso Sea
gaggattgtgattttttgattgcagtaggagctagatttgatgatagagttgctggagatccagagggttttgcaccaaatgcaaaaaaaattgctcattttgatattgatatatcagaaataaataaagttaaaagtgtggattggtaccatgtaggtaacctcaaaaaagatttaaatgacttaattacattaggaaaacaaatagaatttgtttcagattttagtgaatggcacagtcacattgaaaagctgaaagaagagtataagttaaattacaataaaaacagcgaattgattcaaccctatgaagtaattgaagaaattaataaaataagtcgtggtgaagcgatcatatctaccggtgttggacaacatcaaatgtgggcagctcagtattttgattacaaggaacccagattgtggctgacttcaggaagcatgggaacaatgggttttggtctgcctgctgcgataggtgctcagttcgcgaaacccaatacattggtaatcgatatagatggtgatgccagtataagaatgaacattggtgaactagagacagctacaacatatgatctgcctatcaaagtacttgttctaaacaactatggagatggtatggttcgtcaatggcagaagctttactacaagggcagaatgtcagcaagtgacaaatcccttcatcgaaaagatttcattaaaactgcagaggcagatggttttgagtttagtgaaagattagataataagaacgaaataaagagcactgtaaaaaaattcattgagttcgatggtccggcatttttagaagttatta

SEQ ID NO: 231859 - DNA, 682 bp, Unknown
  Bacterial polypeptide expressing nucleotide sequence isolated from the Sargasso Sea
atgagtaatgacatcactggagctgagattgtgcttaaaagtctcaaagagcaagaagttgaagtagtgtttggatatccaggaggagcagtgcttcctatatatgatacactatttaaacaaaattcaattaaacatgttctggttcgacaagagggtggggcaattcatgccgcagagggttatgctagatcaactggcaaaacaggtgttgtacttgtaacgtcaggcccaggagcaacaaacgtagtaactggattaacagatgctatgatggatagtgttccaatagtttgcataaccggtcaagtaccacaacatttaattggcagtgatgcatttcaagaatgcgatacaactggaattactagaccatgcacaaaacacaattaccttgtaaaagatgtaaataaattatcagctgtatttcatgaagcatttactattgcacaaaatggaagaccaggaccagttttaattgacgtacctaaagatgtacaatttgcaaacggcaattatgttgaaaaaaataaaatagttattccatcccacaggctttttgaaccaagtcctgattttgaatcaaaaaaaattgaagatgcagtagatattatttctaaagcaaaaaaaccaattttttacattggtggtggttgtataaattctggaccaaaggcatcaa

SEQ ID NO: 231860 - DNA, 586 bp, Unknown
  Bacterial polypeptide expressing nucleotide sequence isolated from the Sargasso Sea
tttataactactgaggttggtcaacatcaaatgtgggctgcacaattttataaatttgaaaaacctaacagatggcttacatctggtggattaggaactatgggttatggatttcctgcagcaattggagctcaagttgccaatcctgatgctttagtaattgatattgcaggagacgcttctatacttatgaatatccaggaaatgagtactgctgtccaatatagattacctgttaaaatatttattcttaataatgaatatatgggaatggtaaggcaatggcaggaacttctgcatggaggccgttattcagagagttatactgatagtcttccagattttgttaagttagctgaaagttataaggctgttggacttagagcgaaaaaacctgaagacttagataatgttattaaagaaatgattgatactgataaaactgttattgcagatatttgggtaagcaaagaagaaaattgttttccaatgattcaaagtggttcagctcacaatgaaatggttttaagtaaagatcaaaaacaagataaggattctgctgaaaaaggtaagattttagtataat

SEQ ID NO: 231861 - DNA, 682 bp, Unknown
  Bacterial polypeptide expressing nucleotide sequence isolated from the Sargasso Sea
gatgacaggcgctcaaatggttttaaaagcatttgaagatcatcaagttgatacaatttttggttatcctggtggcgcagttctacctatatatgatgagttagctaaggaaagagataccaaccaacctatcaggcactatttagtaaggcacgaacaaggggcatctcatagtgccgagggatatgctagatctagtggcaaagtaggagtcatgcttgttacgtctggtcctggagttactaacgcggttacaggattgactgacgccatgatggattctataccaattgtttgtataagtggtcaagtacctactcacttaatcggcactgatgcttttcaagaatgtgatgctgtaggtattacaagaccctgcacaaaacataattggcttgttaaagatattaatgatctttcaagaattctccatgaagcgttttacgttgcatcaagcggaagacctgggccagttctagttgatataccaaaagatattcaatttcagacaggaacgtatattggccctgaaactgttaaacataaatcgtatagaccaaaattaaaggcaaacattgatcaaattgatgacgcactaaaattaatagctgatgctgaaaaacccattttttatactggtggaggtgttattaattctgggaatgcggctgttcaatactaa

SEQ ID NO: 231862 - DNA, 784 bp, Unknown
  Bacterial polypeptide expressing nucleotide sequence isolated from the Sargasso Sea
ccctcttcaataaataaaaatgttaaagttgatatagccttagttggagacgttaaatctgttttagaaaaactaattttagtatttaaacaaaagcacccaaattttgaaagttctaacaagcaaaaaatagctgcgtggtggagtcagatagaaaattggagaaagaaaaattcgttaggttttgttaatagcaaggaaattatcaaaccacaattcgctgttcaaagactttatgaactaacaaaagctcaagatacatttattacaaccgaagttggtcaacaccagatgtgggctgcccagcattataaattcgataaacctaacagatggatgacatctggaggtctaggcactatgggctatggtttaccagctgccgtcggtgtacaggtggcaaatcctgataagttagttattgatatagccggagaagcttctgttttgatgacaatgcaagaaatgtcaacagcagttcaatacaaactgccaataaaaatatttattttaaataatgaatacatgggaatggttcgacaatggcaagaattgttacatgaaaaaaattattcagaaagttatacagcagctttaccagattttgttaaattagctgaggcatatggttgtgttggtattcgagcaaataaaccagatgaattagatggaaaaatttctgaaatgctttccgttaatcgtccagttatttttgattgcgttgtagataaagcagaaaattgctatccaatgattccttcaggaaaaccacataatcaaatgt

SEQ ID NO: 231863 - DNA, 782 bp, Unknown
  Bacterial polypeptide expressing nucleotide sequence isolated from the Sargasso Sea
taaagcaacaattaaaactatttcaaagaaaaaacttaatttttcaaaatctaacaaacaaaagatttcaaagtggtgggaaaagattcaaaaatggagatccattaaatctttggattatattaacagtgaagaaagcattaaacctcagtatgcgatagagaggttgtatgagctaacaaaaaataaggaaacatttattactactgaagttggacaacatcaaatgtgggcagctcaacattataaatttaacaaacctaatagatggatgacttctgggggtttgggaacaatggggtatggtttacctgcagcagtcggggttcaggttgcccatccaaataaattagttattgatattgcgggtgaggcgtcagtattaatgactatgcaggaaatgtctactgctgttcagtacagtttacctataaaaatcttcattttaaataatgaatatatgggaatggtaagacagtggcaggaactgttacatgataaaaattactctgaaagttatacagctgcccttcctgattttgtaaaattggcagaagcatatggatgtgttggtattagagccaaaacacctgaagagttagatgataaaatcattgaaatgcttaatacagataggcctgtaatttttgattgtttggttgataaagaagaaaattgttttccaatgataccttcaggtaagccacacaatcaaatgcttttaggtccaaaagatcaaaaaaacaataaaatttcaggcaagggtaaaactttagtttaat

SEQ ID NO: 231864 - DNA, 683 bp, Unknown
  Bacterial polypeptide expressing nucleotide sequence isolated from the Sargasso Sea
aatgccaaaattattaactggagcagaaattgtattcaaatgtcttgaagaccaaaaggtagaacatatctttggttatccaggtggtgcagtattaccaatttatgatgaattaaaaaatcatccttctataaaacatattttagttagacacgagcaaggtgctggtcacgcagctgaaggttatgcaagatcatcaggaaaaccaggtgtagtattagttacatcaggccctggagccactaatgttgttacagcattaaccgatgcgtatatggactctgtcccgctagtttgtatttctggtcaagttccaacacatttaattggaacagatgcttttcaagaatgtgacaccacaggaattacaagaccttgtacgaaacacaattggttagttaaagatattaatgatctttctaaagttattcatgaggcttttagagttgcaacaactggaagaccaggaccagtattaattgatattccaaaagatattcaatttgcaaaaacaaaatataaaaaaccgaataaagaaaaaagtttaaatggaaaatcccacaataaattttctcaagatcaaattgatgaattagtaaaattattaagtaaggctaaaaaaccaatcatttatagtggtggaggagtaattaactcaggtccaaaagcaagccaggctttaa

SEQ ID NO: 231865 - DNA, 757 bp, Unknown
  Bacterial polypeptide expressing nucleotide sequence isolated from the Sargasso Sea
tatggggaaattattttcaggtgcagagattgtttttaaagttttagagcatcataaagttgagcatatatttgggtacccaggcggggcagtactaccaatttatgatgaattaaaaaatcataaaactataaaacatattctagctcgtcatgagcaaggagcaggacacgctgcagagggatatgcacgttcttctggaaaacctggtgtaatgttagttacatctggtccaggagcaacgaatgcggtaaccgctttaaccgatgcttacatggactcagtaccgattgtttgtataagcggacaagttccaacacacttaataggaacagatgcttttcaagagtgtgatacaacaggaataacaagaccatgcacaaaacataattggttagtaaaagatgtaaacgatttagctaaagtcatggatctcgctttcgatgtagcgacttctggaagaccaggaccagttttagttgatataccaaaggatattcaatttaaaaaaacaaaattttttttaagaagtaaaaaaaataaaaaaacaaatggtaaattgaatagtaagatttccaattcaaatcttgataaaatcattcaattgatgaaaaaatcttcaaaaccagttttttatactggtggaggagttattaattctggaccagaggcaagcaagttactaagagagcttgtttctttgacaggttttccaatcacatccacacttcaagggattgggcgcttacccaggtga

SEQ ID NO: 231866 - DNA, 448 bp, Unknown
  Bacterial polypeptide expressing nucleotide sequence isolated from the Sargasso Sea
atgccaaaattatattcaggagctgagatagtatttaaatgtttggaagatcaaaatgttagtcacatatttggttatcctggaggagcagtccttccaatatatgatgaattaaaaaattttaattcaataaaacatattttagttagacatgaacagggcgctgggcacgcagcagaaggttatgcaagatcaactggaaaaccaggtgtattgttagtaacttcaggtcctggagccaccaatgctgttactgccttaacagatgcttacatggactctgtgcctttagtttgcatcacgggacaagttccaactcatttaattggtacagatgcatttcaagaatgtgacacaacaggaattactagaccttgtactaaacataactggctagtaaaagatgttaatgacttagctgaagtaatgcacaaagctttgaagtagc

SEQ ID NO: 231867 - DNA, 950 bp, Unknown
  Bacterial polypeptide expressing nucleotide sequence isolated from the Sargasso Sea
gcgatacaacagggaattacaaggccatgcacgaaacataattggttggtaaaaaatgtaaatgatctttcaagagtattacatttagctttcgaggttgcaactactggaaggcctggaccagttttagtagatattccaaaagatatacaatttaaaaaaggcaaatataaattttttaagaacacacttaaaaaaaaattgaatggtaaatctacccataaaatatcaaatacagatttggataaatttattgacttaattaaaaaatcctcaaagcccattttttatacaggcggtggtgtaataaactctggaccagaggcaagtaaaaacttaagagaacttgtttcattaactggatttcctattacctcaacattgcaaggacttggagcgtatccgggagacgatccacaatttcttggaatgttaggaatgcatggaacttacgaagctaataatgcaatgcatgattgtgacttgatgataaatattggagcaagatttgatgatagaattacaggaaaggtagatgaattttcacctggatcaaaaaaaattcacgttgatattgatccatcatctattggaaaaaacattaaagttgatttggcaatagtaagtgatgttacagatcttttaaaatctttaataaaaagatttaaggaaaaaaataaaaactttcttaattctaataaacaaaaaacttcaaaatggtgggaacaaattgaaaaatggagagaaaaaaagtctttaaactatattaatagcgataagataataaaacctcagtatgcagtccaaagattatatgaactaacaaaaaatcaagatacttttgtcaccacagaggttggacaacatcaaatgtgggcagctcaacattacaaatttaataaacctaatagatggatgacatctggaggtcttggaacaatgggatatgg

SEQ ID NO: 231868 - DNA, 760 bp, Unknown
  Bacterial polypeptide expressing nucleotide sequence isolated from the Sargasso Sea
taatatgactggatcaccagttacaatgacattgatgggcctcggtgtagtaggttcatcagataaaaattcacttggtatgctcggaatgcatgggatgtatgaagctaatatggcaatgcatgaatgcgatgttatgattaatataggtgcaagatttgatgatagagttactggaagactcgatgcgttttctcctaattcaaagaaaattcatatagatattgatgaaagtaatattaataaaaccattaatgttgatgttccaataataggtgatgttaagcaagttgttgataaaatgatttctgtttggaaagataaaaaatacaaaatagatactgagtcattaaagtcatggtgggaaaaaattaataaatggaaaaaagttgattgtcttaattataataatgaagggaagcaaattaaacctcaatatgctgttcaaagactttatgaattaacgaaaaatataaaaacatatgttacaactgaagttggtcaacatcaaatgtgggcagcacagttttataagtttgaagagccaaatagatggcttacttcaggaggtttaggaacaatgggttatggctttccggcagcaattggagcacaggtaggtaatccagatgctctggttgttgatatagctggagatgcttcaattcttatgaatattcaagaaatgagtactgctattcaatatagacttccagttaaaatatttattttaaataatgaatacatgggaatggttagg

SEQ ID NO: 231869 - DNA, 958 bp, Unknown
  Bacterial polypeptide expressing nucleotide sequence isolated from the Sargasso Sea
tgccgagatgctcttggctgccaagcgtccggtcatgtacgccggcggtggcgtgatcatgggcggcgcttccgcgccgctgaccgagctggcgcagatgctcaacctgccggtgaccaacaccctgatgggcctcggtggctatccgggtaccgatcgccagttcatcggcatgctcggtatgcacggtagctacaccgccaacctggcgatgcaccatgccgacgtgatcctggcggtcggtgcgcgtttcgatgaccgcgtgatcaatggcgcggcgaagttctgcccgaacgccaagatcatccacatcgacatcgatccggcttcgatttccaagaccatcaaggctgacatcccgatcgttggcccggtggacagcgtattgaccgagatggtcgccatcctcaaggaaatcggcgaaaccccgaacaaggacaccgttgccagctggtggaagcagatcgaagagtggcgtggtagcggccgtctgttcccttacaacgagggcgacggttcgatcatcaagccgcagaccgtgatcgaaaccctgtgtgacgtgaccaagggcgatgccttcatcacctccgatgtcggtcagcatcagatgttcgctgcgcagtattaccgtttcaacaagcccaaccgctggatcaactccggcggcctgggcaccatgggcttcggtttcccggctgcgatgggcatcaaactgaacttcccggatgccgacgtggcgtgcgtcactggcgagggcagtattcagatgaacattcaggagctgtcgacctgcctgcagtacgacctgccggtgaagatcgtcaacctgaacaacggcaccctcggcatggtccgccaatggcaggacatgcagtacaacagccgttattcgcactcctacatggagtcgctgccggacttcgtcaaactggccgaggcttatggccatgtcggcatg

SEQ ID NO: 231870 - DNA, 836 bp, Unknown
  Bacterial polypeptide expressing nucleotide sequence isolated from the Sargasso Sea
tatgcatggaacttatgaagcaaataatgcaatgcacgactgtgatttaatgattaatattggggcacgttttgacgatagaataacaggaaaaatagatgagttttctccaaaatcgaaaaaggttcatattgatatagatccatcgtctatcaataaaaatgttaaagttgatttagccattgtaggagatgtaaaaactgttctttcatctactttaaaaagtttaaaacaaaaaaaatcaaaatttttaaaatctaataaacaaaagacttctaagtggtgggaaaaaattcaaaaatggaggtctgttaggtctttagattatatcggaagtgaagagactataaaacctcagtatgcgattgaaagattatatgaattgactaaagacaaagactcctacattacaactgaggtaggacagcatcagatgtgggccgcacaacattataaatttaataaaccaaatcgttggatgacatctggtggattaggcaccatgggatatggtttaccagcagcagtaggtgtacaagttgctcatccaaaaaaattagttattgatattgcaggagaagcctcagtattaatgacaatacaggaaatgtctacagctgtacaatacaaccttccaattaaaatatttatattgaataatcaatacatgggtatggttagacaatggcaagaacttttacatgataaaaactattctgaaagttatactgccgctctaccagattttgttaaattagcggaagcatacaactgtgttggtataagagcaaaaacaccagaagagttagatgataaaattattgagatgttgaata

SEQ ID NO: 231871 - DNA, 970 bp, Unknown
  Bacterial polypeptide expressing nucleotide sequence isolated from the Sargasso Sea
attccaaaagatgttcaatttgcttctggtacttacgaagaaaaaagtaaaataattattccttcacatagattatttgagccaagtcctgattttgaaaaaaataaaattgaagaagcagttgaattaatttcaaaagctaaaaaaccaattttttatattggtggtggttgtattaattctggtccaaaagcttcaaaattagttagagaatttataaatattgttggatcaccagttacaatgactttaatgggtctgggtgtagtaggctcatcagataaaaactcacttggcatgcttggtatgcatggaatgtatgaagctaatatggctatgcatgaatgtgatgttatgattaatattggtgcaagatttgatgatcgagttactggaagactcgatgcattttctccaaattcaaaaaaaatccatattgatattgatgaaagtaatattaataaaactataaatgtcgatgttccaataataggtgacgtaaaacaggttgtcgaaaagatgattgcagtttggcaagacaaaaaatataaaatagatactgtttcattaaaattatggtgggacaaaattaataaatggaaagaagtagattgtttaaactataataatgaaggtaaacagataaaaccacagtatgcagttcaaagactctatgagttaacaaaaaatacaaaaacatttattacaactgaagtaggtcagcaccaaatgtgggctgctcaattttataaatttgaagaaccaaacagatggcttacatcaggtggtttaggaactatgggatatggatttcctgccgcaattggagctcaagttgggcatccagatgctttagtagtagatatagcaggagatgcttcaatactcatgaacattcaagaaatgagtacggctgttcaatatagattacctgtaaaaatatttattttaaataatgaatacatgggaa

SEQ ID NO: 231872 - DNA, 772 bp, Unknown
  Bacterial polypeptide expressing nucleotide sequence isolated from the Sargasso Sea
atgtcaaaattgtattcaggagctgaaatagtatttaaatgcttggaggaccaagaagtagaatttatttttggttatcctggtggtgcagttcttccgatctatgatgaattaaaaaattttaattcagttaaacatatattagttcgtcacgaacaaggtgcgggtcatgctgctgaaggatacgcaagatcaagtggaaagcccggtgtacttttagttacctcaggaccaggagcaactaatgcagtaaccgctttgacagatgcttatatggactctgttcctctggtatgtatttcgggacaagttcctactcacttaataggcactgatgcatttcaagaatgtgataccacgggaataacaagaccttgcacaaaacataattggctagttaaagatgtaaaagatttagaaaaaacaattcataaagcttttgaagttgccacaactggtagaccaggacctgtattagttgatataccaaaagatgttcagtttcaaaaaacaaattatactaaatttgtaaaacaaaaaaaattaaacggtaaagttaataatcaattttcccaaaaagatattaatgaactgattaaattaatgagtaaagcatcaaaaccaattttttatactggtggaggtgttataaactcgggaccaaatgctagcgaacttttaagagaactagttaatactactggttttcctataacatctacactacaagggttaggctcttacccaggtgaagacagtcgatttttgggca

SEQ ID NO: 231873 - DNA, 852 bp, Unknown
  Bacterial polypeptide expressing nucleotide sequence isolated from the Sargasso Sea
gtttacgcaactgggttttccaataactacaacactacaaggattaggatctttcccgggagatgataatcaatttttaggaatgctaggaatgcacggaacgtacgaagcaaataatgcaatgtacgaatgtgatttaatgatcaatgttggtgcaaggtttgatgacaggatcacaggaaaaattgatgagttttctccaaaatctaaaaaagttcatattgatatagatccatcatcaattaataaaaatgttaaagtagatcttgcaattgtaggagatgttaaatcagtaattacatctactttaaaaactttaaagaaatcaaaaccaaattttattaaatccaataaacaaaaaacatctaaatggtgggaaaaaattcaaaaatggagatcaaaaagatctttagattatattggcagtgaagagacgataaaacctcagtatgcaattgaaagattgtatgaacttacaaaagacaaagatactttcataactactgaagttggacaacatcaaatgtgggctgcacaacactataaatttaacaaaccaaatagatggatgacatctggaggattgggaaccatgggatatggtttgcctgctgcagttggagttcaaattgcacacccacaaaagttagtaattgatattgcaggagaagcatctgtattaatgacgatgcaagaaatgtccactgctgtgcaatatagtttgccaataaaaatatttattttgaacaatgaatacatgggaatggttcgacaatggcaagaattacttcatgataaaaattattctgaaagttatacagcagcacttccagattttgttcaaatggcgga

SEQ ID NO: 231874 - DNA, 600 bp, Unknown
  Bacterial polypeptide expressing nucleotide sequence isolated from the Sargasso Sea
aaaatagaaaaacattcataacaactgaagttggacaacatcaaatgtgggctgctcaatttataaaatttgaaaaaccaaatagatggttaacttcaggtggcttaggtacaatgggttatggttttccggctgcaattggtgcccaggtaggtaaccccgatgcacttgtagttgatattgctggtgatgcatcaattttaatgaatattcaagaaatgagtacggctattcaatatagacttcctgtaaaaatattcattttaaataatgagtatatgggaatggtaagacagtggcaggaattacttcatggcggtagatattctgagagttatactgatagtttaccagattttgttaaattagctgagagttataaagcagttggtctaagagctaaaacaactgatgaacttgatgatgttattaaacaaatggtggagtcaaaagatactgtaattgcagatatttgggttacaaaagaagaaaattgttttccaatgattcaaagtggatcagcgcataatgaaatgcttcttagtagtgatcaaaagcaagataaaaaatctgcagaaaaaggaaaaattttagtttaat

SEQ ID NO: 231875 - DNA, 726 bp, Unknown
  Bacterial polypeptide expressing nucleotide sequence isolated from the Sargasso Sea
aagcagcaataaatggtttaacaaaaaaaattgtagaaaaaaaattaaaacctaacaatattgatgaatggtggaataatattaatgaatggagaaaaaaagattcctttagatataagcagggttcagaaattataaaacctcaatatgtaattgataggctttatgaaattactaaaggtgatgcctttataacgtctgatgtcggtcagcatcaaatgtgggcagcgcaactatataagtttaaaaaaccaaaaaggtggattaactctggcgggctaggaaccatgggctttggtttgccatctgcaatgggcactcaatttgctaacccaaactctttagtatgttgtgttactggagaggcgagtattcaaatgtgtatacaagaattatcgacttgcttacagtatggtttgcctatcaaaattataaatttaaataataggtatatgggtatggtcagacagtggcaagaatttttttatgaaaaaagatatgctatgtcttatatggatgctttaccaaactttgtgaaacttgcagagagctttgggcatataggatataaggttgagaaaccaagtgatgttgatgcggcaattttagaggcaatcaaacaaaaagacaggctagtctttatagattttattacagatcaagaagaaaatgtttttcctatgattgctactggcgctgcgcataataaaatgatactttcctaaa

SEQ ID NO: 231876 - DNA, 830 bp, Unknown
  Bacterial polypeptide expressing nucleotide sequence isolated from the Sargasso Sea
tatgcatggaacttacgaagcaaataatgccatgtactcatgtgatttaatgataaatgttggtgcaaggtttgacgatagaattaccggtaagattgatgagttctctcctaagtctaaaaaagttcatattgacatagatccatcatcaataaataaaaatgtaaaagtagatttagcaattgttggagatattaagtcagttttaacatcaacgctaaaaacttttaaaaaatctaaaaataatttttctaaatcaaacaaacatcaaatatcaaattggtgggaacaaattcagaaatggagatctaaaagatcattagactacattggtagtgaagaaactattaaacctcaatatgcgattgaaagattatatgaacttactaaagataaagatacctatataacaactgaagtaggccaacatcaaatgtgggctgctcaacactacaagtttaataaaccaaatagatggatgacttctgggggtcttggtacgatgggatatggattaccagcagctgttggagtccaaattgctcatcctcagaaattagtaattgatattgcaggtgaggcatctgttttgatgacaatgcaggaaatgtcaaccgcagttcagtacaatttgcctataaaaatatttattctaaataatgaatacatgggaatggtaagacaatggcaagaattacttcacgataaaaattattcagaaagttatacagctgcgttgccagattttgttaaattggcagaagcatatggatgtgttggtataagagcaaaaacacctgaggagttagatgataagattattgaaatgt

SEQ ID NO: 231877 - DNA, 898 bp, Unknown
  Bacterial polypeptide expressing nucleotide sequence isolated from the Sargasso Sea
gcaagaccaaggcgttgatgtcgtttttggttacccaggtgtggcggtacttcctctttatgacgaacttttcaaaacaaataaacttcgacatattctagtacgtcatgagcaggccgcagttcacgcagccgaaggatacgctcgatcaacaggaaaaattggtgtagtgctagttacctctggtcctggcgccaccaatgcggtaacagggttgacggatgctcttatggatagcattcctatagtttgtctgacaggtcaggttccaacgcatttaattgggacagatgcgtttcaagaggctgatacaaccgggataactagagcatgtacgaaacataattacttagtgaaaaactctgatgaactggccgacgttatgcacgaggctttttacgtagcggcgaatggtcgaccaggccccgtggtagtagatttgccaaaagatatcctatttgctgaagctccatatttcctgcccaaagacgttaggccatgcgcgtatcaacccaagatggatggcgatacaaaaaaaatcgaacaagcggttgagcttttagccaacgctgaacgtccgattatctacggcggtggcggcctaattaactcaggattaacggcctgtaaacttcttcgagaatttgcagaattaagtgggttcccggtgacgctcacattaatgggtttaggagcctttccagcgtccaatccgaattttcttggaatgttagggatgcacggtacctacgaggcaaatttagcaatgcatcactgtgatgtcatgttaaatattggtgcgcgatttgatgatagggtcactggacgaattgacgctttttcgccaaacgcaacgaaaatccatatcgatatagaccaatcctcattaataagaata

SEQ ID NO: 231878 - DNA, 824 bp, Unknown
  Bacterial polypeptide expressing nucleotide sequence isolated from the Sargasso Sea
tgcaaaaacaaaatataagagaccaaataaagaaaaagaattaaatggaaaaacgcataacaaattttctcaagatgaaataaatgaattagcaaacttattaaagaaatctaaaaaaccaataatttatagtggtggaggcgtgattaactctgggccaaaagcaagccaagctcttagagagttcgttgagataactggctttccaattacttccacacttcaaggtttaggtgcttatcctggagatgataatcaatttttaggcatgctaggaatgcacggaacctatgaagcaaataatgctatgcatgattgtgatcttttaattaatatcggtgcaagatttgatgaccgtattacagggaagatagatgagttctccccaaattcaaaaaagattcatattgatatcgatccatcatcaattaataaaattattaaggtagatcttgcaattgtgggagatgttgcaagtgtaataactaaaataaataaaacaattacaaaaagtaaaaatggtcatagtaaatcaaataaatcaaatattgccaaatggtgggaacaaattgaaaaatggagagaaaaagcttctctaaattttataaatagtaatgagagtattaaaccacaacatgctgttcaaagactttatgagttaactaagaataaagatacttatgttactactgaagttgggcaacatcaaatgtgggctgcacagcattataaatttaataaaccaaacagatggatgacatctggtggtttgggaactatgggatatggattaccagcagcagttggtgtacaaattgctcatc

SEQ ID NO: 231879 - DNA, 795 bp, Unknown
  Bacterial polypeptide expressing nucleotide sequence isolated from the Sargasso Sea
ttggtgatgtaattagtgttttaactaaaattattaagacatggaaagataataatttaaaaactaataaatcagatctgaaattatggtgggataaaattaacaattggaaaaagatagattgtctacatttttccaaaaatgaaaaagaaataaaacctcagtacgctgttcagagattatatgaattaacaaaagataaaaaaacattcattactactgaagttggtcaacatcaaatgtgggctgcacaattttataaatttgaacaacctaatagatggcttacttctggtggattaggaacaatgggctatggttttcccgcagctattggagcgcaagtggcaaatccagatgcattggttattgatatagctggagatgcatctatcctaatgaatatccaagaaatgagtacagctgttcaatacagattacctgtaaaaatatttattcttaataatgaatatatgggtatggtaagacaatggcaggaacttttacatggaggacgatattctgaaagttatacagatagtttaccagattttgtaaagttagctgaaagctataaagctgttggattaagagcaaaaaaacctgcagagcttgataatgttattaatgaaatgataaaaacagacaaaacagttattgctgatatttgggtcagtaaggaagaaaattgttttccgatgattcaaagtggctcagctcacaatgaaatggttttaagcaaggaccaaaaacaagataagctatctgcagagaaaggtaaaattttagtataat

SEQ ID NO: 231880 - DNA, 742 bp, Unknown
  Bacterial polypeptide expressing nucleotide sequence isolated from the Sargasso Sea
agatcaaaaggttgagcatatctttgggtaccctggtggagcagttttaccaatctatgatgaacttaaaaatcataattctattaagcatatattagttagacacgaacaaggtgctggtcacgctgcagagggatatgcaagatcatccggaaagcctggggttgttttagttacttctggacctggcgctactaatgttgttacagcattaacagatgcatatatggactcagttcctttggtttgtatttctggtcaagttccaacacacttaataggaactgatgcatttcaagaatgtgataccaccggtattactaggccctgcacaaaacataattggttagtaaaagatataaatgatttatcagaaataatgcacgaagcatttaaagttgcaactacaggaagaccaggtcctgttttagtcgatattccaaaagatattcaatttgcaaaaaccaaatataaaaaaataaaaaaagaaaaaaaattaaagggaaaatctaaaaatggattttctcagaaacatatagaccaattaattgatttattaaaaaatgcaaaaaaaccaatcatttatagtggtggtggagtaattaattcaggccctaaggcaagtgacgcattaagagagtttgtagaattaacaggctttccaataacttctacacttcaaggtttaggtgcatatcctggagatgataatcaatttcttggaatgttaggtatgcatgga

SEQ ID NO: 231881 - DNA, 853 bp, Unknown
  Bacterial polypeptide expressing nucleotide sequence isolated from the Sargasso Sea
gatgatgccgggagcagaacttctgctgaaggcgcttgaggatgagggtgtcgaggttgtattcggctaccctggcggtgccgtgcttccgatctatgacgccttgttcaagaacaacaagatcaagcacatcctcgttcggcacgaacaggcggcggttcatgccgcagaaggctatgcccgttcaaccggcaagaccggtgttgttcttgtcacatcggggcccggcgccaccaacgccgttaccggcttgaccgacgcgctgatggactccgttccggttgtctgcctgaccggtcaggtgccaacccatctgatcggcaatgacgcgtttcaggaagccgacacgaccggtatcacccgtgcctgcaccaagcataactacctcgtgaaagagggcggcaaactgcagtccacagtgatcgaggctttccatgttgccgcaaccggtcgccccggcccagtcctgatcgaccttccgaaggacatcctgatgaaggaggccccgtaccagaaggaggccatccgcgcatctgcaacagcgcgctaccagccggcgaccgagcctgatccggcggcaatctgcgcggcggtcgacatgatgatccgtgccgagcgtccggtgatctatggcggcggcgggctgatcaactccggcccgcgtgcctcggaactgctgaccaaacttgttcatatgaccggctggccgaccaccctgacgctgatgggtctcggcgcgctgtcggccgccgacaagcatttcctcggcatgctgggcatgcacggcacctatgaagccaatctggccatgcatggctgcgacctgatgctcaaccttggcgcgcgcttcgag

SEQ ID NO: 231882 - DNA, 862 bp, Unknown
  Bacterial polypeptide expressing nucleotide sequence isolated from the Sargasso Sea
aaagattcatgttgatatagatccatcttcaataggaaaaaatataaaagttgacttagctgttgtaagcgatgtttctgagctactaaaatctttaattaaaagatttaaggaaaaaaataaaaactttttaagctcaaataagcaaagaacttcaaaatggtgggagcaaattgaaaaatggagagaaaaaaaatctttaaatttcatcaatagtgataaaataataaagcctcaacacgcagttcaaaggctatacgagttaacaaaaaatcaagacacttatattactaccgaggttggtcagcatcaaatgtgggcagctcaacactataaatttaataaacctaatagatggatgacgtcaggaggtttgggcactatgggatatgggcttccagcagctataggcgtgcaaattgctaacccaggtaaactagtggttgatattgctggagaggcttcagttttaatgacaatgcaagaaatgtccactgcagtacagtatagattgccaatcaaaatatttattttaaataatgaatatatgggaatggttagacagtggcaagaactactacatgaaaaaaattattctgaaagttacacagccgcactaccagattttgtaaagcttgcagagtcttatggttgcgttggtattagagcaaaaacaccaagtgaattagatgaaaaaattaaagaaatgataactactgataaaccggttatatttgattgtgtagttgacaaagctgaaaattgttttccaatgataccatcaggaaaaccacataatcaaatgatcttgggaccggaagaggaagaagagatatcagatgagggaaagattttagtttaa

SEQ ID NO: 231883 - DNA, 498 bp, Unknown
  Bacterial polypeptide expressing nucleotide sequence isolated from the Sargasso Sea
aatgcgagctcttagagaagagggcgtaaaatttatattcggttatcccggaggagctgctttacatatctacgattctgttttccgtcaaaagagtatcgaacacattttagttagacatgagcaaggcgctactcatgcagctgatggctatgcaagagctactggaaagcctggggttgtattggtcacttccggacctggagcaacaaatgctattactgggatagcaacagcttttatggactccattcctatgattgttatctcaggtcaggttcaaagtcatttaataggaacagattcattccaagaaacagacatgattggtatctcgagaccaatagttaagcatagttatattattcaagatgttagggatattcctaaagtagttcaagaagcatttcatatagctacttcaggaaggcctggaccagtcgttattgatattcccaaagatatgactgatccttctaaaaagtttaagtatcaaaa

SEQ ID NO: 231884 - DNA, 247 bp, Unknown
  Bacterial polypeptide expressing nucleotide sequence isolated from the Sargasso Sea
atgtcaaaattattcacaggagcagaaattgtattcaaatgtcttgaagatcaggacgttgaatttatttttggttatccaggcggagcagttttgccaatatatgacgaattaaaaaatcattcctcaataaaacatattttagtaagacatgaacaaggagcaggacatgcagctgaaggttacgcaagatcttcaggaaaaccaggagtagttttagtaacatcgggaccaggtgcaacctaat

SEQ ID NO: 231885 - DNA, 484 bp, Unknown
  Bacterial polypeptide expressing nucleotide sequence isolated from the Sargasso Sea
aatgccaaaattattaactggagcagaaattgtatttaaatgtcttgaagaccaaaaggtagaacatatctttggctatccaggtggcgctgtattaccaatttatgatgaattaaaaaatcatccttctataaaacatattttagttagacacgagcaaggcgctggtcatgcagccgaaggttacgcaagatcatcaggaaaaccaggtgtggttttagttacatcgggccctggagccactaatgttgttacagcattaaccgatgcatatatggactctgttccactagtttgtatttctggtcaagtgccaacacatttaattggaacagatgcttttcaagaatgtgacacaacaggaattacaagaccttgtacgaaacataattggttagttaaagatattaatgatctttctaaagttattcatgaagcttttagagttgcaacaacaggtagacccggaccagttttgattgat

SEQ ID NO: 231886 - DNA, 845 bp, Unknown
  Bacterial polypeptide expressing nucleotide sequence isolated from the Sargasso Sea
acctgcgtatgatcctttatacgatagtcctattaggcatatattagctagacatgaacaaggtgctgggcacatggcagagggttatgctcaagctactggagaacttggtgttgtaatagctacttctggaccaggagcaacaaacttgataacccctctagctaatgcgttgatggactctactcctcttctagctattactggtcaagttgcctctactgcaataggtaatgatgcgtttcaggaagcttatactgtaggactttcgatggcagctactaaacacaattacttaatcacagatgcttcagaaattcctcaagttttaaaggaagcaaaatttattgctactactggtagacccggtccagttttggttgatataccaaaggatatactaaaccaagtagctgcttgggttgagccagtcgatcttgacttaccaggatacaagcctacaacagagccaaatccaaaaatggttcagcaagcttcttctctaatcaaaaagtcaaagaagccaattctttatgtcggtggaggaattattcattcgaaagctaataatgaactctttgaactagctactaaatttaatattccagttgttacaacacttatgggaagaggtgctttccctgatggtcatgaattgtgtcttgaaatgccaggtatgcacggcaattatacagctaccacttcaattcaaaatgctgacctgttaattgcaataggcgtaaggtttgatgatagagttactgcaaatccgtcattttttgctcagaatgcaaaagttattcatgctgatattgatccagcggaaattggaaaagtacgtgatg

SEQ ID NO: 231887 - DNA, 766 bp, Unknown
  Bacterial polypeptide expressing nucleotide sequence isolated from the Sargasso Sea
gatgttaaaaatatggaaaaataaaaattacaaaattgatgaaaaagcattagatgcatggtggcaaaaaatttgtaaatggaaagaaattgattgtttgagttatgttagtgatactaagcaaattaaaccacaatatgcagttcaaagactttatgaattaactaaaaatacaaaaacttttgttactaccgaggttgggcagcatcaaatgtgggcagcacaatattataaatttgatgaacctaatagatggttaacttcaggaggtttgggtacaatgggttatggttttccggctgctataggtgcgcaagtaggtaatcctgatgctttagtaattgatattgctggtgacgcttcaattctaatgaacattcaggaaatgagcactgcaatacaatatcgtttgcctgttaaaatatttattcttaataatgaatatatgggtatggttagacaatggcaggaactacttcatggaggaagatattctgaaagttatacggacagcttgcctgattttgttaagttagctgagagttataaagctgaaggtttgagagccaagactgctgatgaattagacagcgtaatcatacagatgatagaatctaaaaatacagttattgcggatatttgggttacaaaagaagaaaactgttttccgatgatacagagtggatcagcacacaatgaaatgcttttaagtaaagaccaaaagcaagataaaaaatctgctgaaaaaggtaaaatattagtttaa

SEQ ID NO: 231888 - DNA, 252 bp, Unknown
  Bacterial polypeptide expressing nucleotide sequence isolated from the Sargasso Sea
aatgtcaaaattgtattcaggtgctgaaatagtatttaaatgtttggaagaccagaatgtgaaatttatctttggttatcctggtggagcggtactgccaatatatgatgaacttaaaaattttaattttttaaaacatattttagttcgtcatgagcaaggcgcggggcacgccgctgaaggatatgctagatctacaggaaaaccaggagttctcttagttacttcaggaccaggagctactaatgcagt

SEQ ID NO: 231889 - DNA, 836 bp, Unknown
  Bacterial polypeptide expressing nucleotide sequence isolated from the Sargasso Sea
aaataaaaatgtaaaagttgatcttccaattgttggcgatgtacaagatgttattacatcaactattaaaactataaaaaaaactaaaccaaattttgcaaagtcaaataaacaaaaaatttcaaagtggtgggaacaaatacaaaaatggagagaaaaaaaatccttagattttattaatagtgatgaaacaattaaaccacagtacgctgttcaaagactttacgagttaacaaaaggcaaagatacttttattacaactgaagtaggacaacatcagatgtgggctgctcagcattataaatttgataagccaaatagatggatgacctcgggcggactaggtacaatgggatatggtttacctgcagcggtaggagttcaaattgcgcacccaacaaaactcgtaattgatattgctggcgaggcttcagttcttatgacaatgcaagaaatgtctactgctgttcaatataatcttcctataaaaatattcattttaaacaacgaatatatgggaatggtaagacaatggcaggagcttcttcacgataaaaattattctgaaagctacacagcggcattgcctgactttgtaaaattagcggaagcttatggctgtgttggaattagagcaacaaatcctaatgaattagatgataaaatcatagaaatgttaaatactgataggcctgttatttttgactgtttagttgataagcaggaaaattgttttccgatgattccatcaggaaagccacataatcagatgttattgggtccaaaagatcaagagcaaaacaaaataactggaaaaggtaaaaccctagtttaaa

SEQ ID NO: 231890 - DNA, 947 bp, Unknown
  Bacterial polypeptide expressing nucleotide sequence isolated from the Sargasso Sea
taaacataattggttagttaaagatattaaagatttatcaaaaattttacatgaggcttttatagttgccactacagggagaccaggtcctgtattagtcgatatccctaaagatattcaatttgctaaaacaaattattttaaacctaaaaaacaaaaaaaaaataaagaaaaagttcataataaattttctcataatgaaatagatgagttaattagtctaatatctagggctaagaaacctataatttatacaggtggtggagttataaactctggaccaaaagcaagtgaagcattaagagaatttgttagactaattggctttccaattacctctacattacaaggtctaggcgcattcccaggagatgataatcaatttataggaatgttaggtatgcatggaacttacgaagctaataatgctatgcatgattgtgatctactaattaatattggagcaagatttgatgacaggataacaggtaagattgatgaattttcacctaaatcaaaaaaagttcatattgatatagacccatcatcaattaataaaatcataaaagtagatttagctattgtaggtgatgttaatgaagttcttaaagctgctataaaaaagattaataaaaaacaaaatggttttaaaatttcaaataaacaaaatacctctaggtggtgggaacagattcaaaaatggagaatgaaagactctcttggttttattaatagtgaaaaaatgataaaaccacaacatgctgttcaaagattatatgaactaacaaaaaaccaagatacttttattactacagaggttggacagcaccagatgtgggctgcacaacattataaatttaataaacctaacagatggatgacatcaggagggcttggaactatgggttatggtttaccagctgcagtaggtgttcaaattgcacacc

SEQ ID NO: 231891 - DNA, 847 bp, Unknown
  Bacterial polypeptide expressing nucleotide sequence isolated from the Sargasso Sea
tgatccatcgtctattggtaaaaatattaaagtagatttagctattgtcagtgatgttggcagctttttaaaagccttaaataaaagaataaaagaaaaacataaagattttttaaactccaataaacagaatatatctaaatggtggaaggatatagataagtggagacaaaaaaaatctttaagcttcaagaacagtaaagaggttatcaagccacagtacgcagtacagagactttatgaattatcaaaaaataaagatacttttataacaactgaggtaggacagcatcaaatgtgggctgcccaacattataaatttaataaaccaaacagatggatgacttcaggtggactaggaacgatggggtatggcttaccagccgcattaggggttcaaattgctcacccagataaactagttgtcgatattgcaggagaagcatctgttttgatgactatgcaagaaatgtcaactgctgttcaatacaaattaccgattaaaatatttatcttaaacaatcagtacatgggaatggttagacaatggcaagaacttttacacgaaaaaaattattctgagagttacacggcagctttacctgattttgttaaattagcagaagcgtacggttgtgttggtattcaagctacaaaaccagacgaattagatgaaaaaataaacgaaatgataaatacaaaagaaccagttatttttgactgtagagttgatccaactgagaattgctatccaatgataccatctggaaaacctcacaaccaaatgctcttaggtcctgaagatgaaaaagaagaagtaacagatgaaggtaagactttagtataa

SEQ ID NO: 231892 - DNA, 679 bp, Unknown
  Bacterial polypeptide expressing nucleotide sequence isolated from the Sargasso Sea
ttcctcggcatgctcggcatgcacggcacctacgaagcgaacatggcgatgcagcactgcgacgtgctgatcgcgatcggtgcccgcttcgatgatcgcgtaatcggcgacccggcgcacttcgcgtcgcgtccgcgcaagatcatccacatcgacatcgacccgtcgtcgatctcgaagcgtgtgaaggtcgacatcccgatcgtcggcgacgtgaaggaagtgctgaaggagctgatcgagcagctgcagacggccgagcatggccccgacaccgaggcgctcgcgcaatggtggaaggacatcgagggctggcgcgcgaaggactgcctgaagtacgaccgcgaaagcgagatcatcaagccgcagtacgtggtcgagaaggcgtgggagctgacggacggcaatgcgttcgtgtgctcggacgtcggccagcaccagatgtgggcggcgcagttctaccgtttcaacaagccgcgtcgctggatcaactccggcggcctcggcacgatgggcttcggcctgccggcagcgatgggcgtcaagatggcgcacccggacgacgacgtgctgtgcatcacgggcgaaggctcgatccagatgtgcatccaggaactgtcgacctgcctgcagtacgacacgcccgtgaagatcatttcgctgaacaaccgctatctcg

SEQ ID NO: 231893 - DNA, 979 bp, Unknown
  Bacterial polypeptide expressing nucleotide sequence isolated from the Sargasso Sea
gatgcatatatggattctattccactagtttgtatctcaggacaagttccaactcacttaattggtacagatgcatttcaagaatgtgacacaactggaataaccagaccttgcactaaacataattggttagtcaaagatataaatgatttagctagtacaatacataaagcatttgaagtagctacaactggtagacctggaccagttttagtcgatataccaaaagatattcaatttcaaaaaacaaaatataagaaacccaaaaaagaaaataaattaaacggtaaatctcacaatcattttaatcaaaatactattgatcagttaattgatttaatgagcaaatcttcaaaacctatattttataccggtggtggagtgattaattctggacctaaggctagcgaacttttaagagaacttgtttatgcaacaggctttcctattacatcaacattacagggattaggatctttcccaggtgatgataatcaatttttgggaatgttgggtatgcatggaacctatgaagcaaataatgcaatgcacgattgtgatttaatgattaatattggggcacgctttgatgataggataacaggaaagatagatgaattttcaccaaattcaaaaaaagttcacatcgatatagatccatcatctattaataaaaatgtcaaagttgatttagctattgtcggagatgtaaaaactgttctttcatctactttgaaaagtttaaaacaaaaaaaatcaaaatttttaaaatcaaataaacaaaagacttctaagtggtgggaaaaaattcaaaaatggaggtcggttagatctttagattatattggaagtgaagagactataaaaccccagtatgcgattgaaagattatatgaattaactaaagataaagattcctatattacaactgaggtagggcagcaccaaatgtgggctgcacagcattataaattaacaa

SEQ ID NO: 231894 - DNA, 886 bp, Unknown
  Bacterial polypeptide expressing nucleotide sequence isolated from the Sargasso Sea
attagcctatatggcaaattaatgacaggtgcagaaatagtctttaaagttctggaagatcggggcgtagaacacatctttggttacccgggtggagcagtattgccaatttatgatgaacttaaaaatcataaaaaaattaaacacattttagttcgtcatgaacaaggagcgggacatgcagcggaaggttatgcaagatcatcaggcaaaccaggagtaatactcgtaacttcagggcccggtgcaacgaacgctgttactgcattgacagatgcatacatggactcaattcctttagtttgtataactggacaagtgccgactcatcttataggtaccgatgcatttcaagaatgtgataccactggtatcacaaggccgtgcactaaacataattggttagttaaagatattaaaaaactttcttcaattatgcataaagcttttgaagttgcaactaccggaagaccaggaccagttttagttgatataccaaaagatattcaattcgctaaagggaaatatataaaacctaaagaattaaaaagtaataaacatttaaatattaaatttaatggacaagataaagatatagaagctgcagttgaactcataaaaaaatcttcaaagccaattttatatactggtggcggagttattaactctggaccaaaagctacagagatgcttagagaatttgtttctttaacaggatttccaataacatcaacacttcaaggattgggagcttacccgggcaatgaccagcaatttttaggaatgttaggaatgcacggcacctacgaagcaaataatgcgatgcatgattgtgatttaatgataaatgttggagcacgttttgatgatagaattactggaaaaa

SEQ ID NO: 231895 - DNA, 787 bp, Unknown
  Bacterial polypeptide expressing nucleotide sequence isolated from the Sargasso Sea
aatgccaaaattatattcaggagctgagattgtttttaagtgtttggaggaccaaaaagtaagtcatctttttggttatcctggaggagcagttcttccaatatatgatgaactaaaaaaccacccatctataaaacatatattggttagacacgagcaaggagcaggtcatgccgctgaagggtatgctagatcaacaggtaaaccaggtgtagttttagtaacctcaggaccaggagcaactaatgtggtaactgctttgacagatgcttatatggactctgttccaattgtatgtatatcaggacaggtaccaactcatttaataggtacagatgcatttcaagaatgtgacacaacaggaattaccagaccatgcactaaacataattggttagtaaaaaaaattgaagatttgccaaaaattatgcataatgcttttaaagttgcaacctctggaagacctggaccagtattagttgatatacctaaagatatacaatttgcaaaaacaaactataaaaattttaatacaaaggttttaaaacaaaatggaaaaactcacagatctttttcttccaaagaaataaataaacttattgagctgatgagtaaatcaaaaaaacctgttttttatactggaggaggagtagtaaactcaggcccagaagctagtaatttactaagagagcttgtatcaatgacaggttttccgattacatccactttacaaggtattggttgttttcctggagatgataatcaatttttaggccatgttgggaat

SEQ ID NO: 231896 - DNA, 826 bp, Unknown
  Bacterial polypeptide expressing nucleotide sequence isolated from the Sargasso Sea
tgctgttttacctatttatgacgttatctttaatcaagaaaaactaagacatatccttgttagacatgagcagggcgctgttcatgctgcagagggttatgccagatcaactggcaaggtcggagttgttcttgttacatctggcccaggggcaactaatgctgttacaggtttgactgatgcattaatggatagtattccattagtatgttttactgggcaagttgcaactcaccttattggtaatgatgcatttcaagaggctgacactactggcataacaaggccctgcacaaagcataattatctagttaaggatattaataatttaaattctattattcatgaggccttttatgtagcaaaatctggaaggcctgggcccgtagtaattgatttacctaaagatatacaattgcaacaaattgattatgagtctgaaaccccatctattcaaacatcttataatccgaggacagaaggagaccaagttgcaattgagtctgcagcaaaattaatatcagaagcacggaatccagtcttctatactggaggtggtgtaataaactctggtccagttgcgtctaatttacttattgatttagttaagtatacaggttttccaattactagcactttaatgggtttaggtgcttatcctggttctgattcacagtttctaggtatgttaggaatgcatggaacttatgaggctaacatggctatgcatcaggctgatttgcttatagctgttgggtctagatttgatgatcgaataaccgggaggttagatgcttttagtcctgattcaaaaaaatacatatag

SEQ ID NO: 231897 - DNA, 364 bp, Unknown
  Bacterial polypeptide expressing nucleotide sequence isolated from the Sargasso Sea
atgaaattggcgggtaatgatatcttaattcagtctcttatagaggagggagttgaatatatttttggttatccaggtggagcagcccttcatatttatgactcaatttttaagcaaaaagaaatggaacacattcttgtaaggcatgaacaaggtgccactcatgccgctgatggttatgcaagagcaacaggaaagcctggagttgttttagttacttctggtcctggagctactaatgctataactggaattgcaactgcatttatggactctataccaatgattgttatttcaggccaagttgcaaaacatcttataggaacagacgcatttcaagaaactgacatgattggtatctcac

SEQ ID NO: 231898 - DNA, 964 bp, Unknown
  Bacterial polypeptide expressing nucleotide sequence isolated from the Sargasso Sea
tcaagagacagacatgatcggcatttttagaccaatgtttaagcatagctttactgtagatcatcaatcaaatattccaagaattgttaaagaagcattttatgtagcaacatccggtagacagggacctgtagtaatagacgtaccaaaagatctaacaaatccagatgatctatttgattttaattatcctgatgaagccaacataagatcatataatccaccaattaaacctgaagaaaatcagatagatagagtaatagaggctttaaagaattctaaaagacctgttatttatgctggtggtggaacaattgctagtaatgcttcaaatgagttaagagagtttaatagttatatcaaagcacctgtaacaaatacattaatggggctaggtgtttatcctggaactgataagtattttcttggtatgttaggtatgcatggcacatatcaggctaatatggctatgcacaacgctgatttaatcttggctgttggagcaagatttgatgataggatcaccaatactcctgagaagtttgctcccagagcacaaatagttcattttgatgttgatcattcatctgtttcaaaaatcattgaggcagatatagcagtctttgggcaagtaaaagattctttaaaatctattaatgagaaacttaaattagaatcctcctactttaataaagatagattttcagactggcataatcaaatagccaattggaaagatgctcatggacttaatcatgatctgtataagaacatagatgataaatcaccaattctacctcaagccgctgttcagcaaatatatcaaacttcagagggcagagcttttgtaacttcagatgttggccaacatcaaatgtttgctgcgcaatattaccattttgatgaaccaagaaaatggataaattcaggcggcttgggaacaatgggttttggattaccttct

SEQ ID NO: 231899 - DNA, 664 bp, Unknown
  Bacterial polypeptide expressing nucleotide sequence isolated from the Sargasso Sea
aatgaaaaaaagttatcctttaagttataaccaagaagaaaaaggtccacttaaagttccatatgttctagaagaactacaaaaaatgtcagaagaagattccatagttgtttctggagttggccaacaccaaatgtggatttctcttcattggaaatttacttcccctaatacttggttgaactcaggaggattaggaacaatgggatattcacttccagcagcaattggagcaaaagttgcatttcctgataaacaagttcttgctctagatggagatggttgtttccaaatgacttgccaagaattaattactgcctctactgaaaatatacctttaaagatagtagtttttaataatggaaatcatggcatggtaagacagtggcaaaaaatattttatgatcatagattctcagcatctgaactaactcatcatacgccagattatgtagctcttgctgaagctatgggtgcagttgggcttaggatggtcgaaaaatcagatgttaatagagtgttcgaagagatgttcaaagttaatgataggcctgtactagttgattgtgttgtagaccccgacgatatggtcttcccaatggttcctgcaggcggtagtaacgatgtagtgcttttaaatgaagatgatttgaagaacatatga

SEQ ID NO: 231900 - DNA, 948 bp, Unknown
  Bacterial polypeptide expressing nucleotide sequence isolated from the Sargasso Sea
gaatttataataaaaactttggcagatttaaatgttgaagtaatctttggttatcctggtggagcagtattaccaatatatgatgctatttttaaacaaaatagaattaggcatgttttagttagacatgagcaagcagcagttcatatggctgagggatatgctcgttctactggaaaagtaggagttattttggtgacttctggacctggtgctacaaatgctgttactggtttaactgatgcactaatggacagtgtacctctattatgtttaacagggcaagttccaacacatttaataggaactgatgcatttcaggaggccgacacaattggaataacatcttcatgtaccaaacataattatttagttaaagatattaatgatttagagaatacaattgcagaaggtttttatgttgctaaatcaggaaggccaggacctgtagtaattgatttgcctaaggatgttcaaaattcaattactaattataagggtattaaagtaaaaagtatggcttcttataagccagcaaaaaaagctaagataaataatattaaagaagctatagatatccttattaaagctaaaaagccggttatatattcaggaggtggcgttattaattcaggtcaaaaggcttcgtcaactcttactaaattagtagattatctaaatattccaataacacagactttaatgggattaggggcagtatctgcaaaaaataaaaactttataggaatgttaggcatgcatggtacatatgaagcaaatatggctatgcatgattgtgatgtaatgctatgtgtaggtgctaggtttgatgataggataactggtaatttaaaatatttttctcctaattctaagaaaatacatattgatattgacccgtcgtccataaataaaaatgttaaagtggatatagctctagtaggtgat

SEQ ID NO: 231901 - DNA, 565 bp, Unknown
  Bacterial polypeptide expressing nucleotide sequence isolated from the Sargasso Sea
atgtcaaaattgtattcaggtgctgaaatagtatttaaatgtttggaagaccaaggtgtagaatttatatttggttacccaggtggtgccgttcttccaatttatgatgaattaaaaaattttaattttttaaagcatattttggtacgtcatgagcaaggtgctggacatgctgctgagggatacgcaaggtcaacaggaaagccaggtgttcttctagttacttcaggtcctggagctacaaatgctgtaacggcattaactgatgcatatatggattctgttccattagtttgtatttctggacaagttcctacacacttaattggtactgatgcgtttcaagaatgtgacactacaggaattactagaccatgcacaaaacataactggttagtaaaagacgtaaaagatttggaagaaacaattcacaaagcttttgaagttgcaactacaggaagaccaggaccagttttagtagatattcctaaagatgttcagtttcaaaaaacaaaatatataaaacataaaaagataaaaaagttaaatggtaaaactaaaagtc

SEQ ID NO: 231902 - DNA, 724 bp, Unknown
  Bacterial polypeptide expressing nucleotide sequence isolated from the Sargasso Sea
ccgtcatgaacagggtggaacccacatggcagatggatatgcccgagccacaggcaaacccggggtggtactggtcacttccggaccaggggcgacgaacacggtcacaggtctgcttaccgctcaaatggactccgtaccgatggtcgtcctgacaggccagaccatcactcccaatcttggaaaggatgccttccaggaagccgatgttttcggcgtcacaatgccagttgtcaaacatagttacttagttcgtaatgtgaacgatttaccacgggtgatgaatgaggccttccatttagcaacttctggaagaccaggcccggtgttggtcgatctcccgaaagatgtggtttcggctgaatgcgaggctgactttaccgacgaatttcacctacctggctatgcccccccggcaaggggattaactgaagacctggaaaaagccgcggaattgatttcatcctccaaaaaacctctcctttatgtaggtgccggtgcggtcattgcccaagcatcaaaacaggtcattggacttgcagaaaaacttcaggcacctgtcacaactaccttgttgggtaagggagcatttccggaaacccatccgctttctgtgggcatgctgggcatgcatgggaccgcctatgccaacaaaacagtcgtggattgtgacctgatcatggccatcggtgcacgttgggatgaccgaatcacaggcaaggtt

SEQ ID NO: 231903 - DNA, 896 bp, Unknown
  Bacterial polypeptide expressing nucleotide sequence isolated from the Sargasso Sea
aatgcatgattgtgatttaatgataaacgttggtgcaagattcgatgatagaattacaggaaagttagatgaattctcaccaaaatcaaaaaaaattcacattgatattgacccatcttcaataaataaaaatgttaaagtagatttgccaattgttggagatgttgctgatataatcaattcaactttaaatacaattaaaaaaataaagccaagctttatgaaatcaaataagcaaaagatttctaaatggtgggaaaaaattgcaaaatggagatcggtcaattctcttaattttgaaaatagcactgaaacaataaagccacagtatgccgttcaaagactttatgaattaacaaaagataaagacacttatataactacagaagttggtcagcaccaaatgtgggccgctcaacattataaattcaataagccaaataggtggatgacttctggtggcttaggaacaatgggttatggtttgcccgcagcggttggtgtacaggttgctcatccaaataaattagttattgatattgctggagaggcatctgttctaatgactatgcaagaaatgtctactgcagttcaatatagtttaccaattaaaatttttattttaaataatgaatatatggggatggttcgtcaatggcaggaattacttcatgataaaaactattcagagagctacacagcagctttaccagattttgtaaaattagcagaagcatatggttgtgttggcataagagcaaccacacccgaagaacttgatgataaaattattgaaatgcttaataccgatcgaccagtaatatttgattgccgagttgataagattgaaaattgttttccaatgataccttctggaaaagcacataatcagatgt

SEQ ID NO: 231904 - DNA, 808 bp, Unknown
  Bacterial polypeptide expressing nucleotide sequence isolated from the Sargasso Sea
gtcattcatatagatattgacccagcagaagttaataaaaataggcgtgtagatgttgcaattgtatctgacgtttcaaaagctgttcaaaaaattaatgataaatctctaaataataaatttgcttgtcagacgaagaactggttagaaaaaattgatttttggaaaaataaacatcctttgtatgaaccgcctaaagaaggagaaatttatcctcaagaagttcttttgaaagttagggaaatttcaccggaagcttatgtaactacagatgtaggacaacatcagatgtgggctgctcaatatcttaggaattctccaagaaaatggattagtagtgctggcttaggaactatgggttttggattgccagcggcaattggagtgaaggcagccttacctaattcagatgtaatttgcatagctggagatgcaagcgtcttaatgaatattcaagaattaggaactttatctcaatatggtttaaaggtgaagttgatcatcataaataatcgctggcaagggatggtaaggcaatggcaggaaagtttttacaatgaaaggtattcctcttcagacatgagttgtggtgaacctgattttgtaaaacttgctgagtctttcggaattaaaggatatttaatttctgatagaaaacaattacataatgaactacaacatgctcttgattatgacggccctgccttgattaatattcttgttagaagaggtgaaaattgctatccaatggtaccacctggtaaaagtaacgctcaaatggttggatatgttaattgtgaagactaat

SEQ ID NO: 231905 - DNA, 861 bp, Unknown
  Bacterial polypeptide expressing nucleotide sequence isolated from the Sargasso Sea
gttggttagtgaatttgttgacttaattggatctccaataacaatgactttaatgggattaggagttgttgcttcatcaaataaaaattctttaggaatgttgggaatgcatggaatgtatgaagcaaatatggcaatgcatgaatgtgatgttatgattaacattggtgctcgatttgacgatagagtaactggaagacttgatgctttttcacctaattcaaaaaaaatacatatagatatcgatgcaagtaatattaataaaactataagtgtagactatccaattgtaggcgatgtcaaacaaattgttgaaaagatgataggaatttggaaaaagaataattataaacttgatcaacaatcacttaatcaatggtgggaaaagattaataaatggaaaaaagttgattgtctaaaatataataataataatgaacaaattaagccacaatatgctgttcaaagattgtatgaattaacaaaaaacactaaaacctttattaccactgaagttggtcaacaccaaatgtgggctgcacaatattataaatttgaagagccaaatagatggttaacttctggtggtttagggacaatgggatatggtttcccagcagcaataggtgcgcagattggtaatcctgattctttagtagttgatattgctggcgatgcttcaattcttatgaatattcaagaaatgagcactgcaattcaatatcgcttaccagtaaaaatatttattttaaataatgaatatatgggaatggttagacaatggcaggaactacttcatggcggaagatattctgaaagctatacagatagtttaccagattttgttaaattggcagagag

SEQ ID NO: 231906 - DNA, 736 bp, Unknown
  Bacterial polypeptide expressing nucleotide sequence isolated from the Sargasso Sea
ggctatgcatgaatgtgatgttatgattaatatcggcgcaagatttgatgaccgtgttacaggaagactcgatgctttttcgccaaattcaaaaaaaatccatattgatatcgatgaaagtaatattaataaaactataaacgtcgatgttccaataataggagatgtaaaacaggttgttgaaaagatgatcactgtttgggaagaaaagaaatttcaaatagatgataaagcactaaaattatggtgggataaaataaataaatggaaacaagtagattgtttaaattacaataatgaaggtaaacagataaaaccacagtacgcagttcaaagactctatgagttaacaaaaaatacaaaaacctttattacaactgaagtaggtcagcaccaaatgtgggctgctcaattttataaatttgaggagcctaatagatggttgacgtcaggcggtttaggcactatgggatatggatttcctgctgcaattggtgctcaagttggacatccagatgccttagtaatcgatatagcaggagatgcttctatactcatgaacattcaagaaatgagcacagctgtacaatatagattgccagtaaaaatatttattttaaataatgaatatatgggaatggtaagacaatggcaggaacttttacatggaggaaggtattctgaaagttataatgatagcttgcctgattttgttaaattagctgaaagttataaa

SEQ ID NO: 231907 - DNA, 925 bp, Unknown
  Bacterial polypeptide expressing nucleotide sequence isolated from the Sargasso Sea
agcagaaatagtttttaaagcactcgaagatcaaaaagtggaatatatttttggttaccctggtggcgctgttcttcctatttatgatgaacttaaaaatcataaatcaattaaacatattttagctcgacacgaacaaggagcaggtcatgctgctgaaggctacgctagatcaagcggcaaacctggagtgctacttgttacttctggtccaggtgcaactaatgcagtgactgctttaacagatgcttacatggactctgttccgttagtttgtatttctgggcaagttccaactcatttaattggaacggatgcatttcaagaatgtgacacaacaggtattacaagaccgtgcacaaaacataattggttagtaaaagatgtaaatgatctttctagagttctgcatttagcttttgaagttgctactactggaagacctggcccagttttagttgatattcctaaagatatacaatttaaaaaaggcaaatataaatttataaaaaatagtttaaagaaaaaacttaatggtaaagctattcacaagttatctaacaaagagttagataaatttattgacctgatgaaaaaatcatctaaaccaattttttatacgggtggtggagttataaattctggtcctgatgccagtaaatatttaagagagttagtctctttaacaggctttcctattacttcgactttacaaggactgggagcatatcctggagatgatcctcaatttttaggaatgttgggaatgcacggaactttcgaagcaaacaatgcaatgcatgattgtgatttaatgattaacataggagcaagatttgatgacagaatcacgggaaaggttgatgagttttcacctaagtctaaaaaaatacatgttgacatagatccttcctcaataggaaaa

SEQ ID NO: 231908 - DNA, 859 bp, Unknown
  Bacterial polypeptide expressing nucleotide sequence isolated from the Sargasso Sea
gctcaaaatggaagacctggaccagtattaatagatattccaaaagatgttcagtttgcaaaaggtaaatatgttgaaaaaaataagattgtaattccatctcacagactttttgagccaagtccaaattttgaaaccaaaaaaattgaagatgcagttgaaataatatctaaatcaaaaaaaccaattttttatattggtggtggttgtattaattcaggaccagtagcttcaaagcttgtaagaaaatttataaatttagtaggatcacctgtaacaatgacactaatgggtttaggagttgtagcatcatcagataaaaattcattaggcatgttaggcatgcatggaatgtatgaagcaaacatggcaatgcatgaatgtgatgttatgattaatattggtgctcgatttgatgatagagtaactggaagattagatgctttttcaccaaactcaaagaaaatccatgttgatattgatgcgagcaatataaataaaactattaacgttgatgttccaataattggcgatgttaagcaagttgttgaacaaatgataagtgtatgggaaaataaaaagtacgctattgataaactagcattagctgattggtggcaaaaaataaataaatggaaagaagttaattgcttgagttataataatgatagtaagcaaattaagccacaatatgctgtacaaagactttatgaattaactaaaaatacaaaaacttttgtaacaactgaggttggtcagcatcagatgtgggctgcacaatattataagttcgaagaaccaaatagatggttaacttctggtggtttgggcacaatgggatatggttttcagcagctat

SEQ ID NO: 231909 - DNA, 691 bp, Unknown
  Bacterial polypeptide expressing nucleotide sequence isolated from the Sargasso Sea
taaatggaaagatgtagattgcttaaactataacaatgaaggtaagcaaattatacctcagtatgcagttcaaaggctttatgagttaacaaaaaatacaaaaacatttattacaactgaagtaggtcaacatcaaatgtgggctgctcaattctataaatttgaagaaccaaatagatggctaacttcaggtggtttaggaactatggggtatggttttcctgctgctattggagctcaggttggacatcctgatgctttagtagtcgatatagcaggtgacgcctctatactcatgaatattcaagaaatgagcactgctgttcaatatagattgcctgtaaaaatatttattttaaacaatgaatacatgggaatggttaggcaatggcaggaacttttacatggtggaagatattccgaaagttatactgatagtttacctgattttgtaaaattagctgaaagttataaagctgttggtttaagagcaaaaacaactgatgaccttgataatgttataaatcaaatgatagaaacaaaaaatacagtaattgcagatatttgggtaactaaagaagagaattgctttccaatgattcaaagtggatctgctcataatgaaatgatgttaagtaaagatcaaaaacaagacaaaaaatctgccgaaaaaggaaaaattttagtttaa

SEQ ID NO: 231910 - DNA, 631 bp, Unknown
  Bacterial polypeptide expressing nucleotide sequence isolated from the Sargasso Sea
atgtcaaaattgtattcaggagctgagattctatttaagtgcttggaagaccaagatgtagaatttatttttggttatcccgggggtgctgttcttcctatctacgatgagttaaaaaattttaattttttaaaacacattttagttcgtcacgagcaaggtgcaggacacgctgctgaaggatatgccagatcttctggaaaaccaggggttcttcttgttacttcaggccctggagctactaatgcagtaactgctttaacagacgcttatatggactcagttccattagtttgtatttctggacaagttcctacacacttgataggcactgatgcttttcaagaatgtgatacgacaggaataacaaggccatgtacaaagcataattggttagttaaagatgtaaaagatttagaaaaaacaattcataaagcatttgaagttgcaacaacaggtagacccggacctgttctggttgatattccaaaagatgttcagtttcaaaaaacaaattatacaaaatttaaaaagcaaaaaaaaacaaacggtaaagtccataatcatttttcacaaaaagacattgataaattgattgagttaatgagcaaagcttctaagcctaattttt

SEQ ID NO: 231911 - DNA, 843 bp, Unknown
  Bacterial polypeptide expressing nucleotide sequence isolated from the Sargasso Sea
agtttctgaaattttaaaggcaaagaaaccagttatttatgcaggaggaggtgcaataaatagcaatgcatctaaagaactatttgaactaaatgagcttctaaattttcctgttacaaatactttaatgggattaggtgtttatcctgcaaaaaataaaagatttatgggaatgttaggaatgcacggcacttatcaatcaaatatggcaatgcataatgcagatttgattattgcaattggagctaggtttgatgacaggataacaaatactccagatctatttgctccaaatgcaaagataattcatttcgatgttgatcaatcttctgtttcaaaaattatcgaagcaaatattgcagtttttggacaggttaagaactctttaattgaattaaataaacaattaaaagataaaattgattcaattgatagtactttaattcagccctggcttgatcaaattgatgaatggacctcacttcatggactaaatcatgaattatataaagaaaattctgatgaaaaaaagataatacctcaatcagtggttcaacatgtttatcaaataactgacggtaatgcttttgttacttctgatgtaggacaacatcaaatgtttgcagctcagtattatcatttcaatgagccaagaaaatggattaattcaggcggacttggaactatgggttttggacttccagcagcaatgggtgttaagttagcctttcctgaagaagaagttgtctgcattacaggggaaggaagtatacaaatgtgtattcaagaactctcaacttgttctcaatatgacttacctatcaaaataattaatataaataa

SEQ ID NO: 231912 - DNA, 823 bp, Unknown
  Bacterial polypeptide expressing nucleotide sequence isolated from the Sargasso Sea
gatataaatgatttatcagaaataatgcacgaagcatttaaagttgcaaccacaggaagaccaggtcctgttctagttgatattccaaaagatattcaatttgcaaaaactaaatataaaaaaccgaaaaaagaaaaaaaattatatggaaaatcaaataataaattttctcaaaaacaaatagatcaactaattgatttattaaaaaaagcaaaaaaaccagttatttatagtggtggtggagtaattaattcgggccctaaggcgagtgatgcattaagagagtttgttgaattgacaggatttccaatcacttccacacttcaaggcttaggtgcatatcctggtgatgacaatcaattccttggaatgctaggtatgcatggaacttatgaagcaaataatgctatgcatgattgcgatcttttaataaacattggtgcaagatttgatgatcgtatcactggaaaaattgatgaattttcgccaaactcaaaaaaaattcatattgatatagatccttcgtctataaataaaattataaaagttgatcttgctatagtaggtgatgttacgaaagtaattggtaaaataaataaaacaatattgaagaaaaaaaatggccacagcaaatctaataaatcaaatattgctaagtggtgggaacaaatacaaaaatggagagaaaaagaatcccttaattttgttaacagtaatgttagcatcaagcctcaacatgcagtccaaagactgtatgagttaacaaaagataaagatacttatgtaactactgaagttggtcaacaccaaatgtgggcagctc

SEQ ID NO: 231913 - DNA, 784 bp, Unknown
  Bacterial polypeptide expressing nucleotide sequence isolated from the Sargasso Sea
tttgcaaggtctgggttgtttccctgctgacgataatcaatttttaggaatgttaggtatgcatggtacttatgaagcaaacaatgctatgtatagttgtgacttaatgataaacgttggcgcaaggtttgacgatagaattactggtaaaattgacgaattctctcccaaatctaaaaaggttcatattgatatagatccatcatctataaataaaaatgtaaaagtagatctagcaattgtaggagatattaaatcagttttaacaacaacattaaaaacttttaaaaaatcaaaaaaaaatttttctaagtcaaataagtctcaaatatctgattggtgggaacaaattcagaaatggagatctaaaagatcattagaatacattggcagtgaagaaactattaaacctcaatatgcaattgaaagattatatgaacttaccaaagataaagatacctatataacaactgaagtaggtcaacatcaaatgtgggctgctcaacactataagttcaataaaccaaatagatggatgacttcaggaggtcttggtacaatgggatatggcttacctgcagctgttggagttcagattgcacatcctaaaaaattagtaattgatattgctggagaagcctctgttttaatgactatgcaagaaatgtctactgcagtgcaatacaatttacccataaaaatatttattttaaataatgaatacatgggaatggtaagacaatggcaggaattattacacgataaaaattatcagaaagtcttc

SEQ ID NO: 231914 - DNA, 382 bp, Unknown
  Bacterial polypeptide expressing nucleotide sequence isolated from the Sargasso Sea
atgtcaaaattatattcaggagcagagattttatttaaatgtctagaggatcagggtgtagatcatatttttggatatcctggaggagcggttcttccaatttacgatgagttaaaaaaccataaatctataaagcatattttagttagacatgaacaaggagcaggtcatgccgcagaaggttatgcaagatcttctggtaagccaggcgttgtacttgtaacttcaggtccaggagcaactaatgctgtaactgcacttacagacgcttatatggactcagttcctttagtttgtatttctggacaagtgccaactcacttaataggaactgatgcatttcaagaatgtgatactacaggaattacaagacccatgtact

SEQ ID NO: 231915 - DNA, 930 bp, Unknown
  Bacterial polypeptide expressing nucleotide sequence isolated from the Sargasso Sea
aagttgaatatattttttggttatcctggaggagccgtgcttccaatttacgatgaattaaaaaatcataaatcaataaaacatattttagcgagacatgaacaaggtgcaggtcatgctgcagaaggttacgcaagatcaagcggtaagccaggagttttattagttacatcaggtccaggtgcaacgaatgcagttacagctttgacggatgcttacatggactcaattcctgtagtttgtatttcaggacaggttccaactcatttaattggaacagatgcgtttcaagaatgtgacacaacaggtatcacaagaccatgtacaaaacataattggttagtgaaagatgtaaatgatttagcagaaattatgaatcaagcttttaaaatcgcaacaacaggtcgaccggggccagtgttagttgacattcctaaagatattcaattcaacaaaggtatttataaagtaagaaaaaacaaattagaaaaaaaattgaatggaactctttctaataagataaatttaaaagacgtagataattttattgagatgataaaaaaatcatctaaacctattttttatacaggtggcggagttattaattcaggtccaaaagcgagtgaacttttaagagatctagtttcattaactggttttcctattacttctactcttcaaggtttaggggcataccctggcgatgatcctcaatttttaggaatgcttggaatgcacggaacttatgaagctaataatgctatgcacgattgtgatctgatgattaatattggagcaaggtttgatgatagaataaccggaaaaatagatgagttctctccaaaatcaaaaaaaattcatattgatatagatccatcatctattggaaagaacgttaaagttgatttagctattacaagcgatgtaaca

SEQ ID NO: 231916 - DNA, 706 bp, Unknown
  Bacterial polypeptide expressing nucleotide sequence isolated from the Sargasso Sea
aatgccaaaattattaactggagcagaaattgtatttaaatgtcttgaagaccaaaaggtagagcatatttttggttatccaggtggtgcagttttaccgatttatgatgagctaaaaaatcatccatctataaaacatattttagttagacatgaacaaggtgctggtcacgcagcagaaggttatgcaagatcttctggaaagccaggtgtagttttggttacatcaggtcctggagctactaatgttgttacagcactaacagatgcttacatggattcagttccattagtttgtatatctggccaagttccaactcacttaattggaacagatgcttttcaagaatgtgacactacaggaattacaagaccttgtactaaacataattggctagtaaagaatatcaatgatctttcaaaagttattcatgaagcttttagagttgcaacaacaggaagaccaggaccagttttgattgatattccaaaagatattcagtttgcaaaaacaaaatacaaaaaaccaaataaagagaaaaaattaaatggaaaaaaacataataaattttctcaagatcagattgatgaattagtaaaattattaagcaaggctaaaaaaccaatcatctatagtggaggaggagtaattaactcaggcccaaaagcaagtcaggctctgagagattttgttgagctaactggt

SEQ ID NO: 231917 - DNA, 902 bp, Unknown
  Bacterial polypeptide expressing nucleotide sequence isolated from the Sargasso Sea
atcttgcagagttttacatttagcttttgaagtagctacgactggaagaccaggacctgtattagtagacattccaaaagacatacaatttaaaaaaggtaaatataattttaacaaaagcactcttaagaaaaaacttaatggaagagcaactaataaagtttctaatagtgaactagataaatttattgacttactaaagaaatcttccaaaccaattttttatactggaggaggggttataaactctggaccacaagctagtaaatatttaagagagttagtatctttaactggtttcccaataacttcaactttacaaggactaggcgcttacccaggagatgatccgcagtttttaggaatgttaggtatgcatggaacttttgaagccaacaatgcaatgcatgattgtgatttaatgattaacattggcgctaggtttgatgatagaataactggtaaagtggatgagttttctccaggttcaaaaaaaatacacattgatattgatccatcctctattggcaaaaatataaaagttgacttagcaattgtaagtgatgtgtctgaattcttaaaatcattaataaaacgatttaaggaaaaaaataaaaattttttaaactctaataaacaaaagacttcaaaatggtggagtacaattgaaaagtggagagaaaaaaaatctcttaattttataaatagtgataaattaattaagcctcaacatgcagttcaaagactttatgaattaacaaaagacaaagatacattcattacaactgaggttggccaacaccagatgtgggctgcgcaacattataaatttagccaaccaaatagatggatgacatctggaggattaggcactatgggctatggtttaccagctgctattg

SEQ ID NO: 231918 - DNA, 589 bp, Unknown
  Bacterial polypeptide expressing nucleotide sequence isolated from the Sargasso Sea
atgaaaattgcaggaaacgacatattaattcagtctctgataaatgagggagtggaatatatcttcggttaccctgggggtgctgctcttcatatctatgattcgatctttaatcaaaaagagatgcaacatattttagtaaggcatgagcaaggtgcaacacatgctgctgatggttatgctcgtgcaacaggaaaacccggagttgttctcgttacatcaggaccaggcgcaacaaatgctattacaggtattgcaacagcattcatggattcaataccaatggtaattatttctggtcaggtgcaaagtcatttaattggaactgatgcctttcaagagacagacatgataggtgtatcaagacctattgttaagcatagtttcaccgtggacaaacaagagaatattgcaaatatagttgctgaagcttttcatatagcaacatcaggaagacaagggcctgttcttattgatgttccaaaagatttaacaaatccagttgatttatttgattttgtctatcctgataaggttcacataagatcttacaatccacccacaaagccagaaaatcatcaggtgtctc

SEQ ID NO: 231919 - DNA, 923 bp, Unknown
  Bacterial polypeptide expressing nucleotide sequence isolated from the Sargasso Sea
ttatattgctcaaaatggtcgtccagggcctgttttaatcgatattcctaaagatgtaggtttggaagaatttgatagttatactccaattacacaaaaaaatattgttaataataaaggatatcgttttaaatttaaaacgaatcgttttcaaattcgtcaaactttaaatttgattaaacaagctacacaaccgcttttgtatgttggtggtggagcaattacctctaatgctgaaaaagaattaaaagaatttgctgaattatttcagattcctattacaactacattaatgggtaaagggtgttttggtgaaacgcataatttagcattaggtatgttaggtatgcatggaactgcttatgcaaacttttcggttagtgaatgtgatttattgatcgcaataggtgctcgttttgatgatcgtgtaacaggaaaacttgaagattttgcttgtaatgcacaagtaattcatatcgatattgatccagctgaaattagtaaaaataggattccacaaattgctttagttggtgatgttaaattaattttacaagaaattttaaaagaacaaatttcggatttaaatcttgaattggatcagactattccttggcgaaaaagaataaatcgttggaaacaaacttatccattgattattcctagcaatcaaataagtctttctcctcaagaagttatcaataaaattagtaatcttgcccctaatgcattttttactactgatgttggacaacatcaaatgtggtctgctcaatttgtaaaatgtaatcctagacaatgggcgtcgagcgcgggtttaggtacaatgggttatggtttaccggctgctattggggtccaaattgctcatcctgaaaatcaagttatttgtatttccggtgattcaagttttcaaatgaata

SEQ ID NO: 231920 - DNA, 841 bp, Unknown
  Bacterial polypeptide expressing nucleotide sequence isolated from the Sargasso Sea
tccaataacatctacattgcaaggtttaggctcttacccagcagacgataatcaatttttaggaatgttaggaatgcacggaacttatgaggccaacaatgcaatgtatgaatgtgatttaatgataaatataggtgctagatttgatgatcgtataacaggaaaaattgatgaattttcaccaaagtcaaaaaaaatacatattgatattgatccgtcttcaataaataaaaatgtaaaagtagatttagctgtcgttggcgatgttaagacagttgtttcttttataataaaaactttaaagaaaaaaaaacctaaatttattaaatcaaataaacaacaaatttctaaatggtgggaaaaaattcagaaatggagatctataagatctttagattatattaatagtgaagaaactataaagccacaatatgctatagaaagattatatgaacttactaaagataaagatgcttatataacgacagaggtagggcagcatcaaatgtgggctgcgcagcattataaatttaataaaccaaatagatggatgacttctggaggattgggaactatgggatatggcttaccagctgcagttggtgttcaagtagcacatccaaacaaattagtaattgatattgcaggagaagcatcagtacttatgactatgcaagagatgtcaacagcggttcaatatagtttaccaattaaaatttttattttgaataatgaatacatgggtatggttagacaatggcaagaattattgcatgataaaaattattccgagagttatacagcagcattacctgattttgtaaaattggcagaagcttat

SEQ ID NO: 231921 - DNA, 894 bp, Unknown
  Bacterial polypeptide expressing nucleotide sequence isolated from the Sargasso Sea
cggtcgacccgggtccgtcgtgccgccaggctttcgccagcccctgccaccggaggatgacgccatccatgccgctctcggtctgatccgggatgctcagcgccctttgctctacgtcggcggcggggcgatctcggcggcggctcacgacagcctcaaggtgctggcggatcggttccagctgccggtcaccaccacgctgatgggcaagggagccttcgatgagaacgaccccctttccgtcggcatgctcggcatgcacggcacggcctacgccaacttcgccgtcaccgaatgcgacctgctgatcgcggtcggagcccgtttcgatgaccgggtcaccggcaagctcgacaccttcgcgccccgggcccgggtggtgcacttcgagatcgatcctgcggaagtcggcaagaaccggcaggccgaggtggcggtgctcggggatctgggcctgagcctggcgcgtctggtggaactgagccttcagcatcccgccgagccccgcaccaccgcatggctcgcccgcatcgcctcctggaaggagcgctatcccctcaccatccctccggcagagggtgagatctatccgcaggaggtgctgctgaaggtgcgtgacctggctccacaggccatcgtcaccaccgacgtgggtcagcaccagatgtgggcggctcaatacctccgcaatggaccgcggggctggatcagcagtgccggtctcggcaccatggggttcggcatgccggcggcgatgggagcccaggtggcctgtcccgaccagcaggtgatctgcatcgccggcgatgccagcatcctgatgaacattcaggagctgggaaccctcgcggcctacggcctgccggtgaaggtggtgatcgtgaacaaccactg

SEQ ID NO: 231922 - DNA, 655 bp, Unknown
  Bacterial polypeptide expressing nucleotide sequence isolated from the Sargasso Sea
aatggataaaagtaataagtctggtgctgaagcattaattcactcccttcatctagaaggagtagagcttatgtttggatatcctggaggagctgctctacatatttatgatgccatatttaatcaaaactatgttgatcacattctagttagacatgaacaaggcgcagttcatgctgcagatggatatgccagagctacaggcaagcctggtgtagctttagtaacatctggtccaggtgctaccaatgcaattactggtttagccacagcttatatggattcaactcctatagtagttatttccggtcaggttaaatcaggattaatagggaccgattcctttcaggaaacagacatgatcggagtttctagacctatagtgaaacatagttttctcgttcaatctgctgaagacattccagagattgtaaaaaaagcttttcacattgcgacaaccggccgacctggtcctgttgttattgatatacccaaagatttcacagatccagagtataaatttgagttcaattatccttctgaagttaacatgcgttcgtataatcctcctaaaaaaggagatacttctaggataaaagaagcggtagatttaatcgaacaatcaaaaaaacctgtcatatattctggaggcggt

SEQ ID NO: 231923 - DNA, 290 bp, Unknown
  Bacterial polypeptide expressing nucleotide sequence isolated from the Sargasso Sea
tatgccgaaattaattagtggagcggaaatagtttttaaagcattagaggatcaaaaagttgaatatatttttggttatcccggtggggctgtacttccaatttatgatgagttaaaaaatcacaaatctattaaacatattctggctcgacatgaacaaggagctggtcatgcggcagaaggttatgctagatcaagtggtaaaccaggagtgttgcttgttacttctgggcctggagcaactaatgcagtaactgcgttgacagatgcttatatggattccatacctt

SEQ ID NO: 231924 - DNA, 921 bp, Unknown
  Bacterial polypeptide expressing nucleotide sequence isolated from the Sargasso Sea
gctatcgatatccttattaaagctaaaaagccagttatatattcaggaggaggtgttattaattcaggccaaaaggcttcgtcaactcttactaaattagtcgattatctaaatattccaataacacagactttaatgggattaggggcagtatctgcaaaaaataaaaattttataggaatgttaggtatgcatggtacatatgaagcaaatatggctatgcatgattgtgatgtaatgctatgcgtaggtgcaaggtttgatgataggataactggcaatttaaaatatttttctcctaattctaaaaaaatacatattgatattgacccgtcttccataaataaaaatgttaaagtagatatagctttagtgggtgattgttattttgtattagatatgatgttgaaggaactaaaaataaataaaagtaaacttaacataaaaagtttagataaatggtggaatactataaataaatggaagaaaaaagattgcttatcttttactgactctgataaaattattaaacctcaaaaagctctgaaggttctaaatgaagctttaaaaagtaaagatgcatttattactactgaggttggtcaacaccagatgtgggctgctcaatatttagatttctacaaaccaaatagatggatgacgtcaggtggtttgggtaccatgggatatggttttcctgcagccattggagttcaagttgctcatcctaaaaagccagtaatttgtgtggcaggagaggcatcttttttaatgaatatgcaagaattatctactttgagacaacttaatattcctgtaaaaatattcattttgaataacgaatatatgggcatggttagacagtggcaacagtttttccatggaggtagatatgctgaatcatatactgattctttacct

SEQ ID NO: 231925 - DNA, 457 bp, Unknown
  Bacterial polypeptide expressing nucleotide sequence isolated from the Sargasso Sea
catgctttgtacaggagcagaaatagtattaaaagctttaaaagatttagatgtggagtttatatttggatatccgggtggagcaatcttacctatttacgatgaaatctttaaacaaaatagaataagacatatattggtgaggcacgaacagggcgctgtacacatggcagagggctatgctagatctacaggaaaaacaggtgtagtattagttacttcaggcccaggagctactaatgcagttacagggcttacagatgcacttatggatagtatccctatattttgtattactggacaggttcctacacatttaataggtacagatgcatttcaagaagctgatactgttggcattactaggtcgtgcacaaagcataattatttagttaaagatgttaatgatattcaggaagtaattacagagggttttagaatagttctagcggtagac

SEQ ID NO: 231926 - DNA, 724 bp, Unknown
  Bacterial polypeptide expressing nucleotide sequence isolated from the Sargasso Sea
atggggaaattattttcaggagcagaaattgtttttaaagttttagaacatcataaagtagagcatatatttggttatccgggtggtgcagtgttaccaatttatgatgaattaaaaaatcataaaaccataaaacatattttagctcgtcacgaacaaggagcaggacacgctgccgaaggctatgctcggtcttcaggaaaacctggagttatgttggttacatcaggaccaggagctacaaatgcagtaactgctttaacagatgcatatatggattcagtaccaatcgtttgtattagcggacaggtcccaactcatttaatcggaacagatgcatttcaagagtgtgacacaacaggaattaccaggccttgcactaaacataattggttagtgaaagacgttaaagatttagcggatataatggaccgtgcatttgaaattgcgatgacaggcagacctggcccagttctagttgatattccaaaagatattcaattcaaaaaaactgaattttttattaaaaacaaaaaaaagaaaaaaacaaatggaaaattaaacggcaaagcaagtaatacggagatagataaagttattaacatgatgaaaaaatcttctaggccagttttttataccggaggaggagttataaactctggacccgaggcaagtaaattgttgagagaacttgtttctcttactggatttccaattacatcaa

SEQ ID NO: 231927 - DNA, 525 bp, Unknown
  Bacterial polypeptide expressing nucleotide sequence isolated from the Sargasso Sea
aatgtcaaaattatatagtggagctgaaatagttttcaaatgtcttgaggatcaaaatgtaaatcatatttttggatatccaggaggcgcagttttaccaatatacgatgaattaaaaaattttaattctataaaacatattttagttagacacgaacaaggcgcaggtcacgctgcagaaggttatgctaggtcttctggtaaaccaggagttttgttagttacgtcaggaccaggtgcaacaaacgcagttactgcattaacagacgcctacatggattcagttcctttagtatgtatatcaggacaggtaccaactcatttaataggaactgatgcatttcaggaatgtgatacaactggtatcactagaccatgtactaaacacaattggttagtaaaagatgtaaacgatttagctagaattattcacaaagcattcgaagttgctacaactggaagacccggacctgtattagtcgatatacctaaagatatacaatttcaaaaaacaacatataagaa

SEQ ID NO: 231928 - DNA, 652 bp, Unknown
  Bacterial polypeptide expressing nucleotide sequence isolated from the Sargasso Sea
atgtcaaaattatcaacaggatctgaaattgtatttaaatgccttgaagatcagggagtagaatttatttttgggtatcctggcggtgcggttcttccaatatacgatgagttaaaacatcataaatctataaagcatattttagttagacacgaacaaggagcaggtcatgcagcagaaggttacgcaagatcatcaggtaaacctggagtagttttagttacatcaggacctggagccacaaatgttgtaactgcattaactgacgcatacatggactctgtgcctttagtttgtatttctggtcaagttccaacacatcttataggaacagatgcttttcaggaatgtgatacaactggaattacaagaccgtgtactaaacataattggttagtaaaagatgttaaagatttatcaaaaacaattcacaaggcatttgaggtcgcaactaccggaagacctggacctgtgctagttgatattcctaaagatattcaatttcaaaaagctgtttattctaaatttaaaaaaataaaaaaattaaatgggaaaagtcataataattttggtcaaaaagaaattgaaaatttaatagaattaatgagtaaatcaaaaaaaccaatattttatactggcggaggtgtttaaa

SEQ ID NO: 231929 - DNA, 557 bp, Unknown
  Bacterial polypeptide expressing nucleotide sequence isolated from the Sargasso Sea
aatgtcaaaattgtattcaggagcagagatcgtttttaaatgtttggaagaccaaggtgtaaaaaatatttttggttatcctggaggagcagttttaccaatttatgatgaattaaaaaatcatcaaactattaaacatattttagttcgacatgagcagggagctggacatgcagcagaggggtatgctcgatctacaggtaaaccaggtgttttacttgttacttctggaccaggagcaactaatgcagtaacagctttaacagatgcatatatggactcagttccgttagtttgtattactggtcaagttccaactcatttaataggaactgatgcttttcaagaatgtgatacaactggaataacaagaccttgtacaaaacataattggctagttaaaaatattcatgacctagcaaaaacaattcataaagctttcgaagttgcaactagcggaagaccggggccggtattagttgatattccaaaagatatccaatttcataaatctacttatcagaagtttaaaaaacaaaagaaattaaatggaaaat

SEQ ID NO: 231930 - DNA, 778 bp, Unknown
  Bacterial polypeptide expressing nucleotide sequence isolated from the Sargasso Sea
attgtgttgtgaagattctataaaattatggaagtctaaagtttataaaatcaataaaccctctctcaaggagtggtggaaaacaattgataaatggaaagagaaagactcactaaaatatgtaagcgataaaaatataataaaaccacaacatgcaatccagagattatatgagttaactaaggataaagatgtatttgttacaactgaagttggtcaacatcaaatgtgggcggctcaatattataaatttaacaaacctaatagatggataacatcgggtggattaggaacaatgggttttggcttacctgcagcgattggagcacaggtagctcatcctgataaattagttatagatattgcgggagaagcgtcaatattgatgtgtatacaggaaatgtccactgccattcaacacaaattacctgtaaagatttttattattaataatcagtacatgggaatggttaggcaatggcaggaactgcttcatgataaaaggtattctcatagctacacagatgcattaccagattttgttaaactagctgaagcttatggcgctaaaggcataagagttcagaaacctaatgaattagataaagcgataaatgaaatgatcgaatatgatgggccggttatatttgactgtgttgtagaacagaatgaaaatgtatttccaatgattccatcaggtaaggctcataatgaaatgttacttggggacgaaactgaaaaagaagaaatttcagatgaaggaaaagttttagtttaa

SEQ ID NO: 231931 - DNA, 925 bp, Unknown
  Bacterial polypeptide expressing nucleotide sequence isolated from the Sargasso Sea
acaactttgatgggaaaaggcgcttttgatgaacgtgatcctttatcagttggaatgcttggtatgcatggaacagcttatgccaactttgctgtgactgaatgtgatttgttgattgccattggagcaagatttgacgacagagttacaggtaaattagatacttttgctcctaaagcaaaagtaattcattttgagattgatcctgctgaaataaataaaaatagagttgttgaagtttctgtattaggtgatgttggaattagccttgttaaattattagatctcagtaaccaaaggaaaacaaatccaagaacttctcaatggcttaacaaaattaaaaactggaaaaataattttcctttgataactccccctaaagaaggagaaatttatccacaggaagttttaattgcgttgagagatttggctcaagatgcttacattacaactgatgttggacaacatcagatgtgggcagctcagtatttgttgaatggaccaagacaatggattagcagtgctggacttgggacaatgggctttggaatgccggctgcaatgggagtcaaagttgctttgcctaaggagaaagtaatttgtatcgccggtgatgcaagtatcctcatgaacattcaggagcttggaactattgctcaatataagttgaatttaaaagtaattatcatcaataatcattggcaagggatggttaggcaatggcaagaaagtttttatgatgaacgatattcggcatctaacatgtctgttggggagcctgactttatttcgctatctaaggcttttggaattgagggtatagtaatttcaggaagagaaaacctaattcctcaactccaaaaagcattggagaatgaaggaccagttcttgttaacgtaaatgtaagaagagggaaaattgtta

SEQ ID NO: 231932 - DNA, 666 bp, Unknown
  Bacterial polypeptide expressing nucleotide sequence isolated from the Sargasso Sea
tatgaacatgacagaacaactgtcgggcggagatatgttgatccgatcgttgcaggacgaaggtgttgaatacatctttgggtatcctggtggctcagcattacacatctatgacgccatatttcggcaacaaaaaatcgagcatatcctagttcgtcatgagcaggcagcaactcatatggctgatgggtatgcacgctctaccggtcgtcctggtgtagttcttgttacctcaggtcctggtgccaccaatgccattacgggtattgctacggcttacatggacagcattccaatggtagtgatttccgggcaggtgcccagagatttgattggtacagatgcgtttcaagaaacagatatggtgggaatatcgcgtccggtggtgaagcacagtttcttagtgcgagatgcggaagaaattcccagtgtagtaaaaaaggcctttcatatcgccacgaccggccgtcctggacccgttgttatagatgtgcccaaggatacgacggacccgtttgagcaatttccgtatgcttacccagagaccgtcagcatgcgttcctatacgccggcttttgctggagacctgacgcaaattgatcgcgcggtagcagcgatgctagcagccaaaaagccagttttttatgttggtggtggtgtcatttt

SEQ ID NO: 231933 - DNA, 643 bp, Unknown
  Bacterial polypeptide expressing nucleotide sequence isolated from the Sargasso Sea
gtgcctcccgccgaaggccccctcttccctcaggaggtgctgctggccgttcgcgagctggcaccgaatgcaatcgtcaccacggacgttggccagcaccagatgtgggcggcccagtacctgcggaatgggccccggggctggatcagcagtgccggtcttggcaccatgggcttcggcatgccggcagccatgggcgcccaggtggcttgccccgatcgtcaggtggtgtgcatcgcgggtgacgccagcatcctgatgaatattcaggagttgggaaccctggcggcctatggccttccggtgaaggtggtgatcgtcaacaaccactggcaaggcatggtgcgtcagtggcaggagagcttctatgaggagcgttattccgcctctgacatgctcaatggcatgccggacttcgtggctcttgcacgctccttcggtgtggatggcgtgcacatccgcgagcgggagtcgttgaagcgtgatctcgaggctgcgctcaaggcccccggaccgatgctgatcgacatccacgtgcgtcgtggagagaactgctatccgatggttcccccgggcaaaagcaatgctgaaatggtgggccttccggctcccatgccggttctaaacgccccgacctcttgat

SEQ ID NO: 231934 - DNA, 748 bp, Unknown
  Bacterial polypeptide expressing nucleotide sequence isolated from the Sargasso Sea
cttgtcacctccggtcccggcgctacaaacgcgattactggggtggcgaccgcgtatatggattccattccgatggttgttttgtcaggtcaggtggctacgcatcttataggtgaagatgcctttcaagaaactgatatgataggtgtctccagaccaatagtgaaacacagttttcaagtgcgtcgtgcatccgatatccccattacgattaaaaaggcctttcatcttgcatcaacgggaagaccgggtcctgtcgtcattgacataccaaaagatctcactaagccagacgagttgtttgaatattcatatccagaaacggttaaattgcgttcctattctccagccaggcgtggtcatatggggcagattaaaaaagccgttagattactctcgagtgctaggcgtccaataatctatgcagggggtggagtgattcttggggagggtagtgatttgctaagagagcttgctgaatttggaaattttcctgtcacgaatactctcatgggtcttggttcgtttccagcaagtagtcctcaatttcttggaatgctcggtatgcatggattctatgaagctaacatggcgatgcataatagtgatgttattctcgcggttggagtgcgttttgatgatcgtgttaccaacacggtaagcaagttttgtccgggtgcgcagataatacatatagacattgatcctgcatctatatccaaaacggtccccgcagatctgcctatcg

SEQ ID NO: 231935 - DNA, 625 bp, Unknown
  Bacterial polypeptide expressing nucleotide sequence isolated from the Sargasso Sea
atgccaaaattatttactggagcagaaatcgtatttaaatgtctagaagatcaaaaggtagagcatatctttggttatccgggtggtgcagttttaccaatttatgatgaattaaaaaatcatcctactataaaacatattttagttagacatgaacaaggtgctgggcatgcagctgaaggatatgctaggtcatctggaaaaccaggagtagttttagttacatctggccctggagcaacaaatgttgtaaccgccttaacagatgcttatatggactcagttcctttagtttgtatttctggtcaggtgccaacacatttaattggaaccgatgcttttcaagagtgtgatactacaggaattacaagaccttgtacgaaacacaattggttaattaaagacataaatgaactttcaaaagttatgcatgaagcttttagagttgcgacaacaggaagaccaggaccggttttaattgatattccaaaagatgttcaatttgcaaaaacaaaatataaaaaaccaaacaaagaaaaaaaactaaatggaaaatcacataacaaattttgtcaagatcaaattgatgaattagtaaaattattaagcaaatctaaaaaaccaa

SEQ ID NO: 231936 - DNA, 883 bp, Unknown
  Bacterial polypeptide expressing nucleotide sequence isolated from the Sargasso Sea
ttgatcgccgccagcggccgccccggtccggtgctgatcgacatccccaaggatgtgggacaggaacagttcaactatgtgccggtggaacccggttccgtcatccctggcggtttccaccagcccgaacctccgcttgatgctgctgtggcagcggcactggatctgatcgagcaggcccaacgacctctgctgtatgtgggtggcggggcgatttcagccggtgcccacgacagcctgcggatgctggccgagcgttatcagctcccggtcaccaccaccttgatgggtaagggtgcctttgatgagaacgatgttctctcggtgggcatgctcggcatgcatggcaccgcctacgccaacttcgccgtcaccgaatgcgacctgttgatcgctgtcggtgcacggtttgatgaccgcgtcaccggcaagctggacacttttgccccccgggcccgggtggtgcacttcgagatcgatccggcggagatcggtaagaaccgcaaggctgatgtggctgtgctcggtgatctcggcctgagcctggcgcggatggtggagatcagcctgcaacgaaccgcggaaccccgaactgcagcttggctggagcgcatcaacacctggaaggatcgttatcccctcagaattccgccagcggaaggggcggtctacccccaggaggtgctgctggcggtgagggatctggcccccgacgcgattgtcaccacagacgttggtcaacatcagatgtgggctgcgcagtacctgcgcaacgggcccaggggctggatcagcagcgctggtctgggcacgatgggcttcgggatgccggctgccatgggggccccaggtggccatgccggatcggcaggtggtgtgcatc

SEQ ID NO: 231937 - DNA, 664 bp, Unknown
  Bacterial polypeptide expressing nucleotide sequence isolated from the Sargasso Sea
agctttaaaaatagcaaagaggttatcaaaccacaatatgcagtacagagactttacgagttatctaaaaatcaagatacttacatcacaactgaagtgggtcagcaccaaatgtgggctgctcagcattataaatttaataaaccaaatagatggatgacctcaggcggacttggcacaatgggatacggattgccagcagcagtaggagttcaaattgctcatccagataaactagttatagatatagcaggtgaagcatctgttctgatgacaatgcaagaaatgtcaactgctgtgcagtataaattaccaattaaaatatttattttaaataatcaatacatgggaatggtaagacaatggcaagaacttttgcacgaaaaaaattattctgagagttatactgaagctttaccagattttgttaaattagcagaagcatatggctgcgtaggaattcaagcaacaaaaccagatgaactagatgaaaaaataaatgaaatgataaatacaaaagaaccagttatatttgactgcagagtagatccagctgaaaactgttttccaatgataccttctggaaaacctcataatcaaatgttacttggtcctgaagatgagaaagagaaagtatcagatgaaggtaagactttagtataat

SEQ ID NO: 231938 - DNA, 553 bp, Unknown
  Bacterial polypeptide expressing nucleotide sequence isolated from the Sargasso Sea
aatgtcaaaattgtattcaggagctgagattgtattcaagtgcttggaagaccaagatgtagaatttatttttggttatcctggtggtgcagttcttcctatttatgatgaattaaaaaattttaattttttaaaacatattttagttcgtcacgagcaaggtgctggacatgcagctgaaggatacgctagatcttctggaaagccaggagttcttttagttacatcgggccctggagccactaacgctgtaactgctttaacagacgcctatatggattcagttccattggtttgtatatctggacaagttcctacacacttaataggtactgatgcttttcaagaatgtgatacgactggaataacaaggccatgcacaaaacataattggttagttaaagatgtaaaagatttagaaaaaacaattcacaaagcatttgaagttgcaacaacaggtagacctggacctgttttagttgatattcctaaggatgttcagtttcaaaaaacaaattacacaaaatttaaaaagcaaaaaaaaagaacggca

SEQ ID NO: 231939 - DNA, 589 bp, Unknown
  Bacterial polypeptide expressing nucleotide sequence isolated from the Sargasso Sea
atgccaaaattatacacaggagcagaaattgtttttaaatgccttgaagatcaaaaggtagaacatatttttggatatcctggtggagcagttttaccaatttatgatgaacttaaaaatcatacttctattaagcatattttagtgagacacgaacaaggtgctggtcatgcagctgagggatacgccagatcatcaggtaagcctggagtagttttagttacatctggacctggcgctaccaatgttgttaccgcgttaacagatgcgtacatggactcagttccattggtttgcatttctggtcaagtcccaacccatttaataggaactgatgcatttcaagaatgtgataccaccggtattactaggccctgcacaaaacataattggttagtaaaagaaataaatgatttatcagaaataatgcatgaagcatttaaagttgcaaccacaggaagaccgggccctgttttagttgatattccaaaagatattcaatttgcaaaagctaaatataaaaaacctaaaaaagaaaaaaaaaaaaatggaaaatcaaataataaattttctcaaaaacaaaaataga

SEQ ID NO: 231940 - DNA, 905 bp, Unknown
  Bacterial polypeptide expressing nucleotide sequence isolated from the Sargasso Sea
cctcatgccagcaagttattaagagagcttgtggacaaaacgaattttccaataacttcaacattaatggggctgggctgttatcctgcatcaggaaagagatggctgggcatgcttggaatgcatggtctgtatgaagccaatttggctatgcatgattgcgatcttatgattaatataggcgcaaggtttgatgacagaataacgggcagaattgacgcatttagcccaagttctaaaaaagtgcatgtagatatcgatccatcatcaataaataaggtgatcagcgtagatatacccatcatcggtgacgtgggtagtgtgctcaaagatgtgctggaactatggaagtccagaggacaaaaaactaatgcaaaagaaattagcaactggtggaaagagatcgaaaattggaaatccattgactgcttagcatttagtcaaaaaggtaagacgatcaaacctcaatttgcactttcgcgactagagcaactgaccaaaaaatataaaaaacgtttcattgctaccgaagtaggtcaacatcaaatgtgggccgctcagtacctgggttttgaagaacctaaccaatggatgacatcgggtggattgggaacaatgggctatggcttccctgcttcaataggcgttcaaattgcccatcctgattcattagtgataaatgttgcaggcgaagccagctggctgatgaacatgcaagaaatgggaacagccgtacagtatagattacctgtcaaacaattcattttaaataatgaacgactaggtatggttaggcaatggcaagagcttttacatggtgagcgttattcccatagctggtccgatgcgttgccagatttcgtcaagctagccgaagcatttggagctaaagggatattatgtga

SEQ ID NO: 231941 - DNA, 798 bp, Unknown
  Bacterial polypeptide expressing nucleotide sequence isolated from the Sargasso Sea
aatgactggcgcagaaatggtttttcgtgctcttgaagaccagggagttgaacatatttttggttatcctggaggggctgttttgcctatatatgatgaacttaaaaatcataaaaagatcaaacatattttagtacgtcatgaacaaggagctggtcatgcggctgaaggctatgcaagatcttcaggcaagccaggagttattcttgtaacttctggtccaggtgcaacaaatacagtaactgcattgaccgatgcttatatggattctattcctttagtttgtataactggacaagttccaacacatcttatcggaacagatgcttttcaagaatgtgatactacaggaataacaagaccatgcactaaacataattggttagtgaaagatataaataaattatctgaagttttacacaaagcttttgaagttgccacaagtggaaggcccggccctgttcttgtagatataccaaaagatattcagtttcaaaaaggaaaatatttaaaaccaaaaataataaataaaagaaatattgaaaataaaaaaaatcttaacggattagataaaaatataaatgctactgtagaattatttaaaaaatcatcaaaacctattttgtacacaggcggtggtgttattaactcgggaccgagggcaactaaattgcttcgtgaattagttttattaaccggttttccaattacatcaacactgcaaggcttaggagcttatccaggatacgatcagcaatttttaggaatgttgggtatgcacggaacatatgaagcaaa

SEQ ID NO: 231942 - DNA, 657 bp, Unknown
  Bacterial polypeptide expressing nucleotide sequence isolated from the Sargasso Sea
atagtgcagagtcgataaaacctcaatatgcagtccaaagactttatgaactaacaaaaaacaaagaaacgtatataacaactgaagttggccaacatcaaatgtgggcagctcaacattataaatttgacaaacctaaccattggatgacgtcaggtggtttaggcacgatgggttacggattaccagcagcagttggagttcaggtggcacatccgaataaacttgttattgatattgcaggagaagcatcagttttaatgactatgcaagaaatgtctaccgcagttcaatatagcttgccaattaaaatttttattttgaataatgaatacatggggatggttcggcagtggcaggaacttcttcatgaaaaaaattattcagaaagttatactgcggccctaccagattttgtaaaattggcagaagcttatggatgcgttggaattagagctaaaacacctgatgaattagacgataaaatcattgaaatgattaacactgatagacctgtaatatttgattgtttagttgataaagaggaaaattgttttccaatgataccttctggaaaaccacacaatcaaatgcttttaggaccaaaggatcagaaagaaacaaaaataactaagaaaggaaaaactttagtttaat

SEQ ID NO: 231943 - DNA, 634 bp, Unknown
  Bacterial polypeptide expressing nucleotide sequence isolated from the Sargasso Sea
aatgtcaaaattatatacaggtgctgaaattgtattcaaatgtctagaagaccaaggtgtagaatttatttttggttatccaggaggagcagttctaccaatttatgatgaattgaaaaatcataaaagtataaaacatattttagcaagacatgaacaaggagctggccatgctgcagagggttatgctagatcatcaggtaagcccggcattgtattagtaacttcaggccctggcgcaacaaacgtagttacagcattgacagatgcatacatggactccgttcctttagtttgtatttcaggacaagttcccacacatttgattggaactgatgcttttcaagaatgtgatacaactggtattactagaccttgcacaaaacataattggttagtcaaagatataaaagatttggcaaaaactattcataaagcttttgaggtagcaacaacaggaagacccggccctgtattagttgatattccaaaagatattcaatttaataaacactcatattcaaaaccaaaaaaacaaaaaaaactaaatggtaagacacataatttttattcacaaaaagaaattgatgaattaattaaattgataactaaagcaaaaaaaccgataatttat

SEQ ID NO: 231944 - DNA, 848 bp, Unknown
  Bacterial polypeptide expressing nucleotide sequence isolated from the Sargasso Sea
ttggaaactggtgcagaggcactaatggattctctgaaaattcatggggtaaagttaatctttggatatcctggaggtgcaatactcccaatatatgatgctgttcataaagctgaacaagagggttggttaaagcactatatggtaagacatgagcaaggaggttctcatgcagctgatggatatgcaagatctactggtcaagtaggagtatgttttggtacttcaggtccaggtgcaacaaatttagtaactggaatcgctactgctcaaatggattcagtacctctagtagtaattacaggccaagtcccaagaccagctattggtacagatgcctttcaagaaactgatatttttggtataacgcttccaatagttaaacattcatgggtaataagagatccttctgatatcgcgaaagtagtttcagaagctttttttatagcatcctctggaagacccggacctgttttaattgatataccaaaggatgtaggccaagaattctttaattaccaaagagttttacctggtgagattattcctaagggatttaaaagaaacggagatattaatgattgtgatataaagaaagctattaagttaatagaagagtctgaaagtcctcttctttacgttggtggtggggcaatatcttcaggagctcatgatgaaataaaaacgttggcaaataattatcaaataccagttacaacgaccttaatggggaaaggtgcttttgacgaaaaagataatttatcagtaggtatgttaggaatgcacggaactgcttacgcaaactttgcagtaacagaatgtgatcttttaatagctattggagctag

SEQ ID NO: 231945 - DNA, 658 bp, Unknown
  Bacterial polypeptide expressing nucleotide sequence isolated from the Sargasso Sea
aatgtctaaattatatacaggtgcagaaattgtatttaaatgtcttgaggatcaaaatgttgaattcatttttggttatcctggcggtgcggtattaccgatttatgatgaattaaaaaatcattcttcaataaaacatattttagtaagacacgagcaaggagcaggtcatgctgcagaaggttatgcaagatcttctggaaaacctggtgtagttttagttacctcgggaccaggtgctacaaatgttgtcacagctttaactgatgcgtatatggactctattcccttagtatgtatttctggtcaagtaccaactcatttaattggtacagatgcttttcaagagtgtgatactaccggtataacgcgtccgtgtacaaaacataattggttaattaaagatataaaagatttatcgaaaactttacatgaggcttttagagtagctacaactggaagaccaggtcctgttcttgtcgatatacctaaagatattcaatttgctaaaattaactatgcaaaacaaaaaaaaataaaaaaactaaatggtaaatcagatagcaagttttctcaggatgaaatagataaattaattaatttaatttctaaagcaaaaaagcctgtaatttatacaggaggtggagttattaattca

SEQ ID NO: 231946 - DNA, 910 bp, Unknown
  Bacterial polypeptide expressing nucleotide sequence isolated from the Sargasso Sea
gaattaaatgaaatattgagcataccagttacaaatactctaatgggtttaggagtatatcccgcaaccgataaaagatttttaggaatgcttggcatgcatggaacttaccaagcaaatatggcaatgcacaattcagatttaattattgcaattggcgctaggtttgatgacaggataaccaacacacctaagctctttgctccaaatgcaaaaattattcacttcgatgtcgatcattcctctgtttctaaaattattgaggcaaatattgctgtttttgggcaaatcaaaaattccttaagagcattaataaatgaaattaaatccgcaaataaagaatatgatataaatcaaattgaatcatggaggaatgaaataaaattatggaaagaacagcatggcttaaatcatgatttatatctatctgaaaatgatgatgctgaaattctacctcaacaggttgttcaacatgcataccatttgacgaatggaaaggcttatgtaacatctgatgttggacaacatcaaatgtttgcagctcaatattatcattttgatgagcctcgaaaatggattaattctggcgggttagggacaatgggtttcggtctacctgctgcaatgggtgttaaattagcttttcctaaggatgaggtaatatgtatcactggtgaaggaagtatccaaatgtgtattcaagaactttctacttgtcttcagtatggattaccaatcaagataataaacattaacaatgaagctctaggcatggttaaacaatggcaagatatgaattatggcggcagacactctgagagcacttatcaaagctcgttacctgattttataaaacttacagaatcgtatggtcatgttggaattaaaattgagaaaaattctgaactaa

SEQ ID NO: 231947 - DNA, 577 bp, Unknown
  Bacterial polypeptide expressing nucleotide sequence isolated from the Sargasso Sea
attaccactgaagttggccaacaccaaatgtgggcagcgcagcattataaatttaataaacctaatcgatggatgacatctggtgggctaggtacaatgggttatgggcttccagcagcaattggagtccaaatagcaaatcctggtaaattagttgttgatatagcaggtgaagcatcagttttaatgaccatgcaagaaatgtcgacagcagttcagtatggattaccaataaaaatatttatcttaaataatgaatatatgggtatggtgagacaatggcaggaacttttgcatgaaaaaaactactctgaaagctataccgcagctctgcctgactttgtaaagctagcagaatcttatggctgtgttggtataagagctaaaacaccggacgaattagatgaaaagataaaagaaatgattaatgttcaaaagccagtaatatttgattgtgtagtagataaatcagaaaattgtttcccaatgataccatcaggaaaaccacataaccaaatgattttaggccctgaagaggatgaagaaatttctgacgaaggaaagatcttagtttaat

SEQ ID NO: 231948 - DNA, 829 bp, Unknown
  Bacterial polypeptide expressing nucleotide sequence isolated from the Sargasso Sea
gatggactcggtgccgatggtggtcatcaccggacaggtgcccaggccgatgatcggcaccgatgccttccaggagaccgacatcttcggcatcacgctgccgatcgtgaagcactcctggctggtgcgcgatccagcggatctgggcagcgtgatcgctcaggcctttttcatcgcggcaacggggcggcctggaccagtcctggtcgatatcccaaaagatgttggccaagagctcttcgattacgtgccggtggagcccggcagcatcattccgcgtggcttcatccaccccccccagcacgacaaacaagacatctgtgcggcacttgatctgatcgaggatgctcagcggccgcttctttatgtcggtggcggagctgtttcagcgggcgcccaagaggcgctcaatgccattgcccagcggcaccgcattccggtgaccaccaccttgatgggcaaaggcgtattcgatgagaacgaccccctcgccgttggcatgctgggtatgcatggcacggcctacgccaactttgccgtcaccgattgcgacttgctgatcgctgttggtgcccgctttgacgaccgggtgaccggcaagctcgacaccttcgcgccacgagccaaggtcatccatttcgagatcgacccggctgaggtaggcaaaaaccgcaagcccgatgtggcggtgttgggggatgtgcgccgcagcctcgaagagctgctgctgcaaagccagcaacgccatgtggaaccgcacaccgcggcatggctagcgcgcattgaaagctggaagcagaactaccccctgacaacacctccagcggaa

SEQ ID NO: 231949 - DNA, 862 bp, Unknown
  Bacterial polypeptide expressing nucleotide sequence isolated from the Sargasso Sea
agaaaaattcatattgatattgatccatcatctatcaataagtcagtatcagttgatataccaataattgcagatgcaacttctgcattacaagaacttataagcgaaattaagaagttaaaatttaaacaatctgaaaataggattggtatatggctaagacagattgatcaatggcgtaaaagaaaatgcttagattttaaacaaactgacaaaatcattaaaccacaatatgcaattcaaaggttatatgaaaaaactaaggaaatggaaacttacataaccactgaagttgggcagcatcaaatgtgggctgctcaatattatggtttttcaaaaccaaataggtggatgacttcgggcggattaggaacgatgggctatggtcttccatcagctatgggtgttcaaatagctcatccagggaagctggtagttgacatatctggagaagcatcatttttgatgaatatgcaagaactatcaactctaaaacaatataaacttcctgttaaagtttttataattaataaccaatggatgggtatggtaaggcaatggcagcaattgatacatggcggcagatattcagagagttatactgaatctttacctgattttaaagctttagcagagtcatttgggcttaaaggccttagagctgaaaacgttgaccaattagatgatgttattgatgaaatgattgcttcaaaatctgcagtcctttgtgatattcaagttgctaaagaagaaaattgttttccaatgatcccatctggagcggctcattatgatatgttgcttggccctgaagataaacagagtagtaaagtttcaaaagatggaatggttttggtataat

SEQ ID NO: 231950 - DNA, 829 bp, Unknown
  Bacterial polypeptide expressing nucleotide sequence isolated from the Sargasso Sea
atgaaaaaaattacaggtgcacaaattgtcattgaaacattgatccaggaaaatgtaaaaattatctttggttatcctggtggagccgttttacctatctatgatgaactttttaagcaaaaaaagattagacatattcttgttagacacgaacaagcagctgttcatgcagctgaaggctatgcaagatctacaggaaatgtaggggttgttttagtaacatctgggccaggagctactaatactgtaaccggtttaactgatgctatgatggactcagttcccgtggtttgtatttctggacaggttccaacacatatgatcggaaatgatgcatttcaagaagctgatattgttggtattacaagaccttgtactaaacacaattatcttgttaaagatgttaaaaatttggcaggctctattcattcagcattttatatagcaagaaatggtagaccgggtccagttcttgttgatgtgccaaaggatattcagacttttaaaacaaattatttaggaaaaaagtctactaagttagtctcatattataagcctaaagtacttcctgaagtgcataaaattgaaaaagtaattgatcttttaaaaaattccaaaaagccaattttttacgttggtggaggagtagtaaattctggaacaaaagcatcaaaaaatttatttaatctgataaaaaaaacagggtttccatgtactgaaactttaatgggattgggtgcttttccaacttcggataagcaatttataggcatgctaggtatgcatggcacttatgaagcaaatatggcaatgcatcaatctgacttgt

SEQ ID NO: 231951 - DNA, 382 bp, Unknown
  Bacterial polypeptide expressing nucleotide sequence isolated from the Sargasso Sea
aatgtcaaaattatactcaggtgctgaaattgtatttaagtgtatggaggatcaaaatgttgatcatatttttggttatccaggaggtgcagtcctaccaatttatgacgaattacagaattttaaatcaatcaaacatgttttggttaggcatgaacaaggtgctggtcatgcagcagaaggatatgcaagatcatcaggtaagcctggtgttattttagtaacttcaggtccaggtgcaacaaatgtagttacagctttgactgatgcgtatatggattctattccactagtttgtatttctggacaagttccaactcatttaattggcacagatgcatttcaagaatgtgatacaactggaataaccagaccttgcact

SEQ ID NO: 231952 - DNA, 620 bp, Unknown
  Bacterial polypeptide expressing nucleotide sequence isolated from the Sargasso Sea
tttgttcactggggctgaaatctttgttaaatgtctagaagctgctggagttgaaaatatttttggctatcctggcggagcagtattgcatatatatgatgaattatttaaacaaaaaaacgtcaaccatattcttgttagacatgaacagggtgcagtacatgcagctgaaggttatgcaaaatcttcaggaaaaactggtgttgttttagtcacctcaggaccaggagctacaaattctattactggtatagcagatgcatatatggattctgtgcctatagttgtatttacaggacaagttaggactaatttaattggaaatgatgcatttcaggaagtagatacggttggaataacaaggccatgtgtaaaacataattttatgattacagatgtaaaagatatggctaacactataaagaaagctttctacattgctaatagcggaagaccaggacctgttgtagtagatatcccaaaagatattacagagcaggaattttattttgattatccaaagagtgtctctatgagatcatacaatccagatattaaagttgaagattcaaaaatagaaatgattattgaggcaatcaaaaaatctaataagccaatta

SEQ ID NO: 231953 - DNA, 798 bp, Unknown
  Bacterial polypeptide expressing nucleotide sequence isolated from the Sargasso Sea
tgtagatttaaccggttttccgattacttctactcttcagggtttgggcgcgtaccctggagacgataatcaatttttgggaatgcttggtatgcatggtacatacgaggcaaataatgctatgcatgattgcgatttattaataaatattggcgcaagatttgatgatcgaattactggaaaaatagatgagttttcgccacattcgaagaaagtacatattgatattgacccatcatcaatcaataaaattatcaaggttgatcttgcaatagttggtgatgtcacaagtgtaataagtaaaatcaacaagacaatcgttaaaaggaaaaatggccatagtaaatcaaataaaccaaatattgccaagtggtgggaacaaattgaaaaatggagagaaaaaaactctcttaattttgttaatagcgataaaagtataaaaccacaacatgctgttcaaagactttatgaattaaccaaggataaagatacttatgttactactgaggttggacaacatcaaatgtgggctgctcagcattataaatttaacaaaccaaacagatggatgacatctggtggcttgggtactatgggatatggtttaccagcagctgtcggtgtacaaattgctcatcctgaaaaattagtaattgatattgcaggagaggcctccgttttaatgactatgcaagagatgtctacagcagttcaatacaatcttcctataaaaatattcatactaaacaatcaatatatgggaatggtaagacagtggcaggaattactgcatgaaaa

SEQ ID NO: 231954 - DNA, 884 bp, Unknown
  Bacterial polypeptide expressing nucleotide sequence isolated from the Sargasso Sea
cttggaccttcccggatatcaagttcagacaagaggtagctcagatggaatcgaatatgctgcagaactgatctcaaaatcaaaacagccattgctttatgtgggtgccggtgctgttatttcaggagccggtaggcaggttcagaaactggctgaaaagctacaggcacctgttactacaactttgctgggcaaaggtgctatttcggaaatgcatccactttctgtaggaatgctaggtatgcacggcactgcttatgccaataaagcagtaattaattgtgacctgattatggctattggagcacgctgggatgatcgcataactggcaaagtcagtgagttttgtcctgatgcaaccaaaattcatattgatatcgaccctgcagaatttggaaaaattattcaacctgacgtaagcattaatggagacgcggccgaggttcttgcagaattgatcccgctgatggataagcttgatacttcagcatggcttaaaaagattgagaattggaaaattaaatatccgcttaaattcccaaaacggggaggtctgcgggcacagcatgtattagccgaactggaccgtttgactgaatctaacgcgattatttcaactgatgtcggtcagcaccagatgtgggccgctcaattctgcaaatcaatcagagagcgccaatggctctccagtggaggcgctggaaccatgggctatgggtttcctgcagcaattggcgcacagcttgggaaacccgatgatcttgtagtagctgttgttggtgatggaggattccaaatgacaatgagtgaacttgccacagcggcaattcacaaactgcctatcaaaatcattattattaataacagttatctcggaatggtca

SEQ ID NO: 231955 - DNA, 901 bp, Unknown
  Bacterial polypeptide expressing nucleotide sequence isolated from the Sargasso Sea
ttaggtgcataccctggagatgataatcaatttttaggaatgcttggtatgcatggtacttatgaagcaaataatgcaatgcatgattgtgatcttttaattaacatcggcgcaagatttgatgatcgtattactggaaaaattgatgagttttcaccaaattcaaaaaaggttcatattgatatagatccatcatcaattaataaaattatcaaagtagatcttgcaatagttggagacgttacgagtgtaatcagtaaaattaataaaacaattgctaaaagaaaaaatggtcatagcaagtcaaataaatcaaatattgctaagtggtgggaacaaattgaaaaatggagagaaaaagattctcttaattttgtaaatagtaatgaaagtataaaaccccaacatgctgttcaaagactttatgaattaactaagaataaagacacttatattacaacagaggttggacaacaccaaatgtgggctgctcaacattataaatttaataaaccaaacagatggatgacatctggtgggttaggaaccatgggatatgggttgccagcagcagttggagttcaaattgctaatcctgaaaaacttgtaatagatattgcaggagaggcttcagtattaatgaccatgcaagaaatgtctacggcagttcaatataatcttcctataaaaatatttattttgaacaatcaatatatgggaatggttagacaatggcaggagttgcttcatgaaaaaaattattctgagagttactcagaagcattacctgattttatgaaaatggcagaggcatatggatgcaaaggaattaaagcagataatccatcctaccttgatgataaaattcaagaaatgattgattatgacgggcccagttatt

SEQ ID NO: 231956 - DNA, 936 bp, Unknown
  Bacterial polypeptide expressing nucleotide sequence isolated from the Sargasso Sea
ggatgttcaaacagctgagatatccgaagaagattatgaggacgctaatatttcagcttattctaatagaatattggccattgaaaaatcgcgcctgaaccaagaaaaatcatccgaattctttacacatcttggcaattcaaagaggccactgatttactttggaggtggtgtaatctcagcgagtgcatcaaaagagctgagagaatttgttgattattttaatctgccggctgtttcaaccctgatgggactaggtgcagtggatactcgacatccctcatctctgcacatgcttggcatgcatgggactccttatgcaaactatgccgttcaagaaagcgacttcttgatagcgataggttctcgttttgacgatcgtgttgcaggtgtgcctgaaaaatttgccccgaaagccaaagtcattgcacactttgatgtcgatccctccgagatcaataaagtcaagaatgctgcttggtctcatctcggagtattgtcattggcactgaaagatctcataaagtatgcaaaatcaaatgatcttgagtttaattttggagattggctcagtcacacaggcgaactaaaatcaaaatatcctttaaacttcaatcgctcatccgatttgattcagccggaacatgtcattgagtgcatcaataagatcacaaagggtaatgcaatcgtcacaaccggtgtaggtcaacaccaaatgtgggcggcgcagtactttgacttcaaagaccccaggctttggctaacgtctggcagtatgggaacaatgggttttggtatacctgctgcgatcggcgctcaaattgcacatcccgataaaacagtcattgatgtggatggcgatggaagcattaggatgaacttaggagacttagaaaccattacaaattatgacttaccggttaaagtccttttgct

SEQ ID NO: 231957 - DNA, 937 bp, Unknown
  Bacterial polypeptide expressing nucleotide sequence isolated from the Sargasso Sea
agacatgaacaaggtgcaggacatgctgttgaaggctatgctagatcaagtggtaaaccaggcatcttgttagttacctctggtcctggcgcaactaatgctgttacagctttaacagatgcttatatggactcggtccctttagtttgtatatcaggtcaagtaccaacacatttaattggcactgatgcctttcaagaatgtgacactactggcattactcgtccttgcacaaaacataattggttggttaaagatgtaaatgatctagcgagagttttacatttagcttttgaggtagccacaacgggaagacctggtccggtattagttgatattccaaaagacattcaattcaaaaaagggaaatatagtttctctaaaagcactcttaaaaaaaaactgaatggtagagctacgcataaaatttcaaacaatgaattagataaatttattgatttattaaaaaaatcttcaaaaccaattttttatactgggggaggagttattaattctggtcctcaagctagcgaatatttaagagagttagttgctttaactggattcccaattacctcaacactgcaaggattaggtgcttaccctggagatgatccacaatttttaggaatgttaggtatgcacggaacatttgaagctaataatgcaatgcatgattgtgatttaatgattaatattggcgcgagatttgatgacagaataactggtaaggttgatgagttttctcctggatcaaaaaaaatacatgttgatattgatccatcatctattggcaaaaatataaaagtagatttagcaattgtgagtgatgtttcagaatttttaaaattattaataaagagatttaaagaaaaaaataaaaactttttaagctctaacaaacagaagacttcgaaatggtggagcacaatgaaaa

SEQ ID NO: 231958 - DNA, 605 bp, Unknown
  Bacterial polypeptide expressing nucleotide sequence isolated from the Sargasso Sea
aactaaagataaagatacgtatattacaactgaggttggacaacatcaaatgtgggctgctcaacactacaagttcaataaacctaataggtggatgacctcaggtggtcttggaacaatgggatatggtttgcctgctgcggttggagttcagatagcgcatcctaaaaaattagttgttgatattgctggtgaagcttcggttttaatgactatgcaagaaatgtctactgcagttcagtataatctaccaataaaaatatttattttaaataatgagtacatgggcatggtaaggcaatggcaagaattactacatgataaaaactattcagagagttacacggcagcgttaccagattttgttaaaatggctgaagcttatggatgtgttggaatacgagcaaaaacaccagaggaattagacgacaagattattgaaatgttaaatactgatagaccagtaatatttgattgtcttgtagacaaacaagaaaattgcttcccaatgataccatctggaaaaccacataatcaaatgttactaggtcccaaagatcaaaaagataaaaaaatcacaggaaaaggaagaactttagtttaag

SEQ ID NO: 231959 - DNA, 548 bp, Unknown
  Bacterial polypeptide expressing nucleotide sequence isolated from the Sargasso Sea
aatgtcaaaattatattctggagctgaaattgtatttaaatgtttagaagatcaaaacgttagtcatatttttggatatccaggaggagcagttcttccaatttatgatgagttaaaaaattttaattctattaaacatattttagtaagacatgaacaaggtgcaggacatgccgctgaaggttatgcaagatcatcaggaaaacctggtgtattgttagtaacatcaggacctggggccacgaatgcagtgactgctcttacagatgcctacatggactcaattcctttagtttgtattactggacaagtcccaacccacttaatcggtactgacgcatttcaagaatgcgatacaacaggaattactagaccttgtaccaaacataactggttagttaaggatgtaaatgatcttgcagagataatgcacaaagctttcgaggtagcaactactggcagaccaggcccagtattagttgacattccaaaagacatacaatttcaaaagacaaaatataaaaattctaaaaaaaataaaaaattga

SEQ ID NO: 231960 - DNA, 913 bp, Unknown
  Bacterial polypeptide expressing nucleotide sequence isolated from the Sargasso Sea
tccaatcacctcaaccttacaaggtcttggggcataccctggagatgaaaatcaatttttaggaatgctaggtatgcatggaacatatgaagctaataatgctatgcatgattgtgatttattaataaatattggtgcaagatttgatgacaggataacaggaaaaatagatgaattttctccgcattcaaaaaaagtacatattgatatagatccatcctcaataaataagattatcaaagttgatttggcattagttggagatgttaatgatgtacttcaaagtattaataaaactttaaaatataaaaaaattgatttgaaaaagtcaaataaacaaaaaatatcaaagtggtgggaaaaaattcaaaagtggagaaccaaaaactctttaaactttaaaaatagtgatgaaaatatcaaaccgcaacacgctgttcaaagactttatgaactaactaaaaataaagacacattcattacaacagaggtgggacaacatcagatgtgggcagctcaacattataaatttaacaaacctaatcgttggatgacttctggaggattgggcacaatgggatatggtttgcctgctgcagtcggagttcaaatagctcatccaaacaaattagttattgatattgctggagaagcttcagtcttgatgacaatgcaagaaatgtcaactgcagttcagtataatctaccaataaaaatttttattttgaataatcaatacatgggaatggtaagacaatggcaagaattacttcatgaaaaaaattattctgagagttattcagaggctttacctgattttatcaaactggcggaagcttatgggtgtaaagggattatggcagataaacctgatgaacttgacgcaaaaattaaagaaatggttgaatttgat

SEQ ID NO: 231961 - DNA, 908 bp, Unknown
  Bacterial polypeptide expressing nucleotide sequence isolated from the Sargasso Sea
ggcccgatttgacgaccgcgtcacccgcaagctgtcgacgttcgcgccgaaggcttccgtcatccacgccgacatcgatcccgcggaaatcggcaaaaacagaaccgcggatatcccgatcgtcggcgatgttgcggagatcatccccgaattgatcactgcgatcgaggccgaactcgccgaaggttcccaccccgattaccgcgattggtggaaccaactgaaccggctccgggagacgtatccactcggctacgacctgcccgaggacgagtcgctgtcgccgcaatacgtcatcgagcggctcggcgcgctgtccggcccggacagcatctacgcggcgggcgtggggcagcaccagatgtgggccgcacagttcgtcggatacgagcggccgggtacctggctcaattccggcgggctcggcacgatgggctttgccgtccccgcggcaatgggagccaaggtcggacgccccgacacgacggtgtgggccgtggacggcgacggatgcttccaaatgaccaaccaggagttggccacgtgctccatcaacgacataccgatcaaggtcgcacttatcaacaattccagcctcggaatggtgcgccagtggcagacgttgttctataacgagcgctactccaacaccgatctgcactcgcactcgttcccggatttcgtgaagttggccgaggcgtacggctgccacgggttgcaggcgacgaacgccgacgatgtcgacagcacgatcgagaaggctcttgcgatgaacgatgcacccgtcgttgtcgatttccgagtgcacaaggacgccatggtgtggccgatggttgcggcaggaaccagcaacgacgacatcatggtcgcccgtgcgatggcgcccgagtgggggagtgacgactgat

SEQ ID NO: 231962 - DNA, 913 bp, Unknown
  Bacterial polypeptide expressing nucleotide sequence isolated from the Sargasso Sea
ttaatgaaaaaatcatctaaaccaattttttatactggaggaggcgttataaattcaggtcctgaagcaagtaatttactaagagaactaatttcgttaaccggatttccaataacttctaccttacaaggtctgggagcttatccaggagatgatccttcgtttttagggatgttgggaatgcatggaacttacgaggcaaacaatgcgatgtatagttgcgatttaatggtaaacatcggagcaagatttgatgatagaattacaggaaaagttgatgagttttcgccaaattcaaaaaaaattcatattgatatagatccatcttcgattggtaaaaatataaaagtagatttagctatagttagcgatgtgggtagttttttaaaagctttaaacaaaagaattaaagagaaacataaagattttttaaattctaataagcataatatttccaaatggtggaaagatattgataagtggagacaaaaaaaatctttaagttttaaaaatagcaaagaggtaattaaaccacaatatgctgtacagagactttatgagttatcgaaaaataaagatacctttataacaactgaggtaggtcagcatcaaatgtgggcagcccaacattataagtttaataaacctaatagatggatgacctctggcggtcttggaactatggggtacggcttaccagccgcagtcggggttcaaattgcacatccagataaattagttatagatatagctggagaagcatcggttttgatgacaatgcaagaaatgtcaacagctgtgcaatacaaattacccattaaaatttttattttaaacaatcaatacatgggaatggtgaggcaatggcaagagcttttgcatgaaaaaaattattctgaaagttatacagcag

SEQ ID NO: 231963 - DNA, 511 bp, Unknown
  Bacterial polypeptide expressing nucleotide sequence isolated from the Sargasso Sea
tatgcctaaattaattagtggtgcagaaatagtttttaaagcgttggaggatcaaaaagtggaatatatttttggttatcctggtggcgctgttctacctatttatgatgaattaaaaaatcataaatctattaagcatattttggctcgacacgaacaaggagctggtcatgcagcagaaggttacgctagatcaagcggtaaacccggagtgttgcttgttacttctggccctggtgcaacgaatgcagtgactgctttaacagatgcttacatggattcagttccgttagtttgtatttcaggacaagttccaactcatttaattggaacggatgcatttcaagaatgtgatacaacaggtattactcgaccatgtacaaaacacaattggttagtaaaagatgcaaatgatctttcaagagttttacatttagcctttgaagttgctactacaggaagacccggtccagttttagttgatattcctaaagatatacaatttaaaaaa

SEQ ID NO: 231964 - DNA, 863 bp, Unknown
  Bacterial polypeptide expressing nucleotide sequence isolated from the Sargasso Sea
ggatatcctgggaggagcagctctacatatttatgatgctatatttaatcaaaattatgttgatcatattctagtaagacatgaacaaggtgcagtacatgctgcagatggatatgctagagctacaggcaagcctggtgtagctttagtaacatctggtccgggtgctaccaatgcaattactggcttagccacagcctatatggattcaactcctatagttgttatttccggtcaggttaaatcagggttaatagggaccgattcctttcaggaaacagatatgattggagtttctagacctatagtgaaacatagctttctcgttcaatctgctgaagacattccagagattgtaaaaaaagcttttcacattgcgacaaccggaagacctggtcctgttgttattgatatacccaaagatttcacagatccagattataaatttgagttcaattatccttctgaagttaacatgcgttcgtataatcctcctaaaaaaggtgatacttctaggataaaggaggcagttgatttaatcgaacaatcaaaaaaacctgtcatatattctggaggcggtgtcattcagaatgatgcttctgaagagttaactgccttggctaagcttttaaatttccctgttactaacactttgatggggttgggggccttccctggttctgacccacaatttatgggtatgctaggtatgcacggcacctatcaagcgaacatggccatgcacaatgcagatttaataattgccgtgggtgctaggtttgacgatcgaataactaatgaccccaagcaatttgctcttggagcaaaaaaaattcatatcgatgttgatgcagcatcagttt

SEQ ID NO: 231965 - DNA, 653 bp, Unknown
  Bacterial polypeptide expressing nucleotide sequence isolated from the Sargasso Sea
aatgacacgccaaatgacaggtgcgagaatggttgttcaggccttgaaagatcaaggtgtggatacagtatttggctatccaggtggagctgttttacctatttacgacgaggttttcttacaaaatgacattaggcacattttagttcgtcatgaacaaggggcagttcatgcagctgaagggtatgcccggtccacgggaaagccaggcgtggtactcgttacgtcagggccgggcgctacgaatgctgtaacggggcttaccgacgccctaatggacagtattccattagttgtattaactgggcaagttccaacctttatgattggctcagatgcttttcaagaagcggataccgtgggcattacccgtccttgcaccaagcataactggttggtcaaagatacaaatgaactagctgaggtgatccatgaggcatttcatgttgccacttcaggaagacccggacccgtactagttgatattccaaaagatgtacaatttgcaacttctgagtatattgaaaagtcaaaaatacctgtttctcactaccaaccgaaaaccaaggctgacccccaacaaatcgctagcttggtagacgctattgaaaatgctaaaaagcctttattttacactggtggtggcgtcatta

SEQ ID NO: 231966 - DNA, 739 bp, Unknown
  Bacterial polypeptide expressing nucleotide sequence isolated from the Sargasso Sea
tctaagtcaaataaatctcaaatatctaactggtgggaacaaatacagaaatggagatctaaaaaatcattagattatattggaagtgaagagacaataaaaccacagtatgcaattgaaagattatatgagctaactaaagataaagacgcgtatatcacaactgaagtaggccaacatcaaatgtgggccgctcaacactataaattcaataaaccaaatagatggatgacatctgggggtctcggtacaatggggtatggcttaccagcagctgttggagttcagattgcacatcctaaaaaattagttattgatattgctggagaagcctctgttttaatgactatgcaagaaatgtctacagcagtgcaatacaatttacccgtaaaaatatttattttaaataatgaatacatgggaatggtaagacaatggcaggaattacttcatgataaaaattattctgagagttacacagctgcattgccagattttgttaaaatggctgaagcttatggctgtatcggcataagagcaaaaacaccagatgaattagatgataagatcattgaaatgttaaacacagatcgaccagtaatatttgattgccttgtagataaacaagaaaactgttttccaatgataccttctggaaaacctcataatcaaatgttgcttggtcctaaagatcaaaaagaaaaaaagattactggaaagggtagaacactggtttaat

SEQ ID NO: 231967 - DNA, 790 bp, Unknown
  Bacterial polypeptide expressing nucleotide sequence isolated from the Sargasso Sea
atgtcaaaattgtattcaggagctgaaatagtatttaaatgcttggaagaccaaaatgtagaatttatttttggatatcctggtggtgcagttcttccaatctatgatgaattaaaaaattttaattcagtaaaacatatattagttcgtcatgaacaaggagcaggtcacgctgctgaaggatacgcaagatcaagtggaaaaccaggtgtacttttagttacatcgggtcctggtgccacaaatgcagtgactgctttgacagatgcttatatggactctgttccactggtatgtatttctggacaggttccgactcacctaataggtacagatgcatttcaagaatgtgataccacaggaataacaagaccttgcactaaacataattggctagttaaagatgtaaaagatttagaaaaaacaattcacaaagcttttgaagttgcaacaacgggaagaccaggacctgtattagttgatattccaaaagatgttcagtttcagaaaacaaattatactaaattcaaaaagcaaaagagtttaaacggtaaagttaatagtcaatttacccaaaaagatattgatgagttaataaaattaatgagaaaggcatcaaaaccaattttttatactggtggaggtgtaataaactctggaccaaaagcaagtgaacttttaagagaattagttaacacaactggatttccaataacatctacactgcaagggctaggttcttatccaggtgaaaatagtcaatttttgggtatgcttggcatgcatgggt

SEQ ID NO: 231968 - DNA, 853 bp, Unknown
  Bacterial polypeptide expressing nucleotide sequence isolated from the Sargasso Sea
tcatattgatattgatgaaagtaatatcaacaaaacaataaatgttgatattccaattattggtgatgttaaacaagttgtcgaaaaaatgatttcgatctggaaagacaaaaaatataaaatagatactgtttcactgaaattgtggtgggataaaataaaaaaatggaaagaagtagattgcttaaactacaataatgaaggtaagcagattaaaccacagtatgcagttcaaagactttatgagttaacaaaaaatacaaaaacatttgttacgactgaagtaggtcagcatcaaatgtgggctgcacaattctataaatttgaggaaccaaatagatggcttacatcaggtggtttggggactatgggatatggatttcctgctgcaattggagctcaagttggacatccagatgcattagtagtcgatatagcaggagatgcttctatactaatgaatattcaagaaatgagtacagctgttcaatatagattacctgtaaaaatatttattctaaacaatgaatacatgggaatggttagacaatggcaagaacttttgcatggtggaagatattccgaaagttatactgatagtttaccagattttgtaaagttagctgagagttataaagctgttggtttaagagcaaaaacaactgatcaacttgatgatgtcataactcaaatgatagaaacaaaaaatacagtaatagcagatatttgggttactaaagaagagaattgcttcccaatgattcaaagtggatctgctcataatgaaatgatcttaagtaaagatcaaaaacaagataaaaaatcagccgaaaaaggaaaaattttagtttaa

SEQ ID NO: 231969 - DNA, 895 bp, Unknown
  Bacterial polypeptide expressing nucleotide sequence isolated from the Sargasso Sea
ttttgggataacacttccaattgttaaacattcatgggtcgtaagagatccatctgaaattgcaaaagttgtagctcaagcttttcttattgcctcatcgggcagaccaggacctgttttgattgatataccaaaagatgttggacaagagatgtttaaatatcttcctgttgagccaggttcaataaaaccaccaggctttgaactgccattcgcgccagaacacaaagccataagtgcggccttagatttaattgaaaatgctgagcaaccactcctttacgttggtgggggagttatttcttcgggggcacatgaaactcttgcagccattgctaatagatttcaaatacccgtaacaacaactttgatgggaaaaggtgcgtttgatgaacgcgagcctttatctgttgggatgcttgggatgcatggaacagcttatgccaactttgctgtgactgaatgtgatttgttgattgctattggagcaagatttgacgacagagttacaggtaaattggatactttcgctcctaatgcaaaagtaattcattttgagattgatccggctgaaataaataaaaatagagtagttgaagtctcagtattgggtgatgttggaataagccttgtaaaattattagatctcagtaatcaaaggaaaataaatccaagaacttctaattggattaaaaaaattgaaaactggaaaaataattttcctttgacaactccccctaaagaaggagaaatttatccacaggaagtattgattgcgttaagagatttggcgcaagatgcttacattacgactgatgtgggacaacatcagatgtgggcagctcaatatttgttgaatggaccaagacaatggattagtagtgctggacttggg

SEQ ID NO: 231970 - DNA, 832 bp, Unknown
  Bacterial polypeptide expressing nucleotide sequence isolated from the Sargasso Sea
atatatatttggatatcctggtggtgcggttcttccaatctatgatgaattaaaaaatcatgaaagtataaagcatattttagtaaggcacgaacaaggagcaggacatgcagcagaaggttatgcaagatcttcgggaaagcctggtgttgtattagttacttctggaccaggggcaacaaatgccgtcaccgctttgacagatgcatacatggactctataccgttagtttgtatatctggacaagttccaacacatttaattggaacagatgcatttcaggaatgcgatacaacaggaataacaagaccatgtacaaaacataattggcttgtaaaggatgtaaaagatttatctaaaattatacataaagcttttgaagttgctacaactggaagaccaggacctgttctggttgatataccaaaagatattcagttccaaaaaacaaaatatgttaattcaatcaaaagaaaaaaattaaatggtaaaattcataataaatttaatcaaggcgaaatcgatcaacttgtaaagttgatggttaattcatctaagccgatattgtacacaggtggtggtgtaattaattctggaccaaaagcaagcgaactattaagagagcttgtgtctcttactggttttccaataacttcaactttacaaggcttaggatcatatcctggtgatgataatcaatttttaggaatgcttggtatgcacggaacttatgaagcaaacaatgctatgcatgattgtgatttgatgattaacattggcgcaaggtttgatgatagaataactggaaagatagatgagttttcaccaaaa

SEQ ID NO: 231971 - DNA, 580 bp, Unknown
  Bacterial polypeptide expressing nucleotide sequence isolated from the Sargasso Sea
tattaccacggaagtaggacagcatcaaatgtgggcagctcaacattataaatttaacaaacctaatcgatggatgacttcaggtggtcttggcaccatggggtatggactaccgtcggcaatcggtgttcaagtagctaatcccgataaacttgttatagatattgctggtgaagcatctgttttaatgacaatgcaagaaatgtcgacagctgttcaatataatttgccaattaaaatatttattttaaataatcaatggatgggaatggttagacagtggcaagaattattacatgaaaaaaattattcagaaagctacacagctgcattgccagattttgttaaattagctgaagcttatggttgtgttggaattagagcaactaaaccagaagagcttgatggaaaaattgctgaaatgctttcagtagataaacctgttatttttgactgtgtagttgataaagttgagaattgttatccaatgataccatcgggcaaggctcataaccagatgttattgggatcacaagatgaagaagagaaaatttctgatgaaggaaaaattttagtttaa

SEQ ID NO: 231972 - DNA, 820 bp, Unknown
  Bacterial polypeptide expressing nucleotide sequence isolated from the Sargasso Sea
ttaccaatttatgatgaattaaaaaaccatccttctataaaacatattttggttagacacgaacaaggcgctggtcacgcggcagagggttatgctagatcatcaggaaaaccaggtgtagttttagttacatccggtcctggagcaaccaatgttgttacagctttaacagatgcatatatggactctgtaccattagtttgtatttctggtcaagttccaacacatttaattggaacagatgcatttcaagaatgtgacactacgggaattacaagaccttgtacgaaacataattggttagttaaagatattaatgatctttcaaaagttatgcatgaagcttttagagttgcaacaactggaagacctggaccagttttaatcgatattccaaaagatattcagtttgcaaaagcaaaatataaaaaaccaaataaagaaaaaaaattaaatggaaaatttcataataaattttctcaagatcaaattgatgaattggtaaaattattaagtaaagctaaaaaaccaattatttatagtggtggaggagtaattaactcagggccaaaagcaagtcaggctttaagggaatttgttgagctaactggttttcctataacttcaacacttcaaggattaggtgcttatcctggagatgataatcaatttttaggaatgcttggtatgcatggtacgtatgaagcaaataatgcaatgcatgattgtgatctattaattaacattggcgcaagatttgatgatcgtattactggaaaaattgatgagttttcaccaaattcaaaaaaaaggttcatat

SEQ ID NO: 231973 - DNA, 922 bp, Unknown
  Bacterial polypeptide expressing nucleotide sequence isolated from the Sargasso Sea
atgccaaaattattaactggagcagaaattgtattcaaatgtcttgaggaccaaaaggtagaacatatctttggctatccaggtggtgcagtgttaccaatttatgatgaattaaaaaaccatccttctataaaacatattttggttagacacgaacaaggcgctggtcacgcggcagagggttatgctagatcatcaggaaaaccaggtgtagttttagttacatccggtcctggagcaaccaatgttgttacagctttaacagatgcatatatggactctgtaccattagtttgtatttctggtcaagttccaacacatttaattggaacagatgcatttcaagaatgtgacactacgggaattacaagaccttgtacgaaacataattggttagttaaagatattaatgatctttcaaaagttatgcatgaagcttttagagttgcaacaactggaagacctggaccagttttaatcgatattccaaaagatattcagtttgcaaaagcaaaatataaaaaaccaaataaagaaaaaaaattaaatggaaaatttcataataaattttctcaagatcaaattgatgaattggtaaaattattaagtaaagctaaaaaaccaattatttatagtggtggaggagtaattaactcagggccaaaagcaagtcaggctttaagggaatttgttgagctaactggttttcctataacttcaacacttcaaggattaggtgcttatcctggagatgataatcaatttttaggaatgcttggtatgcatggtacgtatgaagcaaataatgcaatgcatgattgtgatctattaattaacattggcgcaagatttgatgatcgtattactggaaaaattgatgagttttcaccaaaattcaaaaaaaggttcaatattgatatga

SEQ ID NO: 231974 - DNA, 941 bp, Unknown
  Bacterial polypeptide expressing nucleotide sequence isolated from the Sargasso Sea
ggaacaaggggcgacacatgctgctgatggatatgcaagagctacaggaaaacctggcgttgttttagttacatctggtcctggagcaacaaacgctataactgggattgcaacagcatttatggactccataccaatgataataatatctgggcaggtggcaaaacatttaattggtaccgatgcttttcaagagacagatatgattggcatttctcgcccaattgtaaaacatagtttttcagttgaatcagcagaagatattcctgaaatagtgaagcaagctttctatatagcaacctcaggtagaccaggtcctgttgtaatagatgttccaaaagatacaacttctcctgacgaacttttcgattttgtatatccagattcggctcatataagatcttataatcctccaatttctccagaaaaaaagcagattgaaagagctgtagaagctatgcttaaagctaggaagcctgtgatatatgcgggtggtggagctatcaatagtaatgcttcgtctgaactaataaaacttaacgatatcttagattttcctgtgacaaataccttgatgggtctaggagtttatccagcgacacataaaagatttttaggaatgcttggtatgcatggaacttatcaagctaatatggctatgcataatgcagaccttattatcgctgttggggcaagatttgatgataggataacgaatactccaaaactttttgctccaaatgcaaaaattattcactttgatgttgatcaatcatcagtttcaaaaattattgaagcaaacattgcagtgtttggacaagtgaaagattcactccaagaaatattaaatgagcttgagtcaagaagaaatgaaatagatgaaaaaaaattagatgattggaaacagcaaattaaatatggaaagaaaagcatggcttaga

SEQ ID NO: 231975 - DNA, 975 bp, Unknown
  Bacterial polypeptide expressing nucleotide sequence isolated from the Sargasso Sea
agcagaaggttacgctagatcgtctggtaaacctggagttgctttagtaacatcaggaccgggtgcaacgaatattgtaacagctctaacggatgcatatatggactctattccaattgtttgtatttcaggacaagttccgacacatttaataggcactgatgcatttcaagagtgtgacacaactggtatcactcgaccatgcactaaacataactggttagttaaggatgtaaaagatttatcaaagattattcatagagcatttgaagttgcaacaactggaaggccagggcccgtattaattgatattccaaaagatatccaatttcaaaaaacaaaatacaatggttataaaaaattaaaaaaattaaacgggaaagttcaaaatcattttaaacagtcagaaatcgataaattaataaaattaatgagtgttgcatctaaacctattttttatacaggtggcggtgttattaattctggaccaaaagcaagtgagcttttaagagaattagtgtctgcaacaggtttccctataacttctactttgcaaggacttggcgcatttcctgctgatgataatcaatttgttggtatgctaggtatgcatggaacttatgaagctaacaatgcaatgcatgattgtgacctaatgattaatgttggggcaagatttgacgatagaattactggaaagttagatgaattttcacctaaatcaaaaaaagttcatatagatatcgatccatcttcaataaataaaaatgtaaaagtagatttaccaataattggagatgtaactgatgtaataagttcgacgttaaaaaccattaagaaaaaaaaaccaagtttcatgaaatctaataagcaaaaaacttctaaatggtgggaacaaattgaaaaatggcgatcagttaactctcttaattatgaaaatagctcagagacaattaaacacaatacgccgttcaa

SEQ ID NO: 231976 - DNA, 778 bp, Unknown
  Bacterial polypeptide expressing nucleotide sequence isolated from the Sargasso Sea
gtattaaataaaattatcaaaacgtggcaagataaaaagttaaaaactaattcatctaatttaaaattatggtgggataaaataaataattggaaaaaaattgattgtttaaatttttcgaatgatgaaaaagaaattaaaccccaatatgcaatacaaagattgtatgagctaacaaaagataagaaaacttttattactacagaagttggtcagcatcaaatgtgggctgctcaattttacaaatttgaaaaaccaaatagatggttaacatctggtggattaggcactatgggatacggttttcccgcagcaattggagcacaggtagcaaatcctgatgcattagtaatagatattgctggtgacgcttctatactgatgaatattcaagaaatgagtacagctgttcaatatagattgcctgtaaaaatattcattctgaataatgaatatatgggaatggtaagacaatggcaggaacttttacatggaggtcgctattctgaaagttatactgatagtttacccgattttgttaagttagctgaaagttataaagcagttggtctaagggcaaaaaaaccagaagaattagacgatgtgattaatgaaatgattagtactgataaaactgtcattgcagatatttgggttagtaaggaagaaaactgctttcctatgattcaaagtgggtctgctcataatgaaatggttttaagcaaagatcaaaaacaagataagagttcggcagagaaaggtaaaattttagtttaat

SEQ ID NO: 231977 - DNA, 833 bp, Unknown
  Bacterial polypeptide expressing nucleotide sequence isolated from the Sargasso Sea
aatgtcaaaattgtattcaggagcagaaattgtttttaagtgtcttcaggaccaaggagttgaagttatttttgggtatccaggaggagcagttttacctatttatgatgaacttaaaaattttaaatctataaagcattatttagtaagacatgagcagggagcaggacacgccgccgaaggttatgctagatcatcaggtaaaccgggagttttattagtaacctcaggtccaggagcaacaaatgccgttactgctttaacagatgcatatatggactcagttcccctagtttgtatttcaggacaagtaccaacacatctaattggaactgatgcatttcaagaatgcgacacaacgggaataacaagaccatgcacaaaacataattggctagtaaaagatgttaaagatttatcaaaaataattcataaagcttttgaagttgcgatgactggtagacctggtcccgttttagttgatattccaaaagatattcaatttcaaaaaacaaattataaaaaatataaaaagcaaaaaaaatcaaacggaaaatcttttaatcaatttacacaaaacgacattaataagtttgttaaattaatggctaaagcttcaaaaccaatcttttatactggaggaggagttattaactcaggacctaaggcaagtgaacttttaagggaactagtttcagcaactggttttccaattacttctaccttgcaaggtctcggtgcttaccctggtggagataatcaatttttaggaatgcttggtatgcatggatcctatgaagcaaacaatgcaatgcatgattgtgatctaatga

SEQ ID NO: 231978 - DNA, 948 bp, Unknown
  Bacterial polypeptide expressing nucleotide sequence isolated from the Sargasso Sea
tgcttttcaagaatgtgacacaactggaataacgaggccatgcacaaaacacaattggttagtgaaagatataaatgatctctcaagagttttacatttagcttttgaggtagcaactacaggaagaccaggtcccgttttagtcgatattccaaaagatatacaatttaaaaaaggaaaatataaattttttaataacacacttaaaaaaaaacttaatggaaaagctatacgtaaaatatctaatatagagctagataaatttatcgatttaataaaaaaatcttcaaaacctattttttatacgggaggaggagttattaactcaggtcctcacgcgagtaaatatttaagagaattggtttctttaacaggttttccaattacttctacattacaagggctaggagcatatcctggagatgatccacagtttttaggaatgcttggtatgcacggaacttatgaagcaaacaatgcgatgcacgattgtgacttaatgataaacattggtgcaagatttgatgacagaattactggaaaggttgatgaattttcacctggttcaaaaaagattcatgttgatattgatccatcctcaattggaaaaaacattaaagtagatttagctattgttagcgatgtaactacacttttaaaatctttaattaaaaggttcaaagaaaaaaataaaaactttgttaattcaaataagcaaaaaacgtcaaaatggtgggaacaaattggaaaatggagagaaaaaaagtctttaaactttattaatagtgataagattattaaaccccaacacgcagttcagagattgtatgaattaacaaaaaatcaagatacgtttattactactgaagtgggtcagcatcaaatgtgggcagctcaacattataaatttaataaacctaatagatggatgacatctggagggcttgg

SEQ ID NO: 231979 - DNA, 696 bp, Unknown
  Bacterial polypeptide expressing nucleotide sequence isolated from the Sargasso Sea
attggataggcaaaattaatatatggaaagataagcatggtcttgatcatgagatttacatgaaacatctcaaaactaaggcaattttgccacaagctgttgttcaggagctatatcatgcaacaaatggagatgcttacgtaacttcagatgtgggtcaacatcaaatgtttgttgctcagtactatcattttaataagccaaggagatggattaattctggtggcttgggaacaatgggatttggtttgccagctgctttaggtgttaagttggccttcccaaaaaaagaggtggtttgtgtcactggtgagggcagtattcagatgtgcatccaagaactctctacctgcttgcagtatggattaccaataaaaattattaacattaataatgaggcacttggtatggtcaagcagtggcaagacatgaactacggtggtagacattcagagagcacatatcaaaattcattaccggattttgtaaagctgacagaatcatacggtcatgtgggaatgcgagtaaaaaaatatgctgatctcagaccagcacttaacaaagccttttccatgaaggaaaaattagttttcattgatgtattggttgacccagatgaacatgtgtacccaatgctggttgcaccaaatggaagtatgaaagatatgtggctcagcaaatcagataaagtatgag

SEQ ID NO: 231980 - DNA, 874 bp, Unknown
  Bacterial polypeptide expressing nucleotide sequence isolated from the Sargasso Sea
tagtgatttagacaaagttataaatttgatgaagaggtcatcaaaaccaattttttatactggaggaggtgtaattaattcaggtcctgaggcaagcaaatcattaagagaacttgtttcaataactggtttcccaataacctctaccttacaaggtctcggcgcttaccctggagacgatcctttatttttaggaatgctgggaatgcacggaacatatgaggcaaacaattccatgtatagctgtgacctgatgataaatatcggtgcgaggttcgatgatagaataacgggaaaagtggatgagttttcgcctaaatcaaaaaagattcatatagatattgatccatcatctattggtaaaaacattaaagtagatttagctgttatcagtgatgttggcagttttttaaaagccttaaataaaagaataaaagaaaaacataaagattttttaaactccaataaacaaaatatatctaaatggtggaaggatatagataagtggagacaaaaaaaatctttaagcttcaaaaacagcaaagaagtaataaaaccacagtatgcagtgcaaagactttatgagttatcaaaaaatcaagatacctacatcacgactgaagtaggtcagcatcaaatgtgggctgctcaacattataaattcaataaaccaaacagatggatgacttcaggcggacttggaacaatgggatacggtttgccagcagcagtaggagttcaaattgctcacccagataaattagttatcgatattgctggagaagcatctgttttgatgacaatgcaagaaatgtccacagctgtacaatacaaattacccataaaaatatttatcttaaacaatcagtacatg

SEQ ID NO: 231981 - DNA, 599 bp, Unknown
  Bacterial polypeptide expressing nucleotide sequence isolated from the Sargasso Sea
aaaatataaagaccgtttcatctccacggaagtagggcaacatcaaatgtgggctgcccaatacttgggttttgaaaagccaaatcagtggatgacgtcaggtgggctaggaacgatgggttatggattcccagcttcaattggtgttcaaattgctcacccagacgctcttgttataaatgttgctggagaagctagttggcttatgaatatgcaagaaatgggaaccgctgtgcagtatagattaccggttaaacaattcatcttaaacaacgaaagattagggatggttaggcaatggcaagagctgttacatggtgaacgatactctcacagttggtcggacgccctacctgattttgtcaaattggctgaagcttttggcgcaaagggtattttatgtgacgatcccaaaaatttagatgatgcaataatggaaatggttgaatatgaagggcctgtaatttttgattgtcttgttgaaaagcatgaaaattgttttccaatgattccatcaggtgagccccataataaaatgttgttgggagaggcaaatactaaagatgcaattacatcttcaggcgcagttctagtttaag

SEQ ID NO: 231982 - DNA, 604 bp, Unknown
  Bacterial polypeptide expressing nucleotide sequence isolated from the Sargasso Sea
atggggaaattattttcaggcgctgaaattgtttttaaagttttagaacatcataaagtggagcatatctttggttatcctggtggtgctgtgcttccaatttacgatgaattaaaaaatcataaaacaataaaacatattcttgcacgtcatgaacaaggcgcaggccacgcagccgagggatatgctcgttcgtctggaaaaccaggtgtcatgctagtaacatctggtcctggcgcaactaatgcggttaccgcgctaaccgatgcgtacatggactcagttccaatcgtttgtattagcggacaagttccaacacatttgatcggaacagatgcttttcaagaatgcgatacaaccggaattacaaggccttgcactaaacataattggttagtgaaggatgtaaatgatttagctagagttatggatctagcttttgatgtagctacaacaggaagaccaggaccagtcttggttgatatcccaaaagacattcaatttaaaaaaactgaatttgttttaaaaaataaaaaaaataagaaaataaatggaaaatcaaatggtaagatcaacaattcagatatcgacaagataattcaaa

SEQ ID NO: 231983 - DNA, 870 bp, Unknown
  Bacterial polypeptide expressing nucleotide sequence isolated from the Sargasso Sea
gttagggaattcataaatttagttgggtctcccgttactatgacattaatgggtctaggggttgtagcttcatcagataaacactcactaggaatgttgggaatgcacggtatgtatgaagccaatatggctatgcatgagtgcgatgtaatgattaatattggagcacgatttgatgatagagttactggaagattagatgccttctcaccaaattcaaaaaaaatacacgttgatattgatgcaagtaatattaataagacaataaatgttgatgcaccaataattggagatgtaaaaaaagtagttgagaagatgataagtgtatggaaaaataaaaaatataatcttgatcaaaaagcaataaaagaatggtggaataaaattgataaatggaaagaagtagattgtcttaattacaataatgaaaatgaacaaattaaacctcaattcgcagttcaaagactttacgaattaacaaaagataaaaatacttttattacaaccgaagtaggacaacatcaaatgtgggctgcacagtactacaaatttgatgaaccaaatagatggctgacatctggaggtttaggaacaatgggatatggtttcccagcagctataggtgcgcaggttggtaatccagatgccttggttattgatattgcgggtgatgcatcaattcttatgaatattcaagaaatgagcaccgccattcaatatcgcttaccagtaaaaatatttattcttaataacgaatacatggggatggttagacaatggcaagagttacttcatggtggaagatattctgagagttatactgatagtttgcctgactttgttaaactagccgaaagttatcaagctgta

SEQ ID NO: 231984 - DNA, 892 bp, Unknown
  Bacterial polypeptide expressing nucleotide sequence isolated from the Sargasso Sea
ccattatatgacagtccaataagacatattttagccagacatgaacaaggatctggtcatatggcagaaggatatgctcaagcaacaggtgaattgggagttgtaattgctacatctggcccaggtgcaactaacttaattaccccattaacgaatgcacttatggactctactcctcttttagcaattactggtcaggtagcatcggaagcaataggtaatgacgcattccaggaagcttacaccgtaggacttactatggctgcaacaaaacataactacctgataactagtgccgaggagatcccacaagtgttacttgaagcaaaacatattgctacaactggaagacctggccctgttcttgttgatataccaaaagacatactgaatcaaaaagtagagtggatagaacctaaattaatagaaatgcccggatacaagccaacattagagccaaatccaaaaatgataagtcaagcagctgaattgattaaacaatcaaaaaaaccaatcctctatgtaggtggaggaattattcattccaaagcaaatcaagaattatttgaattggcaacgaaatataaaattccagttgtaacaacattaatgggaagaggtgcattcccagatggaaacgaactatgttttgaaatgcctgggatgcatggtaattatacagcgacaacatcaattcaaaaatcagatctcttaattgctataggtgtgaggttcgatgatagagttactgcaaatccaaaattctttgcacaaaatgcaaaagtgattcatgcagatattgaccctgcagaaattggaaagattagagagcctgaagttccaattgttggagatgcaaaaagtgtaattacaggattgatgaaaaattaga

SEQ ID NO: 231985 - DNA, 889 bp, Unknown
  Bacterial polypeptide expressing nucleotide sequence isolated from the Sargasso Sea
actggaaggcctggacctgtattaattgatatacctaaggatatacaatttgccaaagcaaattatacaaaaattaaaaaagaaaaaaaattaaatggaaaattaaaaaataaattttctgacaaagaaattgatcaatttattaatttacttttaaaagcaaaaaaaccagttgtatacactggtggtggagtaataaattcaggtccagaggctagtgagtctttaaaagaatttgtaagattaattggttttccaataacttcaactttacaaggtctaggggcgttccctggagatgacaatcaatttattggcatgttaggaatgcacggaacttatgaagcaaataatgcaatgcatgattgtgacttattaattaatataggtgcaagatttgacgacagaattacaggcaagattgatgaattttcaccaaagtcaaaaaaggttcatattgatattgatccttcatcaattaataaaattattaaagtagatcttgcaatagttggagatgttaatgaagtaattaaatctaccattaaaaaaataaagaaaaaacaaaacggtttgaaagactcaaataaacaaagaatttcaaagtggtgggaacaaatccaaaagtggagaacaaaagactctttaggatttatcaatagtgataaagagattaaacctcaacatgctgtaaaaaggttgtatgagttaacaaaaaatcaagatacgtttatcaccacagaggtaggtcaacaccaaatgtgggctgctcaacattacaaatttaataaaccaaatagatggatgacgtcaggaggattaggaacgatgggatatggacttccagcagctgttggtgttcaaattgctcatccagataaactggtta

SEQ ID NO: 231986 - DNA, 973 bp, Unknown
  Bacterial polypeptide expressing nucleotide sequence isolated from the Sargasso Sea
ttttacatagcaaaatctggtcgtcccggacctgtgttaattgacattactaaggatgcccaatttgaaaagtttaaattttcatataaaaaatgcaatggcataagaagttatgttccaaaaccccagctaagtgaagatattttaactaaggcttctaaactgataaataaagccaaaaagccacttattgtttttggacaaggtgttattctaggagaagcagaaaaagaattaaaagaatttgttgaaaaatcaggtattccatctgtttggacaattctaggtctttcagccctgccaacttcccatcctttaaatttagggatggttggaatgcatggaaattacgctcctaatgttctaacaaatcaatgcgatgtattattagctattggaatgcgttttgatgatcgagttactggagatttgaaaacttatgctaaacaagcaaaagttttgcattttgaaattgatccttcagaaattaataaaaacgttaaggttgatattgcaattttaggtgattgcaaagaaagtttatccaaattaactccactcataaataagaaggaatatcctgaatggattaaacagtttaaagatcttgaaaagatagaaatagataaagttataaaagaagatttatatccaaaaaaaaatggattaaccatgggggaaactatttctgctgtaaataaatacactaaaggtgatgcaattattgtaactgatgtcggacagcaccaaatggtagcatgtagatattctaaatttataaaatcaaaaagcaatattacctcaggaggccttggaacaatgggattcgctttaccagcagctattggcgcaaaaatgggtgcccctgaaagagaagtaattgcaattattggagatggaggatatcaaatgacaatacaagaattaggaactatttttcagaataaattgtcagtaaaaatactagtctcaa

SEQ ID NO: 231987 - DNA, 545 bp, Unknown
  Bacterial polypeptide expressing nucleotide sequence isolated from the Sargasso Sea
gatgtcaaaattatattcaggggcggaaatagtatttaaatgtttggaagatcatgatgttaatgttctctttggttacccaggtggagcagttttgccaatttatgacgaattaaaaaatttcccttcaattaaacattatttggttagacatgaacaaggagctggtcacgctgctgaaggttacgctagatcatctggtaaacctggagtcgctttagtaacatcaggaccaggtgcaacaaatattgtaacagctctaacagatgcatacatggactctatcccaattgtttgtatttcaggacaagtacctacgcatttgattggtactgatgcttttcaagaatgtgatacaactggtatcactcggccatgcactaagcataactggttagttaaagatgtaaaagatttagcaaagattattcatagagcatttgaagttgcaacaactggaagacccggacctgtattaattgatattccaaaagatatccaatttcaaaaaacaaaatacaatggttataaaaaattaaaaaaat

SEQ ID NO: 231988 - DNA, 250 bp, Unknown
  Bacterial polypeptide expressing nucleotide sequence isolated from the Sargasso Sea
atgccaaatttattaagtggagcagaaatcgtatttaaagcactagaggatcaaaaagtagaatatatttttggttaccctggtggcgcagtgttaccaatttatgatgaattaaaaaatcataaatctattcaacatattttagctagacatgagcaaggggcaggtcattcagcagagggatacgcaagatcaagtggtaagcctggagttttattagttacatctggtcctggcgcaacaaatgctg

SEQ ID NO: 231989 - DNA, 799 bp, Unknown
  Bacterial polypeptide expressing nucleotide sequence isolated from the Sargasso Sea
atgacaggcgaatcaaacattgctagaaaaccatcagaacatctctcgggtgccggggtaattgttaaagctctgcaggatcaaggtgttgaagtcatttttggttatcctggaggtgctgtgctgcccctctatgatgaactttttaaaacaaataacctccgacatgttttagttcgccacgagcaggcggcggtgcatgccgccgaggggtacgcgcgatcaactggaaaaataggcgtagtgctcgtaacatctggtcccggcgctaccaatgctgtaacaggattgacagatgctctcatggacagcatccctatagtttgcttaactggtcaggtcccaacgcacttaattggcacagacgctttccaagaggctgatacaacaggaattaccagagcatgtacgaagcataactatcttgtaaaaaaatctgatgaattatcggacgttatgcacgaagcattctatgtggctgcgaatggtcggcccggaccagttgtagtggacttgccgaaagatatattatttgccgacgctccatattttactccaaaagatgttagaccatgtgcatatcaacctaaaacaaatggcgatttagcgaaaattgagcaagccgcagaactgcttgctaaagctcaacgtccaattatctacgggggcgggggcctaataaactcaggaccaacggcctgtaagctacttcaagaatttgcagaaataaccgggtttcccgtcactttaacactaatgggtttgggagctttccctgcgtccaatccaaattttctgg

SEQ ID NO: 231990 - DNA, 900 bp, Unknown
  Bacterial polypeptide expressing nucleotide sequence isolated from the Sargasso Sea
tatgcccaaattattaacaggagctgaaatagtatttaaggccttggaggaccaaaatgtggaatatatttttggatatccgggtggcgcagtgcttccaatttatgatgaattaaaaaatcataaatctataaaacatattttggcaagacatgagcaaggcgcaggtcacgctgcagagggttatgcaagatcgagcggcaagccaggaattttactagttacatctgggccgggtgcaactaatgcagtgaccgcactaacagatgcatatatggactcagtgcctcttgtttgtatttcaggacaggtgccgacgcatttaattggtactgatgcttttcaagagtgtgatacaacaggaattactaggccatgtactaaacataattggttagtgaaagacgttaatgatttggctaaaatacttcatttagcttttgaagttgcaacaactggaagaccaggaccagtgttagtcgacatacctaaagatatacaatttaaaaaaggtaactataaattttttaaaaaccaacttcataacaagttaaatggtaaatcaaaagaaaaaataaatacgaaagagctagataaattcatctctatgataacaagttcaaaaaaaccaattttctataccggtggaggcgtaataaactctggaccgagagcaagtgaacttttaagagagttagtgcaattgactggtttcccaattacttcaacactacaaggcctgggagcttttccgggtgatgataatcaattccttggaatgttaggtatgcatggcacttacgaagctaacaacgcaatgcatgattgtgatcttatgattaatataggtgcacgttttgacgatagaataacaggaaaagttgatgagttttctcctaa

SEQ ID NO: 231991 - DNA, 914 bp, Unknown
  Bacterial polypeptide expressing nucleotide sequence isolated from the Sargasso Sea
tgaagtagctaaactacttgtaaatgctaagaagcccataatttatggaggtggtggaattattaattcaggaccagaggcctcgaatttattgagagaattagttgatttggttgaaatacctacaactcttacactaatgggtcttggtgctttaccgcatgataataaattttttctcggaatgcttggaatgcatggtacttatgaagcaaatctttctatgtataattgtgatgttatgctcaatattggagcgaggtttgatgacaggattacaggaaatcttaaagagttctcgcctaactcaaaaaaaattcatattgatatagacccatcttcaattaataagtcagttcctgtagatatccctataatttcagatgctggcagtgcattaaaagagttaatatatgaattaaaaaaattaaaatttaaagactctaaaaatcgaattggagtttggctatcacaaatagatgagtggaggtctaagaaatgcttagactttaatcaaacagggaaaattataaaaccacaatacgcaattaaaagactttttgaaaaaaccaaaaacattgaaacatttataacaactgaagttggtcagcatcagatgtgggctgcacaatattatggtttttcaaagcctaacagatggatgacgtctggtggattaggaaccatgggttatgggttaccttcggctatgggtgttcaaattgcacacccagaaaaacttgtcatagatatttcaggtgaggcttcttttctgatgaatatgcaagaattatcaacgcttaagcaatataaattacctgttaaagtttttattataaataatcaatggatgggcatggttagacaatggcaacaactaatacatggaggaagatactcagaaagttatacag

SEQ ID NO: 231992 - DNA, 745 bp, Unknown
  Bacterial polypeptide expressing nucleotide sequence isolated from the Sargasso Sea
tggcccgggtgcgacgaacttaatcacctcactggccgacgccatgctggattccgtgccagtagtggcgataaccggccaggtgtcgcaagccgtgatgggcagcgatgcgtttcaggaagtcgacgttttgggcttaagcctggcggtaaccaaacacagctttatggttcgcagtgtggatgaactggcagcaacgctaaacgaagcttttactattgcccagtctggccgcccagggccggtgctggtcgatattcccaaagatgtgcaactggctgacattgatgccgagctgcaagctatcagtaaaagtaacagcaatattcaaacctctttagccaatgcagctgcggcacgcaagttaattgccgcagcgaaaaaacctgtcgcctatatcggtggcggcgtgcatatggcaggcgctatggcgcagctgcaacagtttttagccagcaaccctatgccgtcggttaccaccttaaaaggcatgggctctgttgcgaaagataatgaacattatctgggcatgcttggcatgcatggtactcaggccgctaacttagcagtgcagcagtgtgatttgctgatttgcctgggcgcccgttttgatgaccgggttaccggcaatctgcaaaagttcgcgccggaggccaaagtgatccatgttgatatcgacccggctgaaatcaataaagtgcgctttgcccacgtcgcactgctgggcgatatgaagcaaatactg

SEQ ID NO: 231993 - DNA, 712 bp, Unknown
  Bacterial polypeptide expressing nucleotide sequence isolated from the Sargasso Sea
tacgtgccggtggaacccggttccgtcatccctggcggtttccatcagcccgaacctcccctcgaagctgcggtggcagcggcactggatctgatcgagcaggcccaacgaccgctgctgtacgtgggtggcggggcgatctctgccggtgcccacgacagcctgcggatgctggccgagcgttatcagctcccggtcaccaccaccttgatgggaaaaggtgcctttgatgagaacgatgctctctcggtgggcatgctcggtatgcatggcaccgcctacgccaacttcgccgtcaccgaatgcgacctgttgatcgctgtcggtgcacggtttgatgaccgcgtcaccggcaagctggacaccttcgccccccgggcccgggtggtgcacttcgagatcgatccggcggagatcgggaagaaccgcaaggctgatgtggctgtgctcggtgatctcggcctgagcctggcgcggatggtggagatcagcctgcaacgcactgcggaaccccgtactgcagcctggctggagcgcatcaacacctggaaggatcgttatcccctcacgattccgccaacggaaggggcgatctacccccaggaggtgctgctggcggtgaaggatctggcccccgacgcgatcgtcaccacggacgttggtcagcatcagatgtgggctgcgcagtacctgcgcaacgggcccaagggct

SEQ ID NO: 231994 - DNA, 860 bp, Unknown
  Bacterial polypeptide expressing nucleotide sequence isolated from the Sargasso Sea
tcaggtgatgataatcaatttttaggaatgcttggtatgcatggaacttacgaagcaaataatgcgatgcacgaatgtgatttgatgataaatatcggagctcgttttgatgatagaattactggaaaattagatgagttttcacctaaatcaatgaaggtacacatagatattgatccatcttcaataaataaaaatgtaaaagtagatttaccaattgttggtgacgtgagcgaagttataaattcagcaataaaaacaattaagaagaaaaaaacaaattttacaaaatctaataagcaaaaaatttcaaaatggtgggaaaaaatagaaaaatggcgatcaattcgttctcttgattttgtaaatagttcagaaactattaaaccacagtatgcagttcaaaggctttatgaactaaccaaaaataaagatacttatattacaactgaggtcggacaacatcaaatgtgggctgctcaacattataagtttgataaacctaacagatggatgacttcaggtggattaggtacaatggggtatggtttaccctcagctgttggagttcaggttgctcatccaaataaattagttattgatatagctggagaagcttcagttttaatgactatgcaagaaatgtctactgcagttcaatatagtctgcctattaaaattttcattttaaacaatgaatacatggggatggttcgtcaatggcaagaactattacatgataaaaattattcagaaagttatacagcagcattaccagattttgttaagttagcagaagcttatggatgtgttggtttaagagcatcaaccccagaagaacttgatgataaaattattga

SEQ ID NO: 231995 - DNA, 679 bp, Unknown
  Bacterial polypeptide expressing nucleotide sequence isolated from the Sargasso Sea
atattctggaaagataagcatggtcttgatcatgatatttacatgaaacatctcaaaactaaggcaattttgccacaagctgttgttcaggagctatatcatgcaacaaatggagatgcttatgtaacttcagatgtgggccaacatcaaatgtttgttgctcagtactatcattttaataagccaaggagatggattaattctggtggcttgggaacaatgggatttggtttgcctgctgctttaggtgttaagttggctttcccaaaaaaagaggtagtttgtgtcacgggtgagggcagtattcagatgtgcatccaagaactctctacctgcttgcagtatggattaccaataaaaattattaacatcaataatgaagcacttggtatggtcaagcagtggcaagacatgaactacggtgggagacattcagagagcacatatcaaaattcattaccggattttgtaaagctgacagaatcatacggtcatgttggaatgcgagtaaaaaaatatgctgatctcagaccggcacttaacaaagccttttccatgaaggaaaatttagttttcattgatgtattggttgacccagaagaacatgtttacccaatgctagttgcaccaaatggaagtatgaaagatatgtggctgagcaaatcagataaagtatgag

SEQ ID NO: 231996 - DNA, 522 bp, Unknown
  Bacterial polypeptide expressing nucleotide sequence isolated from the Sargasso Sea
tatgttaggaatgcatggaatgtatgaagctaatatggctatgcatgaatgtgatgtaatgattaatattggagctagatttgatgatagggtgactggaagacttgatgcttttgctcctaactctaaaaaaatacatattgatatagatccaagcaatattaataaaactataaaaatagacgttcctattgttggagacattgaatctgttatgaatcaaattttttcatcatggaaaaataataattataaaagtcaaaaagaaaatttaataaaatggtggaataaaatagaagaatggaaaaaagttgattgtttaaattatgatcaaggtgaaggatcaattaaaccacaacatgctataaaaagattatatgaacttacgaaagataagaaaactttcattacaacagaagtaggtcaacatcaaatgtgggcagcccaatactacaaatttgaagaacctaatagatggctaacatctggaggtttaggaactatgggctatggttttccagc

SEQ ID NO: 231997 - DNA, 892 bp, Unknown
  Bacterial polypeptide expressing nucleotide sequence isolated from the Sargasso Sea
cattcctcaataaaacatatattagttagacatgaacaaggtgcaggtcatgctgcagaaggttatgcaaggtcttctggcaaaccaggtgtagttttagtcacatctggacctggagccacaaatgttgttacagcattaactgatgcatacatggactccgtccctttagtttgtatttctggccaagttccaacacacttaattggaactgatgcgtttcaagaatgtgacacgacaggtattacaagaccttgcacgaaacataattggttagttaaagatattgatgatctttcagatataatgcatgaagcttttagagttgcaacttcaggaagaccaggtcctgttttagttgatattccaaaagatattcaatttgcaaaaactaaatataaaaaaccaaaaagacaaaaaaaatcaaatggaaaacctgttaataaattttctcaaaaacaaattgatcaattagttaatctattcaacaacgcaaaaaaaccagttatttatagtggtgggggagtaattaattcaggtccaaaagcaagcgatgcattaagagaattagtagaattaacaggatttccaataacctcaacactacaaggtttaggtgcttatcctggtgatgacaaccaattcctagggatgttaggtatgcatggaacttatgaggcaaataatgctatgcatgattgtgatcttttaataaatattggcgcaaggtttgatgatcgtataactggaaaaatagatgaattttctccaaattcaaaaaaagttcatattgatatagatccttcatctataaacaaaattataaaagttgatcttgctattgttggagatgtagcaaaagtaattgctaaggtaataaaacaatattgaa

SEQ ID NO: 231998 - DNA, 829 bp, Unknown
  Bacterial polypeptide expressing nucleotide sequence isolated from the Sargasso Sea
agatattccaaaagatattcaatttcaaaaaactacttatattaattataaaagaaaaatgaaattaaatggcaaatctcataatcaattttcaaaaaatgatgttgaggaacttgttaaccttttgaagaaagcctcaaaaccaattttttatactggtggaggcgttgtaaactctggcccaaaggctagtgaacttttaagagaattagttcgcgcaactggttttccaattactagtactttgcagggcttaggctgttaccctgccgatgataatcagtttttaggtatgcttggtatgcacggtacttacgaagcaaacaatgcaatgtacgaatgtgatttgatgataaatattggtgcaagatttgacgacagaattactggaaaaatagatgaattttctccaaattcaaaaaaagtgcatattgatattgatccttcatcaataaataaaaatgttaaagtagatttagcaattgttggagatgtaaaatcagtaattgagtccacaataaaaactttgaaaaaaacaaaacatgatttcttaaaatctaataagcaaaaaacttctaaatggtgggaaaagattcaaaaatggagagctagaagatctttagattatattgggagcgaagaaacaattaaacctcaatatgctgtagaaagattatatgaacttacaaaagacaaagatacctatatcacaacagaagttggacaacatcaaatgtgggctgcacaacattataaatttaataaaccaaatcgatggatgacctctggtggattagggacaatgggatatggtttgcctgctgctgtt

SEQ ID NO: 231999 - DNA, 364 bp, Unknown
  Bacterial polypeptide expressing nucleotide sequence isolated from the Sargasso Sea
aatgaccggcgcagaaatagtcttcaaggcattagaggaccaaggtgttaaacatatctttggttatccaggaggagctgtgttaccaatttatgatgaactaaaaaatcataaaaacattaaacatattttagtacgtcatgagcagggagcaggtcatgctgcagaagggtacgcgagatcttcgggtaaaccaggtgtgatacttgtaacttcgggacccggagcaacaaatgcagttacagctttaacagatgcttatatggattcgatacctctagtttgtattacaggccaggtaccaacacatcttattggaacagacgcatttcaagagtgtgacaccacaggtataacaagacca

SEQ ID NO: 232000 - DNA, 781 bp, Unknown
  Bacterial polypeptide expressing nucleotide sequence isolated from the Sargasso Sea
atgtctaaattatattcaggtgcagaaattgttttcaaatgtcttgaggatcaagatgtagaatatatatttggatatcctggtggtgcggttcttccaatttatgatgaattaaaaaatcatgaaagtataaaacatattttagtaagacacgaacaaggtgcgggacatgcagcagaaggatacgcaagatcttctggtaagcctggagtagtattggttacttctggtccaggagcaactaatgctgttactgctttgacagatgcatacatggactctataccgttagtttgtatatctggacaagttcctactcatttaattggtacagatgcgtttcaagagtgtgacacaacaggaattacaagaccatgcacaaaacataattggcttgtaaaggatgtaaaagatttatctaaaattatacataaggcttttgaagttgccacaacaggtagaccaggacctgttctagttgatataccaaaagatattcagtttcaaaaaacaaaatatgttggttcaatcaaaaaaaaaaaactaaacggcaaaattcataacaaatttaatcaaagtgaaattgatcaacttgtaaagttaatggtaaattcatcaagaccaatattatatactggcggaggcgtaattaattcagggccaaaagctagcgagttattaagagaacttgtatcacttacaggttttccaataacttctactttgcagggcttaggatcatatcctggtgatgataatcaatttttaggaatgctcggta

SEQ ID NO: 232001 - DNA, 802 bp, Unknown
  Bacterial polypeptide expressing nucleotide sequence isolated from the Sargasso Sea
tttggataccctggaggagccgctcttcatatttatgatgcaatttttaatcgaaaagaactccaacatattcttgttagacatgaacaaggggcaactcatgctgctgatggttatgcaagagctactggtaaacctggagttgtattagttacatctggtccaggagcaacgaatgcaataacaggaattgctacagcttttatggactctattccaatgatagttctttcaggtcaagttgcctcacatcttattggaacagatgctttccaagaaacagatatgataggtatatcaagaccaatagttaaacatagttttagcattgaaagcgcagaagaaattcctaaagtaattaaagaagctttttatattgcaacctcaggaagaccaggtccagttgtaatagatatacctaaagatacaacagccccagataaattatttgagtataatcctcctgaatcagtaaaaattagatcttacaatcctcctgttgaaccagactctaaacaaattgctagagcattatctgaaattttaaaggcaaataaaccagttatttatgcgggaggcggtgcaataaatagcaatgcatctaaagaactatttgaactaaatgagcttttaaattttcctgttacaaatactttaatgggattaggcgtttatcctgccaaacataaacgatttatgggaatgttaggaatgcacggcacatatcaatcaaatatggctatgcataatgcagatttgattattgctattggagctagatttgatgacaggataacaaata

SEQ ID NO: 232002 - DNA, 721 bp, Unknown
  Bacterial polypeptide expressing nucleotide sequence isolated from the Sargasso Sea
aatgaccagtgaaaatatagatggcggcaaggctctaattagggctctggaaaaagaaggcgtggaagttatgttcgggcttcccggcggagcgatactgcccgtgtatgacccgatcattgattcaaacatcagacacatacttgtccgccatgagcaaggtgctggacacatggctgaaggttacgcccaagcaaccggcaagcctggtgtagctatggtgactagcggcccggcagctacgaacattgtcacgcccttatgtgacgcgtatttggactcaataccattggtggtaattactgggcaagtgcctttagctgcgatcggcacagacgcgtttcaagaatgtgacaccaccgggatcacaatgggagttacaaaacataatttcctagttaaagatgcacaagatattccaagaatagtaaaagaggcattccatatagcgaccacaggccgaccaggtccagtactgattgatgtacctaaggacattgttgatcctaaaaatccaaggtcaaagcttaattgggtggaggatcctgaaatggatttgcccggctatgacccggaaaaaaacttcgacctctctggaatagagaaagccgtagagcttatacaaaatgcagagaagccaattttctatgttggaggcggaattctcaaatcaagagcagccgaagccctcagagaactagtagagattacagggattcat

SEQ ID NO: 232003 - DNA, 916 bp, Unknown
  Bacterial polypeptide expressing nucleotide sequence isolated from the Sargasso Sea
ggcgcgtccatggagatccaccagtccctgacaaagtccaagacgggcgtgcggaacgtgctgtgcaggcacgagcaaggcgaggttttcgccgcggaggggtacgccaagtgcacgggcaaagtcggggtgtgcatcgcgacgtcggggccgggcgcgacgaacctcgtcaccggcctcgccgacgccctcctcgactccgtgccgatggtggccatcaccggacaggttccccggcgcatgatcggcaccgacgcgttccaggagacgcccaccgtcgagatcacccgccagatcaccaagcacaactacctcgtcatggacgtgaacgacattccccgcatcgtccgcgaggctttcttcctcgcgtccagcggcagacccggccccgtgctcatcgacatcccaaaggacgtccagcagcagatgagcgtcccgtactggggacccaaggtgtccctcaacggctacctcagccgcctcccctctcccccgtcgcatccccagatggagcgcgtgctggacatgatcaaagacgccaagcgaccggttgtgtacgcgggcggcggctgcctggacgccgcgcccgagctgaaggagttcatcgagtccaccggcatccccatcaccaacaccctcatgggtttgggttgctaccccgcctccgacgagctctgcctcgacatgctcggaatgcacggagccgtgtacgccaactacgccgtcgactcggcggatctgctcctcgcgtttggagttcgcttcgacgatcgcgtcaccgggaagctcgaggcgttcgccgcccgcgcgtccatcgtgcacatcgacatcgacccggcggagattggtaagaacaaggaggcgcactgcccggtgttctccaacatcaagcccgcgcttcgaactctcaactcga

SEQ ID NO: 232004 - DNA, 891 bp, Unknown
  Bacterial polypeptide expressing nucleotide sequence isolated from the Sargasso Sea
aataacttcaactttacaaggacttggagcatatcctggagatgacccgcaatttttagggatgcttggcatgcacggaacttatgaagctaataatgcgatgcatgattgcgatttgatgattaatattggcgcgcggtttgatgatagaatcactggtaaagtagatgaattttcgccaggttcaaaaaagattcatgttgatattgacccatcctcaattggaaaaaatataaaagttgatttagcaattattagcgatgtgactacacttttgaaatctttaattaaaagattcaaagaaaaaaataaaaactttgtaaattccaataaacaaaaaacatcaaaatggtgggaacaaattggaaaatggagagaaaaaagatctctaaactttatcaacagcgataagattattaaacctcagcatgcagttcaaagactatatgaattaacaaaaaatcaagatacgtttattactactgaggtgggccagcatcaaatgtgggcagctcaacattataaatttaataaacctaatagatggatgacttctggaggtcttggaacgatggggtatgggctcccagctgcaatcggagttcaaattgcaaatccaggaaaattagtcgttgatattgctggagaagcatctgttttgatgacaatgcaagaaatgtctacagcggtgcaatatagactacctatcaaaatatttatattgaataatgaatacatgggaatggtaagacaatggcaagaacttttacacgaaaaaaattattctgaaagttatacagctgcattaccagattttgtaaaactagcagagtcttatggttgtgttggcataagagctaaaacacctaacgagctggatgaaaaattaaa

SEQ ID NO: 232005 - DNA, 646 bp, Unknown
  Bacterial polypeptide expressing nucleotide sequence isolated from the Sargasso Sea
atgccaaaattatttactggagcagaaattgtatttaaatgtcttgaagaccaaaaggtggagcatatctttggttatcctggtggtgcagtgttaccaatttatgatgaattaaaaaatcatccttctataaagcatattttagttagacacgaacaaggtgctggccacgcagctgaaggatatgcaagatcatcaggaaaaccaggagtagttttagtcacatcgggtccaggagccacaaacgttgtaactgccttaactgatgcttatatggactctgttccattgatttgtatttctggtcaagttccgacacatttaattggaactgatgcttttcaagaatgtgacactactggaattacaagaccttgcactaaacacaattggttagttaaagatataaatgatcttgcaaaagttatgcatgaagcttttagagtagcaacaacaggaagacctggaccagttctagttgatatcccaaaagatgttcagtttgcaaaaacaaaatataaaaaactaaataaagaaaaaaaattaaatggaaaatcacataataaattttcccaagatcaaattgatgaatttgtaaaacttttacataaagccaaaaaaccaatcatctatagtggtggaggag

SEQ ID NO: 232006 - DNA, 523 bp, Unknown
  Bacterial polypeptide expressing nucleotide sequence isolated from the Sargasso Sea
atgtcaaaattatattcaggagctgagattgtattcaaatgtttagaagaccaggctgtaagcaatatatttggttatccaggtggagcagttctcccaatatatgacgaattaaaaaattttaaatcaatcaaacatattttagttaggcacgaacaaggagcgggtcatgctgctgaaggttacgctagatcaacaggcaaagcaggagttttattagttacatctgggcccggtgctacaaatgcagtcacagctttaacagacgcatatatggactccgttccaatagtttgtatatctggacaagtaccaacacatttaattggaactgatgcttttcaagaatgtgacacaaccggtattacaagaccatgcacaaaacataattggttagtaaaagatataaaagatttagctaatgttattcataaggctttcgaagtagcaaccactggaaggccaggcccagttttggttgatgttcctaaagatattcaatttcaaaaaacagtttataaaa

SEQ ID NO: 232007 - DNA, 730 bp, Unknown
  Bacterial polypeptide expressing nucleotide sequence isolated from the Sargasso Sea
atgaacggatctcagatcatcgttgaagctctgcgcagacatggggtggattatcttttcggctatccaggaggtgcctgcatgccgatttttgatgctctggtggatgcaccagaaatcaaaatcgtcctggttcgtcatgaacaggggggaacccatatggcagacggatatgcccgggccacaggcaaacccggggtggtgctggtcacttccggaccaggggcaacgaacacggtcacaggcctgctcaccgctcaaatggactccgtaccgatggtcgtactgacaggccagaccatcactcccaatcttggaaaggatgccttccaggaagccgatgtttttggggtcacgatgccagtggttaaacacagttatctggtccgtgaagtaaacgatttaccccgggtgatgaatgaggccttccatttagcaacttcgggaagaccgggcccggttttggtcgatctcccgaaagacgtggtttcggctgaatgcgaagctgactttaccgacgaatttcacctacctggctatgcccccccggcacggggattaactgaagatctggaaaaaaccgcggaattgatttcatcctccaaaaaacctcttctttatgtaggtgccggtgcggtcattgcccaggcatcaaggcaggtcattggacttgcagaaaaacttcaggcacctgtcaccaccaccttgttgggtaagggagcatttccgg

SEQ ID NO: 232008 - DNA, 376 bp, Unknown
  Bacterial polypeptide expressing nucleotide sequence isolated from the Sargasso Sea
atgaaaattgcaggaaacgacatattaattcagtctctgataaatgagggagtggaatatatcttcggttaccctgggggtgctgctcttcatatctatgattcgatctttaatcaaaaagagatgcaacatattttagtaaggcatgagcaaggtgcaacacatgctgctgatggttatgctcgtgcaacaggaaaacccggagttgttctcgttacatcaggaccaggcgcaacaaatgctattacaggtattgcaacagcattcatggattcaataccaatggtaattatttctggtcaggtgcaaagtcatttaattggaactgatgcctttcaagagacagacatgataggtgtatcaagacctatgtaag

SEQ ID NO: 232009 - DNA, 302 bp, Unknown
  Bacterial polypeptide expressing nucleotide sequence isolated from the Sargasso Sea
aatgtcaaaattgtattcaggcgctgaaatcgtatttaaatgtttggaagaccagggagtagaatttgtttttggttacccaggtggagcagttctgcccatttacgatgaattaaaaaattttaattttataaaacatattttagttcgtcatgaacaaggagccggtcatgctgcagagggctacgcaagatcatctggaaaaccaggagtgcttttagttacatcaggtccaggagctacgaatgcagtaaccgctttaacagatgcctatatggactcagttccattagtttgtataa

SEQ ID NO: 232010 - DNA, 803 bp, Unknown
  Bacterial polypeptide expressing nucleotide sequence isolated from the Sargasso Sea
ttcttcaattggaaaaaacattaaggtagaccacgcgattgttagcgatgttggaagttttttaaaagctttaaacaaaagaattaaagaaaaacataaagattttttaaattctaataaagcgaatatttctaaatggtggcgagatatagataagtggagacaaaaaaaatctttgagttttagaaatagcaaagatgtaatcaagcctcagtatgccgttcaaagactttatgaattatcaaaaaataaagatacttatataacaactgaagttggtcagcatcaaatgtgggcagcgcagcattataaatttaataaaccaaatagatggatgacttcaggtggtctaggaacaatgggatatggattgccagctgctgtgggagtacaagttgctcatccagataaattggtaattgatattgctggagaagcctctgttttgatgacaatgcaagaaatgtcaaccgctgtgcaatataaactcccaataaaaatatttattttaaataatcagtacatgggaatggttaggcagtggcaagaactcttgcatgaaaaaaattattctgagagttacactgcagctttgccagattttgttaaacttgccgaagcatatggttgtgttggaataatagcagaaaaaccaaatgagttagatgaaaaaataaacgaaatgatcgaagttgacaaaccagttatatttgattgcagagttgacccaactgaaaattgttttccaatgataccatcaggaaaacctcataatcaaatgatattaggtccgagaagatgaa

SEQ ID NO: 232011 - DNA, 357 bp, Unknown
  Bacterial polypeptide expressing nucleotide sequence isolated from the Sargasso Sea
aatgaaaataactggagcaaatatagtaataaaatctttaaaagatttaggtgttgagcatgtttttggctatcctgggggagctatactaccaatatatgatgagatttttaaacaaaataaaattagacacatattggttagacacgagcaaggggctgtgcatatggcagagggttatgcaagatcaacaggaaaagttggtgttgttttagtgacctcaggacctggcgcaactaatgcagtaactgggcttacagacgctttaatggacagcgttcctattttatgtttaacaggtcaagtgccaactcacttgattggtacagatgcattccaagaagctgacactttggg

SEQ ID NO: 232012 - DNA, 586 bp, Unknown
  Bacterial polypeptide expressing nucleotide sequence isolated from the Sargasso Sea
aatgtctaaaaattattcaggtgcagaaatagtatttaagtgtcttgaggatcaaggtgtagagaatgtattcggttatcctggtggtgctgttcttcctatttatgatgaattaaaaaatcatgaatctgttaaacatattctagtgcgacatgaacaaggagcaggccatgcagcagaaggatatgcaaggtctactggaaaaccaggtgttgttttagttacgtcaggccctggtgctacaaatgtggtcacagctttaacagatgcttatatggactctgttccattagtttgtatatctggacaagttccaacacatcttattggtacagatgcttttcaagaatgtgatactactggaataacaagaccatgtacaaaacataactggttagtaaaagatataaaagatctagcaaaaactattcataaagcttttgaagttgcaactactggaagaccaggtccagttttagtagatattccaaaagatatacaatttcaaaaaactaaatatcaaaaatacaataagaaaaaaaaattgaatggcaaaaatactaatcattattctcaaaaagaatag

SEQ ID NO: 232013 - DNA, 703 bp, Unknown
  Bacterial polypeptide expressing nucleotide sequence isolated from the Sargasso Sea
atgtcgaaattaattacaggtgctgaaatagtattcaaatgtttagaggatcagggtgtagattttatttttggatatcctggtggcgctgttcttccaatatatgatgaattaaaacatcataaaagtattaaacatattttagctagacacgaacaaggagcaggtcatgcagcagaaggttatgcaagatcttctggaaaacctggtgtcatattagtaacttctggtcctggtgcaacaaatgttgttactgcattaacagacgcatacatggattcagttccattagtttgtatttctggtcaggttccaactcatttaattgggactgatgcttttcaagaatgtgatacaaccggaattacaagaccttgtacaaaacataattggttagtcaaagatgtaaaagatttagctaaaacaattcataaagcttttgaggttgccacaactggaagaccaggccctgttttggtcgatatcccaaaagatattcaatttaataaatttacttactcaaagtttaaaaaacaaaaaaaattaaatgttaaattaaagaatccttactcccaaaaagaaattgatgaattaattaaattgattattaaatcgaaaaaaccaataatttattcaggtggtggtgtaatcaactcaggaataatagcaagtcagttattaagagagctagtagactcaactg

SEQ ID NO: 232014 - DNA, 301 bp, Unknown
  Bacterial polypeptide expressing nucleotide sequence isolated from the Sargasso Sea
atgccaaaattattaactggagcagaaattgtatttaagtgtcttgaagatcaaaaggtagaacatatttttggttatcccggtggtgcagtgttaccaatttatgatgaattaaaaaaccatccttctataaaacatattttggttagacacgaacaaggtgctggtcacgcggcagaaggttatgctagatcatcaggaaaaccaggtgtagttttagttacatcaggtcctggagcaaccaatgttgttacagctttaactgatgcttatatggactctgtaccattagtttgtattt

SEQ ID NO: 232015 - DNA, 871 bp, Unknown
  Bacterial polypeptide expressing nucleotide sequence isolated from the Sargasso Sea
tctgaaagatcaagatgtagattttatttttggttatccaggaggagctgtgcttccaatatatgatgaattaaaacatcataaaagtattaaacatatcttggctagacatgaacaaggtgctggacatgcagcagaaggttatgcgcgatcttcaggaaaacctggtgttgtgttagtaacatctggtcctggagccacgaatgttgttacagctcttactgatgcgtacatggactcagttcctttagtttgtatatctggacaagtcccaacacacttaattggaactgatgcttttcaagaatgtgacacaaccggcatcacaagaccttgcacaaaacataattggctagtcaaagatataaaagatttaggaaaaacaattcataaagctttcgaggtagcaacaactggtaggcctggccctgtgttagttgatattccaaaagatattcaatttaacaaatactcatatacaaaactaaagaaacaaaaaaaattaaatggcaagaaacataacttttattctcaaaaagaaattgaagaattaatagaattaatttgtaaatcaaaaaaaccaataatttattcaggtggtggggtaattaactcaggaattgaagcgagccagcttttaagagagctggtagatgcaacaggttttccaatcacttcaactttacaaggacttggtgcttatccaggtgatgataatcaatttttaggaatgcttggtatgcatggaacttatgaagctaacaatgcaatgcatgattgtgatttaatgataaatgtaggcgcaaggttcgatgatagaataactggtaagatagatgaattttcacctaagtcaaaaaaagttcatatt

SEQ ID NO: 232016 - DNA, 358 bp, Unknown
  Bacterial polypeptide expressing nucleotide sequence isolated from the Sargasso Sea
aatgcgagcactccacgatgagggtgttgagcttatatttggttatccaggcggtgctgcattgcatatatatgacgctctttttaggcaagataagattgaacacattcttgtaaggcatgagcaaggtgccacacatgctgctgacggttatgcaagagcaacaggtaagcctggagttgttttagttacctctggccctggagcaacaaatgctataacaggtattgcaactgcgtttatggattcgattccaatggtggtgatttctggacaagtggcaagccaccttattggtacagatgcttttcaagaaacagatatgattggtatttcaagaccagtagtaaagcatagt

SEQ ID NO: 232017 - DNA, 730 bp, Unknown
  Bacterial polypeptide expressing nucleotide sequence isolated from the Sargasso Sea
cgtcatgaacagggtgcaacacacatggccgatggctatgcacgagcaacaggaaagcccggtgtagtacttgtaaccagtggcccaggcgcaaccaataccgtcacaggtattttaaccgcccaaatggactccatacccatgattgttatttgtgggcaaaccatatcgcccatgcttggaaaggacgcctttcaagaagccgatgtattcggcataacagcgccaaccgttaaacacagctacctgctaactcaagcagacgatattcccagagtatgcaaagaatcgtttcatattgccacaaccggtcgccccggcacagtggtcatggatatcccaaaagatatctcaagtgggccatgcgaagccacttttgagtcagctaaaatggacttacctggctataagccaacaaaaacagcggatttaaccgacttaaaggccatgattagtcacctgaatgccgccaaaaagccactactcctcgttggacacggcgccattatctcaaacgcatcaaaggatgtattggcattggccgaacagctccaagcacccgttgtgaccaccaaattaggaaaggggatcattcccgaaacacacccactggccatgggaatgctaggcatgcatggcaccgcttacgccaatcgtgcagttgaacattgcgatttaatactgtctattggtagcaggtgggatgatcgcatcacaccagcggatatca

SEQ ID NO: 232018 - DNA, 934 bp, Unknown
  Bacterial polypeptide expressing nucleotide sequence isolated from the Sargasso Sea
ttatttctagggatgctaggcatgcacggaacatatgaagcaaacaattctatgtatagttgtgatctgatgataaacatcggagcaagatttgatgacagaataaccggaaaagtagatgagttttcacctaagtcaaaaaaaattcatgtggatattgacccatcgtctattggtaaaaatattaaagtagatttagcagttgtcagtgatgttggcagttttttacaagctttaaataaaagaataaaagaaaaacataaagattttttaaactctaataaacaaaatatatctaaatggtggaaggatatagataagtggagacaaaaaaaatctttaagcttcaaaaacagcaaagaagtaataaaaccacagtatgcagtgcaaagactttatgaattatcaaaaaatcaagacacctacatcactactgaagtaggtcagcaccaaatgtgggctgctcaacattacaaattcaataaaccaaacagatggatgacttcaggcggacttggcaccatggggtacggtttacctgcagcagtgggagttcaaattgcgcacccagataaactagttatcgatatcgcgggagaagcatctgttttgatgacaatgcaagaaatgtcaactgctgtgcagtacaaattaccaattaaaatatttattttaaataatcaatacatgggaatggttagacaatggcaagaacttttacacgaaaaaaattattctgaaagctataccgcagctctacctgattttgttaaattagcagaagcatacggttgtgttggaatacaagcaacaaaaccagatgagttagatgataaaataaacgaaatgataaatacaaaagaaccagttatatttgactgtagagttgatccagctgagaattgttttccaatgataccatctgaaaacctca

SEQ ID NO: 232019 - DNA, 904 bp, Unknown
  Bacterial polypeptide expressing nucleotide sequence isolated from the Sargasso Sea
catgcagcgggaaggttatgctagatcttcaggtaagccaggagtagttttagtaacatcaggtccaggtgctacaaatgttgtaactgctctaacagatgcatacatggactcagttccattagtttgcatttcaggacaggttccaactcatttgattggaacagatgcttttcaagaatgtgataccactggaattacaagaccttgtacaaaacataattggttagtaaaagatattaaagatttatcaaaaacacttcatgaagcttttagagttgcaactactggaagaccagggccagttttagtagatattccaaaagatattcaatttgcaaaaattaattattcaaaaccaaagattgaaaaaaaacttaatggcaaatcaataaattatttttctcaaaataatattgatgaattgattggcttgatgaataaatctaaaaaacctattatttattctggtggaggagtaattaattctggtccagaggcgagcgatgctttgagagagcttgttcaattgaccggtttcccaattacatcaacacttcaaggtttgggagcatatcctggagatgataatcaatttttaggaatgttaggaatgcatggaacttacgaagcaaacaatgcaatgcacgattgtgatttattgataaatattggagctagattcgacgatagaattactggaaagatcgatgaattttctccaaagtcaaaaaaagttcatatagatatcgatccctcatctatcaacaagataataaaagttgatctagcattagttggggatgttaaagacgtgcttaagggtattaataaaactttgaagaaaaaaaatatagatttgagaaaatcaaataagcaaaaaacatctaagtggtgggaacaa

SEQ ID NO: 232020 - DNA, 476 bp, Unknown
  Bacterial polypeptide expressing nucleotide sequence isolated from the Sargasso Sea
catcccgatcgtcggcgacgtgaaggaagtgctgaaggagctgatcgagcagctgcagacggccgagcatggccccgacaccgaggcgctcgcgcaatggtggaaggacatcgagggctggcgcgcgaaggactgcctgaagtacgaccgcgaaagcgagatcatcaagccgcagtacgtggtcgagaaggcgtgggagctgacggacggcaatgcgttcgtgtgctcggacgtcggccagcaccagatgtgggcggcgcagttctaccgtttcaacaagccgcgtcgctggatcaactccggcggcctcggcacgatgggcttcggcctgccggcagcgatgggcgtcaagatggcgcacccggacgacgacgtgctgtgcatcacgggcgaaggctcgatccagatgtgcatccaggaactgtcgacctgcctgcaatacgacacgcccgtgaagatcatttcgctgaacaacc

SEQ ID NO: 232021 - DNA, 715 bp, Unknown
  Bacterial polypeptide expressing nucleotide sequence isolated from the Sargasso Sea
gatttacgcgagttattgccggctatgtcagtacccactcactgtgaagactggttaaaacattgcgtgaagctgaaacagcaacatggttggcgttatgaccatccgggcgaacgtatcttcgcgccattaatgctgaaacagttaagcgagcggttgccagataactcagtggtgtgctgcgacgtcggccaacatcaaatgtgggtggcgcagcatatgagctttagtcatccacgtaatcatttaagcagtggcggtttaggcactatgggttttggtttaccagccgctataggtgcgcagttggccaggccaaaagatacggtagttacagtgagcggcgacggctcttttatgatgaatgtgcaggaactgggcaccatcaagcgtttccgtttacctgtgaagattgtcattgttgataaccagcgtttaggtatggtgaaacaatggcaggagctgttttttaacgaacgctacagcgaaaccgatttatccgacaacccggattttgtctctttagctgctgcttttgctataccaggccacagcatcagccgtaaagacgaagtgttaccagcgctggaagccatgtttacctggccaggcccatacttattacacgttcgaatcgatgaaacagacaacgtctggccattagtaccgccaggagcagccaatcagaatatgttaacggagaaagcacaatgaa

SEQ ID NO: 232022 - DNA, 1000 bp, Unknown
  Bacterial polypeptide expressing nucleotide sequence isolated from the Sargasso Sea
ccatcctgagtataagttcgagtacgtgtatccagataaggtaacaatgcgctcctatcagccctcgttcaaagggcacaccgggcaaattcggaaggctgcacgcatgttattgggtgccaagcgccctgtgatctacgccggtggcggagtgattcagggtgaggcttcagataagttgactgcgctggcacgacggttgaattatcccgtcaccaatacgctcatggggctgggcgccttccccggcagtgaccaacaatttctgggtatgttgggcatgcacggtttttatgaagccaacatggctatgcatcactccgatgtgattttggctgtaggtgcacgttttgacgatcgtgtgaccaatacggtgtctaaattctgccccggggccaaaattattcatattgatattgatcctgcctcgattgccaaaatcgtaccggttgatatacccatcgtaggccccgtgagcactattttggacgagctagacaagcagctaacagcgcaaatagatggcaatgagcgggcgctcccggatcctgacgtattggcacagtggtggcagcagattgacagttggcgcgatgctcacggcctttggcacgggcgtcgctatgcagagtccagttccatcatgcctcaggatgcgattctcgccctctatgatgcgacaaacggtgaggcctacgtgacgtctgatgtgggtcagcatcagatgtttgcggcgcagtactacaagtttgatcacccccgccgttggatcaattccggcgggctgggaaccatgggtttcggtctccctgctgcgatggggataaaaatagcgttgccggaggccgacgtggcttgtgttactggggagggcagtatccagatgaatattcaggagctctcaacctgcagtcagtacggctgccccgtgaagatcatcaatctgcgcaacgattatctaggtatggtcaagccagtggcaggacatgcagtacgaggg

SEQ ID NO: 232023 - DNA, 430 bp, Unknown
  Bacterial polypeptide expressing nucleotide sequence isolated from the Sargasso Sea
tatgccaaaattattaacaggggctgagatagtttttaaagcgttaatcgatcaaaaagtggaatatatttttggatatcctggaggtgcagttttaccaatttatgatgagctcaaaaatcacaaatcaataaaacatatattagcgaggcatgaacaaggagcaggtcatgcggccgaaggttatgcaagatcaagcggcaagccaggaataatgctagtaacatctggaccaggagcaacaaatgctgtaactgctttaaccgatgcgtacatggactctgtcccattagtttgtatatcaggtcaagttccaactcatttaatcggaacagatgcatttcaagaatgcgataccacaggtataacgcgaccatgtacaaaacataattggctagtcaaagatgtaaacaaattagcgaaacaatca

SEQ ID NO: 232024 - DNA, 900 bp, Unknown
  Bacterial polypeptide expressing nucleotide sequence isolated from the Sargasso Sea
aatgggaaaagtaaataaaaaactcaatattaaggatttagaaaatttaattaaaatgatgaaagaatcttctaagccaatattttatactggcggtggagtgattaactcaggacccgaagctagcaagctacttagagaattagtttctttgactggttttcctattacatcaacattacaaggattaggagcatttccgggagatgacccacaatttttaggaatgctaggtatgcatggaacatacgaagctaataatgcaatgcacgattgtgatttgatgataaatattggtgcgagatttgacgatagaattacagggaaggtggatgagttttcgccaaattctaaaaaaatacatattgatatagatccatcttcagtgggaaaaaatataaaagtagatctagcagttatcagtgatgtaactcctttgcttaaaaatttgataaaaatatttaaggaaaaaaataaagactttttaaactctaataaacaaaaaacatcaaagtggtggaatcaaattgagagttggagacaaaaaaaatctttaaattttaaaaatagtaatacaattataaaaccacagtatgccgttcaaaaactttatgagttgactaaggacaaagacactttcattacaactgaagtaggacagcatcaaatgtgggcagcccagcattataaatttgataaacccaatagatggatgacttctggtggactggggacaatgggatacggattaccggccgcagtaggagttcaagtagcaaatccgaacaaattagtaatagatattgcaggtgaggcttcagttcttatgactatgcaagaaatgtctacagcagttcagtataaattaccaattaagattttcattttgaacaaccagta

SEQ ID NO: 232025 - DNA, 322 bp, Unknown
  Bacterial polypeptide expressing nucleotide sequence isolated from the Sargasso Sea
atgtctaaattatataccggtgcagaaattgtattcaaatgtcttgaagatcaagaggttgaatatatttttggttatccaggtggagcagttttaccaatttatgatgaacttaaaaatcattcatcaattaaacatatacttgttagacacgagcaaggagcgggccatgcagcagaggggtatgcaagatcatcaggcaagcccggagtagttttagtaacatcaggacccggtgcaactaatgttgttacagcattgactgatgcttatatggactcaatacctttagtttgcatttctggacaagtacccactcatt

SEQ ID NO: 232026 - DNA, 427 bp, Unknown
  Bacterial polypeptide expressing nucleotide sequence isolated from the Sargasso Sea
tatggcaaatttaatgaccggtgcacaaatagtttttagagctttggaagaccaaggtgttaaacatatctttggttatcctgggggagcagtattgccaatttatgatgaacttaaaaatcataaaaaaataaaacatattttagttagacacgaacaaggagctggtcatgctgcggaagggtacgcaagatcttcaggcaagccaggtgtaatgcttgtaacttcaggaccaggagcaacaaatgccgttactgctttaactgatgcatacatggattcggttcctttagtttgtattacaggacaggttccgacacaccttattggtactgatgcttttcaagaatgtgatacaacgggtattactagaccatgcactaaacataattggttggttaaagatgtaaaaaaattatcatcaata

SEQ ID NO: 232027 - DNA, 875 bp, Unknown
  Bacterial polypeptide expressing nucleotide sequence isolated from the Sargasso Sea
aactttacataacaaattttctcaagatcaaattgacgaattagttaaactattaagcaaaacaaaaaaaccagtcatttatagtggtgggggagtgattaattcaggaccaaaagcaagtcaggctttaagagaatttgtagatttaaccggttttccaattacttctactcttcagggtttgggtgcataccctggagatgataatcaatttttaggaatgcttggaatgcatggtacttatgaagcaaataatgcaatgcatgattgtgatttactaattaacattggtgccaggttcgatgatcgtattactggaaaaatagatgagttttctccaaattcaaaaaaagttcatattgacattgatccatcctcaattaacaaaattatcaaggttgatcttgcaatagttggagatgttacgagtgttataagtaaaataaataaaacaattacaaaaagtaaaaacggtcatagtaaatccaacaaatcaaatattgctaaatggtgggaacaaatagagaaatggagagaaaaaaattctcttaattttgttaacagtgatgaaagtattaaacctcaacatgctgtgcaaagactttatgaattaactaaaaataaagatacttatgttaccactgaggttgggcaacatcaaatgtgggcagcccagcattataaatttaataaaccaaacagatggatgacatctggtggtttaggaactatgggttatggattaccagcagcagttggtgtgcaaatcgctcatcctgaaaaattagtaattgatattgcgggagaagcttcagttttaatgactatgcaagaaatgtctaccgcagttcagtacaatcttcctataaaaatat

SEQ ID NO: 232028 - DNA, 395 bp, Unknown
  Bacterial polypeptide expressing nucleotide sequence isolated from the Sargasso Sea
tatggcaaatttaatgacaggtgcggaaatagtttttcaagctcttgaagatcaaggtgtgaaacatatttttggttatcctggtggagctgtattacctatatatgatgaacttaagaaccataaaaaaataaaacatattttagttcgtcatgaacaaggcgcaggtcatgcagccgaaggatatgcaagatcttcaggtaagcccggtgtactattagttacttcaggacctggagcaacaaatactgttaccgctcttacagatgcatacatggactcagtcccaatagtttgtatttcaggacaggtcccaacgcatttaattggtacggatgccttccaggagtgtgataccactggaataacaagaccttgtacaaaacataattggt

SEQ ID NO: 232029 - DNA, 887 bp, Unknown
  Bacterial polypeptide expressing nucleotide sequence isolated from the Sargasso Sea
aatgtcaaaattgtattcaggtgctgagatagtattcaaatgcttggaagaccaagatgtagagtttatctttggttatccaggtggcgctgttcttcctatttatgatgaactaaaaaactttaattttctaaaacacattttagttcgtcatgagcaaggtgcgggacatgccgcagaaggatatgcaagatcatctggcaaacctggtgtattgttagttacatctggccccggtgcaacaaatgcagttactgccttaacagatgcttatatggactcagttcctttagtatgtatctctggacaagttcctacacacttgataggcactgatgcttttcaagaatgtgatacaactggaataacaagaccatgcacaaagcataattggttagttaaagatgtaaaagatttagaaaaaacaatccataaagcatttgaagttgcgacaactggtaggcctggacctgttttagttgatattccaaaagatgtccagtttcaaaaaacaaattatacaaaatttaaaaggcaaaaaaaaataaacggcaaagttcacaatcttttttcacaaaaggatattgacgaattgattaaattaatgagcaaagcctctaaaccaatattttatacaggaggaggtgttataaattcaggaccaaaagcaagtgagcttttaagagagcttgtgaacaaaactggttttccaataacatctacattacaaggcttaggctcatatcccggtgaagacagtcaatttttgggcatgcttggcatgcatggatcatatgaagctaacaatgcaatgcatgattgtgatttaatgataaatataggagcaaggtttgacgatcgaataactggaaaaatagatgaatttt

SEQ ID NO: 232030 - DNA, 763 bp, Unknown
  Bacterial polypeptide expressing nucleotide sequence isolated from the Sargasso Sea
agttaacgcaacaggttttcctataacttctacattacaaggactaggatcttatcccggtgaggatagtcaatttttagggatgcttggtatgcacggatcatatgaagccaacaatgctatgcacgattgtgatctaatgataaacattggtgctaggtttgatgaccgaataactggaaagatagatgaattttctcctaaatcaaaaaaagttcatattgatatagatccatcttcaataaacaaaaatgttaaagtagatttaccaattgtaggagatgttgctgaagttattgcttctacaataaaaactataaaaaaagtaaaaccaaattttgcaaaatctaataaacaaaaaatttctaagtggtgggagcaaattcaaaaatggagatctattaattcgtttaattttgttaatagtaccgaaactataaaacctcaatacgcagttcaaagactttatgagctaactaaaaataaagatacttatataacaactgaagttggtcagcatcaaatgtgggcagcacaacactataaatttgataaaccaaatcgttggatgacttctggtggattaggtactatgggttatggattaccagcagcagttggagttcaagttgcccatccaaataaattagtaattgatattgcaggggaagcatctgttttgatgactatgcaagagatgtctactgcagttcaatacagtcttcctattaaaatatttattttaaataatgaatatatggga

SEQ ID NO: 232031 - DNA, 895 bp, Unknown
  Bacterial polypeptide expressing nucleotide sequence isolated from the Sargasso Sea
aaaaaaacaaattttgtttttaaaagttctaacaaaaaaaaagtaaatggaaaattaaaagtaaatgaaaaaattaataatgacgaaatagacaaaattattaatttgatgaaaaaatcatcaaaaccaattttttatactgggggtggaataattaactcaggtccggaagcaagtaaattattaagagaactagtctctctaaccggttttccaataacatctacactacaaggtcttggtgcgtatccaggtgatgatcctttatttttaggaatgttaggaatgcatggaacatatgaagcaaataattcaatgtacagctgcgatctaatgataaatattggcgcaaggttcgatgatagaattacaggaaaggtggatgagttttcaccgaagtcaaagaaagttcatgttgatatagatccatcctctataggaaaaaatattaaagtagatctagcaattgttagtgatgtaggaagttttttaaaagcattaaataaaagaataaaagaaaaacataaagattttttgaattctaataaaccaaatatttcaaaatggtggaaagatatagataaatggagacaaaaaaaatctttgagttttaaaaatagcaaagaggtaatcaaaccacagtatgctgttcaaagactttacgagttatcaaaaaacaaagatacttatataacaacagaagtaggccagcatcaaatgtgggcggcccagcattataaatttaataaaccaaatagatggatgacctctggtggattaggaacgatgggatatggtttgccagctgcagtaggtgttcaaattgctcatccagataaactggttatagatattgccggagaagcatcagtgttgatgacaagcaagaaatgtc

SEQ ID NO: 232032 - DNA, 697 bp, Unknown
  Bacterial polypeptide expressing nucleotide sequence isolated from the Sargasso Sea
atgaaaaaacgcatgaatggtgctcaaattgtcgtcgaggcacttaaaaggcaaggagttgagtttatttttggatatcccggaggtgcatgtatgcctatttttgatgcacttgttgatgcaccagagcagaaaattattttagtccgccatgagcagggagcaactcatatggcagacggctacgctaaggcaacagggaagacaggagtagtattagtgacttctggtccaggtgcaactaacactgttactggaatactaactgctcaaatggattctgttcctcttgttattcttactggacaaactataactcccaatcttggtaaagatgcatttcaagaagcagacgtgtttggtgttaccatgcctattgtaaaacacagctatcttgtcagggatgtcaaggacctatcaagggtagtgaatgaagctttccaccttgcatcaacaggacgcccgggacccgttctagttgatttaccaaaagatgtagtttcaaatgagtgggatgaagacttcacttcagggttggaccttcccggatatcaagttcataccagtggcagtacagatggaatcgaatatgctgcagaacttctctcaaaatctaaacagcctttgctttatgtaggagctggtgctgtaatttctggagctgggaagcaggttcaaaaacttgctgaaaagcttc

SEQ ID NO: 232033 - DNA, 763 bp, Unknown
  Bacterial polypeptide expressing nucleotide sequence isolated from the Sargasso Sea
agaataaaagaaaaacataaagattttttaaactctaataaacaaaatatctctaaatggtggaaggatatagataagtggagacaaaaaaaatctttaagcttcaagaatagcaaagaggttatcaaaccacagtacgcggtacaaagactttatgaattatcaaaaaataaagatacttttataacaaccgaggtaggacagcatcaaatgtgggccgcccaacattataaatttaataaaccaaacagatggatgacatcaggtggacttggcacaatgggatacggtttaccagctgcagtaggagttcaaattgcccacccagataaactagttatagatattgctggagaggcatctattttgatgacaatgcaagaaatgtctacagctgtacaatacaaacttccaattaaaatatttattttaaacaatcagtacatgggaatggttagacagtggcaagaactcttacatgaaaaaaattattctgaaagttacactgcagctctacctgattttgttaaattagcagaagcatacggttgtgttggtatacaagctacaaaaccagatgaattagatgaaaaaataaacgaaatgatcaatgtaaatgaaccagttatttttgactgtagagttgacccagcagagaattgttatccaatgataccatctggaaaacctcacaaccaaatgctcttaggtcctgaggatgaaaaagaagaagtaacagatgaaggtaagactttagtataat

SEQ ID NO: 232034 - DNA, 785 bp, Unknown
  Bacterial polypeptide expressing nucleotide sequence isolated from the Sargasso Sea
aattaataaaattatcaaagttgacttagcaattgttggtgacgttaatgaagtacttaaaactacgattaaaaaaatcaacaaaaaacaaaatggttcaaagatctcaaataaacaaaatatttctaagtggtgggaacagatacaaaaatggaggacaaaagactctttagggtttatcaatagtgataagacaataaaacctcaatatgctgttcaaagattatatgagttaacaaaaaaacaagatacttttattactacagaagttgggcaacatcaaatgtgggctgcacaacattataaatttaacaaacctaacagatggatgacgtctgggggacttgggactatgggatacgggcttccagcagcagtaggtgttcaaattgcacatccaaataaacttgttgttgatatagctggtgaagcttcagttttaatgacaatgcaagaaatgtccactgcagttcaatataatttgccaatcaaaatttttgttttgaataatcagtatatgggaatggtgagacaatggcaggagctacttcatgaaaaaaattattcggagagttattcagaagcattacctgattttgtaaaattggctgaggcttatgggtgtaaaggaattaaagtcgataatccagaagagcttgactcaaagattaaggaaatggtcgatcataatggcccggtaatatttgattgtcaggttgatccaaatgaaaactgttttccaatgataccttctggaaagcctcataatcaaatgattttaggtc

SEQ ID NO: 232035 - DNA, 289 bp, Unknown
  Bacterial polypeptide expressing nucleotide sequence isolated from the Sargasso Sea
atgccaaaattattaactggagcagaaatcgtatttaaatgccttgaagaccaaaaggtagagcatatttttggatatcctggtggtgcggtgttaccgatatatgatgagttaaaaaatcatccttcaattaaacatattttggttagacacgaacaaggtgctggtcacgcagcagaaggttatgcaagatcttcaggaaagccaggtgtagttttagttacatcaggtcctggagccactaatgttgttacagcattaacagatgcttatatggattctgttcctt

SEQ ID NO: 232036 - DNA, 842 bp, Unknown
  Bacterial polypeptide expressing nucleotide sequence isolated from the Sargasso Sea
caaggtgctacccatgctgcagatggttactctcgagcaacagggaagccaggcgttgcattggttacttcaggacctggtgcaactaatgcaattacaggtcttgcaactgcttacatggactccataccgctcgttgttatttcgggtcaggtgcagagtcatttaattggaactgattcatttcaagaaacagatatgatcggtatatctcgacctgtagtgaaacacagttttattgttcaaaatactcaggacattccgcaaattgttcaagaagcttttcatatagccacaactggtagaccgggtccagtagttatagatatcccaaaggataaaactgatccttcagaactttttgaatataaaagggctaaagagatctctttacgttcctatcaacctagagtattaccccatcctggacaaataaaaaaagctagcaagaagatcttgtcagctgagcgtcctgtgatctatgcgggaggaggagtcatcctaggtaatgctcataaagagttaatattattaaacaaattattaaaagctccggtaactaatactttgatgggattaggagcatacccagcaaaagataaatatttcatgggaatgctcggtatgcatggaacttatcaagcaaatatggcgatgcataatgctgatgttattattgcaattggcgccaggtttgatgaccgcattactaataccccagctatgtttgcacccaatgcgaagattgttcatattgatgttgatcctgcttcaatttctaaaattattaatgctgatattccaattgttggtcaggttaaagaatctttaaatgctttaat

SEQ ID NO: 232037 - DNA, 817 bp, Unknown
  Bacterial polypeptide expressing nucleotide sequence isolated from the Sargasso Sea
ttctgtttcaaaattatcgaagcaaatattgctgtttttggacaggttaagaactctttaattgaattaaataaacaattaaaagataaaattgattcaattgatagtactttaattcagccctggcttgatgaaattgaagaatggacctcacttcatggactaaatcatgaattatataaagaaaattctgatgaaaaaaagataatgcctcaatcagtggttcaacatgtttatcaaataactgatggtaatgcttttgttacttctgatgtaggacaacatcaaatgtttgcagctcagtattatcatttcaacgagccaagaaaatggattaattcaggcggactaggaactatgggttttggactaccagcagcaatgggtgttaagttagcctttcctaaagaagaagttgtctgcattacaggagaaggaagtatacaaatgtgtattcaagaactctcaacctgttctcaatataacttacctatcaaaataattaacataaataatgaagcattaggaatggtcaaacaatggcaagatatgagttacggaggacgacattctgagagtacatatcaaagctctctcccaaactttattgaattagtagaatcgtatggacatattggatttaaaattgaaaaaaattctgatttaaaaggcattctagatgaagctttttctataaaagataaattagtctttgtcgatgtatatgtagatccagatgaacatgtgtatccaatgttagtagctcctaatggaagcctaaaggatatgtggattgataaagataaaaaagtatgat

SEQ ID NO: 232038 - DNA, 893 bp, Unknown
  Bacterial polypeptide expressing nucleotide sequence isolated from the Sargasso Sea
tatgaagaaaaaaaagataagtggagctgaagctgtaatacattcattgttaaatgaaggtattgatttagtatggggatatccaggtggagctataatgccagtttatgatgagttttataaattccaagataaactaaaacatatacttgcaagacacgaacaaggtgctattcatgctgcacaaggttatgcaagatcatctggtaaagttggagtagctattgccacgtcaggtcccggtgctacaaatcttgtaactggaattgctgatgctcaaattgattctacacctgttgtctgtattactggtcaagtaccatctcaccttttaggttccgatgcatttcaagaaactgatattattggtatatcaatgccagtaacaaaatggaattatcaaatcacaaaagcctctgaaattcccgatatttttgcaaaagctttttacatagcgaaatcaggtagacctggccctgttttaattgatattacaaaggatgctcaatttgaattatttgattatgaatattctaaatgtaaaggtataagaagctataatccacttcctaaaataaatagctcttctattgatgatgcggttagattaataaataatgcaaaaaaaccatttatagtttggggtcagggagtaatacttggaaatgcagaggatgagttcaaaagtttcgttgaaaagtctggtatacctgctgcatggactattcttggagcatcagccctcccaacatctcatgaacttaatgtaggaatggttggaatgcatggtaactacggtccaaatcttttgactaatgagtgtgatttgcttgttgctattggtatgcgttttgatgatcgagttactggagatccaaaaacttatgctaatc

SEQ ID NO: 232039 - DNA, 893 bp, Unknown
  Bacterial polypeptide expressing nucleotide sequence isolated from the Sargasso Sea
gatattccaaaagatattcaatttcaaaaagccaaatatacaaattttaaaaaacaaaaaaaacttaatggaaaatcaaatattagattttcacaaaaagatatcgacaaacttattgaaatgatgggtagagcaaaacaaccaatattttatacaggtggtggtgtaattaattctggtcctaaggcaagtgagaaattaagagaattagtttcaatcactggttttccaataacatcaaccctacaaggtcttggttcattcccaggagatgacaatcaatttttgggaatgttaggcatgcatggaacatacgaagccaacaatgctatgcacgattgtgatcttatgattaatataggcgcaagatttgatgataggataacaggaaaaattgatgaattctctcctaaatctaaaaaagttcatatagatatagatccatcttctataaataaaaacgtaaaagttgatcttccaattgtaggcgatgtttcagatgtaatttcttcattaataaagacaataaaaaaaaataaaccaaattttttaaagtctaataaagaaaatacctcaaagtggtgggaacaaatcgcaaaatggagatcggttaactctctaaactttattaatagcgataaaacaataaaaccgcaatttgcaattcaaagactttatgaactaacaaaaaataaagatacatttattacaactgaagttggccagcatcaaatgtgggctgctcaacactataaattcgataaaccaaacagatggatgacttcaggtggtcttggcacaatgggttatggtttaccagctgcagttggtgttcaaatagctcatcctgataaattagtagttgatattgcaggagaggcctcagttcttat

SEQ ID NO: 232040 - DNA, 345 bp, Unknown
  Bacterial polypeptide expressing nucleotide sequence isolated from the Sargasso Sea
aatgccaaaattattaactggagcagaaattgtatttaaatgtcttgaagaccaaagggtagaacacatctttggttatccaggtggcgcagtgttaccgatttatgatgaattaaaaaatcatccttctataaaacatattttagttagacacgaacaaggtgcgggtcacgcagctgaaggctacgcgaggtcatcaggaaaaccaggtgtagttttagttacatcaggtcctggggcaactaatgttgttacagctctaacagacgcttatatggattccgtaccgttggtttgcatttctggtcaggttccaacacatttaattggaactgatgctttcca

SEQ ID NO: 232041 - DNA, 823 bp, Unknown
  Bacterial polypeptide expressing nucleotide sequence isolated from the Sargasso Sea
acaaaaaaaaataaacggaaaatcacgaaacaattataatcaaaaagatattaataaacttattgagttgatgagcaaatcttcaaaaccaattttttacaccggcggaggagttataaattcaggtccaaaagcaagcaatcttctaagggaacttgtaagtattacaggatttcctataacttcaaccttgcaaggattaggttcatttcctggcgatgataatcaattcttgggaatgttaggcatgcatggatcttacgaggctaataatgcaatgcatgactgtgatttaatgattaatgtgggagcaagatttgatgacagaataactggtaagattgatgaattttcaccaaattcaaaaaaagttcatattgatattgatccatcatcaataaataaaaatgtaaaagttgaattacctatagtcggtgatgtagcaaatgtaataagctctacaatcaagactattaaaaaatcgaaaccaaattttacaaaatcaaataaacagaaaatttcaaaatggtggcagagaattgaaaaatggaggtccgttaattcatttaattttgttaatagtgcacaaactataaaaccacaatatgcagttcaaagattatatgagttaacaaaaaatgaagacacatatataacaaccgaagtaggtcaacatcaaatgtgggctgcacagcattacaagtttgataaacctaatcgttggatgacatctggaggactgggcaccatgggctatggcttaccggcagcagttggggtacaagttgctcatccagataaattggtaattgatatagctggg

SEQ ID NO: 232042 - DNA, 735 bp, Unknown
  Bacterial polypeptide expressing nucleotide sequence isolated from the Sargasso Sea
aatgccaaaattatacacaggagcagaaattgtttttaaatgccttgaagatcaaaaggtagaacatatttttggatatcctggtggagcagttttaccaatttatgatgaacttaaaaatcatacttctattaagcatattttagtgagacacgaacaaggtgctggtcatgctgctgaaggatatgccagatcatcaggtaagcctggagttgttttagttacatctggacctggcgctaccaatgttgttaccgcattaacagatgcgtacatggactcggttccattggtttgtatttctggtcaagttccaactcatttaataggaactgatgcatttcaagaatgtgataccaccggtattactaggccctgcacaaaacataattggttagtaaaagatataaatgatttatcagaaataatgcatgaagcatttaaagttgcaaccacaggaagaccgggccctgttttagttgatattccaaaagatattcaatttgcaaaagctaaatataaaaaacctaaaaaagaaaaaaaactaaatggaaaatcaaataataaattttctcaaaaacaaatagatcaattaattgatttattaaaaaatactaaaaaaccagttatttatagtggtggtggagtaattaattcaggacctaaggcaagtgacgcattaagagagtttgtagaattaacaggatttccaattacctctacgcttcaaggttt

SEQ ID NO: 232043 - DNA, 931 bp, Unknown
  Bacterial polypeptide expressing nucleotide sequence isolated from the Sargasso Sea
gaaattgtcttaaaaagcttagctgaacaaggtgtagaagttgtatttggatatcctggcggtgcagtattacccatatacgatactttatttaaacagaattcaattaagcacgttttagtaagacaagagggtggtgccatacatgcagctgaaggttatgctaggtctactggtaaaactggagtagttcttgtaacgtcaggacctggtgcaacaaatgtagtaactggtttaactgatgcgatgatggatagcgtacctatcgtatgtataactggacaggtaccacaacacctaattgggagtgatgcatttcaagaatgtgacacgacaggtataaccagaccatgtactaaacataattacttagttaaagatgttaataaattatcgtctgtatttcatgaggcatttactattgctcaaaatggaagaccaggccctgtattagtagatatacctaaagatgttcaatttgcttctggagcttatgaagaaaaaaataaaattattattccttctcatagattgtttgagccaagtcctgattttgaaaaaagtaaaattgaagaagcagtggaattaatttcaaaagctaaaaaaccaattttttatattggaggtggatgtattaactctggtccaaaagcttcaaaattagttagagaatttataaatatggttggatcaccagttacaatgacattaatgggtcttggggtagtaggttcatcagataaaaattcacttggcatgcttggaatgcacggaatgtatgaagctaatatggcaatgcatgaatgtgatgtcatgattaatattggtgcaagatttgatgatcgtgttacgggaagacttgatgcgttttctccaaattcaaaaaaattcatattgatatcgatgaaagtaatattaataaaactataaa

SEQ ID NO: 232044 - DNA, 844 bp, Unknown
  Bacterial polypeptide expressing nucleotide sequence isolated from the Sargasso Sea
gatccttcttctataggcaaaactataaaagtagatcttgcagtagtgagcgatgttgtaaattttttaaaatctttaaacaaaaggtttaaggaaaaaaataaagattttttaaattcaaacaagtcaaacacatctaagtggtggaaagatattgataagtggcgacaaaaaaaatccttaggttttaaaaatagcgacaaagttattaagccacaacatgctgttaaaaggttgtatgaattatctaaacataaagatgcctatataaccactgaagttggccagcatcaaatgtgggcagcacagcattacaaatttaataaaccaaatagatggatgacatctggtggccttggaacaatgggctatggtcttccagcagcagtaggggtgcaagttgccaatcctgataaattggttattgatatagcaggtgaggcatctgttttaatgacaatgcaagagatgtcgacagcagttcaatacaatctaccaatcaagatatttattttgaacaaccagtacatgggaatggttagacagtggcaagaactacttcatgaaaaaaattattctgaaagttatacagcagcattaccagattttgtaaagctagcagaagcctatggttgtgttggtatacaggcaaaaaaaccagatgagttggatgaaaaaataaacgaaatgttgaatgttaacaaacctgttattttcgactgtttagttgatccaaatgaaaattgttttccaatgataccttcaggaaaacctcataatcaaatgcttcttggaccagaagatgaggaagaaatttctagtgaaggaaaggttttagtttaaa

SEQ ID NO: 232045 - DNA, 850 bp, Unknown
  Bacterial polypeptide expressing nucleotide sequence isolated from the Sargasso Sea
aatggctatagaaaaactatctggagctgatgctttaatgcgctctcttaaagaagagggagtggagcttatttttggatatccaggaggggcttcgttgcatatttatgatgctttatttaatcaagaagacatagagcatattttagtaaggcatgagcaaggagcagttcatgctgccgatggatatgcaagggcttgcggtaagccaggagttgtttttgttacgtcaggtcctggtgcaactaatgctataactggattggcaacagcttatatggattctattccggttgttgtcatttctggtcaggtaaaatcacatcttattggaactgattcttttcaagaaacagacatgattggagtttctaggcctatagttaagcatagctttttagctcagagagctgaagatattccagaaattgttaaaaaagctttccacatagcaactacaggaagacctggtccagttgttatagatatccctaaggacgttagtgaacctagttatacttttgactttagttatccagaagaagtagacataagatcatacaagcctgttgaagaaggacattctggccaaatacgtagagcggcaaaattaattttaaaatctgaaaaaccagttatatatacaggtggaggagtgatacaagacgaagcctccgaagagcttacaaagctggctaaaatgttaaattttccagtcactaacactctaatgggcttgggagcttatcctggaacagacgaacagtttattggaatgcttggaatgcacggaacataccaagcgaatatggttatgcatgaatgtgatttaattttagctgtaggagca

SEQ ID NO: 232046 - DNA, 951 bp, Unknown
  Bacterial polypeptide expressing nucleotide sequence isolated from the Sargasso Sea
cttcgaagcaaacaacgcaatgcatgactgtgacttaatgattaacataggagcaaggtttgatgacagaatcactggaaaggtagatgagttctcacctaaatcaaaaaaaatacatgttgatatagatccatcttcaataggaaaaaatattaaggttgatttagctgtagttagcgatgtttcagaacttttaaaaggtttaatcaaaaggtttaaagaaaaaaataaaaacttttcaaactctaataaacaaaaaacatctaaatggtgggaacagattgacaaatggagagaaaaaaaatctttaaattttattaacagcaataaaataataaaacctcagcatgcagttcaaagactttatgaattaacaaaagatcaagatacttttattaccactgaagttggccaacaccaaatgtgggcagctcagcattataaatttaataaacctaatcgatggatgacatctggcggactaggaacaatgggttatggacttccagcagcgatcggagttcaaatagcaaatccaggtaaattagttattgatattgcgggtgaagcatcggttttaatgactatgcaagaaatgtcgacagcagtccagtatagattgccaataaagatatttatcttaaataatgaatatatgggtatggtgagacaatggcaggaacttttacatgaaaaaaactattctgaaagctacactgcagctctacctgattttgtaaagcttgcagagtcttatggttgtgttggtattagagctaaaacgccagatgaattagatgaaaagataaaagaaatgattaatgttcaaaagccagtaatattcgattgcatggttgataaatcagaaaattgtttcccaatgataccatcaggaaaaactcataacaaaatgattttaggtccagaagaagatgatgaaatctctgacga

SEQ ID NO: 232047 - DNA, 838 bp, Unknown
  Bacterial polypeptide expressing nucleotide sequence isolated from the Sargasso Sea
aattcatgttgatattgatccatcttcgattggaaaaaatattaaggttgatcttgctgttgtgagtgatgtcgaaaattttttaaaagctttaaacaaaaggtttaaagaaaaaaataaagattttttaaactcaaacaagtcaaacatatcgacatggtggaaagatattgacaaatggagacaaaaaaaatcattgagctacaaaaacagcaaagaagttataaaaccccaatatgctgttcaaagactctatgagctttccaaagataaagatgcttatataacaacagaagttggtcaacaccaaatgtgggctgctcaacattataaatttaataaaccaaacagatggatgacatcggggggtcttggcaccatgggttatggattaccagccgccgttggtgttcaagtggcaaatcctggtaaattagtaatagatattgctggagaagcatctgttctaatgacaatgcaagaaatgtcgacagcagttcaatataagttgccgattaaaatatttattttaaacaatcagtatatggggatggttaggcagtggcaggaacttttacatgaaaaaaattattcagaaagttacactgctgcattaccagattttgttaaacttgcagaagcatatgggtgtgtaggaattcaagcaaaaaaacctgatgagttggatgaaaaaataaatgaaatgataaacgttaacaaaccagttatttttgattgtttagttgatccaatggaaaattgttttccaatgataccttcaggaaaacctcacaatcaaatgttgttaggtccggaagacgaaaaggaagaagtttct

SEQ ID NO: 232048 - DNA, 340 bp, Unknown
  Bacterial polypeptide expressing nucleotide sequence isolated from the Sargasso Sea
aatgtcaaaattatactctggagctgaaatcgtatttaagtgtatggaggaccaaaatgttgatcatatttttggttatccaggcggtgccgtgcttccaatttatgacgaattacaaaattttaaatcaattaaacacgttttagttagacatgaacaaggcgcaggccatgcagcagaaggatatgcaaggtcatctggaaaaccaggtgttattttagtaacatcaggaccaggtgcaacaaatgtagttacagctttgaccgatgcatatatggattcaattccattagtttgtatctcaggacaagttcccacacacttaattggtacagatgca

SEQ ID NO: 232049 - DNA, 388 bp, Unknown
  Bacterial polypeptide expressing nucleotide sequence isolated from the Sargasso Sea
atgccaaaattatattcaggagctgagattgtatttaaatgtttagaggatcagggcgtcagtcatatttttggatatcctggaggagcagttcttccaatttatgatgaattaaaaaattttaattctatcaaacatattttagtaaggcacgaacaaggtgccggacatgctgctgaaggttatgcaagatcaacaggtaaaccaggtgttttattggtaacatcaggacctggcgcaacaaatgccgttactgcattgacagatgcatatatggactctgttccgttagtttgtataacagggcaagttccaactcatctaattggaactgatgcatttcaagagtgtgatacaactggaattactagaccttgcacaaaacata

SEQ ID NO: 232050 - DNA, 910 bp, Unknown
  Bacterial polypeptide expressing nucleotide sequence isolated from the Sargasso Sea
gcatttcaggaatgtgatactacaggaattactcgaccatgtacaaaacataactggctggtgaaagatgtaaatgatctggctagagtcttgcacttagcgtttgaagtagcaacaacaggaagaccaggtcctgttttagttgatatcccaaaagatattcaatttaaaaaaggtaaatataaattttttaaaagcagtcttaagaaaagattaaatggaaaagctacacataaaattgataattctgaattagataaatttatagatttaattaaaaaatcttcaaaaccaattttttatactggaggtggagttataaactcgggtcctgaagcaagcgaaaaattaagagaacttgtttctttaactggatttccaataacttcaacactacaaggacttggcgcatttccaggagatgatcctcagtttttaggaatgttaggtatgcacggcacctacgaagctaataatgcaatgcatgattgtgatttaatgataaatataggtgcaagatttgacgatagaataactggtaaggttgatgaattttctccaagatcaaaaaaaattcatgttgatattgatccttcttcaattggaaaaaatatcaaagtagatttagcgatagttagtgatgtttctgtgcttcttaaaagtcttataaaaagatttaaagaaaaaaacaaaaattttttaaattcaaacaaacaaaaaacgtcgaaatggtgggagcaaattgataaatggagagagaaaaaatctttaaactttattaatagcgataagattataaaaccacaacatgcagtaaaaagactttatgaattaacaaaagacagagatacttttgttacaaccgaggtaggtcaacatcaaatgtgggccgcccaacactacaaattta

SEQ ID NO: 232051 - DNA, 667 bp, Unknown
  Bacterial polypeptide expressing nucleotide sequence isolated from the Sargasso Sea
tatgggaaaattaatatcaggcgctgaaatagtttttaaagttttagagcatcacaaagttgaacatatatttggatatccaggcggagcggtcctaccaatttatgatgaacttaaaaaccataaaacaattaaacatattctagcacgtcatgaacagggagcaggacatgcagccgaaggatacgcacgctcatctggaaaacctggagttctattggttacttctggacctggagctacaaacgctgtaaccgctcttacagatgcttacatggattcagttccgttagtttgcataagcggccaagtcccaactcatttaatcggaacagatgcatttcaagaatgtgacacaactggtattacgcgaccctgtacaaaacataattggttagtaaaagatgttaaccaattagctaaaataatggatttagcttttgaagtagcaacaactggtagacctggaccagttttagttgacataccaaaagatattcaatttaaaaaaacaaattttgttttaaaaagttcaaataagaaaaaattgaatggaaaatctaagcctaatggaaaaataagtcctagtgatttagacaaagtgataaatttgatgaagaagtcatcaaagccaattttttatactggaggaggcgtaattaattca

SEQ ID NO: 232052 - DNA, 943 bp, Unknown
  Bacterial polypeptide expressing nucleotide sequence isolated from the Sargasso Sea
aattgaaactgtacaaagactagaaaaagcttcgaagcctataatctacagcggaggcggcgtaataaattctggggagaaggctgtaaatttattaaggaaattagtatccaaaacaaacttccccataacatccactttgatgggattaggtagttacccagcatctggcaacaactggcttgggatgctcgggatgcatgggacttatgaggcaaacatgtcaatgcatgactgtgattttatgttatgtgtaggggcaagatttgacgacagaattactggcaggatagacgctttcagtccaaattctttcaaagttcatattgatatagatccctcgtccgtaaataaaaatgttacggttgacgttccgttgattggtgatgtgtcaatcatattggaagaattaatcgccacttgggaaaagcgaggttcaaaagtcagctctcaaaagctaggtcaatggtggaaagaaataggtgaatggaaaaatgtaaaatcattgcaatacaccaattcttctagtgttatcaaaccacagtatgctcttcaaaggcttgaagagcatacccgaggtcacgacagatatatctctaccgaagttggtcaacatcaaatgtgggctgcacaatttatgggctttgaagaaccaaatagatggatgacttccggtggattgggaactatggggtatggattcccggcctcacttggaatacaggttgctcaccctaagtcattggttataaatgtagccggtgaagcgagttggcttatgaacatgcaagaattgggaactgctgtacaatataggctaccagtaaaacaatttatattaaataatgaaagactaggcatggtaagacaatggcaagaattgttacacggtgaaagatactctcatagttggtctgatgcattgccggatttgaaaagctgc

SEQ ID NO: 232053 - DNA, 235 bp, Unknown
  Bacterial polypeptide expressing nucleotide sequence isolated from the Sargasso Sea
atgaaaaaacgcatgaatggtgctcaaattgtagttgaggcccttaaaaggcaaaatgttgaatatattttcggatatcctggaggggcatgtatgccaatctttgatgcacttgtagatgcaccagaacaaaaaattattttggtacgccatgaacagggggccacacatatggcagatggttacgcaaaggccacagggaagcctggagtggtacttgttacttccggaccgg

SEQ ID NO: 232054 - DNA, 616 bp, Unknown
  Bacterial polypeptide expressing nucleotide sequence isolated from the Sargasso Sea
gctgtatgagttaacaaaagataaagatacttatgtaacaacagaagttggtcaacatcaaatgtgggcagctcaacattacaagtttaataaaccaaatagatggatgacatctggaggtttaggcacaatgggctatgggctaccagcagcagtaggtgtgcaaattgcccaccccgaaaagttagtagttgatattgctggtgaagcctctgtattaatgacaatgcaagaaatatccactgcagttcaatacaacttaccaattaaaatttttattttgaataatcagtacatgggaatggtcagacaatggcaagagcttttacatgaaaaaaattactcagagagttactctgaagcacttcctgattttttaaaaatggctgaggcttatggctgtaagggaattaaagcagaaaacccttctgagttagatgggaaaattcaagaaatgatagattataaaggtccagttatttttgattgtcatgttgatcctaatgaaaattgtttcccaatgataccttcaggaaaacctcacaatcagatgatcttaggacctaatgatcaggaagagaacaaaatcaagggtaaaggcaaagccttagtttag

SEQ ID NO: 232055 - DNA, 822 bp, Unknown
  Bacterial polypeptide expressing nucleotide sequence isolated from the Sargasso Sea
aagtggatttaccaatagttggagacgtaactgaagtaattaatttgactttaaaaacaataaaaaaagcaagacctaactttgttaaatctaataaacaaaatatttcgcaatggtgggaaaaaattgaaaaatggcgttcagtaaattccttaaactatgaaaatagtactgagaccataaaaccacagtatgctgttcaaagactatatgaattaacaaaagataaagatgcttatataactacagaggtaggtcaacatcaaatgtgggcagctcaacattataaatttaataaaccaaatagatggatgacgtcaggaggtttaggaactatgggctatggtttaccagcagcagttggagtacaagttgcacatccaaaaaaattagttattgatattgctggagaagcttctgttttgatgactatgcaagaaatgtcaacagcagttcaatatagcttacctatcaaaatttttattttgaacaatgagtatatgggaatggttcgtcaatggcaggaacttttgcatgataaaaattattctgaaagctatactgctgccttaccagattttgttaagctagccgaagcatatggttgtgttggtttaagagcaacaacacctgaagaattagatgacaaaattattgaaatgctaaacattgaaaaaccagttatattcgattgcagggttgataaaattgagaactgttttcccatgattccttcaggaaaacctcataatgaaatgctactaggtccaaatgataaaaaggaaaaaaaaattaccgggaaaggtaaaacgttagtttaat

SEQ ID NO: 232056 - DNA, 737 bp, Unknown
  Bacterial polypeptide expressing nucleotide sequence isolated from the Sargasso Sea
gttgacatcccgattcgtcgggccggtggacaccatcctcgaggagttggacaagcaggttgctctgcagatggaggacgccgagcgggcattgcctgatccagaggcgttggcgcagtggtggcaacaagtcgacagctggcgagaggcgcatggtctctggcacggccgccgatatggcgagtcggcatcgatcatgcctcaagacgcgatctgtgcgctgtatgaagctaccaacggcgaggcttatgtcacatcagacgtcggacagcatcagatgttcgctgcccagtactacaagtttgactacccgcgccgctgggtcaattccggcggcctcggcaccatgggatttggcctccctgcggccatgggtatcaaaattgccctgccggatgccgatgtagcgtgtgtgacaggagagggaagcatccagatgaatatccaggagctctctacctgcagtcagtacggctgcccggtgaagatcatcaacctgcgtaatgactatctcggtatggtcaagcagtggcaggatatgcagtacgaggggcgttactcggagagccactacgcggcgtccctgcccgattttgtgaagcttgcggaggcctatgggcacgttgggtatggaggtcaaatctccatccgacttgttgcctgcgatgaaggaagcctttgccctggaagacagctggtctttttggatatacatatcgaccctgatgagcacgtat

SEQ ID NO: 232057 - DNA, 814 bp, Unknown
  Bacterial polypeptide expressing nucleotide sequence isolated from the Sargasso Sea
tatgacgattccaagtcaaaaattcccgtacgagtatccaaaagagatcaagctgcgctcttataacccaaatgccaaaggccatccaggtcagattaaaaaagcactaaccactttgttagcggcaaaaaaacctgtgctttatgccggtggtggcgtgattttaggtcaggcttcagaagagctgacagtgctggcccgtaagctgaatcttccggtcaccaataccttaatgggcttgggtgcttatccggcctccgatccacagtttattggcatgctgggcatgcacggtagttatgaagccaatcaggtgatgcataacgccgatgtgatttttgccgtaggcgcgcgttttgatgatcgcgtgactaacgccaccaagaagttctgccctaacgccaccattattcatatcgatattgacccggccagtatttctaaaaccatcaatgcgcatattcctattgtcggtttagtgaagcctgtattgcaggaaatgctgcatcagttggagaaaaacaaaggcgaattggataaagaagctttaggccagtggtggcaacaaatcaaacaatggcgtgaagtgcatggtggccggtatgaccaaagcccgtcgcatttaaaacctcaggccgtgattgaagctgtgcaccgtcacaccaagggcgatgcttatgtcacctcagacgtaggtcagcaccagatgtttgctgctcagtattataagtttgataaaccgaatcgctggatcaactcaggtggcctcggcaccatgggttttggtttacccgccgctatgggcgtcaagctg

SEQ ID NO: 232058 - DNA, 343 bp, Unknown
  Bacterial polypeptide expressing nucleotide sequence isolated from the Sargasso Sea
aatgtctaaattatataccggtgcagaaattgtatttaagtgtcttgaagatcaagaggttgaatatatttttggttatccaggtggagcagttttaccaatttatgatgaacttaaaaatcattcatcaattaaacatatacttgttagacatgagcaaggagcaggccatgcagcagaaggttacgcacgatcatcaggtaagcccggagtagttttagtaacatctggacccggtgccactaatgttgttacagcattaactgatgcttatatggactcaatacctttagtttgtatttctggacaagtgcctactcatttaataggcactgatgctttt

SEQ ID NO: 232059 - DNA, 724 bp, Unknown
  Bacterial polypeptide expressing nucleotide sequence isolated from the Sargasso Sea
atgtcaaaattgtattcaggagctgaaatagtatttaaatgcttggaggaccaagaagtagaatttatttttggttatccaggtggagcggttcttccgatctatgatgaattaaaaaattttaattctataaagcatatattagttcgtcacgaacaaggcgctggccacgctgccgaaggatatgcaagatcgagcggaaaacctggtgtacttctggttacctcaggaccaggagcaactaatgcagtaaccgcattgacagatgcttatatggattcagttcctctagtatgcatttctggacaagttcctactcacttaataggtactgatgcctttcaagaatgtgacactacaggaataactagaccatgtacaaaacataattggctagttaaaaatgtagcagatttagaaaaaacaattcacaaagcttttgaagttgctacaacaggtagaccaggacctgtattagtcgatataccaaaagatgttcagtttcaaaaaacaaaatacactaaattcaaaaaacaaaaaaaattaaacggtaaagttaataatcaattttcccaaaaagatattgatgaactgattaaattgatgagtaaagcatcaaagccaattttttatactggtggaggtgttataaattcaggaccaaaagcaagtgaacttttaagagaattagtaaacacgactggttttccaataacatctacac

SEQ ID NO: 232060 - DNA, 621 bp, Unknown
  Bacterial polypeptide expressing nucleotide sequence isolated from the Sargasso Sea
aatgtctaaattatataccggtgcagaaattgtatttaaatgtcttgaagatcaagaggttgaatatatttttggttatccaggtggagcagttttgccaatttatgatgaacttaaaaatcattcatcaatcaagcatatactagttagacatgagcaaggagcaggtcatgctgcagaggggtatgcaagatcatcgggcaagcctggggttgttttggtaacatcaggaccgggtgctacaaatgtcgtcacagcattaactgatgcttatatggactcagttcctttagtttgtatttctggacaagtgcctactcacctaataggaacagatgcttttcaagaatgtgatacaacgggaattacaagaccttgtacaaaacataattggttagttaaagatattaaagacttatcaaaagttatgcacgaggcttttaaagtggcaacaacaggaagacctggacctgtgttaattgatattcccaaagatatacaatttgcaaaatctaattattcaaaacttaaaaaagaaaaaaaacttaatggaaaaacacataataagttttctcaaaatgaaattgatttactgattgaattaatttcaaaagcaaaaaa

SEQ ID NO: 232061 - DNA, 976 bp, Unknown
  Bacterial polypeptide expressing nucleotide sequence isolated from the Sargasso Sea
gatgcttttcaagaatgtgacacagttggaatcacaaggccttgcacaaaacataattggctagttaaagatattaatgactatcaaagaatacttcatgaggcattctatgttgcatcaaatggaagaccaggccctgtcttagtcgatattccaaaagatatacagtttcaaacaggtacctatattggccccgagactgttaagcataagtcatatcgtccaaagcttaaagcaagcattgatacaattgatgaggctttacaactaatctcttcagctgaaaaacctgttttttacacaggaggaggcgttataaattctggaaatgccgctgttcaattattaagagagttcgtgagacttactgggtttccaattacatctactctgcaaggtttgggagcgttcccaggcgacgataatcagtttattggaatgcttggaatgcatggaacatatgaagcaaacatgacaatgaatcaatgtgacttaatgatcaatattggagcacgatttgatgatcgaataactggaaaggttgacgaattttcgcctaactctaaaaagatacacattgatattgatccatcatcaattaataaaacagttaatgtagatgttccaataattggggatgttgctcatgtgttagaagatgcaattaagctatggaagactaaggtatataaaacaaataaagctgagataaaaaattggtggagtacaattgatcaatggagaaaaaaagactctttaaaatttgatcaaggaaagaagacaatcaagccccagtatgcaattcaaagactttatgaattaacaaaagatcaagatacttttgttacaaccgaagttgggcagcatcaaatgtgggctgcgcagcactataaattttcgaagcctaataggtggattacctctggtggtcttggaaccatgggatttggttttcctgctgctttgggcgttcaag

SEQ ID NO: 232062 - DNA, 893 bp, Unknown
  Bacterial polypeptide expressing nucleotide sequence isolated from the Sargasso Sea
taatcaatttttaggcatgctaggcatgcatggttcttatgaagcaaataatgccatgcatgattgtgatttgatgattaatattggagcaagatttgatgatagaattactggaaagatagatgaattttcgcctaattcaaaaaaagttcatatagatattgatccttcatcaataaataaaaatgtaaaagttgatttgccaatcgtaggagatgttgcggaagtcattagctcaacaataaaaactattaaaaaagtgaaaccggatttttcaaaatcgaacaatcaaagaatatctaaatggtgggagaaaattcaaaaatggagatctgtaaattcatttaattttgtaaatagttctgaaactataaaacctcaatatgcgattcagagactttatgaacttacaaaaaataaggatacctatgtaacaaccgaggtaggtcagcatcagatgtgggcagcacagcattataaatttgataaaccaaatcgatggatgacatcaggtggattaggtactatgggttatggattacccgcagcagttggagttcaagtagcacatccaaataaattagttattgatattgcgggggaagcatctgtattaatgacaatgcaagaaatgtccactgcagttcaatacagcttaccaataaaaatatttatattaaacaacgaatacatgggtatggtcagacagtggcaagaactccttcatgataaaaattattctgaaagttacaccgctgctcttccagactttgtaaaattagctgaagcttacggatgtgttggaatgagagcgacaaaacctgaggaattagatgataaaattatagaaatgatcaatacagatagatcagtaatatttgattgtttagttg

SEQ ID NO: 232063 - DNA, 745 bp, Unknown
  Bacterial polypeptide expressing nucleotide sequence isolated from the Sargasso Sea
atttttggaaaatcaaataaacaaaaaatttctaaatggtgggaaaaaattgaaaaatggagatccgtacgttctcttgattatattaatagcgaagaaacaattaaaccacagtatgcagttcaaagactttatgaactaacaaaagataaagatacttttattacaactgaggttggtcaacatcaaatgtgggctgctcaacattacaaatttgataaaccaaatagatggatgacatcaggtggattaggaacgatgggttatggtttgcctgctgcaattggagttcaagttgctcatccaagtaaattagtagttgatattgctggtgaggcgtcagttttaatgactatgcaagaaatgtcgactgcggttcaatatagtctgccaataaaaatatttattctaaataatgagtatatgggaatggtacgtcaatggcaggaactattacacgataaaaattattctgaaagttacacggctgcactaccagattttgttaaattagcagaagcatatggctgtgttggaataagagcatcaactccagaagagcttgacgacaaaataattgaaatgcttaacacagaaaggcctgtaatatttgattgtcgcgttgataaaatagaaaattgttttccaatgataccatcgggaaaacctcataatcaaatgcttctagggccaaaagatcaaaaggaaaataaaattaccggaaaaggaaaaacattagtataat

SEQ ID NO: 232064 - DNA, 790 bp, Unknown
  Bacterial polypeptide expressing nucleotide sequence isolated from the Sargasso Sea
cctggtggagcggtactgccaatttatgatgctttatttaaacagaaccgtttgaagcatattttggtgcgtcaagagggtggagccgttcatatggctgaaggctatgcgcgctctactggtaaattgggagtggttttagttacttcgggcccaggggcaaccaatgccgtaacaggtctgactgatgcgatgatggacagtgttcccgttctttgtttaacgggacaagttccaactcacctaattggaaatgatgcttttcaagaggcagatacgacaggaattacaagaccctgtactaaacataattacctcgtaaaagatgtatccaagctagcaaaaatcatgaaagaaggcatgtatgtagcacagacaggtcgtcccgggcctgttgtaattgatttgccaaaagatgtactcataaatgaaacacaatacgaaatttctaacaaaacctacttgcggcacaaaacttatcgcccaagaaaaaaaggtgacccaattaagattaaagaagctataaatttaatagcaaatgccaaaaggcctttgttttattgtggtggtggagtgattaattcgggcctgaaaggctctaagttgcttacagaatttgttaataccacgggctttccaataacattaactctcatgggtttgggggcatttcctgccgaagataagaaatttttaggtatggtaggaatgcatggtacatatgaatctaatctagccatgcatggctgtgatgtaatgataaacattggggcgcgctttgatgaccggg

SEQ ID NO: 232065 - DNA, 498 bp, Unknown
  Bacterial polypeptide expressing nucleotide sequence isolated from the Sargasso Sea
aatgactggcgcacaaatggttcttaaggccttggaagatcagcaagttgatacaatttttggatatcctggtggcgcagttttgccgatatatgatgaattagcaaaaactaaggatacaaaccatcaaatacgccattttttagtaaggcatgaacaaggcgcatcccatgctgctgaagggtatgcaaggtcaagtggtaaagttggagtaatgttggttacgtctggccctggagttactaacgcagtgaccggattaactgatgctatgatggattcaattcctcttgtttgtataagcggacaagttcccacgcacttaattggaacggacgcatttcaggagtgtgatgcggttggcattacgcgtccgtgcacaaagcataattggctagttaaggatataagtgatctatctcgaattttacacgaagctttttatgtagcttcaagcggcagacctggacctgttctcgtagatatacctaaagatat

SEQ ID NO: 232066 - DNA, 268 bp, Unknown
  Bacterial polypeptide expressing nucleotide sequence isolated from the Sargasso Sea
tatgaaaattgcaggaaacgacatattaattcagtccctgataaatgagggagtggaatatatttttggttaccccgggggtgctgctcttcatatctatgattcaatctttaatcaaaaagagatgcagcatattctagtcaggcatgagcaaggagctacacatgctgctgatggttacgcaagagctactggtaagcccggtgttgttttagttacctctggaccgggagctacaaatgcaataaccggtattgctacagccttt

SEQ ID NO: 232067 - DNA, 787 bp, Unknown
  Bacterial polypeptide expressing nucleotide sequence isolated from the Sargasso Sea
gaactagttaatgctacgggttttccaattactagcactttacaaggtttaggttcctatccagccgacgatgatcaatttttaggaatgttaggaatgcatggaacttatgaagctaacaacgcaatgtatgaatgtgatttaatgataaacattggcgcaagatttgatgatcgtataactggaaaaattgacgaattttcacctaaatcaaaaaaaatacatattgatattgacccttcgtcaataaataaaaatgtaaaagtagatttagcaattgttggagacgttaaaacggttgtttcatcaataataaaaactttaaaaaagaaaaatcctaattttataaaatcaaacaatcaaaggacttccaggtggtgggaaaaaatccaaaaatggagagcaaagagatctttagattatattgggagtgaagaaacaattaaaccacaatatgcaattgaaagattgtatgaacttactaaagataaagatgcttacattactacagaggttggacaacatcaaatgtgggcagcgcaacattataaatttaataaaccaaatcggtggatgacttcaggtggattaggaacaatgggatatggtttgccagccgctgttggtgtccaagtcgcgcatccaaataaattggttattgatatcgcgggagaagcatctgtactaatgaccatgcaagagatgtcaacagcagttcaatacagtctgccaattaaaatttttattttaaataatgagtacatggggatggttagacaatggcaag

SEQ ID NO: 232068 - DNA, 862 bp, Unknown
  Bacterial polypeptide expressing nucleotide sequence isolated from the Sargasso Sea
ctgagagattttgttgagctaactggttttcctattacttctacacttcaaggattaggtgcgtatcctggagatgataatcaatttttaggaatgcttggtatgcatggtacatatgaagcaaataatgcaatgcatgattgtgatcttttaattaatattggtgcaagatttgatgatcgaattactggaaaaatagatgagttttcaccaaattcaaaaaaggttcatattgatattgatccatcatcaattaataaaattatcaaggttgatcttgcaatagttggagatgtttcgagcgttatcagtaaaattaataaaacaattgctaaaagaaaaaatggtcatagcaaatcgaacaaatcaaatatagccaagtggtgggaacaaattgaaaaatggagagaaaaagattctcttaattttgtaaatagtgatgaaagtataaagcctcaacatgccgttcaaaggctttatgaattaactaagaataaagacacttatgttactaccgaggttggacaacatcaaatgtgggctgctcaacattataaatttaataaaccaaacagatggatgacatctggtggcttaggaaccatggggtatggattgccagcagcagtcggtgttcaaattgctcatcctgaaaaattagtaattgatattgctggtgaagcttcggttttaatgactatgcaagaaatgtctacggcagttcaatacaatctacctataaaaatatttattttaaataatcaatatatgggaatggtaagacaatggcaggaattacttcatgaaaaaaattattctgagagttattcagaggcattacctgattttatgaaaatggcag

SEQ ID NO: 232069 - DNA, 916 bp, Unknown
  Bacterial polypeptide expressing nucleotide sequence isolated from the Sargasso Sea
aaaaaataaaattattattccctctcatagattgtttgaaccaagtcctgattttgaaaaaaataaaattgaagaagcagtagaattaatttcaaaagctaaaaaaccaattttttatattggtggtggatgtattaattctggtccaatggcctcaaaattagttagagaatttataaatatggttgggtcaccagtaacaatgacattaatgggtctgggggtagtaggttcatcagataaaaactcacttggtatgcttggtatgcacggaatgtatgaagctaatatggcaatgcatgaatgtgatgtcatgattaatatcggtgcaagatttgatgaccgtgttacaggaagacttgatgctttctcgccaaattcaaaaaaaatccatattgatattgatgaaagtaatattaataaaactataaatgttgatgttccaataataggtgatgtaaaacaggttgttgaaaagatgatcactgtttggaaagaaaagaaatttcaaatagatgataaagcgttaaaattatggtgggataaaataaataaatggaaagatattgattgtttaaactacaataatgagggtaaacagataaaaccacaatacgcagttcaaagactctatgagttaacaaaaaatacaaagacctttattacaactgaagtaggtcagcaccaaatgtgggctgctcaattttataaatttgaggaaccaaatagatggcttacatcaggtggtttaggtactatggggtatggatttcctgctgcaattggagcccaagttgggcatccagatgccctagtagttgatatagctggagatgcttcaatactcatgaatattcaagaaatgagtacggctgttcaatatagattacctgtaaaaatatttatttttaaataa

SEQ ID NO: 232070 - DNA, 551 bp, Unknown
  Bacterial polypeptide expressing nucleotide sequence isolated from the Sargasso Sea
aatgtcaaaattgtattcaggagctgagattgtatttaagtgtttggaagatcaaaatgtagaatttatttttggttatcctggtggtgctgttcttcctatttacgatgaattaaaaaattttaattttcttaaacatattttagctcgtcatgagcaaggtgcaggacacgcggctgaaggatatgctagatcttcaggtaagccaggagtccttttagttacttcgggtcctggtgctactaacgctgttaccgctttaacagatgcttatatggactcagttccgttggtttgtatttcaggtcaagttcctacacacttaataggaactgacgcttttcaagaatgtgatacaacaggaataacaagaccatgcacaaagcataattggttagttaaagatataaaagatttagaaaaaacaattcataaagcatttgaagttgctacaactggtaggccaggccctgtactagtggatattcctaaagatgttcaatttcaaaaaacaaattataaaaaatttaaaaaacaaaaaaaattaaatg

SEQ ID NO: 232071 - DNA, 625 bp, Unknown
  Bacterial polypeptide expressing nucleotide sequence isolated from the Sargasso Sea
ctgttcaaggctttatgaattaactaaaaataaagaaacttttattactactgaagttggtcaacatcagatgtgggctgctcagttctataaatttgaaaaaccaaacagatggctaacttcagggggtttaggaacaatgggctatggctttcctgcagcaatcggagcacaggtaggtaatccagatgcacttgttatagatattgcaggtgacgcctctattttaatgaatattcaggaaatgagtacggcaatacaatatcgattacctgttaaaatatttatacttaataatgaatatatggggatggtaagacaatggcaagagttacttcatggcggtagatactcagaaagttacactgatagtcttccagattttgttaaattagcagaaagttataaggctaaaggacttagagcaaaaaccactgatgagttagataatgttattaatcaaatgattgaaactcaagatactgtaatagctgatatttgggtaacaaaggaagaaaattgctttccaatgatacaaagtgggtctgctcacaatgaaatgttactcagtaaagatcaaaaacaagataaaaaatctgcagaaaaaggaaaaatattagtttaa

SEQ ID NO: 232072 - DNA, 838 bp, Unknown
  Bacterial polypeptide expressing nucleotide sequence isolated from the Sargasso Sea
ttctcaccaaagtcaaaaaaagttcatattgatattgatccttcatcaataaataaaattataaaagtagatcttgcaatcgtcggagatgtaaatgaagtaatgaaatcgattataaaaaaaatgaataaaaaacaaaatgggttaaaagattcaaacaaacaaagaatttcaaaatggtgggaacaaatatctaaatggaggacaaaggactctttagggtttattaatagcgataaagaaattaaacctcagcatgctgtaaaaagactatatgagttaacaaaaaatcaagatacttttataactacagaggttggtcaacatcaaatgtgggctgcgcaacactataaatttaataaacctaacagatggatgacatctggcggccttggaactatgggatatggactcccagctgctgtaggtgttcaaattgcacatccagataaacttgtaatcgatattgctggtgaagcgtccgtattgatgacaatgcaagaaatgtctacagctgttcagtataacttaccaataaaaatattcattttgaataatcagtacatgggcatggtcagacaatggcaagagcttcttcatgaaaaaaattattcagaaagttattctgaagctttacctgattttgtaaaattagccgaagcttacgggtgcaagggtatcaaagctgataatccaaatgatttagacgacaaaattaaagaaatgatagattttaaaggaccagtcatatttgattgtcatgttgatcctaacgaaaattgttttccaatgataccatctggaaagccacataatcagatgattttaggtccaaatg

SEQ ID NO: 232073 - DNA, 873 bp, Unknown
  Bacterial polypeptide expressing nucleotide sequence isolated from the Sargasso Sea
aatgacacaggcaaataaaattactggtgcagagatagtaataaaagctttgattgatcagggtgtggatacagtttttgggtatcctgggggggcgattctgccaatttatgacgaactatttcagcaaaaaaaaataaaacatattcttgttagacatgagcaagcagctactcatgctgcagaagggtacgcaagatctaccggaaaaattggtgtggtttttgttacctctggacctggtgcaacaaactcagttacagggcttacagatgctcttatggacagcgtgccaatagtggtaattagtggccaagtaccaacttttatgataggaaatgacgcgttccaggaagcagatacggtaggcatcactagaccctgcacaaaacataactggcttgtcaaagatacaaataaattggctgaaacaatacacaaagcctttgaagttgcgggtagtggtaggcctggtcctgttttggtagatgttccaaaagatgttcagtttgcttctggccgctacactaagaaaaacgaaataaaaaaggactttattaaaaaagagccccctattgatctcaatatgttgaatgaagcaataaatagattagaacttgcggagaggccaataatttatagtgggggtggggttataaactcaggtcaatctgcagtaaattcacttaggaatttggtcgcaggtacaaattttcccataacttccaccctcttggggttgggtagttatccggcttcaggaaaaaactggttaggtatgctagggatgcatgggacttatgaagcaaatatgtctatgcatgactgtgactttatgctttgtattggcgctcgcttcgacgaccggataac

SEQ ID NO: 232074 - DNA, 562 bp, Unknown
  Bacterial polypeptide expressing nucleotide sequence isolated from the Sargasso Sea
catggctacagcctctcgcacccacgctaccgacgcctttgtaagtggtgccgatgtggttgttgagtcactcatcaggcaaggtgtagaggtcatctttgcctatccaggtggtgccagcatgccgctgcatcaatccctcaccaagttccaagaaaaaattcgaacgattcttccccggcatgaacaggggggaggctttgcggctcagggttatgcacggacgacgggaaagcctggggtttgcatggcgacgagtgggccaggagcaacaaatctcgtaacagctattgctgatgcaaagatggatagcattcctttgattgcgcttacaggtcaggttggtacgagtgtgattggaacagacgcctttcaggaaaccccaattgttgaggtgtgtcgaggtattacgaagcatcattacctgattacagatgcagaggacattccccgcgtcatgcgcgaagcatttcatatcgccacgaccggacgaccaggtcctgtcctcatcgatctgccgaaaaatatccaactctcgaatattgtgctcgactatgaggca

SEQ ID NO: 232075 - DNA, 301 bp, Unknown
  Bacterial polypeptide expressing nucleotide sequence isolated from the Sargasso Sea
atgtctaaattatataccggtgcagaaattgtatttaagtgtcttgaagatcaagaggttgaatatatttttggttatccaggtggagcagttttaccaatttatgatgaacttaaaaatcattcatcaataaagcatatacttgtaagacatgagcaaggagcaggtcacgctgcagagggatacgcgagatcatcgggtaagcctggagtagttttagttacatctggaccaggcgctactaatgttgttactgcattaactgatgcgtacatggactcagttcctttagtttgtatct

SEQ ID NO: 232076 - DNA, 736 bp, Unknown
  Bacterial polypeptide expressing nucleotide sequence isolated from the Sargasso Sea
gatgtcaaataagcaaaatatctctaaatggtgggagcagatacaaaaatggagaacaaaaaactctttaggttttatcaatagtgaaaaaactattaaacctcaacatgctgttcaaagattatatgaactaacaaaaaatcaagatacctttgtaactacagaagttggacaacatcaaatgtgggctgcacaacattacaaatttaacaaaccaaatagatggatgacatctggaggacttgggactatgggatatggcctacctgcagctgtaggtgttcaaatcgcacatccagataaacttgtaattgatatagcaggagaggcttcagttttaatgactatgcaagagatgtctacagcagtccaatataatttacccatcaaaatttttgttttaaataatcaatatatgggaatggtaagacaatggcaggagctattacatgaaaaaaattattctgaaagttattcagaagcgttacctgattttgtaaaattagctgaggcttatggatgcaaaggaattaaagttgataatccagatgagctagattcaaagattaaagagatgattgatcacgatggccctgtaatatttgattgtcaggttgatcctaatgaaaactgctttccaatgataccttctggaaagcctcataatcaaatgattttgggccctaatgaaaaagaggaaaataagattactggaaaaggaaaagcattagtttaa

SEQ ID NO: 232077 - DNA, 772 bp, Unknown
  Bacterial polypeptide expressing nucleotide sequence isolated from the Sargasso Sea
ggcccggtgaagcctgtgttggccgatatggtggaaatgctgaaccagatggatgtcgagcctgaacaggatgcgttaagtgcctggtgggaaaccatcaatggctggcgcgaaaagcatggcctctggactggtgatcgtttcacacgctgcgacaagatcatgcctcaagatgtgattcggacgttgtatgaagtgaccaacggcgaagcgttcatttgctcggacgttggacaacatcaaatgtttgctgcgcaatattataagtacgaccaaccacgacagtggatcaattccggtggactcggaacgatgggattcggtttgccggctgcgatgggtgttcagcttgcacatccggaccggcaggttgctgttgttacgggcgaaggctcgattcagatgtgtatcgaagaactgtcaacttgcacgcaatacaacatgcctgtgaagatcattaacttgaacaatgctgctttaggtatggtcaagcaatggcaggatatgcagtacggcggtcgttacgcggcctcaacctatgcggattcgctgccagattttgtcaagctcgccgaagcctatggtcacgtgggaatgatcgtcaccgatccatcagagctgaaagctaaaatggaagagtgtttcgcgatgaaggatcgcgtggtgtttatggatatctatatcgatccagatgagcatgtctacccaatgcagataccaactggctcaatgaaggatatgattttgagtaagacggagcgtacgaagtgag

SEQ ID NO: 232078 - DNA, 902 bp, Unknown
  Bacterial polypeptide expressing nucleotide sequence isolated from the Sargasso Sea
taaagaaaaaaaattaaatggaaaatcgcataataaattttctcaaaatcaaattgatgaattagtaaaattattaagcaaggcaaaaaaaccaattatttatagtggcggaggagtgattaactcaggactaaaagcaagccaggctttaagagaatttgtcgagttaactggttttcctataacttctacacttcagggtttaggtgcataccctggagatgataatcaatttttaggaatgcttggtatgcatggaacttacgaagcaaataatgctatgcatgattgtgatcttttaattaatattggcgcaagatttgatgatcgtattactggaaaaatagatgagttttcaccaaattcaaaaaaggttcacattgatattgatccatcatcaattaataaaattatcaaggttgatctagcaatagttggggatgtttcgagcgtaataaataaaattaataaaacaattaccaaaagtaataatggcaatataaaatcaaataaatcaaatattgctaagtggtgggagcaaattgaaaagtggagagaaaaaaattctcttaattttgttaacagtgatgaaagtattaaaccacaacatgctgtccaaagactttatgaattaaccaagagcaaagatacctatattactactgaagtggggcaacatcaaatgtgggcagctcagcattataaatttaataaaccaaatagatggatgacatctggtggcctaggaaccatgggatatgggttaccagcagctgttggtgtacaaattgctcatcctgaaaaattagtaattgatattgcaggagaggcttcagttttaatgaccatgcaagaaatgtctacagcagttcaatacaatcttcctataaaaatatttattt

SEQ ID NO: 232079 - DNA, 791 bp, Unknown
  Bacterial polypeptide expressing nucleotide sequence isolated from the Sargasso Sea
tgtttcattaactggtttcccaataacatctaccttacagggtcttggtgcttaccctggagacgatcctttatttttggggatgctaggaatgcacggaacatatgaggcaaacaattctatgtatagttgcgatctgatgataaacatcggagcaaggtttgatgacagaataaccggaaaagtagatgagttttcacctaagtcaaaaaaaattcatgtggatattgatccatcgtctattggtaaaaatattaaggtagatttagcagttgtcagtgatgttggtagttttttaaaagctttaaataaaagaattaaagaaaaacataaagattttttaaactccaataaacaaaatatctctaaatggtggaaagatatagataagtggagacaaaaaaaatctttaagcttcaaaaacagcaaagaagtaataaaaccacagtatgcagtgcaaagactttatgaattatcaaaaaatcaagacacctacatcactactgaagtaggtcagcatcaaatgtgggctgctcaacattacaaatttaataaaccaaacagatggatgacttcaggtggacttggtaccatgggatacggtttaccagcagcagtgggagttcaaattgctcatccagacaaactggtcatcgatattgctggagaagcatctgttttgatgaccatgcaagaaatgtcaactgctgtgcagtacaaattaccaattaaaatatttattttaaataatcaatacatgggaatggttagacagtggcaagaacttttac

SEQ ID NO: 232080 - DNA, 625 bp, Unknown
  Bacterial polypeptide expressing nucleotide sequence isolated from the Sargasso Sea
aatgtctaaattatattcaggtgctgaaattgtatttaaatgtctggaggatcaaaaagttgattttatttttggttatcctgggggtgcagttttaccaatttatgatgaactaaaaaatcataattcaattaaacatattttggtaagacatgaacaaggagcaggacatgcagcggaaggctatgcaagatcatcaggtaaacctggtgtagttttagttacctcaggaccaggagccaccaatgtagtaacagctttaacagatgcatacatggattcagttcctttagtttgtatttcgggacaagtaccaacacatttgattggtacagatgcttttcaagaatgtgatacaactggaattacaagaccttgtacaaagcataattggttggtcaaagatgtaaaagatttatcaaaaacaattcatgaagcttttagagtcgcaacttctggaagacctgggccagtactagtggatattccaaaagatattcaatttgcaaaaattgcatattctaaacctaaatttaataaaaaattgaatggaaaaactttaaatcattttactaaaaaggatattgatgaattgattgacttaatgaataagtcaaagaaaccc

SEQ ID NO: 232081 - DNA, 532 bp, Unknown
  Bacterial polypeptide expressing nucleotide sequence isolated from the Sargasso Sea
gatgtaacagagcttttgaagtcattaataaaaagatttaaagaaaaaaacaaaaattttgttaattctaataagcaaaaaacatcaaaatggtgggaacaaatttcaaaatggagagaaaagaaatctttaaactttattaatagcgataaaattataaaacctcaatatgcagttcaaagattatatgagctaacaaaaaaccaggatacatttgttactactgaagttggtcaacaccaaatgtgggcagctcaacattacaaatttaataaacctaacagatggatgacatcgggagggcttggaacaatgggctatggacttccggcagctataggtgttcaaattgcaaatccaggaaaattagttgtcgatatagcgggtgaggcgtctgttttaatgacaatgcaagagatgtctacagccgtacaatatagattgccaattaagatatttattttaaataacgaatacatgggcatggtgagacaatggcaagaacttttacatgaaaaaaattattctgaaa

SEQ ID NO: 232082 - DNA, 325 bp, Unknown
  Bacterial polypeptide expressing nucleotide sequence isolated from the Sargasso Sea
aatgtcaaaattatattcaggagctgaaattttatttaagtgccttatggaccaaggtgtaactaatatatttggttatcctgggggagcggttcttcctatatatgatgaattaaaaaattttaatttaattaaacatattttagtcaggcatgaacagggtgcaggccatgcagcagagggatatgcaagatcgtcaggaaaacctggtgtgctacttgtgacttctggtccaggagcaacaaatgctgtaacagcattaacagatgcgtacatggattcagttcctttagtttgtatatcaggtcaagtaccaactcattta

SEQ ID NO: 232083 - DNA, 754 bp, Unknown
  Bacterial polypeptide expressing nucleotide sequence isolated from the Sargasso Sea
ggtgcagaagtaatattgaaggttctgaaagatcattcggttgatcatattttcggatatcctggcggcgcagttttaccgttatacgatgaaatttttaaaagtaatgactctccgcaacacattttagtgcgccatgagcaaggcgcagctcatgcagctgaaggttatgcaagatctacaggaaaaccaggagttttagtagtaacttcagggcctggggctacaaatgctgttacaggtttaacggatgctatgatggattcaataccattggtatgtatttccggccaagtaccaacacatttaattggtactgatgcttttcaggaagcagacaccgttgggataactagaccatgtacaaagcataattggttggttaaagatcctgatgaattatgtcgtattttacatgaagctttttatgtagccacatcaggaagacctggcccagttgttgttgatattccaaaagatattcaatttgctgatgcaaattactttccgccaaatgaaataaagactgaaaattataatcctcaaattaaaccagatatgcgttttattgatgaagcaatagaattaatggcaaatgcaaagaaaccggttttttatactggcggtggtgttataaattcaggttcagaagcaagccatttattaaaagaacttgttttactaactggctttccaattactagcactcttatgggtttaggagcatttccatcaacagaaaataattggcttg

SEQ ID NO: 232084 - DNA, 622 bp, Unknown
  Bacterial polypeptide expressing nucleotide sequence isolated from the Sargasso Sea
aatgtcaaaattgtattcaggtgctgaaattgtttttaaatgtttggaagaccaagatgtgaaatttatttttggttatcccggaggtgcagttttaccaatttatgatgagttaaaaaattttagttttattaagcatattttagttcgtcatgaacaaggagcaggtcatgccgccgaaggttatgcaagatcatctggaaaacctggagtgcttttagttacgtcgggaccaggagcaaccaatgcagtcactgcattgacagacgcttatatggattcaatcccattagtttgtatttcaggacaagttccaacacatttaattggaacagatgcatttcaagagtgtgacactaccggaataaccagaccttgcacaaaacataactggctagttaaagatattaaagatttaggcaaaacaatacacaaagcttttgaagtggcaacatcgggaagacccggtccagtattagttgatattccaaaagatgttcaattccaaaaaacgagttataaaaaatttacaaaacaaaaaaaattgaacggtaaaattcataataaattttcacaaaaagaaattaatgaattaataaaattaatgagcaatgcaactagg

SEQ ID NO: 232085 - DNA, 298 bp, Unknown
  Bacterial polypeptide expressing nucleotide sequence isolated from the Sargasso Sea
aatgcttttaagtggtgctgaaattgttataaagtctttaaaagaattgaatgtagagtatatatttggatatcctggtggtgcaattcttccattgtatgatgagatattcaaacaaaataagataagacacatcctggtgagacacgagcaaggagcagtacatatggctgaaggttatgctaggtctactggaaaagtaggagtagttttagttacatctggtccaggtgctacaaatgcggttactggtttaaccgatgcattaatggatagtgttcctatattatgtttaaca

SEQ ID NO: 232086 - DNA, 430 bp, Unknown
  Bacterial polypeptide expressing nucleotide sequence isolated from the Sargasso Sea
aatgctgtctggcggagatatgatcgtccgcgctctagaagacgagggcgtcgaatacatcttcggataccccggtggagcggcgcttcacatctacgatgccttattcaaagcggagaaagtacctcatattctggttcgccatgagcaggccgcgacccatgcagccgatggctatgcccgcgcgacgggaaagcctggtgtggtgctggtcacatccgggccgggtgcaaccaatgccattaccggtattgctacggcttatatggattccatcccgctggtggtgatctccggtcaggtacagagtcacttaattggtgaagacgcttttcaagagactgatatggtcgggatctcacgacccatagtgaagcacagttttctgatccagaaggtggaggatattcccctcatcatcaagaaggcg

SEQ ID NO: 232087 - DNA, 352 bp, Unknown
  Bacterial polypeptide expressing nucleotide sequence isolated from the Sargasso Sea
atgtctaaattatataccggtgcagaaattgtatttaaatgtcttgaagatcaagacgttgaatatatttttggttatccaggtggtgcagtcttaccaatttatgatgaacttaaaaatcattcatcaataaagcatatacttgtaagacatgagcaaggagctggtcatgctgcagaggggtatgcaagatcatcaggaaaacctggagtagttttagttacatctggaccaggtgctactaatgttgttacagcattaaccgatgcgtatatggactcagttcctttagtttgtatctgtggtcaagtacctactcacttaataggcaccgagcattccaagagtgtga

SEQ ID NO: 232088 - DNA, 581 bp, Unknown
  Bacterial polypeptide expressing nucleotide sequence isolated from the Sargasso Sea
tttgaaagtaagggatttttctcctgaagccttcatcacaactgatgtaggtcaacatcaaatgtgggctgctcagtatctaagaaatgctccgagaaaatggataagtagtgctggtttaggaacgatgggctttggattgcctgcagccatgggagtaaaggcagctcttcctaacgaagaggttatctgcatagctggagatgcaagtgttttgatgaatatacaagaattgggtactttatctcaatatggtttaaatattaaattagtgatcataaataatcgctggcaggggatggttagacagtggcaagaaagcttttatgaagaaaggtactcctcctctgatatgagttgtggagaacctgatttcgttaaactcgcggaatcgtttggagtaaaaggcttcttaatttcagagaggaaacaattattaaatgagtttaaatctgctttagattttgatgggccagccttaataaatgtacgagtgaggagaggtgaaaattgctatccaatggttcctccaggtaaaagtaatgctcaaatggtgggttacgtgaacagtgaaagctgat

SEQ ID NO: 232089 - DNA, 885 bp, Unknown
  Bacterial polypeptide expressing nucleotide sequence isolated from the Sargasso Sea
tggtcgaccaggaccagtgttggttgatattccaaaagatattcaatttgcaaagacaaactattcaaaaccaaaaaaaataaaaaaagttaatggtaagtctcataacaaatttactcagaatgaaattaatgaattaattaatttaatttcaaaagcaaaaaagccaatgatttatactggaggtggtgttataaactctggaccaaaagcgagtgaagcattaagagagtttgtaagactagtaggttttcctattacatctacacttcaaggtttaggggcgttcccaggtgatgacaatcaatttattggaatgcttggtatgcatggaacttatgaggcaaacaatgcaatgcacgattgtgatttgttaattaatatcggggctagatttgatgatagaataactggtaagatcgacgagttttcccctaaatcaaaaaaagttcatatcgatattgatccatcatcaattaataagattattaaagtagatttagctatagttggtgatgtaaacgaggttttaaaatcgactataaaaaagattaatcaaaaacaaaatggtattaaagtttcaaataaacaaaaaatatcaaaatggtgggagcgaatacaaaaatggcgtgagaaagactctttaggttttatcaatagtgataaaagtataaaacctcagcatgctgtacaaagattatatgaactcacaaaatctcaggatacttttataactacagaagtgggtcaacatcaaatgtgggcagcacaacattataagtttaataaaccaaatagatggatgacatcaggtggtcttggaactatgggctacggacttccagcggctgtaggtgttcaaattgcacacccagataaactagt

SEQ ID NO: 232090 - DNA, 400 bp, Unknown
  Bacterial polypeptide expressing nucleotide sequence isolated from the Sargasso Sea
atggataaaagtaataagtctggtgctgaagcattaattcactcccttcatctagaaggagtagagcttatgtttgggtatcctggaggagcagctctacatatttatgatgccatatttaatcaaaactatgttgaccatattctagttaggcatgaacaaggcgcagttcatgctgcagatggatatgccagagctacaggcaagcctggtgtggctttagtaacatctggtccgggtgctaccaatgcaattactggcttagccacagcttatatggattcaactcctatagtagttatttcaggtcaggttaaatcagggttaatagggaccgattcctttcaggaaacagatatgatcggagtttcacgacctatagtgaaacatagttttctcg

SEQ ID NO: 232091 - DNA, 777 bp, Unknown
  Bacterial polypeptide expressing nucleotide sequence isolated from the Sargasso Sea
aattttttgggtatgcttggaatgcacggaacttatgaggcaaatttagctatgtatcactgtgatgttatgattaatatcggggctagatttgatgacagggttactggaaggttagattcgttttctcctaactccaaaaaaattcatgtggacattgatccatcatcaattaataaagtagtacaagttgaagttcctttaattggagatgtaaagtatattttaaaaaatattttaatagaattagataaaaaaattttagaaggaggaacaaataataataaatcttggtggtcacaaattgatcaatggaaatcgaaaaattcgctatattttaaacaatctggtgaaacaatcaaacctcaacatgctgtgaaatgtttgtatgataaaacaaaaaaagttaacccctttgttactactgaagttggtcagcatcaaatgtgggctgcacaatattttggtttttctaaacctaatcattggatgacatcaggtgggttagggactatgggttatggcttaccttcttcaattggagtgcaaattgctcatccaaaatcattagttatagacatatctggtgaggcttcctttttaatgaatatgcaggaactttcaacaattgttcaatacaaactacctgtaaaagtatttatattgaataatcaatggatgggcatggttagacaatggcaagagttaattcacggttcacgttatagagaaagctacactgaatccttgccagactttgttaaactagctgagagt

SEQ ID NO: 232092 - DNA, 844 bp, Unknown
  Bacterial polypeptide expressing nucleotide sequence isolated from the Sargasso Sea
ggagctgaaatagtctttaaggtattggagcatcataaagtggaacatatttttgggtatccaggcggtgcagttcttccaatatacgatgaattaaaaaatcatgaaaaaataaaacacattttagcaagacacgaacaaggtgcaggacatgctgctgaaggttatgcacgatcatcaggaagaccaggtgtacttttagttacatctggcccaggagcaactaatgcagtgactgctttaacagatgcatacatggactccattccacttgtatgtatcagcggtcaagttccaacgcatcttattggaacagatgcttttcaagaatgcgatactactggtattactagaccttgtacaaaacataactggttagttaaagacataaaagatctcgccagaattatgaatttagcttttgaagtggccacaacaggaagaccaggtcctgttctagttgatataccaaaagatatacaatttcagaaaactgaatttaatttaaaaaataatagtaagaaaaaaataaatggaagaataaacggtaaaattaatttaactgaaatagataaagtaattaaccttataaaaaaatcatcaaaaccaattttttatactggaggcggtgtaattaattctggcccagacgcaagtaagttgcttagggaattagtttcacttactggatttcctataacatccactttacaagggttaggtgcttatcccggagaagatcctcaatttttaggaatgttaggtatgcatggaacatacgaagcaaataatgcaatgtacaattgtgatctaatgatcaatattggagcaagatttgatgata

SEQ ID NO: 232093 - DNA, 813 bp, Unknown
  Bacterial polypeptide expressing nucleotide sequence isolated from the Sargasso Sea
aatgacagctaattatattaatggagcagaggctgtaattaaagccctagaggaaaacggtgttgaggtaatattcggataccctggtggagctgtattacctctctatgatgccttattcgaaaataaaaaaattaaacatatattagttagacatgaacaagccgccgttcatgcagcagaaggttatgctagatcaacaggtaaagtgggatgcgttttagttacttctggtccaggtgctactaatgcaattactggattaacagatgcattaatggactctgttccaataatctgtctaagtggacaagtgcctactcatttaattgggaccgatgcttttcaagaagctgatactacaggcatttcaagaccatgtacaaaacataattatttagtaaaagacgctactcaattatgtgaaattattcataagtcttttgtgattgcttcttctggaaggcctggtccagttcttattgatcttccaaaagatatccaactttcaaaagtaaaatatgtaaataaaaatactaaaataaaaaaacataataatgataattcttcaaatatagatgaaagtttaattaataaagttgcaacactgctattacaggcagaacgacctataatttatggtggtggaggtgttgtaaattctggaccagaggcttccaaacttttaactgaattagtaaatatattagattgtccagtaacacttactctaatgggtttgggttgtgtgccaaatacaaataaaaattttttagggatgttaggtatgcatggaacatatgaagcaaattt

SEQ ID NO: 232094 - DNA, 793 bp, Unknown
  Bacterial polypeptide expressing nucleotide sequence isolated from the Sargasso Sea
atgccaaaattatattcaggagctgagatagtattcaaatgtttggaagatcaaaatgttagtcacatatttggttatcctggaggagcagtccttccaatatatgatgaattaaaaaattttaattcaataaaacatattttagtaagacatgaacagggcgcagggcacgcagcagaaggttatgcaagatcaactggcaaaccaggtgtactgttagtaacttcaggtcctggagccaccaatgctgttactgccttaacggatgcctatatggactctgtgccgttagtttgtattacaggacaagttccaactcatttaattggtacggatgcatttcaagaatgtgacacaacaggaattactagaccttgtactaaacataactggttagtaaaagatgttaatgacttagctggaataatgcataaagcttttgaagtcgcaacaacaggtagaccaggaccagttttagttgatatacctaaagatattcaatttcaaaaatccaaatacaaaaattataaaaataataaaaatttaaatggtaaatctcatgataactactcacaaaaaaatattgatgaattaataaatttaattagcaaagcaaaaaaaccaattttttacactggaggtggagtaataaattcaggaacaaaagcaagtgaacttttaagagaacttgtgtatttaacaggttttccaataacttcaactttgcagggtctgggttgtttccctgctgacgataatcaatttttaggaatgttaggtatgcatggtactt

SEQ ID NO: 232095 - DNA, 841 bp, Unknown
  Bacterial polypeptide expressing nucleotide sequence isolated from the Sargasso Sea
ggaggtggggttataaactctggaccaaaagcgagtgaagcattgagagagtttgtcaggttaataggttttcctattacatctacacttcaaggtttaggagcgttcccaggtgatgacaatcaatttattggaatgcttggtatgcatggaacttatgaagcaaacaatgcaatgcatgattgtgacttgttaattaatattggagccaggtttgatgacagaataacaggaaagatcgatgagttttcccctaaatcaaaaaaagttcatattgatattgatccatcatcaatcaacaagattattaaagtagatttagctatagttggtgatgtaaatgaggttttaagatcgactataaaaaagattaatcaaaaacaaaatggtattaaagtttcaaataaacaaaaattatcaaaatggtgggaacagatacaaaaatggcgtgagaaagactctttagggtttatcaatagcaataaaactataaaacctcaacatgctgtaaaaagattatatgaactcacaaaatctcaagatacctttataactacagaggtaggtcaacatcaaatgtgggcggcacaacattataagtttaataaaccaaatagatggatgacatcaggtggtcttggaactatgggctacggacttccagcagctgtaggtgttcaaattgcacatcctgataaactagttatagatattgctggggaagcatctgttttaatgacgatgcaggaaatgtccactgcagttcaatataatttaccaattaaaatatttgtcatgaataatcagtatatgggaatggttagacagtggcaggaattac

SEQ ID NO: 232096 - DNA, 673 bp, Unknown
  Bacterial polypeptide expressing nucleotide sequence isolated from the Sargasso Sea
ttagaaaaaattaatttctggaaaaataatcatcctttatttgtacctccggaagaaggggaaatttatcctcaagaagttcttttgaaagttagagatatttctccagaagccttcataacaaccgatgtaggtcaacatcaaatgtgggctgctcaatacctcagaaatgcaccaagaaaatggatcagtagtgccggattaggaacaatgggttttggattgcctgcagctatgggagtaaaggctgccttgccaaatgagcaagttgtctgcatagctggtgatgcaagtgtattgatgaacattcaagaactgggtactttatctcaatatggtttaaaaattaaattagtgatcataaataatcgctggcaagggatggtaagacagtggcaagaaagcttttatgatgaaagatactcttcttctgatatgagttgtggagaacccgactttgtgaaactagcagaatcttttggagtaaaaggttttttaatttcagagagaaaacaattacaagatgaatttaagtctgctttaaattatgatggaccagccttaataaatgttcgagtacgtagaggtgaaaattgctatccaatggttcctccaggtaaaagtaacgctcaaatggtgggttatgttaacagtgaaagtagaaattgctaat

SEQ ID NO: 232097 - DNA, 448 bp, Unknown
  Bacterial polypeptide expressing nucleotide sequence isolated from the Sargasso Sea
aatgtcaaaattatattcaggcgctgaaattgtatttaaatgtcttgaagatcatggcgttgaagtagtctttggttatccaggtggagcagtgcttccaatatacgatgagttaaaaaattttccgtctgttaaacattttttggttagacacgaacaaggtgctggacatgcagcagagggatacgcaagatcttctggaaaaccaggagttgctttagtaacttcaggacctggcgcaacaaatatagtaactgctttaaccgatgcatatatggactctgttccaatagtttgtatatctggacaagtaccaactcatttaattggaactgatgctttccaagaatgtgatacaactggtattactcgaccgtgcaccaaacataactggctagtaaaagatgtaaaagatttagcaaaagttatacatagagcatttgaagtt

SEQ ID NO: 232098 - DNA, 679 bp, Unknown
  Bacterial polypeptide expressing nucleotide sequence isolated from the Sargasso Sea
gttaattctctaaactttattaatagtgataaaacaataaaaccacaatttgcaattcaaagactttatgagttaaccaaaaataaagatacatttattacaacagaggttggtcagcatcaaatgtgggctgcccaacattataaattcgataaaccaaatagatggatgacatcaggtggtcttggcacaatgggttatggtttaccagcggcagttggtgttcaaatagctcatcctgataaattagtagttgatattgcgggagaagcttcagttctaatgacaatgcaagaaatgtccacagctgttcagtataatttaccaataaagatatttattttaaataatgagtacatgggcatggtaagacaatggcaagaattacttcatgaaaaaaattattctgagagttatactgcggctcttcctgactttgtaaaactagcagaagcttatggatgtgttggaataagagcgaaaactccggatgaattagatcaaaaaattcaagaaatgattgatgtaaaaaaacctgtaatatttgattgtttagttgataaagaagaaaattgttttccaatgattccatcaggtaaacctcataatcaaatgttgttggggcctaatgatcaaaaagaaaacaagataacaggaaaaggaaaaactctagtttaat

SEQ ID NO: 232099 - DNA, 847 bp, Unknown
  Bacterial polypeptide expressing nucleotide sequence isolated from the Sargasso Sea
taaacataattggttagttaaagatattaacgatctgtctaggatactgcatgaagctttctatgttgcatctaatggaagacctggtccggtattagtagatataccaaaggatattcagtttcaaaccggaacatatattggtcctgatacggtaaaacacaaatcatatagacctaaattaaaagctaatattgatatgattgatgatgcattaaaattaattgctaatgcagaaaaaccaattttttatactggtggtggggttattaattcaggcaatgcagctgttcagcttcttagggaatttgtaagacttactggatttccaattacatcaactttacaaggactaggggcatttccaggtgatgacaatcaatttgtcggtatgttggggatgcatggtacttatgaagcaaatatggcaatgaatatgtgcgatctaatgattaatataggagctcgctttgacgacagaattacaggaaagattgatgagttttctcctaactcaaaaaaaattcacgtagatattgatccttcttccataaataaagttatttcagtagatgttggattggccggtgatgtagcacatgttcttgaagatgcaataaagttatggaaatcaaaggtttacaaagtcaataaacttgctgttaaagattggtggaagcaaatagataaatggcgaaagactgactcacttaattttaaagaagacaaagaaataattaagccgcagtacgctatacagagactctatgagttaactaaagacacagatgcatttataacaactgaagttggacaacatcagatgtgggcagcgcaacattacaag

SEQ ID NO: 232100 - DNA, 702 bp, Unknown
  Bacterial polypeptide expressing nucleotide sequence isolated from the Sargasso Sea
ctctaaaaaacaaaattacttgtcagacgaaaaactggttagaaagaattgatttttggaaaaacaaacaccctttatatgacccgcccaaagaaggagaaatttatccgcaggaggttcttttaaaagtgcgggaaatttcaccagaatcttatgtaactacagatgtaggacaacatcagatgtgggcagctcaatatcttaggaattctccaagaaaatggattagtagtgcaggcttaggaactatgggttttggattgccagcggcaattggagtaaaagcagccttacctaattcagatgtaatttgtattgcaggagatgcaagtgttttaatgaatattcaagaattaggaactttatcgcaatatggtctaaaggtgaaattgattattatcaataatcgctggcaagggatggtaagacaatggcaggaaagtttctatgatgaaagatattcctcatctgatatgagttgtggtgagcccgattttgtaaaacttgctgagtcttttggagttaaaggatacttaatttctgatagaaaacaattacagaatgaattaaaaaatgcgattgatcatgacggccctgccttgattaatatccttgtcagaagaggtgaaaattgttatccaatggttcctcctggtaaaagtaatgctcaaatggttggatatgttaattgtgaagactaat

SEQ ID NO: 232101 - DNA, 814 bp, Unknown
  Bacterial polypeptide expressing nucleotide sequence isolated from the Sargasso Sea
catattttagttagacatgaacaaggcgcaggacatgcagcagaaggttacgcaagatcatctggaaagccaggagttgttttagtaacttcaggaccgggtgcaacaaatgttgtaacagctttaactgatgcatatatggactctgttccattagtttgcatctcaggtcaagttccaactcatctgattggtactgacgctttccaagagtgtgataccactggaataacaagaccatgtactaaacataattggttagtaaaagatataaaagatttgtcaaaaattttgcatgaagcatttctagttgcaacaacaggaagaccagggcctgtattagttgatattccaaaagatattcaatttgctaaaaatgtttattcaaaaccaaaaaaagagaaaaaatttaatggtaaatctaataataaatttacgcaaaatgaaatagatcaattagtagatttgatatctaaagcaaaaaaacctgtaatttatactggaggtggagtaataaactctggtccaaaagcaagtgagtctttgagagaattagttagacttattgggtttcctattacttcaactttacaaggtttgggggcattccctggtgaggataatcaatttattggaatgttaggaatgcatggaacttatgaagcaaataatgctatgcatgattgtgatttactaattaatattggtgctcgatttgatgatagaattacaggtaagatagatgaattctcaccaaaatctaaaaaagttcatattgatattgacccatcttctattaataaaattataaaag

SEQ ID NO: 232102 - DNA, 772 bp, Unknown
  Bacterial polypeptide expressing nucleotide sequence isolated from the Sargasso Sea
catgaccgccgccgccttcaaacctcaagccgagaccgctccccagtcgggtgcgcgtctgctggtctccaccctggagcggctgggggtggaggtggtgtttggctatccgggcggcgccatcatgccggtctatgacgccctggccggctctaagctaaagcacatcctggtccgccacgagcagggcgcggccttctcggccgacgcctatgccaggaagagcggcaaggtcggggtctgcatggcgacgtcaggccccggcgccaccaatctggtcaccggcatcgccaatgcgatgatggattcggtgccgatcgtctgcatcaccggcaatgtcgcccaaggcctgatgggcactgacgcctttcaggagatcgacatcctgggcgtcaccctgccgatcgtgaaacattcgatcctggtccgctcggccgccgaggttcccgccgcgatcgaggaagccttccatatcgctcgctcgggccgccccggtccggttctggtcgatctgcccaaggatgtgcagttcgagactaccggcgaggactacggtttctccattcccaaccagacgccgcgcgtcgatcacgacgccatcgccgccgccgaggccgcgatccgggctgcgaagaagccgctggtctatatcggcggcgggggtgaagatcggcggcgcgaccgaggccctgcgcgccttcgtcgccgcgaccggcattccccaggtctcgaccctgaacgccctgggcaccatcccgaccgatgcgcccgg

SEQ ID NO: 232103 - DNA, 843 bp, Unknown
  Bacterial polypeptide expressing nucleotide sequence isolated from the Sargasso Sea
gatactatttttggttatccaggtggagcagtattgccaatatatgatgagttaaaaaattttagttctgtaaaacatattcttgtaagacatgagcaaggcgctggccatgcggcagaaggttatgcgagatcatcaggaaaacctggtgtacttttagtaacttcgggacccggtgcaaccaatgcagtgacagcactaacagatgcctatatggactctgttcctttagtttgtatctctggacaagtaccaacgcatttaattggaactgacgcatttcaagaagcagacacaacgggaataacaagaccatgcacaaaacataattggctagttaaagatatcaaagatttatcaaaaataattcataaggcttttgaggttgcaaccactggaagaccaggaccagttttagttgatattccaaaagatattcaattccaaaaaacaaattatataaaatataaaaaacaaaaaaaattaaatggaaaatcttttaataaatttaataaaaatgacattaatgaactaattaaattaatgagcaaagctacaaaaccaattttttatactggtggtggtgttataaactctggtcctaaagcaagcgaattattaagagagcttgtaggcacaacaggttttccaattacttctactttacaaggactaggagcttatcctggtgaagatagccagtttttaggaatgcttggaatgcacggatcttatgaagcaaacaatgcaatgtaccattgtgatttgatgataaatattggcgcaagatttgatgatcgaataaccggaaaactcgatgagttttctcctaattctaaaaaa

SEQ ID NO: 232104 - DNA, 320 bp, Unknown
  Bacterial polypeptide expressing nucleotide sequence isolated from the Sargasso Sea
aatgcaactgacaggagctcaaatagtttgtgagagtttattgcaagagggagtagacaccatattcggaatacctggtggcgcaatccttcccttgtatcaaacgttgccggaatatcctggcttgaagcatatattggttaggcacgagcaaggtgcagcgcatgctgcggatggctattcgagagcgacaggaaagcctggaatatgctgggccacatcaggcccaggagcaacaaatctagtaaccggcataacaactgctgctatggattcagttcctatggttgtgattacggggcaggtgaagagatccgcaa

SEQ ID NO: 232105 - DNA, 979 bp, Unknown
  Bacterial polypeptide expressing nucleotide sequence isolated from the Sargasso Sea
taattataaaaaattaaataagcaaaaaaaattaaatgaaaaagcaaaaaatttattttcaaataatgaaattaatcaattaattaaattaatggataaatcaaaaaaaccaattttttatactggtggaggtgttataaattcaggaccaaaggctagtgaactattaagagaattagtttatgcaacaggctttcctataacttcaactcttcaaggtctgggatctttcccaggtgatgataatcaatttttagggatgttaggaatgcatgggtcttttgaagctaacaatgctatgcatgattgtgatttaatgattaatgttggcgctagatttgatgatagaattactggaaaaattgacgaattctctccaaattccaaaaaagtacatattgatatagatccttcatcaattaataaaaatgttaaagttgatttaccaatcattggagatgtgtcgaaagtaatatctgaaatattaaaaactataaaaaaaagtaaaccaaattttgcaagctctaataagcaaaagatttccaaatggtgggaaaaaattcaaaaatggagatctgtaaattcttttaattttgaaaatagccaggaaactattaaaccacaatatgcaattcaaagattatatgagctaacaaaaaacaaggactcttatgtaactactgaagttggacaacaccaaatgtgggcagcacaacattataaatttgacaaacctaatagatggatgacatctggaggtttaggaactatgggttatggtttgcctgcagctgtaggagtgcaagtagctcatcccaaaaaattagtaattgatattgctggtgaagcatcagttctcatgacaattcaagaaatgtccactgcggttcaatatagtttgccaataaaaatatttattttaaataatgaatatatggggatggtaagacaatggcaggaacttttacatgataaaaat

SEQ ID NO: 232106 - DNA, 652 bp, Unknown
  Bacterial polypeptide expressing nucleotide sequence isolated from the Sargasso Sea
aatgtcaaaattgtattcaggagctgagattgtattcaagtgcttggaagaccaagatgtagaatttatttttggttatcctggtggcgctgttcttcctatttatgatgaattaaaaaattttaattttttaaaacatattttagttcgtcatgagcaaggtgccggacatgcagctgaaggatatgctagatcttctggaaagccaggagttcttttagttacctcaggccctggagccactaacgctgtaactgctttaacagacgcttatatggattcagttccattggtttgtatttccggacaagttcctacacacttgataggtactgatgcttttcaagaatgtgacacgacaggaataacaagaccatgtacaaagcataattggttagttaaagatgtaaaagatttagaaaaaacaattcataaagcattcgaagttgcaacaacaggtagacctggacctgttttagttgatattccaaaagatgttcagtttcaaaaaacaaattatacaaaatttaaaaagcaaaaaaaaacaaacggcaaagtccataatcatttttcacaaaaggacattgacgaattgattgagttaatgagcaaagcctctaagccaattttttatacaggcggaggtgttata

SEQ ID NO: 232107 - DNA, 688 bp, Unknown
  Bacterial polypeptide expressing nucleotide sequence isolated from the Sargasso Sea
aatggaaagaaaaagatcgctttcttattcaactgatgaagttattatcaaacctcaatatgcaatagaaaaactttataaagttacaaaatcatttgatccttatgttactacagaagttggccagcatcaaatgtgggcagctcaatattttggattttcaaaaccaaatcactggatgacatctggagggcttggaactatgggatatggattaccagcttcgattggagtacaaatagcaaaccctggttctcttgtaatagatatagctggggaagcttcttttttgatgaatatgcaagaattatctaccattgtacaatatagcttaccaattaagatatttatcattaacaatcaatggatgggtatggtaagacaatggcaagagttaattcatggatctagatatagtgagagctatacagattctctacctgattttataaaattagcagaaagcttcggcatcaagggaattagggctgaaaagatggatgagttacaagatgttattgatgagatgttagagcatcaaggtccagtcttggcagacatttgtgttgccaaagaagaaaattgttttccaatgataccgtctgggtctgcccattatgatatgattttaaataaagaagataagaagaatcaaaaagtttcatcagatggattagcgcttgtttga

SEQ ID NO: 232108 - DNA, 784 bp, Unknown
  Bacterial polypeptide expressing nucleotide sequence isolated from the Sargasso Sea
tttaacatcaacactaaaaactttcaaaaaatctaaaaataactttactaaatctaacaaacatcaaatatctaattggtgggagcaaattcagaaatggagatctaaaagatcattagactacatcggtagtgaagaaactattaaacctcaatatgcgattgaaagattatatgaacttactaaagataaagatacttatataacaactgaagtaggccaacatcaaatgtgggctgctcaacactacaaattcaataaaccaaatagatggatgacttctggaggtcttggtacgatgggatatggattgccagcagcagttggagtccaaattgctcatccaaagaaattagtaattgatattgctggcgaggcgtctgttttgatgactatgcaggaaatgtcaactgctgttcagtacaatttgcctataaaaatatttattttgaataatgagtacatgggaatggtaagacaatggcaggaattactacatgataaaaattattcagaaagttatacagctgcattaccagattttgttaaaatggcagaagcttacggttgtgtaggcataagagcaaaaacacctgaagaattagatgataagattattgaaatgttaaatacagatcgaccagtaatatttgattgccttgtagataaacaagaaaactgttttccaatgataccttctggaaaacctcataatcaaatgttacttggtcctaaagatcaaaaagaaaaaaagattactggaaagggtagaacactggtttaa

SEQ ID NO: 232109 - DNA, 931 bp, Unknown
  Bacterial polypeptide expressing nucleotide sequence isolated from the Sargasso Sea
tacagaccaaaattaaaagcaaacatagataacatcgatgatgctctaaaattaatttcagatgcagaaaagccaatcttttacaccggtggaggtgtcattaattcaggtaatgccgcggttcagctattaagggagtttgtacgtataactggattcccgattacttcaaccttacaaggccttggagcatttccaggagacgatactcaatttattggaatgcttggcatgcatggaacatatgaagctaacatggcaatgaataaatgtgatctaatgataaatattggcgcacgttttgatgatagaataactggtaaaattgacgagttttctccaaattcaaaaaaaattcatatcgacatagatccatcatctatcaataaagtagtggatgttgacgtagctctagttggcgatgttgcgcacgtattggaagacgcaatcaaattatggaaatctaaagtttacaaagtcagcaaaactcaagttaaagaatggtggaagcaaattgatagatggaaagaagtagactcattaggttttgacaaggataaaaagactatcaagccccaacatgcaatacagcgattatacgaaattacaaaagaaaaggatgttttcgttactacagaggttggtcaacatcaaatgtgggctgcccaatactataaatttaatagaccaaacagatggataacttctggtggtttagggacaatgggatttggtttgccagcagcgataggcgcacaagttgcacatccagataagctcgttattgatatagctggagaggcctcgattttgatgtgcatacaagaaatgtcaacagctattcagcacaagctgccagtaaaaatatttattataaataatcaatacatgggaatggtaaggcaatggcaggagcttcttcatgataaaa

SEQ ID NO: 232110 - DNA, 718 bp, Unknown
  Bacterial polypeptide expressing nucleotide sequence isolated from the Sargasso Sea
aatgtctaaattatattctggcgctgaaatagtatttaaatgtcttgaagatcaagatgttaagtttatttttggatacccaggaggtgcagttttaccaatttatgatgaattaaaaaatcattcgtcaattaaacatattttagtaagacacgaacaaggagctggacatgcagctgaaggttacgcaagatcttcaggaaaacccggggtagttttagttacatcaggaccaggagcaacaaatgttgttactgctttaaccgacgcttacatggactcagtgccattagtgtgtatttcagggcaggttccaacacatttaattggaactgatgcttttcaagaatgtgatacaacaggaataacaaggccgtgcacaaaacataattggttagttaaagatataaaagatttgtcaaaaattttgcatgaggcttttattgttgccacaacaggaagaccaggacctgtattggttgatattcctaaagacattcagtttgctaaagctaattatataaaacctaaaaagaaaaagaaaattaatgaaaagaaaaataataaattttctcagtcagaaattgatgaattagttaatttaatttcaaaagcaaaaaaaccagtaatttatactgggggtggagtaataaactctgggccgaaagcaagtgatgctttacgggaatttgttcgactgactggttttccaattaca

SEQ ID NO: 232111 - DNA, 766 bp, Unknown
  Bacterial polypeptide expressing nucleotide sequence isolated from the Sargasso Sea
tatgccgaaattatttactggtgctgaaatcgttttcaaagctttggaagatcaaaaagttgagtttatatttggttatcctgggggagcggttttaccaatttatgatgaattaaaaaatcataaatcaataaaacatattttagccagacatgaacaaggagctggtcacgccgcagaaggatatgcaagatcaagcggtaaaccgggagtacttttagttacttcaggaccgggtgcaacaaatgcagttacagcattaacagatgcttatatggactcgatccctctcgtatgtatatcaggtcaagtaccaacgcatttgataggtacagacgcttttcaagaatgtgatacaactggaataactagaccatgcactaaacataactggttggtaaaagatgttaatgatcttgctcgtgttttgcacttagcttttgaagtagctacaactggaagaccaggtccagtcttaatagatattccaaaagatattcagtttaaaaagggaaattacaaatattataaaaactctttggcaaaaaaactaaatggcaaaacctcatttaaagtaactaacaatgagttagatagatttattaatttaatgaaatcatcctcaaaaccaattttttacacaggtggtggagttatcaattcaggaccgaatgcaagtaagttattaagagaattagtttcattaactggttttcatataacttcaactttacaaggattaggagcttacccgggagatgatcca

SEQ ID NO: 232112 - DNA, 804 bp, Unknown
  Bacterial polypeptide expressing nucleotide sequence isolated from the Sargasso Sea
aagcaaaaagaaatggaacacattcttgttagacatgaacaaggtgctactcatgctgctgatggttacgcaagagcaacaggaaagcctggagtagttttggttacttctggccctggagccactaatgcaataactggtatagcaactgcatttatggactctataccaatgattgttatatcagggcaagttgcaaaacaccttattggcacagacgcttttcaagaaactgatatgattggtatttcacgtccgattgtaaaacatagcttcactgttgatagtgcagaaaatataccagaaattgttaaacaagcctttcatattgcaacttctggaagacctggccctgtcgtaatagacgttcccaaagatactaccgcgccagataagttatttgaatttaaatatcctaatgatgtgaatattagatcttataaacctccaattgatcctgatccaaatcaaattgaaagagctgtagatgcaatcatagaatcaaataaacctgttatttatgctggaggtggtgcaataaatagtaatgcctctgaagagcttattcgattaaatgaaatcttagattttccagttaccaatactcttatggggttaggtgtttatcctgctactcataaaagattcttgggaatgcttggcatgcatgggacataccaagcaaatatgtcaatgcataatgcagatttgataattgcaattggagcaagatttgatgacaggattactaacacaccaaaattatttgctcctaatgcaaaaataatacatttagatgttgat

SEQ ID NO: 232113 - DNA, 809 bp, Unknown
  Bacterial polypeptide expressing nucleotide sequence isolated from the Sargasso Sea
aacctcaggaccaggtgcaactaacgtagttacagctttgactgatgcatacatggattcaataccattagtttgtatttctggacaagttccaactcatttaattggtacagatgcatttcaagaatgtgatacaactggaataaccagaccttgtactaaacacaattggttagtcaaagatataaatgatttagctgaaacaattcataaagcatttgaagtagcaactactggtagaccaggaccagttttagttgatataccaaaagatattcaatttcaaaatacaaaatataagaaaccaaaaaaagaaaataaattaaatggtaaatctcataatcattttaatcaaaatagtattgatcaattgattgatttaatgagcaaatcttcaaaacctattttttatacaggtggaggagtgattaattctggacctaaggctagtgaacttttaagagaacttgtttatgcaacaggttttcctattacatcaactttacagggattaggatcttttccaggtgatgataatcaatttttgggaatgttgggtatgcatggaacttacgaagcaaataatgcaatgcacgactgcgatttaatgattaatattggggcacgttttgatgataggattacaggaaaaatagatgaattttctccgaaatcaaaaaaggttcatattgatatagatccatcatctattaacaaaaatgttaaagttgatttagctattgtaggagatgtaaaaagcgttctgtcatctacattaaaaaagtttaaaacaaaaaaaatcgaaattt

SEQ ID NO: 232114 - DNA, 744 bp, Unknown
  Bacterial polypeptide expressing nucleotide sequence isolated from the Sargasso Sea
taccccgagagatgatcctttatttttaggaatgttgggaatgcatggaacatatgaggcaaacaactctatgtatagttgtgatctgatgataaatattggagcaaggtttgatgacagaataactggaaaagtggatgagttttcacctaaatcaaaaaaaattcatatagatattgatccatcatcaattgggaaaaatattaaagtagatctaccagttgtgagtgatgttggaagctttttaaaagctttaaataaaagaataaaagaaaaacataaagattttttaaactctaataaacaaaatatttctaaatggtggaaggatatagataagtggagacagaaaaaatctttaagcttcaaaaatagcaaagaagtaataaaaccacagtatgcagtgcaaagactatacgagttatcaaaaaaccaagatacttacatcacaactgaggtgggtcagcaccaaatgtgggctgctcaacattataaatttaataaaccaaacagatggatgacctcaggtgggcttggcacaatgggatacggtttgcctgctgcggttggtgttcaaattgctcatccagataaactagttatcgatattgctggagaagcatctgttttaatgaccatgcaagaaatgtccacagctgtacaatataaactaccaattaaaatatttattttaaataatcagtacatggggatggttagacagtggcaagaacttttacatga

SEQ ID NO: 232115 - DNA, 442 bp, Unknown
  Bacterial polypeptide expressing nucleotide sequence isolated from the Sargasso Sea
aatgggaaaattaatatcaggtgccgaaatagtttttaaggttttagagcatcataatgttgaacatatttttggttatccaggcggtgctgttctaccaatttatgatgaattaaaaaatcataaaactataaaacatattttagctcgtcacgaacaaggagcgggacatgcagcagagggatatgcacgttcatctggaaagcctggggttttattagttacatctggacctggagctacaaatgctgtaactgctcttacagatgcctatatggactcagttcctttggtttgtatcagtggtcaagtcccaactcatttaattggaacagatgcatttcaagagtgtgacacaactggaattacgcgaccttgtacaaaacacaattggttagtcaaagatgtaaatgatttggccaaaagtaatgaatttagcatt

SEQ ID NO: 232116 - DNA, 931 bp, Unknown
  Bacterial polypeptide expressing nucleotide sequence isolated from the Sargasso Sea
attgctgaactgccgcaggtgatgagcgatgcttttcgcatcgcccagtccggccgcccgggtccggtgtggatagatattcctaaggatgtgcagacggcgaccatcgagctggaggcgttaccggagccgggtgcgcgcaccacaccgccgacatttgacagcgccagcgtccacgacgcggccgccatgatcaatgcggctaagcgcccggtactttatctgggcggcggcgtgattaacgcccctgagcaggtgcgtgcgctggcggaaaaagcgaacctgcctaccaccatgaccctgatggcgctggggatgctgccgaaggcgcatccgctgtcgctgggcatgctgggtatgcacggcgcgcgcagcaccaactttattctgcaagaagcggatttactggttgttttaggcgcgcgttttgatgaccgggcgattggtaaaaccgagcagttctgcccgaacgcgaaaattattcacgttgatatcgaccgttccgaactgggtaaaatcaagcagccgcacgtggcgattcaaggggatgtggccgacgttctggcgcagctgacgccgcaggtcgccgcccagccgcgcgacgagtggcgccagatggtggcggatctgcagcgtgagtttccgtccccgattccgcaggagagcgacccgctcacccattacggcctgatcaacgccgttgccgcctgcgtcaatgatgaggcgatcgtcaccaccgatgtcggtcagcatcagatgtgggtcgcgcaggcttatccgctgaatcgcccgcgtcaatggctgacttccggcgggctggggaccatgggattcggtctgccggcagcggtcggagcggcgctggctaatccacagcgcaaagtcatctgcttctccggtgacggcagcctgatgatgaacattcaggaga

SEQ ID NO: 232117 - DNA, 967 bp, Unknown
  Bacterial polypeptide expressing nucleotide sequence isolated from the Sargasso Sea
tggaattacagaccatgtacaaaacataattggttagttaaagatattaaagatttagcaaaaacaattcataaagcatttgaagttgcaaccaccggaagaccaggacctgttttagttgatattccaaaagatgttcaatttcagaaaacaaattattcaaaatataaaaaacaaaaaaaattaaatggaaaaaaacataataattttaatcaaaaagatatagatgaactagttaaattaatgacaaaagccagtaaaccaattttttatactggtggaggagtaattaattcaggaccaaaagctagtgaacttttaagagaattagttcacgctactggttttccaataacgtctacactacaaggtctaggatcatttccaggggatgataatttatttttaggaatgttaggcatgcacggaacttatgaggcgaacaatgccatgcatgattgtgatttaatgattaatattggcgcaaggtttgatgatcgtatcacaggtaagatagatgaattttcacctaaatcaaaaaaagttcatatagatattgatccgtcttctataaacaagaatgtaaaagtagacttaccaattgtgggggatgttcaagacgttatctcatcaacaataaaaacaattaaaaaaacaaaacctaattttgcaaaatcaaataaacaaaagatttcaaaatggtgggaaaaaattcaaaaatggagagaaaagagatcattagattttattaatagcactgaaacaattaaaccacagtatgctgtgcaaagactttatgaattaacaaaaaataaagatacttatataactactgaagttggtcagcatcaaatgtgggcagcgcaacattataaatttgacaaacctaacagatggatgacatctggtggactaggaacaatgggttatggcctgccagctgcagttggtgttcaggttgctcacc

SEQ ID NO: 232118 - DNA, 622 bp, Unknown
  Bacterial polypeptide expressing nucleotide sequence isolated from the Sargasso Sea
tgaaagattatatgaattaactaaagataaagattcctatattacaactgaggtaggacagcatcagatgtgggctgcacaacattataaatttaataaaccaaatcgttggatgacatctggtggtttgggtactatgggatatggattgccagcagcagtaggtgtgcaagttgctcatccaaaaaaattagttattgatattgcaggtgaggcttcagtattaatgacaatacaagaaatgtctacagctgtacaatacaaccttccgattaaaatatttatattgaataatcaatacatgggcatggttagacaatggcaagaacttttgcatgataaaaactactctgaaagttatactgctgctctaccagattttgttaaattagcggaagcatataactgtgttggtataagagcaaaaacaccagaagagttagacgataaaattattgaaatgctgaatacagatagacctgtaatttttgactgtatggttgataaagtagaaaattgttttccaatgataccatcaggaaagccacataatcagatgattttaggacccaaagatcaagaaagtaagaagattactggcaaaggtaagtccttagtttaa

SEQ ID NO: 232119 - DNA, 767 bp, Unknown
  Bacterial polypeptide expressing nucleotide sequence isolated from the Sargasso Sea
gacaaatgctatcaccggcctggctacggcatatatggattccattccgatgattgttatatccggacaggttgagagcagaatgattggaaccgatggttttcaagaaacagacatggtcggaatctcacgtcctatcgtgaagcacagtttcatggttcaaaaagccgaagatatccctttagttatcaagaaagcttttcatatatcgacaacaggacggcctggccctgtagtaattgatataccaaaagatgcaacagatccaaaagctacatttgcgtatgactatccaaaggaagtcaagatgcgctcctactcagttcctggtaaagggcattcgggtcaaattaagaaagcaatcgaattgcttttggatgcgaagcgccccatgatttatacaggaggtggtgttatacaaggggagggatctgaacttcttacaaagctcactagaagacttggtttcccgataactaacacactaatgggacttggcgcgtttccagcctccgataaacagtttcttggcatgttaggtatgcatggaacttatgaagccaatatggcgatgcataactgcgatgttttgctgtgtataggagctcgttttgatgatcgagttaccaactctgacacgtctaaattttgcccgaacgcaaaaatattacatgtagacattgatccagcggctatttcaaaaacggttacggcagatatcccgatagttggttcggtaaattcagtgcttgaagaaatgttgcagc

SEQ ID NO: 232120 - DNA, 899 bp, Unknown
  Bacterial polypeptide expressing nucleotide sequence isolated from the Sargasso Sea
taataaaggtaaatataaattttataaaaataacttaagtaaaaaatctaatcgtaaacctattacaaaaataaatacaaaagatttagatttatttatagatatgattaaaaagtcttcgaagccaattttttatactggaggaggtgtaatcaactctggtcctaaagcaagcgagtccttgagagaactagtagctttgacaggctttccaatcacttcaactttacaaggtttaggcgcataccctggagatgatcctcagtttttaggaatgttaggaatgcacggaacatatgaagctaacaatgcaatgcatgactgtgatttaatgattaatattggagcaagatttgatgacaggataacaggaaaagtagatgagttttcccctaactcaaaaaaaattcatatcgatatcgacccatcatctatagggaaaaatataaaagtagatttagcgatagtaagcgatgtaaatgtactacttaaaagtttaattaaaagatttaaagaaaaaaataaaaattttttaaattcgaataaacaaaaaacttcaaaatggtggtcccaaattgaaaaatggagagaaaaaaaatcccttaattttttaaatagtaataaaactattaaaccacaacatgcagttaaaagattatatgaattaacaaaaaacaaagaaacttttattactaccgaggtaggtcaacatcaaatgtgggcagctcaacattataagtttaataaacctaacagatggatgacatctgggggactaggtacaatgggatatggtttacctgctgctattggtgttcaaattgcaaatcctggtaaattagtaatcgatattgctggagaagcttcagttttaatgacaatgcaagaaatgtctactg

SEQ ID NO: 232121 - DNA, 417 bp, Unknown
  Bacterial polypeptide expressing nucleotide sequence isolated from the Sargasso Sea
aatggataaaagtaataagtctggtgctgaagcattaattcactcccttcatctagaaggagtagagcttatgtttggatatcctggaggagctgctctacatatttatgatgccatatttaatcaaaactatgttgatcacattctagttagacatgaacaaggcgcagttcatgctgcagatggatatgccagagctacaggcaagcctggtgtagctttagtaacatctggtccaggtgctaccaatgcaattactggtttagccacagcttatatggattcaactcctatagtagttatttccggtcaggttaaatcaggattaatagggaccgattcctttcaggaaacagacatgatcggagtttctagacctatagtgaaacatagttttctcgttcaatctgctgaaga

SEQ ID NO: 232122 - DNA, 763 bp, Unknown
  Bacterial polypeptide expressing nucleotide sequence isolated from the Sargasso Sea
tatgggaaaattaatatcaggcgctgaaatagtttttaaagttttagagcatcataaagttgaacatatatttggttatccaggtggagcagtattaccaatttatgatgaattaaaaaatcataaaactattaagcatattttagcacgtcatgaacagggagcaggacatgcagccgaagggtacgcacgatcatctggaaagcctggagttttattagttacctctggacctggagctacaaacgctgtgactgctcttacagatgcttacatggattcagtaccattagtttgtatcagtggtcaagttccaactcacttgattggaacggatgcatttcaagaatgtgatacaactgggatcacacgaccttgcacgaaacataattggttagttaaagatgtaaatgatttagccaaagtaatggatttagcatttgaagttgcaacaaccggcagacctggaccagtcttagtcgacataccaaaagatattcaatttaaaaaaacaaattttgttttaaaaacttcaaataagaaaaaactaaatggaaaatctaaaccaaatggaaaaataaactctagtgatttagacaaagtaataaatttgatgaagaagtcatcaaaaccaattttttatactggaggaggcgtaattaattcaggtcctgaggcaagcaaatcattacgagaacttgtttcaataactggtttccccaataacttctaccttacaaggtctcggtgcctaccctggaga

SEQ ID NO: 232123 - DNA, 868 bp, Unknown
  Bacterial polypeptide expressing nucleotide sequence isolated from the Sargasso Sea
tgcagatttgatgacagagtaacagggaagattagacgctttttccctaattcaaaaaaaatacatgttgatattgatgctagtaatatcaataaaactattaaagtcgatgtcccagttataggtgatgtaaaacaagttgttgagaatatgatttcattatggaaagataaaaaatataagatcgataatgaatctttgaaaacttggtgggcaaaaattaataaatggaaagaaatagattgtttaagttataataatgaaagtaaacaaattaaacctcaatacgcagttcaaagattatatgaactgactaaaaataaaaaaacttttatcactactgaagttggtcaacaccaaatgtgggctgcgcaatattataaatttgaagaaccaaatcgatggttaacttctggtggtttaggaacaatgggctacggttttccagcagcaataggcgcacaagttggcaatcctgatgctttagtagttgatattgctggtgatgcatcaatactgatgaatatccaagaaatgagtaccgctattcaatatcgactgcctgtaaagatttttattcttaacaatgagtatatgggaatggtaagacaatggcaggaactacttcatggtggaagatattcagaaagctatacagatagcttacctgattttgttaagctagctgaaagttataaagctgttgggcttagagctaagacaagtgatgaattagatggagttattactcaaatgattgagtcaaaaaatacagttattgcagatatatgggtaacaaaggaagaaaattgtttccctatgatacaaagtggatcagcacacaatgaaatgcttttaagcaaagatc

SEQ ID NO: 232124 - DNA, 997 bp, Unknown
  Bacterial polypeptide expressing nucleotide sequence isolated from the Sargasso Sea
acacatttaattgggactgatgcttttcaagaatgtgacactactgggataactagaccttgtacaaaacataattggttagttaaggatgttaaagatcttgcaaaaactattcataaagcttttgaagtagcaacaacaggtagacccggtcctgtactagttgatataccaaaagatattcaatttaacaaatattcatactcaaaattaaaaaaacaaaaaaaattaaatgggaagacgcataattattttaacgaaaaggaaattgatgaacttattaaattaatttcacaagcaaaaaaaccaataatctattcaggcggcggtgtaattaactcaggtaaccaagcaagtcaacttttgagagaactagtaaagttaactggatttcctataacctcgaccctccaaggtcttggagcatacccaggcgatgataatcaatttttaggaatgctaggcatgcacggaacttatgaggccaacaatgcaatgcacgattgtgatttaatgataaatataggggctagatttgatgacagaataacaggtaagattgatgagttctctcctaagtcaaagaaagttcacatagatattgacccatcatcaataaataaaaatgtaaaagtaaatttagcaattgtaggagatgtttcatcagttttaaaaaatgcaattaaaactcttaaaaaaatcaaaccaaacttttctacatcaaataaatcaaatatttcgaagtggtgggaacaaattcaaaaatggcgtactgtaaactctctaggttatataaatagcgaggaaagcattaaaccacagtatgctgtccaaagattgtatgaattgacaaagaataaagatacttttatcacaactgaggttggtcaacatcaaatgtgggcagcacaacattacaaatttaataaacctaataggtggatgacatcaggtggacttggcacaatgggttatggccttccagcggcagtaggag

SEQ ID NO: 232125 - DNA, 850 bp, Unknown
  Bacterial polypeptide expressing nucleotide sequence isolated from the Sargasso Sea
ggtaaaggtgcttttgatgaaagagacaatttatcagttggtatgttaggaatgcatggaactgcttatgcaaactttgcagttacagaatgtgatcttttaatagcaattggagctagattcgatgacagggttactgggaaattagatacgtttgctcctaatgcaaaggtcattcatatagatattgaccctgcagaagtcaataaaaataggcgtgtaaatgttgcaattgtttctgatgtttcaaaagctgttcgaaaaattaatgaaaaatgtaaaaataagaaaattgtttgtcagacgaataattggttagaaaaaattgatttttggaaaaataaacatcctttgtatgtcccgcctaaagaaggagaaatttatcctcaggaagttcttttaaaagttagggaactttctccagaagcttatgtaactacagatgtaggtcaacatcagatgtgggctgctcaatatctcaggaattctccaagaaaatggattagtagtgcagggttaggaactatgggttttggattgccagcggcaatgggagtgaaggcggccttgcctaattcagatgtaatttgtatagcaggagatgcaagtgtcttaatgaacattcaagaattaggaactttatctcaatatggtttaaaggtaaagttgattattataaataatcgctggcaagggatggtaagacaatggcaggaaagtttctacgaagaaaggtattcctcatctgatatgagttgtggagaacctgattttgtaaaacttgctgagtctttcggagtcaggggatacttaatatctgatagaaaagaattagcaaataaattacaac

SEQ ID NO: 232126 - DNA, 817 bp, Unknown
  Bacterial polypeptide expressing nucleotide sequence isolated from the Sargasso Sea
atgtcaaaattatattcaggagctgagatagtattcaaatgtttggaagatcaaaatgttagtcacatatttggttatccgggaggagcagtccttccaatatatgatgaattaaaaaattataattcaataaaacatattttagtaagacatgaacagggcgcaggacacgctgcagagggttatgcaaggtcaactggaaaaccaggtgtattgttagtaacttcaggtcctggagccaccaatgctgttactgccttgacagatgcttacatggactctgtgcctttagtttgcatcacaggacaagttccaacacatttaattggtactgatgcatttcaagaatgtgacacaacaggaataactagaccttgtactaaacataactggttagtaaaagatattaatgacttagctgaagtaatgcataaagcttttgaagtagcaacaacaggtagaccaggaccagttttagttgatatacctaaagatattcaatttcaaaaatctaaatacaaaaattataaaaagaataaaaaattaaatggaaaatctcatgataactattcacaaaaaaatattgatgaattaatttatttaattagcaaatcaagaaaaccaattttttacactggaggtggagtaataaattcaggaacaaaagcaagtgaacttttaagagaacttgtatatgcaacaggttttccaataacttcaactttgcagggtctgggttgttttcctgctgatgataatcaatttttaggaatgctaggtatgcatggaacctacgaagcaaacaacgccatgtatt

SEQ ID NO: 232127 - DNA, 826 bp, Unknown
  Bacterial polypeptide expressing nucleotide sequence isolated from the Sargasso Sea
acccaaagatttgcaggctgaggaatttgaatttaaatatccagaagaaaaagttaccatacccggagaaaatccgattaaaagtgatataagtagtgttgatttggatagtgcagttaaaatgattgctaatgcaaaaaaacctgtcatactagcagggcatggggttttaatatcaggtgcctcagatgaagtaatctgtttatcagaaaaaagtagtattcctatcagttggactctacttggttcaggtgcggtgcctgctagccatccactaaacatgggaatgatgggaatgcatggtgagtttgcagcaaataatgctattcataatgctgacctgttaatcgcatgtgggatgaggtttgacgatagggttacgggtaatacaaaaacatactcgcctaattcaaaaaaaattcacatagaagttgacccatcagaaataaacaaaaatgtgaaagtcgaccttgctctgaatggtgatcttaaatttattttaaataatttagttcctaaggtttcaaaaaaagaaaatagagcttggtttgatcagatttcttcttggcaaaatgagtctgcttcaagagatatcattaacatggatacggaaattttatacggtgctcaagttatcagtgatctttggaaggagactaatggagatgctatcattgtgtcagacgttggacagcatcaaatgctcgaagcgcagtattataaacatgatgagccaaacaccctattaacatcaggcggtctaggaacaatggggtttagcttgccggcagcaataggagctagttttgcaaatagaaataaagaa

SEQ ID NO: 232128 - DNA, 670 bp, Unknown
  Bacterial polypeptide expressing nucleotide sequence isolated from the Sargasso Sea
atgaacggatctcagatcatcgttgaagctctgcgcagacatggggtggattatcttttcggctatccaggaggtgcctgcatgccgatttttgatgctctggtggatgcaccagaaatcaaaatcgtcctggtgcgtcatgaacaggggggaacccacatggcagacggatatgcccgggccacaggcaaacccggggtggtactggtcacttccggacctggtgcgacgaacacggtcacaggcctgctcaccgctcaaatggactctgtaccgatggtggtactgacaggccagaccatcactcccaatcttggaaaggatgccttccaggaagccgatgttttcggggtcacgatgccagtggtcaaacacagttacctggtccgtgaagtcaacgatttaccccgggtgatgaatgaggccttccatttagcaacttcgggaagaccgggcccggttttggtcgatctcccgaaagacgtggtttcggctgaatgcgaggctgactttaccgacgaatttcacctgcctggctatgcccccccggcacgtggattaactgaagatctggaaaaagccgcggaattgatttcatcctccaaaaaacctctcctatatgtaggcgctggtgcggtcattgcccaggcatcaaggcaggtcattagac

SEQ ID NO: 232129 - DNA, 775 bp, Unknown
  Bacterial polypeptide expressing nucleotide sequence isolated from the Sargasso Sea
atgtctaaattattttcaggagctgaaattgtatttaaatgtcttgaagatcaaggtgtagaatatatttttggatatcccggaggagcagtgcttccaatttatgatgaattaaaaaatcattcatcaataaaacatatattagttaggcatgaacaaggcgcgggtcatgcagcagagggttatgcaagatcttcaggtaagcctggggtagttttagtaacatctggtcctggtgctacaaatgtcgtgaccgctctaacggatgcttacatggactcagtcccgctagtttgtatttcaggacaagtaccaactcatctaataggaacagatgcttttcaggagtgtgatacaactggaattactagaccatgcacaaaacataattggttagttaaagatgtgaaagatttgtcaaaaattcttcatgaggcttttagagtcgcaaccacaggaaggcctggaccagttttagttgatatcccaaaagatattcaatttgcaaaaatgaattattcaaaacccaagatacataaaaagcttaatggaaaattattaaaaaatttttctcaaaaagatatcgacaaattaattgacttaatgaataaatcaaaaaaaccaataatttattctggtggtggtgttattaattcaggaccagaggcaagtgaggttttaagagagcttgttcaattaactgggtttccaattacatcaactttgcaaggcataggcgcgtatcctggagatgataatcagtttttaggaatgc

SEQ ID NO: 232130 - DNA, 871 bp, Unknown
  Bacterial polypeptide expressing nucleotide sequence isolated from the Sargasso Sea
attagttagagaatttattaatatggttggatcgcctgtaacaatgacattaatgggtctgggtgtagtaggttcatcagataaaaactcacttggcatgcttggtatgcacggaatgtatgaagctaatatggctatgcatgaatgtgatgtcatgattaatatcggtgcaagatttgatgatagagttacaggaagacttgatgctttctcacctaactcaaagaaaattcatattgatattgatgaaagtaatatcaacaaaacaataaacgttgatgttccaatcattggtgatgttaaacaagttgttgaaaaaatgatttcagtctggaaagacaaaaaatataaaatagatactgattcattaaaattgtggtgggataaaataaataaatggaaagatgtagattgtttaagctacaataatgaaggcaagcagattaaaccgcagtatgcagttcaaagactttatgagttaacaaaaaatacaaaaacatttattacaactgaagtaggtcaacatcaaatgtgggctgctcaattctataaatttgaagaaccaaatagatggctcacttcaggtggtttaggaactatgggatatggttttcctgctgctattggagctcaggttggacatcctgatgctttagtagtcgatatagcaggagacgcctctatactcatgaatattcaagaaatgagcaccgctgttcaatatagattgcctgtaaaaatatttattttaaacaatgaatacatgggaatggttaggcaatggcaggaacttttacatggtggaagatattccgaaagttatactgatagcttacctgattttgtaaagctagctgaaagttacaaagct

SEQ ID NO: 232131 - DNA, 613 bp, Unknown
  Bacterial polypeptide expressing nucleotide sequence isolated from the Sargasso Sea
aatgaactaactaagcacttaaatccatttatcacaactgaggttggtcagcaccagatgtgggcagcacaatttttgtcattcaataagccaaaacactggatgacttccggcggattaggaacaatgggttatgggttgccagcagcgatgggtgttcagattgcccacccaaaagatttggtaattgatgtagctggtgaagcttcgatattgatgaatatacaagaaatgtcaacaataagacaatatagacttcctgttaaaatattcattttaaacaatcattacatggggatggtaagacagtggcaagaattacttcatggaaatagattatcagaatcttacatggactcattacctgactttgtaaagttagccgagtcatttggtgcaacaggccttaggattgaaaaaccagctgatgttgacgatttaataaatgaaatgattaagattaaaggcgctgtaatttgtgatgtggtggttgaccctaaggaaaactgttttccaatgataccatctggttcaactcacgatcagatgcttcttggacctaatgataaactagaaggagaaatctcagaggagggtatggttctagtatagt

SEQ ID NO: 232132 - DNA, 739 bp, Unknown
  Bacterial polypeptide expressing nucleotide sequence isolated from the Sargasso Sea
aatgtctaaattatataccggagcagaaattgtatttaaatgtcttgaagatcaaaaggttgaatatatttttggttatcctggtggtgcagttttgccaatttatgatgaacttaaaaatcattcatcaatcaaacacatacttgtaagacatgagcaaggagcaggtcacgctgcagagggatatgcaagatcatcaggtaagcctggagtagttttggtaacatcaggtccaggtgctactaatgttgttacagcattgactgatgcttatatggattcagtccctttagtttgtatttctggacaagtacctactcacttaataggcacagacgcttttcaagaatgtgatacaacaggaattacaagaccttgcacaaaacataattggttggttaaagatattaaagatttatcaaaaattatgcatgaagcttttaaagttgcaacaacaggaagacctggacctgtattgattgatattcctaaagatatccaatttgcaaaagctagttatacaaaatttaaaaaagaaaaaaaattgaatgggaaagcacataataagttttctcaaaatgaaattgaccaattgattgatttaatttcaaaagcaaaaaagccagttgtttatacaggaggcggggtaataaattcaggccctcaagctagtgaaactttaaaagagtgtgtaagactaatcggttttccaatcacatcaaccttgcaaggcttaggt

SEQ ID NO: 232133 - DNA, 808 bp, Unknown
  Bacterial polypeptide expressing nucleotide sequence isolated from the Sargasso Sea
cattgtaggcgatgttaaatcggtcatagcctcaacattaaaaactttaaaaaaaacaaaacctagctttataaaatcaaacaaacaaaaagtatcaagatggtgggaaacaattcaaaagtggagatcaaaaaaatctttagactatattggaagtgaagaaactataaaaccacaatatgccattgaaaggctatatgaacttactaaaaataaggacacttatatcacaactgaagtaggtcaacatcaaatgtgggccgcacaacattacaaatttaataaaccaaacagatggatgacctcaggtggtcttggaacaatggggtatggtttacctgcagctgtaggagtgcaaattgcccatccaaataaattagtaattgatattgcaggagaagcttccgttttaatgacgatgcaagaaatgtcgacggcagttcaatatagtttacctattaaaatatttattttaaacaatgaatacatgggaatggttagacaatggcaagaattattacatgataaaaattattcagaaagttacacagcggctttacccgattttgttaaattagctgaagcatatggttgtgttggaattagagctaaaagacctgaggagcttgatgataagataatcgaaatgttaaatactgacaaaccagtcatttttgactgcatggttgacaaacaagaaaattgttttccaatgataccatcaggaaaacctcacaatcaaatgttattaggccctaaagatcaagaagataagaaaattacaggcaaaggaagaacattagtctaa

SEQ ID NO: 232134 - DNA, 494 bp, Unknown
  Bacterial polypeptide expressing nucleotide sequence isolated from the Sargasso Sea
aatgaccaaggataaagatacttatataacaactgaggttggtcaacatcagatgtgggcagcacaacattataaatttgacaaaccaaatagatggatgacttcaggtggtttaggaacaatgggttatggtttgcccgcagctattggagtccaggttgctcatccaaaaaaattggttattgacatcgcaggtgaggcttccgtactaatgacaatgcaggaaatgtccacagcagttcaatataacttaccaattaagatttttattttaaacaatgaatatatgggtatggtccgtcagtggcaagaactactacatgataaaaactattcagagagttatacagctgctttacccgactttgtaaaattagcagaggcttatggttgtgtcggtataagagctacaaaaccagatgaattagatgaaaagattaaagagatgttaaacattaatagaccagtaatctttgattgtagagttgacaagg

SEQ ID NO: 232135 - DNA, 700 bp, Unknown
  Bacterial polypeptide expressing nucleotide sequence isolated from the Sargasso Sea
tatgcatggatgcgactttatgctttgtgttggcgctcgttttgatgacagaataactgggagaattgatgcttttagtccagcttcatacaaagttcacatagacatagatccatcttctataaataaaaacataactgtagaggcccctttaattggagatgtatccaatatattaaattgtctagctgacagatggaaagaaagaggctcaaaagtaaatcagaaaaaattgagagcttggtggaaatccataaatgattggaaagatgttaaatcgctgagctacgagaattctgcaaacgtaataaagccccaatatgctgttgaaagattagaggagctcacaaaatcttacaatcgatttgtgtcgacagaggtcggtcaacaccaaatgtgggcagcacaatttatggggtttgaggagccaaatagatggatgacctctggaggattagggactatgggatatggctttccggcgtcaattggaatacaaatagctcacccaaaatctctcgtaattaatgttgcaggggaagccagctggctaatgaacatgcaagagttaggaactgccgtgcaataccgattacctgttaaacaatttatcctaaataacgagagactaggcatggtaagacagtggcaagagctattacacggagaacgttactcccatagttggtctgatgctttg

SEQ ID NO: 232136 - DNA, 867 bp, Unknown
  Bacterial polypeptide expressing nucleotide sequence isolated from the Sargasso Sea
tatgttaggaatgcatggaatgtatgaagctaatttggcaatgcacgattgtgatgttatggttaatatcggagcacgttttgatgatagagttacgggtagactagatgctttttcacctaattctaaaaaaatacacatagatattgaccctagcaatataaacaaaacaataaaagttgatattccaatagttggagatattgaagctgttcttcatcaacttattgaatcttggaaaaaaaataaatattcattagatcaaaaaaatttagatttgtggtggaataagataaatgaatggaaaaaagtagactgtctaagtttcaagcaaatagataaaaaaattaaacctcaatatgcaataaaaaaactttatgaattaactaaaaacaaggaaacaataattacaactgaggttggtcagcatcaaatgtgggctgcccaatattataaatttgaaaaaccaaataaatggcttacttcaggaggattaggaacaatgggatatggttttcccgcagcaataggtgctcaagttgctaatccagaagctttggttattgatatcgctggagatgcttcaatattaatgaatattcaggagatcagcaccgcagtacagcatagattaccagttaaaatttttattttaaataatgagtatatgggtatggtgaggcagtggcaggaactattacatggtggaagatattcagaaagttatactgatagcctccctgattttgtaaaattagccgaaagttttaaagctaaaggtttaagagcaaaaacagctgatgaattagatgatgtaattaaagaaatgattaatacagacaaaactgttatagctgacatatgggt

SEQ ID NO: 232137 - DNA, 656 bp, Unknown
  Bacterial polypeptide expressing nucleotide sequence isolated from the Sargasso Sea
tatggggaaattattttcaggtgcagaaattgtttttaaggttttagaacatcataaagtggagcatatttttggctaccctggaggtgcagtacttccaatttatgatgaattaaaaaatcataaaacaataaaacacattctggctcgtcacgaacaaggtgctggtcacgcggcagaaggatatgcgcgttcctctggaaaacctggagtcatgctagtaacatcaggtccaggtgcaactaatgcggtaaccgcattaactgatgcatacatggattcagttccaattgtttgcataagcgggcaagttccaactcatctaatcggaacagatgcttttcaagaatgtgacacaactggaattacaagaccgtgtacgaaacataattggttagtcaaagatgttaaagatttagctgatgtaatgagtcgtgcatttgaagttgcaactacaggaagaccgggtccagtattagttgatattcctaaagatattcaatttaaaaaaacagaatttaaaataaaaaataaaaaaaagaaacagtttaacggaaaactaaacggcaaggttagtaatacagaaatcgacaaagtaataaaaatgatgaaaaaatcttcgaagccaattttttatactggtggcggagtaataa

SEQ ID NO: 232138 - DNA, 775 bp, Unknown
  Bacterial polypeptide expressing nucleotide sequence isolated from the Sargasso Sea
aatgacaggagcagaaatagtttttaaagtccttgaagatcgaggggttagacacatatttggttatcccggaggagctgtacttcctatctacgatgaacttaaaaatcacaaaaaaataaaacatattttagttcgtcatgaacaaggagctggtcatgccgccgaaggctacgctagatcttctggtaaacctggtgtattacttgttacttcaggcccgggagcaacgaatgcagttacggcactcacagatgcttacatggactcagttccaatagtttgtattactggacaagtgccaacacatcttatcggaacagatgcttttcaagaatgtgatacaactgggataacaagaccatgcactaaacacaattggttggtaaaagatgtaaacaagctatcatcaattatgcacaaagccttcgaggttgctacaagtgggcgacctggtcctgttttaattgatatacccaaagatgttcaatttcaaaaagggaaatatattaagcccaaggaattaaaaaataataataaaataaatattcagtttaatgggcaagataaaaaaatagacgaggcagttaaactaattgaaaaatcatcaaaaccaattttgtataccggtggaggtgttattaattctggcccaagagctacagaaatacttcgtgagttagtatcattaactgggtttccaattacatctacgcttcaaggattaggagcataccccgaaaacgacccacagtttctgggaatgctaggaatg

SEQ ID NO: 232139 - DNA, 737 bp, Unknown
  Bacterial polypeptide expressing nucleotide sequence isolated from the Sargasso Sea
aatgccaaaattgtattcaggagctgaaattgtttttaaatgcttggaagaccaaggtgtagaatttatttttggttatccaggcggagcagttttaccaatttatgatgagttaaaaaattttaattttataaaacatattttagttcgtcacgaacaaggagcaggacacgcagccgaaggttatgcgagatcgtctggtaaacctggagtacttttagttacatctggtccaggagcaacaaatgctgtaactgctttaacagatgcatatatggattcagttcctttagtttgtatttcaggacaagttccaacacatttaattggaactgatgcttttcaagaatgtgatacaactggaataactagaccttgcacgaagcataactggctcgttaaagatataaatgatttagaaaaaacaattcataaagctttcgaagttgcaacaactggaagacctggacctgtattagttgatattccaaaagatgttcaatttcaaaaagcaaaatatactaagtttaaaagacaaaaaaaactaaatggaaaaatccataataagttttcccaaaaagatattaatgaactaattgaactaatgagtaaagcatctaaaccaatattttatactggaggaggtgtagtaaattctggtccaaaagctagtgaacttttacgcgagttggttcactcaacaggttttccaataactacaactttacaaggacttg

SEQ ID NO: 232140 - DNA, 947 bp, Unknown
  Bacterial polypeptide expressing nucleotide sequence isolated from the Sargasso Sea
ctggtcagttccactcatttaattggaacagatgctttccaagaatgtgacaccacaggaattacaagaccttgtacgaaacataattggttagttaaagatataaatgatctttcaaaagttatgcatgaggcttttagagttgcaacgacaggaagacctggaccagttttaattgatattccaaaagatattcagtttgcaaaagctaaatataaaaaaccaaataaagaaaaaaaattaaatggaaaatctcataataaattttctcaagatcaaattgatgaattagtaaaattattaagcaaagccaaaaaaccaatcatctatagtggtggaggagtaattaactcaggtccaaaagcaagtcaggctctaagagaatttgttgagctaactggttttcctataacttctacacttcaaggattaggcgcgtaccctggagacgataatcaatttttaggaatgctaggtatgcatggtacgtatgaagcaaataatgctatgcatgattgtgatcttttaattaatattggtgcaagatttgacgatcgaattactggaaaaattgatgagttttcaccaaattcaaaaaaggttcatattgatatagacccatcatcaattaataaaattatcaaagtggatcttgcaatagttggagatgttacgagtgtcatcagtaaaattaataaaacaattgctaaaagaaaaaatggtcatagcaagtcaaataaatcaaatattgctaagtggtgggaacaaatagaaaaatggcgagaaaaagactctcttaattttgtaaatagtgatgaaagtataaagcctcaatatgctgttcaaagactttatgaattaactaaagataaagatacttatgttactaccgaagttggacaacatcaaatgtgggctgctcagcattataaatttaataaaccaaa

SEQ ID NO: 232141 - DNA, 511 bp, Unknown
  Bacterial polypeptide expressing nucleotide sequence isolated from the Sargasso Sea
atgtctaaattatatacaggtgctgaaattgtattcaaatgtctagaagaccaagatgttgaatttatttttggttatccaggtggtgcagtattaccgatttatgatgaattaaaaaatcataataccatcaaacatattttagttagacatgaacaaggtgcaggtcatgctgcagaaggatatgcaagatcatctggtaaaccaggtgttgtacttgttacctctggaccaggagcaactaatgttgttaccgcattaacagatgcatatatggattctgttccactagtttgtatatcaggacaagtgccaacacatttaattggaacagatgcatttcaggaatgtgacacaacaggtattacaagaccatgtacaaaacataattggttagtcaaagatattaaagatttatcaaaaactcttcatgaggcttttagagttgcaacaacaggaagaccggggccagttttagtcgatatacctaaagatattcagtttgctaaaa

SEQ ID NO: 232142 - DNA, 914 bp, Unknown
  Bacterial polypeptide expressing nucleotide sequence isolated from the Sargasso Sea
tgaagctaacaatgcaatgcacgattgtgatttaatgataaatattggtgcgaggtttgacgatagaataactggaaaggttgatgaattttctcctggatcaaaaaaaatacatgtagatatagatccatcatcgataggaaaaaatattaaagttgacttagctattgtgagtgatgtttctgaatttttaaaatccttaattaaacgatttaaagaaaaaaataaaaattttttaaattcaaataaacaaaaaacttcaaagtggtggggcacaattgaaaaatggagagaaaaaaagtctcttaattttataaatagtaataaaataattaaacctcaacatgccgttcaaagactttatgaattaaccaaagataaagatacatttattacaactgaagttggacagcatcagatgtgggctgcgcaacattataaatttaaaaaaccaaatagatggatgacatctggcggtctgggtactatgggttatggattaccagcagctataggtgtccagatagcaaatcctggtaaattagtagtcgatattgctggtgaagcatcggttttaatgacaatgcaagaaatgtctactgctgtacaatataaattaccgataaagatatttattcttaacaatgaatacatgggcatggtaagacaatggcaagaattattacatgaaaaaaattattctgaaagttatacagctgcattacctgattttgtaaaacttgctgagtcttatggatgtgttggtataagagcaaaaactcctaacgaattagatgagaaaataaaagagatggtcgaaatagatagacctgttatctttgattgtttagttgataaagctgaaaattgctttccaatgattccttctggcaaaccacataatcaaatgattt

SEQ ID NO: 232143 - DNA, 418 bp, Unknown
  Bacterial polypeptide expressing nucleotide sequence isolated from the Sargasso Sea
aatgtctaaattatattcaggagcagaaattgtctttaaatgtcttgaggatcaagatgttgaatttatttttggttatcctggaggagcagttttaccaatttatgatgaactcaagaatcactcaaccattaaacatattttagtgagacacgaacaaggtgcaggacatgctgccgaaggttatgcaagatcatctggtaagccaggagttgttttagtcacatcagggcctggtgcaactaacgttgtaactgctttaacggatgcatatatggactcagtcccattagtatgtatatcaggccaagtgccaacacatttaattggcactgatgcatttcaagagtgtgataccactggaattactagaccttgtactaaacataattggttagtaaaagatgtaaagatttat

SEQ ID NO: 232144 - DNA, 1303 bp, Unknown
  Bacterial polypeptide expressing nucleotide sequence isolated from the Sargasso Sea
ggaccagttctagtggatattccaaaagatattcaatttcaaaaaacaagttatacaaaatataaaaaacaaaaaaaattaaatggcaaaactcaaaataatttcaaacagtcagatattgatgaattaataaagttaatggataaatcatcaaagccaattttttatacaggtggaggtgtaattaactcaggacctaaagcaagtgagctgcttagagaattagtttctgccacaggttttccaataacatcaactcttcaaggtcttggtgcctttccagctgacgataatcaatttataggaatgctaggaatgcatggaacttatgaagcaaacaatgcaatgcatgattgtgatttaatgataaatgttggtgcaagatttgatgacagaattactggtaagctagatgaattttcaccaaaatcaaaaaagattcatattgatattgatccatcttcaataaataaaaatgttaaagtagatttgccaatcgttggagatgtggctgatataattaattcaattttaaagacaataaaaaaaacaaaaccaagttttatgaaatcaaataagcaaaagatttctaaatggtgggaacaaatttcaaaatggagatcaattaattctcttaattttgaaaacagtactgaaacaataaaacctcagtacgctgttcaaagactttatgaattaacaaaagataaagacacttatataactacagaagttggtcagcatcaaatgtgggctgctcaacattataaatttaataagccaaatagatggatgacttctggtggcttaggaaccatgggctatggtttgcccgcagcagttggtgtacaagttgctcatccaaataaattagtaattgatattgctggagaggcatctgttctgatgactatgcaagaaatgtctacagctgttcaatatagcctaccaattaaaatttttattttaaacaatgaatatatggggatggttcgtcaatggcaggaactacttcatgataaaaactattcagaaagctacactgcagctttaccagattttgttaaattggcagaagcatatggttgtgttggtataagagccacaacacccgaagaacttgatgataaaattattgaaatgcttaatactgaaagaccagtaatatttgattgtcgggttgataagattgaaaattgttttccaatgataccttccggaaaagcacataatgagatgttacttggtccaaatgatcaaaaagaaaagaaaatcactggaaagggtaaaacattagtttaat

SEQ ID NO: 232145 - DNA, 1082 bp, Unknown
  Bacterial polypeptide expressing nucleotide sequence isolated from the Sargasso Sea
acttgtagagcttacaggttttcctttcacttccacgctgcaaggtttaggtgcgtatccaggagatgataatcaatttttaggcatgcttggtatgcacggaacttatgaagctaataacgcgatgcatgattgtgacttattaataaatattggcgcaagatttgatgatagaataactggtaaaattgatgagttctctccaaaatcaaaaaaagttcatattgatattgatccttcatcaataaataaaataattaaagttgatttagcattagttggtgatgttaaagaggttttaaaagggattaccaaaaccctgaagaaaaaaaacctagatttgaaaaaatcaaataagcaaaaaattgctaagtggtgggaacaaatacaaaaatggcgaaccaaaaattctcttcattttaaaaatagtgatgaaacaataaaacctcaacatgcagttcaaagattgtatgaacttaccaaacataaggatacttatgttacgactgaggtaggtcagcatcaaatgtgggcagctcagcattataaatttaacaaaccaaatcgttggatgacctctggaggacttggaacaatgggatatgggctacctgctgctgtgggtgttcaaatagctcatccaaaaaaattagtaattgatattgctggtgaggcttcagttttaatgacaatgcaagagatgtctacagcagttcaatataatctacctattaaaatttttattttgaacaatcaatacatgggaatggtaaggcaatggcaagagctattacatgaaaaaaattattctgagagttatactgaggcattgcctgattttataaagatggcagaagcctatggttgcaaaggtataaaagctgaaaaaccagaggaattagatgaaaaaattaaagagatggttgagtttgatggacctgtaatttttgattgtcgagtagatccaaatgaaaattgttttccaatgatcccctcaggaaaacctcataaccaaatgatattaggaccaagtgagaaagaagaaaataaaatcaccggtaaaggtaaagctttagtttagt

SEQ ID NO: 232146 - DNA, 1165 bp, Unknown
  Bacterial polypeptide expressing nucleotide sequence isolated from the Sargasso Sea
aatgcctaaattatttactggtgcagaaatagtttttaaagctctggaggatcaaaaagtcgaatttatttttggttatcctggaggagctgttctccctatttatgatgaattaaaaaatcataaatctattaaacatatattagcaagacatgaacaaggcgctggacatgctgcagaagggtacgctagatcaagtggaaaacctggcatcttactagttacatctggtccgggcgcaacaaatgctgttacagctttaacagatgcttatatggactcagtccctttagtttgtatctctggacaagtaccaacacatttaattggcactgatgcttttcaagaatgtgacacgactggtattactcgaccctgcacaaaacataattggttggttaaagatgtaaatgaccttgcaagagtcttacatttagcttttgaagtagccacgacaggtagacctggtcccgtactagttgatattccaaaagacattcaatttaaaaaaggtaaatatatcttttctaaaagcactcttaagaaaaaattgaatggtagagctacacataaaatttcaaacaatgaattagataaatttattgatttattaaaaaaatcttcgaaaccaattttttacactggaggtggagtaattaattctgggccacaagccagcgaatatttaagagagttagtttctttaactggatttccaatcacttcaacactgcaaggattaggtgcttatcctggagacgacccgcaatttttaggaatgttaggtatgcacggaacatttgaagctaataacgcaatgcatgattgtgatttaatgattaacatcggtgcaagatttgatgacagaataaccggaaaagttgatgagttttccccaggatcaaaaaaaatacatgttgatattgatccatcctctataggcaaaaatataaaagttgatttagcaattgtaagcgatgtttcagaattcttaaaatctctaataaaaagatttaaagaaaaaaataaaaattttttaaattctaacaaacagaaaacatcaaaatggtggagtacaattgaaaaatggagagaaaaaaagtctcttaactttataaatagcaacaaagtaataaaacctcaacacgcggttcaaagattatat

SEQ ID NO: 232147 - DNA, 749 bp, Unknown
  Bacterial polypeptide expressing nucleotide sequence isolated from the Sargasso Sea
aatgccaaaattatattcaggagctgaaattgtatttaagtgccttttggaccaaggcgtaaccaatatttttggttatccaggaggagctgttcttccaatatacgatgaattaaaaaactttaaatcaattaaacatattttggtaaggcacgagcagggtgcaggccatgcagcagaaggttatgcgagatcttcgggaaaacctggcgtagtacttgtaacttctggcccaggagcaaccaacgctgttacagctttaacagatgcatatatggattctgttcccttagtttgtatatcaggtcaagtaccaactcatttaatcggaacagatgcttttcaagaatgtgatacaacaggtattacgcgaccttgtacaaaacataattggcttgttaaagatattaatgatttagcaaaaacaattcataaagcttttgaagtttcaacaactggaagaccaggtccagtattagttgatattcctaaagatattcagtttcaaaaaactacttataaaaattataaaaaaataaataaatcaaatggtaaaacacataatcatttttctcaaaatgatattgatcaactaattaatttaatgggaaaagcaacaaaacctattttttatacaggtggaggagtaattaactctggtcctaaagcaagcgaactattaagggaattagttaatgcaactggttttcctattacttctactttgcagggactaggttctttcccag

SEQ ID NO: 232148 - DNA, 332 bp, Unknown
  Bacterial polypeptide expressing nucleotide sequence isolated from the Sargasso Sea
catggagaagttatccggcgccagcatgattgtgcgatccctcatcgatgaaggtgtaaagcacatatttggttatcctggcggctcagtgttagatatctacgacgccctgcaccttatccccggtattgaacatattctggttcgccacgaacaagccgccgtacatatggctgatggttatgcccgcgccacgggtaaagtaggcgtggtactcgtgacctcaggcccaggtgccaccaatgccattaccggcatcgctaccgcctatatggattcaattccattagtggtgttatccggccaagtacccagcaatctcatcggtaacg

SEQ ID NO: 232149 - DNA, 1585 bp, Unknown
  Bacterial polypeptide expressing nucleotide sequence isolated from the Sargasso Sea
agcggatcagaaataattattgaatctcttaaaaaagagggagttgaatatatttttggttatcctggtggagctgtcctacatatttatgatgcattatttgcagctgaaaaaattaaacatgttttggttaggcacgaacaaggtgcaacacatgctgcggatggatatgcgagggcatgtaacaaacccggagttgtcttagtcacttcaggccctggtataacgaattgtgttacaggaattgcaactgcacatatggattctattcctatgattgtaatctctggacaagtatcaagacaatatgttgggagtgatgccttccaagaggctgatgccacaggtattacaaggccaatatgtaaacataactttcttattaatgatcgtgagtcaattgcagaaacatttagaaaagcttttataattgcaacgactggaaggcctggtccagtaataatagacattccaaaagacttaacagatccaaaagtaaaaattaattttgaatataagaaaaatataaaaatcagatcttataatgttaaaaaatcagaatctgatgaaaaaataaaagaggctgcaaagctaatctgttctgcaaaaaaacctatgatatacgctggaggcggagtgattcttggcaaagcaagtaatgatctagttaaattaactaaacatcttaattttcctataactaatacgttgatgggattaggggcatatccctcatcggataaacaatttttaggtatgcttggaatgcatgggacatatgaagctaatatggcaatgcatgactgtgatgttctgctcgctattggcgctagatttgatgatagggtaacgggcgatacgaatcaattttgcccaaaagcaaagataattcatatagatattgatccatcatcaatttcaaaaattattgaagtagatcattccttaataggcgacactaaacagattttgaaaaaacttttagatcatacaaaacactttaaaaaagatattaataaagatgctttgagtaaatggtggagaaaaataaattcatggcaaaaaaagaaatgtctatcttataaaaaatccactaaagtgatcaagcctcaatctgtaattgagactcttcataaaattacaaaaggaaaatcatttgtgacttctgatgtaggacaacatcaaatgtgggttgctcaatattataaatttgataaacctaatagatggattaattcggggggattaggaacaatgggttttggcctaccagcagctataggagcacaattagcttatcctagagaacaagttctttgcgtaactggtgaagctagtattcttatgtgtatacaagagctgtctacatgcttacaatatggattacctattaaaattataactttgaacaatagatatatgggtatggttagacagtggcaagagtttttttacgagggtaggtatgcaatgtcatatatggatgctattccaaactttgcacaacttgctgaaagctttggtcatatcggtatggtaatagataagccaaaagatttagaaaaagacctaactcatgctctta

SEQ ID NO: 232150 - DNA, 790 bp, Unknown
  Bacterial polypeptide expressing nucleotide sequence isolated from the Sargasso Sea
atgaaaattgcaggaaatgacatattaattcagtctcttataaatgagggagtcgagtatatttttggctatcctggaggagctgctcttcacatatatgactcaatctttaatcaaaaagagatgcagcatattttagtaaggcatgagcaaggagctacacacgctgctgatgggtatgcaagagctactggcaagcctggcgttgttttggtgacctctggccctggagctacaaatgcaataactggaattgctacagcattcatggattcaattcctatggttgtcatatctggtcaggtacaaagtcatttaattggaactgatgctttccaagagacagacatgataggagtatcaagacccattgtaaaacacagcttcacagtagataaacaagaaaatattgcacaaattgttaaggaagcttttcatatagcaacttctgggagacagggcccagtagtcattgatgtgcctaaagatataacaaatcctgatgaattatttgattttaattatcccgataaagctaatatcagatcttataatcctcccatcaaaccagaaaatcatcaagtttcgcgagcagtggatgcaattctctctgccgaacgtcctgttatttatgctggtggtggaacaatctcaagcaatgcttctaatgaattaagagagcttaatgaattaattgattttccagtaacaaatacattgatgggtctgggagtttacccagggacaggtaaaagatttttaggtatgctcggtatgcatggaacctatc

SEQ ID NO: 232151 - DNA, 1747 bp, Unknown
  Bacterial polypeptide expressing nucleotide sequence isolated from the Sargasso Sea
atggacaaaagtaataaatctggtgctgaggcattaattcattctcttcatcttgagggggtagatcttatttttggatacccaggaggagcagcactacatatctatgatgcaatatttaatcaaaactatgtagaccatattcttgtgagacatgagcaaggagccgtccatgctgctgatggatatgcaagagcaactggaaaaccaggcgttgcattagtcacttcaggaccaggagctacaaatgccattactggcttagccactgcttacatggattccacgcccatcgtagttatttcaggacaagttaaatccaatttaatcggaacagattcttttcaagaaactgacatgattggtgtatcgcgacctatcgtaaagcatagtttccttgttcaaagagcagaagatatacctgatatcgtaaaaaaagcctttcatatcgccacaacaggcagaaaaggtccggttgttattgatatccctaaagactttaccgatccggaatataaatttgaattcaattacccatcagaaataaacatgcgctcgtataatcctccagaaggtgcagatacgtcgagtataaaagaagcagctgatttgattgcaacagctaaaaggcctgtcatttattctggtggcggggtaaaccaaaataatgcttctgaagaactaactgctctagcaaaacttttaaattttccagttaccaatactttaatgggattgggtgccttcccaggttcagacccacaatttatgggtatgttgggtatgcatggaacttatcaagcaaatatggctatgcataatgcagatttaatcattgcagtaggagcgaggtttgatgatcgaattacaaatgatcctaatcaatttgctctcagtgctaagaaaatccatattgacgtggatcctgcgtccgtctcaaaaattattcatgcagatataccaatcgttggttctgcaaaagaatcattaactgcacttattgaagaacttaaatctagagatttgaaaactaatgaatcagatatttctgagtggaacgaacagattaaaaactggcgagatgcacatggcttaaaccattctctattagagatgggagcgcaaaatggaaagatacttcctcagcaagttatacaatctctctataaagaaacaaatggagaggctttcgttacatcagatgtgggtcaacatcagatgtttgctgctcagtattatcattttgataaaccaagacaatggataaattctggaggtcttggcacgatgggctttgggcttccatcggcaatgggcgttcaactggcataccccgagtctatagtctcatgtgttactggtgaaggaagcatacagatgtgtatccaagaactttcaacatgtcttcaatatgggttgcctataaaaataattaatctcaataacgccgcattgggaatggtaaaacaatggcaagatatgcaatacggaggtaggcattcatctagtacgtatgaaaattcattaccagattttgtggcacttactgagtcatacggacatgttggtattaaagtatctaaattcgatgagctagagtcagctatgaaagagtgcatatcccttaaagataaactggtatttttagatgtggatgttgatccaaatgaacatgtttatcctatgctcgaggctggtaatgcgatggatcacatgcgtcttagcaaagacgaaaagacttggtaat

SEQ ID NO: 232152 - DNA, 1861 bp, Unknown
  Bacterial polypeptide expressing nucleotide sequence isolated from the Sargasso Sea
ctgggtgcagcggtgaccctcacgacctccacccccagcaccacagccgtcggtgctccccagcgagtcagcggtgcctacgccctcatggacgccctgcatcgccatggggtgtcgcacatctttggctaccccggcggcgcgatcctgccgatctacgacgaattacatcaggcggaagcccgcggcgatctcaagcacttcctggtgcggcatgagcaaggcggtgcccacgcagccgatgcctatgcccgtgccaccggcaaagttggcgtttgttttggcacatcgggacctggtgccaccaatctcgtcaccggcatcgccacggcccagatggattcggtgcccatggtggtcatcaccgggcaggtgccaaggccaatgattggcactgatgccttccaggagaccgacatcttcggcatcaccctgccgatcgtgaagcattcgtggttggtgcgcgatccagcagagctggccagcgtcatcgcccaagcctttttcatcgcctccacaggccggcccgggcctgtccttgtagacatccctaaagatgtcggccaagaactatttgattacgtcccggtagagcccggcagcatcattccgcgtggctttatccatccaccagagcacgacaaacaggacatcgctgctgctctcgatctaattgaggaggcccagcgtccgctgctctatgtgggaggtggagctgtctctgcaggggcgcaagaagctctcaatgcaatcgctcaacgccaccgaattccggttaccacgacgttgatgggcaagggggttttcgatgagaacgatcccttggcagttggcatgttggggatgcatggcaccgcctatgcaaactttgccgtcactgattgcgacctgctgattgccgttggcgctcgctttgacgatcgcgtgaccggcaaactcgacacctttgctccacgggccaaggtcattcacttcgagattgatcccgctgaggtcggcaaaaaccgcaagcccgacgtggctgtcttgggtgatgtgcgccacagcttgaaagaactacttgagcagagccaacaacgtcgtatcgaaccgcatacgtcagcttggttagctcgaattgaaagctggaaacaaaactatccactcaccacacctccaacggatggtgggatttacccccaggaagtgcttctcgctgtccgagacctggcccccaaagcctggatcaccactgatgttggtcagcatcaaatgtgggcagcccaatacctgcgctgcggaccccgtcaatgggtcagcagcgcagggctaggcaccatgggtttcggcttgcctgccgccattggtgttcaagtggccttgatggatgagcaggtggtttgtatcgccggcgatgccagcgtgttgatgaacattcaagagctggggaccctcgcccagtacggcctgcccgtgaaaattgtgatcgtcaataaccactggcaaggcatggtgcgccagtggcaggagagcttttacgacgagcgctactcggcctccgacatgctgccgggtatgcctgatttcattgctctagcccgcgcctttggtgtaggtggcgtgcatatcaatgagcgcgcacagctgaaaccacaactgcaacaagcgttagcggcaccggggcccatgctgatcgatgttcacgttcgccgcggtgaaaattgttatccaatggttccccccggcaagagcaatgcccagatggtgggattaccaagccatccagaattagccctcagcgaacgacgcacctgcagcaagtgcggccatagcaacccaagtgaacacctgttctgcagtaactgcggtcatgggctttaac

SEQ ID NO: 232153 - DNA, 346 bp, Unknown
  Bacterial polypeptide expressing nucleotide sequence isolated from the Sargasso Sea
atgtcaaaattatattcaggagctgagattgtattcaaatgtttggaagatcaaaatgttagccacatatttggttatcctggaggagcagtccttccaatatatgatgaattaaaaaattttaattctataaaacatattttagtaagacatgaacagggcgcagggcacgcagctgaaggctatgcaagatcaactggaaaaccaggtgtactgttagtaacttcaggtcctggagctaccaatgctgttactgccttaacagacgcttacatggactctattcctttagtatgcatcacaggacaagttccaacgcatttaattggtacagatgcattcaaga

SEQ ID NO: 232154 - DNA, 1024 bp, Unknown
  Bacterial polypeptide expressing nucleotide sequence isolated from the Sargasso Sea
atgctaaaattatattcaggagctgagatagtattcaaatgtttggaagatcaaaatgttagtcacatatttggttatcctggaggagcagtccttccaatatatgatgaattaaaaaattttaattcaataaaacatattttagtaagacacgaacagggcgcaggacacgccgcagaaggctatgcaagatcaactggaaaaccaggtgtattgttagtaacttcaggtcctggagccaccaatgctgttactgctttgacagacgcttacatggactctgttcctttagtttgcatcacaggtcaagttccaacacatttaattggtacagatgcttttcaagaatgtgacacaactggtattactagaccttgtactaaacataactggttagtaaaagatgtaaatgatctagctgaaataatgcataaagcttttgacgtagcgacaacaggtagaccaggaccagttttggtagatatacctaaagatattcaatttcaaaaagctaaatacaaaaactacaaaaataaaaaaaaattaaatggtaaatctcatgataactattcacaaaaaaatattgatgaattaattaatttaattagcaaagcaaaaaaaccaattttttatactggaggtggagtaataaattcaggaacaaaagcaagtgagctgttaagagaacttgtgtatgcaacaggttttccaataacttcaactttgcagggtcttggttgttttcctgcagatgataatcaatttttaggaatgttaggtatgcatggtacctatgaagcaaacaatgctatgtatagctgcgacttaatgataaatgttggtgcaaggtttgacgatagaattaccggtaaaattgacgagttctctccaaaatctaaaaaagttcatattgatatagatccatcatctataaataaaaacgtaaaagtagatttagcaattgtcggcgatattaaatctgttctaacgacaacactaaaaacttttaaaagatcaaaaaaaa

SEQ ID NO: 232155 - DNA, 757 bp, Unknown
  Bacterial polypeptide expressing nucleotide sequence isolated from the Sargasso Sea
atgggctgctccgttactcgtcaagctgatgttccgaatccacgatcaccgtcgtgcgtgtccgctgacagtaagacctacttagggctacccgttgtcgggtggcatactggcgttcaagaggtgaacaacgtggagcttttatccggcgctgaaatggtcgtccgcttcctgcgtgacgaaggcgttaagcatatctatgggtaccctggtggtgctctcctgcatatttacgatgccctgttcaaagaaccggaagtgacccacatcctggtccgtcacgaacaggcagcgacccatatggctgacggctatgcccgcgccaccggcaaggccggcgtggtgctggtgacctctggccccggcgcgaccaatgccatcaccggtattgccaccgcctacatggactccattccgatggtggtgatctccggccaggtgccgagcgccatggtcggtaccgatgccttccaggaaaccgacatggtcggtatttcccgcccgatcgtgaagcacagcttcatcatcaagcacccgtcggaaatccccgaagtgctgaagaaggcgttttacctcgccgaatccggtcgtcccggtccggtcgtggtcgacattccgaaggacatgggtgatcccacccagaagttcgagtacgtctatccgaagaaggtcaagctgcgttcctacagcccggcggtacgtggccactccggccagaaccgcaaggctgccgagatgctcttggctgccaagcgtc

SEQ ID NO: 232156 - DNA, 589 bp, Unknown
  Bacterial polypeptide expressing nucleotide sequence isolated from the Sargasso Sea
caatatccaaaggaaaggtcgtttgtgacatcagatgttggtcagcatcaaatgtgggtagctcaatattataaatttgataaccctaatagatggattaactctggtggactaggcacaatggggtttggtctacctgctgcgataggcgcgcagctagcttatccaaaagagcaagttatttgtgtgacaggtgaggcaagtattttaatgtgcatacaggaattatcgacatgcttacaatatggtttaccaataaaaattattaacctaaataatagatacatggggatggtaagacaatggcaagaattcttttatgagggaaggtatgcaatgtcgtacatggatgctatcccaaattttgcgaagcttgctgagagctttggtcacatagggatggtaattgacaaaccagaaaatcttgaaaatgatctgaaaactgcacttaaccacaaaaatagactagtttttgtagacgtcataacagaccaaactgagaatgtatatccgatgatagtaagtggcaagggacaccatgaaatgcatcttgctccatctgcgaatgaggatattgaattagcatgaa

SEQ ID NO: 232157 - DNA, 1334 bp, Unknown
  Bacterial polypeptide expressing nucleotide sequence isolated from the Sargasso Sea
aatggataaaagtaataagtctggtgctgaagcattaattcactctcttcatctggaaggagtagagcttatgtttggatatcccggaggagcagctctacatatttatgatgctatatttaatcaaaactatgttgatcatattctagttagacatgaacaaggcgcagttcatgctgctgatggatatgccagagctacaggcaagcctggtgtagctttagtaacatctggtccgggtgctaccaatgcaattactggcttagccacagcttatatggattcaactcctatagtagttatttccggtcaggttaaatcagggttaatagggaccgattcctttcaggaaacagacatgattggagtttctagacctatagtgaaacatagttttctcgttcaatctgctgaagacattccagagattgtaaaaaaagcttttcacattgcgacaaccggcagacctggtcctgttgttattgatataccgaaagattttacagatccagagtataaatttgagttcaattatccttctgaagttaatatgcgctcgtataatcctccaaaaaaaggtgatacttctaggataaaagaaacggtagatttaatcgaacaatcaaaaaaacctgtcatatattctggaggcggtgttattcaaaatgatgcttctgaagagttaactgccttggctaagcttttaaatttccctgttactaatactttaatggggttgggggccttccctggttctgacccacaatttatgggtatgctaggtatgcacggtacctatcaagcgaacatggccatgcacaatgcagatttaataattgccgtgggtgctaggtttgacgatcgaataactaatgaccccaagcaatttgctcttggagcaaaaaaaattcatatcgatgttgatgcagcatcagtttcaaagattattcatgcagatattccaattgttggttcagcaaaagagtgccttgcagctcttattaaagaaattaattctagggacctgcaactcaataattcagctatagcagagtggaatcaaaaaatatctgattggcgagataatcatggcttgaatcattctatgttggaacttggacctcaaaacggcaagattctaccccaacaagttgtacagtctctctacaaggaaactgaaggtcaggctttcatcacatccgatgtaggacagcatcaaatgttcgcagctcagtactaccattttgataaaccaagacaatggataaactcaggcggattaggaactatgggttttggcttgccatctgctatgggagtacagttagcttacc

SEQ ID NO: 232158 - DNA, 880 bp, Unknown
  Bacterial polypeptide expressing nucleotide sequence isolated from the Sargasso Sea
atgtctgataggttgtcaggcggagatatgctaatcagggcgctgcaggaagaaggcgtcgattgtatctttggttatcctggtggcgctgtcttgcacatttatgacgccatttttagacagcaaaagatacgtcatgttttagttcggcatgagcaagctgcgacgcatatggcggatggttacgctcgcgcgaccggaaaagccggagttgtcctggtcacgtcaggacctggtgcaaccaacgcgataactggtatcgcgacggctcacatggatagtatcccaatggtcgtgttgtcaggccaagttccctctaatttgattgggagcgacgcttttcaagaaacggatatggttggcgtgtctaggcccgtggtaaaacatagttttattgttaaacattgcagcgaaatacctttgattattcgcaaagcatttcatattgcgaccacgggtcggcctgggccagtggttattgacatccccaaagatacgaccgatccggagatcctggatacttatgagtttcccgaaaccgtccagatgcggtcatacaatccagtagtcgagggaaacactaagcaaattgcaaaggccgtaaagcaaattttttcttcgaagaaacctattttttatgtggggggcggagcggtgcagagcgacgcctctgaagagctaaaggcaataatggcatttctccgtgcgcctattacgaatactttgatgggcttgggtgcgtttccaggtactgataggcaatgcttgggcatgctagggatgcatgggacctatcaggcgaacatggccatgcatgaagctgatttaattgttgctgttggagcacgttttgatgatcgggtgacgaataatcctgaca

SEQ ID NO: 232159 - DNA, 436 bp, Unknown
  Bacterial polypeptide expressing nucleotide sequence isolated from the Sargasso Sea
aatgactggtgcacaaatggttcttaaggccttggaagatcaacaagttgatacaatatttggctatcctggtggcgcagttttgccaatatatgatgaattagcaaaaactaaggatacaaaccaccaaatacgccattttttagtaaggcatgaacaaggtgcatcccatgctgctgaagggtatgcaaggtcaagtggtaaagttggagtaatgttagttacttctggccccggagttactaacgcagtgactggattaactgatgctatgatggattcaattcctcttgtttgtattagtggacaagttcctacgcacttaattggaacggatgcatttcaggaatgtgatgcggttggaattactcgtccgtgcaataagcataattggctagttaaggatataaatgatctatctcgaatttacacgaag

SEQ ID NO: 232160 - DNA, 958 bp, Unknown
  Bacterial polypeptide expressing nucleotide sequence isolated from the Sargasso Sea
tatgcatgattgtgatttgatgattaacattggcgcgagatttgatgataggataactggaaagatagatgagttttcaccaaaatcgaaaaaagttcatatagatatcgatccatcatctatcaataaaaatgtaaaagttgatttaccaattgtcggtgatgtttctgaggtgatgctttcggtaataaaaactctaaagaaaaaaaattcaaattttgcaagttcgaataaagaaaaaacttcaaaatggtgggaaaaaatttctgaatggagatcagtcaactcacttaattttataaacagtgataaaacaataaaaccacagcacgctattcaaagattatatgagcttacaaaagataaagatacttatataactactgaagtaggccaacatcaaatgtgggcagcgcaacattataaatttaataaaccaaacagatggatgacgtctggaggcttgggaacaatgggatacggtttgcctgcagcagttggcgttcagattgcacatcctgacaaattagtagttgatatagcaggagaagcttcagtattaatgacaatacaggagatgtctacagcagttcaatataatttacctattaaaatttttattttaaacaacgagtatatgggaatggtaagacaatggcaggaactccttcatgaaaaaaattattcagaaagttatactgcagcacttccagattttgtaaaactagctgaagcatatggatgtgttggtataagagccaaaactcctgatgaacttgatgaaaaaataaaagaaatgataaatgtaaacaaacctgttatttttgattgtctagttgacaaagaagaaaattgttttccaatgataccatctggtaaaccacataaccaaatgttgttaggtccaaatgatcaaaaagaaaataagattactggaaaaggaaaaactttagtttaa

SEQ ID NO: 232161 - DNA, 715 bp, Unknown
  Bacterial polypeptide expressing nucleotide sequence isolated from the Sargasso Sea
atgtcaaaattatattctggagcagaaatagtattcaaatgtttggaagatcaaggagtagaagttatttttggttatccaggcggtgctgtattaccaatatacgatgaattaaaaaattttagttcagttaaacattttttagtcagacacgagcagggagcaggacatgcagctgaaggatacgcaagatcaactggaaaagctggcgttgctttagtgacatcaggaccaggagcaacaaatatagtaactgctttaacagatgcttatatggattcagtaccaatagtttgtatatcaggacaagtaccaactcatttaattggaacggatgcatttcaagaatgtgatacaactggtattacaagaccatgcacaaaacataattggttagtaaaagatgtaaaagatcttgctaaaaccattcacagagcatttgaagttgcaacgacaggaagacctggaccagtcttagttgatattccaaaagatattcaatttcaaaaaacaaattatactaaatataagagacaaaaaaaaataaatggcaaagctcaaaaacattttaatcaatcagaaatagacacactgattaatttaatgagcaaatcatcaaaaccaatattttatactggaggaggagtcataaattctggaccgaaggcaagtacattattaagagaactggtatatgcaactggatttccaatta

SEQ ID NO: 232162 - DNA, 1660 bp, Unknown
  Bacterial polypeptide expressing nucleotide sequence isolated from the Sargasso Sea
atgattagaggcgcagacgcagtcataaaagtgttggcagcacatggtgttaccacagtatttggttacccaggtggtgccattatgccaatctacgatgccctctatggaagccctgtcgaacatctcttaagccgccacgaacaaggcgcagcctttgccgccgtaggttacgccagagccagtggtaaaaccggcgtgtgctttgccacctctggtccaggtgcgactaacctaatcacttcacttgctgatgcgttattggattctgtacctgttgtcgctatcacgggtcaggtttcaaccgccgtgattggcaccgatgcgtttcaagaaatcgatgtattgggtatgtccttaagctgcactaagcacagttttatggtgacggatgtaaatgatcttatcccaaccttgtatcaagccttcgacatcgccgcatctggccgacccggcccagtgctggtggatatccctaaggatattcaaatcgcgcaactggaatatcgcactccattgctagcggtaaccaatgagccacaggcgagcgccagtgagattgaagcggcccgcgccctgttagcagaggctaagcagcctatgttgtacgtgggtggcggcgtggggatggcgggagcggtcgatcaactgcgggagtttatcaaagccacggggatgccatcggtcgccacgttaaagggcttaggcagtattgcccatggcacgccaggttatttaggcatgttaggtatgcatggcggaaaggcggccaacctcgcggtgcaggattgtgatttattagtggttgctggtgcgcgcttcgatgacagggtcactggtcgtttagcaacctttgccaacaaggccaaagtcatccatttggatatcgatgccgccgagctaggtaaactgcgccagcccgatgtggctattgccggtgatttacgccagattttccccgctttgactatggcgctgaacatcacgccttggcaggcagaggttgaacaccttgcccgtaaacatcaatgggattatcaacatcccggtagcttaatctatgcccccgctatgctgcgccgtttagctaataaactgcccgaagacagcgtcgtgtgctgcgatgtgggccagcatcaaatgtgggttgcccagcatatgtggttccgccgccctgaagatcatttatccagcgcagggttaggcactatgggctttggtttacctgccgctatcggcgcccaagtggctcgccccgatgcaactgtggtcacagtgtctggcgatggctcttttatgatgaacgtgcaagagctgaccaccatcaagcgccgcaaattaccggtgaagatcctactgatcgacaaccaaaaattggggatggtgaagcagtggcagcagctattctttgaagagcgctacagcgaaaccgatctgtcagacaatcctgattttgtgcaactcgcttcggccttcgatattcccggccgcacgattttctcttccgacgaggtggaagaggccttaaccgaaatgttagcggctaagggaccctatttgttacacgtagcaatcgacgatgcttttaacgtttggccactggtgccccccggcgcatcaaacagcgatatgatggacgaaatggagaaacaaacatgat

SEQ ID NO: 232163 - DNA, 415 bp, Unknown
  Bacterial polypeptide expressing nucleotide sequence isolated from the Sargasso Sea
atgtcaaaattatatacaggagcagaaatattatttaagtgcttagaagatcaaggtgttgattttatttttggttatccgggaggggctgtgctgccgatttatgatgaattaaaaaatcataaaagcataaaacatatacttgctagacatgaacagggcgcaggacatgcagcagaaggttatgctagatcatcaggaaaaccaggaattgtattagttacctctggtccgggagcaactaacgtagttacagcgctgaccgacgcttacatggactctgttcctctagtatgtatttctggacaagtcccaacacatttaattggcactgatgcttttcaagagtgtgacacaacaggtatcactagaccttgcacaaaacataattggctggttaaagatgttaaagatt

SEQ ID NO: 232164 - DNA, 1768 bp, Unknown
  Bacterial polypeptide expressing nucleotide sequence isolated from the Sargasso Sea
atgccaaaattatattcaggagctgagatagtattcaaatgtttagaagatcaaaatgttagtcacatatttggttatcctggaggagcagtacttccaatatatgatgaattaaaaaattttaattcagtaaaacatattctagtaaggcatgaacagggcgcaggacatgccgctgaaggttatgcaagatcaactggtaaaccaggtgtcttgttagtcacttcaggtcctggagccaccaatgctgtaactgctctaacggatgcttacatggattcagtaccgttagtttgcatcactggacaagttccaactcacctaattggtacagatgcatttcaagaatgtgacacaacaggaattacgagaccttgcactaaacataactggttagtaaaagatgttaatgatttagctgaagtaatgcataaagcttttgaggtagcaactacaggtaggccagggccagttttggtagacattccaaaagatattcaatttcaaaaagccaaatacaaaaactttaaaaataaacaaaaattaaatggaaagtctcataacaactattcacaaaaaaatattgatgaattgattaatttaattagcaaagcaaaaaaaccaattttttatactggaggtggggtaataaattctggggcaaaagcaagtgaacttttaagagaactcgtttatgcaacaggttttccaataacttcgactttgcaaggtctgggttgttttcctgctgatgataatcaatttttaggaatgctaggtatgcatggaacttatgaggcgaataacgccatgtattcatgtgacttaatgataaatgttggtgcaaggtttgatgatagaattactggtaagattgatgagttctctcctaagtctaaaaaagttcatattgatatagatccatcctcaataaataaaaatgtaaaagtagatttagcaattgttggagatattaagtcagttttaacatcaacattaaaaacttttaaaaaatctaaaaataatttttctaaatcaaacaaacatcaaatatcaaattggtgggaacaaattcagaaatggagatctaaaagatcattagactacattggaagtgaagaaactattaaacctcaatatgcgattgaaagattatacgagctaactaaagataaagatacctatataacaactgaagtaggccaacatcaaatgtgggctgctcaacactacaagtttaataaaccaaatagatggatgacttctgggggtcttggcacgatgggatatggattaccagcagcagttggagtccaaattgctcatcctgagaaattagtaattgatattgctggtgaggcatctgttctgatgactatgcaggaaatgtcaactgcagttcagtacaatttacctataaaaatatttattttaaataatgagtacatgggaatggtaagacaatggcaggaattactacatgataaaaattattcagagagctatacagctgcattgcctgattttgtcaaaatggcagaagcatatggatgtgttggtataagagcaaaaacacctgaggagttagatgataagatcattgagatgttaaacacagatcgtccagttatatttgattgtcttgtagacaaacaagaaaattgctttccaatgataccttctggaaaacctcataatcaaatgttgcttggtcctaaagaccaaaaagagaaaaagattactggaaaggggagaacactggtttaat

SEQ ID NO: 232165 - DNA, 1372 bp, Unknown
  Bacterial polypeptide expressing nucleotide sequence isolated from the Sargasso Sea
agtcaaagatataaatgatttagctagtacaatacataaagcttttgaagtagcaactactggtaggccaggaccagttttagttgatataccaaaagatattcagtttcaaaaaacaaaatataacagaccaaaaaaagaaaaaaaacttaacggtaaatctcacaatcattttaatcaaaatagtattgatgaattaattgaattaatgagtaaatcgtcaaaacctattttttatactggtggtggagtaattaattctggacctaaggctagtgaacttttaagagaacttgtttatgcaacaggttttcctatcacatcaactttacaaggattgggatctttcccaggcgatgataatcaatttttaggaatgttaggtatgcatggaacttatgaagcaaataatgcaatgcatgattgtgatttgatgatcaacatcggagcacgtttcgatgataggataacaggcaaaatagatgaattttcaccaaaatcaaaaaaggttcatattgatattgatccatcgtctattaataaaaatgttaaagttgatttagctatagtaggagatgtaaaaactgttctttcatctactttaaaaagtttaaaacaaaaaaaatcaaaatttttaaaatctaataaacaaaagacttctaagtggtgggaaaaaattcaaaaatggaggtcagttagatctctagattatatcggaagtgaagagactataaaacctcagtttgcgattgaaagattatatgaattgactaaagacaaagactcctacattacaactgaggtaggacagcatcagatgtgggctgcacaacattataaatttaataaaccaaatcgttggatgacatctggtggattaggtactatgggatatggtttaccagcagcagtaggcgtacaagtcgctcatccaaaaaaattggtcattgatattgcaggagaggcttcagtattaatgacaatacaggaaatgtctacagctgtgcaatacaaccttccaataaaaatatttatattgaataatcaatacatgggtatggttagacaatggcaagaacttttacatgataaaaactattctgaaagttatactgctgctctaccagattttgttaaattagcagaagcatataactgtgttggtataagagcaaaaacacctgaagagttagatgacaaaattattgaaatgctgaatacagataaacctgtaatatttgattgcatggttgataaagtagaaaattgttttccaatgataccatcaggaaagccacataatcagatgattttagggcctaaagaccaagaaagtaaaaaaattactggcaaaggtaagtcattagtttaa

SEQ ID NO: 232166 - DNA, 988 bp, Unknown
  Bacterial polypeptide expressing nucleotide sequence isolated from the Sargasso Sea
tatgttgggcatgcacggtatgtatgagtcaaatatggcaatgcatgactgtgatgtaatgatcaatattggtgctcgatttgatgatcgagtaactggcagattagatgcattctcaccaaattccaaaaaaattcatgttgatattgatgagagcaatatcaacaaaacaatcaatgttgatgttccaataataggcgatgttaaacaagttgttgagaaaatgatcaatatttggaaaaccaaaaaatataaaattgaagatgaggcattaaaatcatggtggcaaaaaattgaaaaatggaaagaggtagattgtcttcattataataatgatagcaaacaaattaaaccacaatatgccgttcaaagattatatgaattaacaaaaaatactaaaacttttattaccactgaagttggacaacatcaaatgtgggccgcgcaatattataaatttgaagaaccaaatagatggcttacatctggtggattaggtacaatgggctatggttttccagcagcgattggtgctcaagttggacatccggatgctttagtagttgacatagcgggggatgcatcaattcttatgaacattcaagaaatgagcacagcaattcaatatagacttcctgttaaaatatttattttaaataatgaatacatgggaatggttagacaatggcaagaattattacatggaggaagatactctgagagttataccgatagtttacccgactttgttaaattggctgaaagttataaggctgttggcttaagagcaaagactacagatgatcttgataaagttattcaagaaatgatacagactgataatactgtcattgctgatatttgggtcacaaaagaagaaaactgctttcctatgatacaaagtggatcggctcataatgaaatgcttttaagtaaagatcaaaagcaagataaaaaatcagcagaaaaaggaaaaatattagtttaa

SEQ ID NO: 232167 - DNA, 433 bp, Unknown
  Bacterial polypeptide expressing nucleotide sequence isolated from the Sargasso Sea
catgactggagcagaggcagtaattcaagccttagttgataacaaagttgaggtaatctttggatatcctggaggagcagtacttccactgtatgatgctttatttgaaaataaaaaaattaaacacatattagtcaggcatgagcaagcagctgtgcatgctgcagagggttatgctagatcaactggcaaggttggatgtgttttagtaacttctggaccaggcgcaactaatgcaattacaggattaacagatgcactcatggactctgtaccagttatttgtctcagtggacaagtacctacacatttaattgggactgacgcttttcaagaagctgacacaactggtatttcaagaccatgtacaaagcataattatttagtaaaaaatgctgataaattatgtgagactattcataaatctttttga

SEQ ID NO: 232168 - DNA, 1261 bp, Unknown
  Bacterial polypeptide expressing nucleotide sequence isolated from the Sargasso Sea
tatggttaatatgcaacttactggagctcagatggttcttaaagcatttgaagatcaacaagtagatacaatttttggatatcctggtggagcagttttgccaatatatgatgaactagctaaagataaggactctaataagccaattaggcattttttagttagacatgaacagggagctgcgcacgctgcagagggatatgcacgctcaagtggtaaggttggtgttttattagttacttcaggtcctggagttacgaatgcagttactggactgacggatgcaatgatggactcaatacctttagtgtgtattagcggtcaagtaccgacccatcttattggaacagatgctttccaagaatgtgatgcagttggcataactcgtccttgcactaagcataattggctggttaaagatattaatgatctctcaaggattttacatgaggcattctatgttgcttctaatggtagacctggtccagtattagtcgatataccaaaagatattcagtttcaaactggaacatatataggtcctgatactgttaagcacaaatcatatcgacctaaattaaaagcaaacattgataagattgatgaagcattacaattaattgttaatgcagaaaaaccaatattttatactggtggtggagtaattaattcgggtaatgctgctgttcaattacttagagaatttgtaagacttactggattcccaattacatcaactttacaaggactaggcgcattcccaggtgacgataaccaatttgttggaatgttagggatgcatggaacctatgaggctaatatggcaatgaataaatgtgatttgatgattaatataggtgctcgctttgatgatagaataacaggtaaaatagatgagttttcacccaattcaaaaaaaatacatgtagacattgatccatcttcaataaataaggttatttcagtagatgttggactggctggtgatgtagcacatgttcttgaggatgcgataaagctttggaaatcaaaggtctataaagttaataaatcttctgttaaggattggtggaagcaaatagataaatggaggaaaactgattcacttcattttgaagaagacaacgacacgattaagccgcaatatgcgatacagaggctttatgaactaaccaaagactctgatgcattcataacgactgaagttggacagcatcagatgtgggcagctcaacattataaatttaataaaccgaaatag

SEQ ID NO: 232169 - DNA, 516 bp, Unknown
  Bacterial polypeptide expressing nucleotide sequence isolated from the Sargasso Sea
aatgacaggagctgaaattgttttccaagttttggaagatcatggtgttagacacatctttggttaccctggaggtgctgtacttccaatttatgatgaattaaaaaatcataaaagtatagaacatattttagttagacatgagcaaggagctggtcatgccgcagaaggatatgcgagatcatctggaaagcctggagtgcttttagtaacttccggaccgggagcaacaaatgccgttacagctttaacagatgcctatatggattctgttcctttagtttgtataacaggacaagttcccactcatttaattggaactgatgcttttcaagaatgcgataccactggaataacaagaccatgtactaaacataactggttagtaaaggatgtgaataaattatcaacgataatgcataaagcttttgaagtagctacatctggaagacccggacctgttttagttgatataccaaaagatattcagtttgcaaaaggaaaatatattgagcc

SEQ ID NO: 232170 - DNA, 835 bp, Unknown
  Bacterial polypeptide expressing nucleotide sequence isolated from the Sargasso Sea
aataaaaatgttaaagttgatttaccaatcataggagatgtttctgaagttattagttctacaatcaagagtataaaaagaacaaaacctaactttgcaaaatcaaataaacaaaaaatttctaaatggtgggaacaaattgataaatggagatcaattaagtcatttaattttgttaatagtacagagacaataaaaccacaatatgcagttcaaagactttacgaattaacaaaaaaaaaagatacgtacataacaaccgaagttggccaacatcaaatgtgggcagcgcaacattataagttcgataaacctaatcgttggatgacatcggggggcctaggtactatgggttatggtttaccagctgcagtaggagttcaagtagctcatccaaaaaaattagttattgatattgcaggagaagcttcagttttaatgaccatgcaagaaatgtctacggcagtacagtacagcttgccaattaaaatttttattttaaataatgaatacatgggaatggttcgacaatggcaagagcttttgcatgataaaaattattctgaaagttatactgctgctttacctgattttgttaaattggctgaggcatacggatgtgttggtttaagagccactaaacctgaggaattagatgacaaaattattgaaatgattaatacagatagaccagtaatatttgattgcttggtagataaagaagagaactgctttccaatgataccatcaggaaaaccacataatcaaatgcttttagggccacaagataaaaaggcaaataaaataacagggaaaggaaaaactttagtttaat

SEQ ID NO: 232171 - DNA, 1129 bp, Unknown
  Bacterial polypeptide expressing nucleotide sequence isolated from the Sargasso Sea
tccaaaattgataaaaataaaatattagaggcagttaaacttattaatgatgcaaaaaatccattaattgtatggggacaaggtgttattcttggaaatgctgagaaagagttaaagaattttgtcgaaaaaagtggaattcctgcagcgtggacaatattaggtgcttcagctcttcctacatcgcatgaattaaatgttggaatggttggaatgcatggaaattatggacctaatattttaacaaataaatgtgatttattaattgctataggaatgagatttgatgaccgtgtaactggtgatacctcaacatatgcgaaacaggctaagattattcatttagagattgatccagcagaagtaaataaaaacattaaagtagatgttcctattttaggaaattgtaaggattcattaaggatgcttacaagagatataaaagaaaaatcatataaaaagtggttaaatacatttgatgaattaatgaaaaaagagtttaaaaaagtaatcaaaagtgatcttgctccaaagaaaaaaggattaacaatgggtgaatctataattgctattaataagtttacgaaaggaaaagctataattgttactgatgttgggcagcatcaaatggtggcttgtagatatgctaactttattgattctaaaagtaatattacttcaggaggactgggtacaatgggttttgctcttccagctgctataggagctaagatgggcgctccagaaagagaagtagtagcagtaataggtgatggtggatatcagatgactatccaagaattaggcacaatatttcaacttcaattacctgttaaaatagtaatattaaataatgattttcttggaatggtaagacaatggcaacaattattttttgataaacgatatgcttcaactgagatggttaatccagactttgtttctatagctaaagcttattttttagagtcagaaagggttgaaaatagatcagaccttgagcctgcagttaaaagaatgatagaatcaaagaaaccatttgttcttgaaatatgtgttgaaaaggaagataatgtttttcctatgataccatcaggagcatcagtttctgatataagactagaataaa

SEQ ID NO: 232172 - DNA, 1057 bp, Unknown
  Bacterial polypeptide expressing nucleotide sequence isolated from the Sargasso Sea
tatgaaaaaaatctcaggtgcagaagcaattattagatgtttaatatccgaagatgttgacgttttatttggttatccggggggcgcaataatgcctgtatatgacgagctttataaatttcaaaacgatataaatcatattcttgttagacatgaacaaggtgcaacgcatgcagctcaaggttatgccagatcctctggaaaggttggtgttgccatagcaacatctggacctggtgcaacaaatttagttactggaattgcagatgctcaaattgattcaactccaatggtatgcataacaggacaagttgcatcctatctactcggttctgatgcgtttcaagaaactgatattataggtatatcaacacctgttacaaaatggaactaccagattacaaaggcatctgagataagtgagattatatcaaaagcattctttatagctagaacgggaagacccggaccagttttaatagatattactaaagatgcacaatttgatatgattgaaaattttgagtataaaaaatgtgaaaatattcgcagttactcaccaatacctgctattaataaatctataatttctgatgctggaaaattaattaatgagtcaaaaaaacctcttattgtttggggtcaaggtgtaatacttggaaatgcagagtctgaatttaaagattttgttgaaaaaactggaatacctgcagcatggacaattcttggtgtctcggcaatttctacgaatcataaacttaatgttggaatggttggtatgcatggaaattatggtccaaatgttctaaccaacgattgcgatctattaattgcaatagggatgagatttgatgatagagtcactggagatttaaaatcatatgcaaaacaagctcaaattattcattttgaaattgaccccgcagaggttgataaaaatgttaaagttgacattgctgtcattggggatgtaaagcagacactaaaagaaattttaccacatgtaaataaaagtagtcataattcatgggtgcgaaagttcagagaattaaataaa

SEQ ID NO: 232173 - DNA, 808 bp, Unknown
  Bacterial polypeptide expressing nucleotide sequence isolated from the Sargasso Sea
atgccaaaattattaactggagcagaaattgtatttagatgtcttgaagaccaaaaggtagaacatatctttggttatccaggtggtgcagtattaccaatttatgatgaattaaaaaatcacccttctataaaacatattctagttagacacgagcaaggtgctggtcacgcagctgaaggttatgcaagatcatcaggaaaaccaggtgtagttttagttacatcaggccctggagctactaacgttgttacagcattaactgatgcatatatggactctgtcccactagtttgtatttctggtcaagttccaacacatttaattggaacagatgcttttcaagaatgtgacaccacaggaattacaagaccttgtacgaaacacaattggttagttaaagatattaatgatctttctaaagttattcatgaggcttttaaagttgcaacaactggaagacctggacctgtcttaattgatattccaaaagatattcagtttgcaaaaacaaaatacaaaaaacaaaatatagaaaaaaaattaaatggaaaatcgcataataaattttctcaagatcaaattgatgaattatttaaattactaagcaaggctaaaaaaccaatcatctatagtgggggaggagtaattaactctggtccaaaagcaagtcaggctctaagagaatttgttgagctaactggttttcctataacctctacacttcagggattaggtgcgtaccctggagatgataatcaatttttaggaatgcttggtatgcacggcacttatgaagcaaaataat

SEQ ID NO: 232174 - DNA, 1356 bp, Unknown
  Bacterial polypeptide expressing nucleotide sequence isolated from the Sargasso Sea
ctaagcataattttcttgtagatagtagggagtctattgctgatgtattcaagaaagcttttaccatagctactactggccgccctggaccagtcctaattgatattccaaaagatttgacagatccaagcattaagatagattttaattatccgaagaaggtaaatatcagatcttataagcctgcaccaaaagagtctgaagataaaattgatactgccgccaagttactatgctctgctaaaaaacctatgatttatactggaggagggataatactgggtaatgcatataaggatttgagcaaattagttaaaaatttaaattatccagttactaatacacttatgggtcttggagggtatcctgcaactgacaaacagtttttaggtatgcttggaatgcatggaacctatgaagctaacatggcaatgcatgattgcgatgttctattagctgtaggtgctaggtttgatgatagagttaccggggatacaacaaaattttgtccctcagcaaaaataattcatattgatatagatccctcatcaatttcaaaaattatcgaagttgatttatctcttgttggggatacatcaaaaattctgaaatcattgaatacagcagttaaaccatatcttaaaaaaattaataagaaaagtctgaaaatatggtggaataagattaataaatggagatcaaaaaaatgtttgagttataaaaaatcaaataagatcataaaaccacaatctgtcatagaaaacctttatgaagtaacaaaaggtaatgcttttgtaacctcagatgttggacaacatcaaatgtgggcagctcaatattataaatttgatagaccaaatcgatggattaactctggtgggctaggaaccatgggttttggtttgcctgccgcgatgggtgttcagttagcatatccaaaatctcaagttgtatgcgttacaggtgaagcaagcattgtcatgtgtattcaagaattagcaacttgtttacaatataggttgccaattaagattataaaccttaataatagatatatgggaatggttaggcaatggcaagaatttttctatgaaggcaggtatgcaatgtcttatatggaaactatacctgatttttcccaactggcgagtagctttggtcatattggaataaaaattgaaaaaccatctgatttaaaaagtaaactttcagaggcaatgaagttgaaagatcgattagtatttgtagatgtaataactgatcaagaagaaaatgtatatcctatgattaaaagcggcaaggctcataatgagatgcacttgtcaccaaccaatgaagatactgagttagcttgat

SEQ ID NO: 232175 - DNA, 1447 bp, Unknown
  Bacterial polypeptide expressing nucleotide sequence isolated from the Sargasso Sea
atgtctaaattaattagtggagcagaaatagtttttaaagcactcgaggatcaaaaagtggaatatatttttggttatcctggtggcgctgttcttcctatttatgatgaattaaaaaaccataaatcgattaaacatattttagctcgtcacgagcaaggagcaggtcatgctgctgagggatatgctagatcaagcggtaaacctggagtgctacttgttacttctggcccaggtgcaactaatgcagtgactgctttaacagatgcttacatggattctgttccgttagtttgtatttcaggacaagttccaacacatttaattggaacggatgcattccaagagtgcgacacaacaggtattacgagaccgtgtacaaaacataattggttggtaaaagatgttaatgatctttctagagttctgcatttagctttcgaagttgctacaactggaagacctggcccagttttagttgatattcctaaagatatacaatttaaaaaaggtaaatataaatttataaaaaatagcttaaagaaaaaaattaatggcaaagctactcacaagctatctaatatagagttagacaaatttattgacctaataaaaaaatcaactaaaccaattttttatactggaggaggtgttataaactctggtcctgatgctagtaaatatttaagagagttagtatctttaacaggttttcctattacttccactttacaaggactaggagcatatcctggagatgatcctcaatttttaggaatgttgggaatgcacggtactttcgaagcaaacaatgcaatgcatgattgtgatttaatgattaatataggagcaagatttgatgacaggatcacgggaaaggttgatgagttttcacccaaatctaaaaagatacatgttgatatagatccttcctcaataggaaaaaatattaaggttgacttagccgtagtaagtgatgtttcagaacttttaaaaagtttaatcaaaaggtttaaagaaaaaaataaaaactttttaaactctaataaacaaaaaacatctaaatggtgggaacagattgacaaatggagagaaaaaaaatctttaaattttattaatagtaataagataataaaacctcagcatgcagttcaaagactttatgaattaacaaaagatcaagatacttttattaccactgaagttggccagcatcaaatgtgggcagctcagcattataaatttaataaacctaatcgatggatgacgtctggtgggctaggtacaatgggttatgggcttccagcagcgattggagttcaaatagctaatccggggaaattagttgttgatatagcaggtgaagcatctgttttaatgactatgcaagaaatgtcgacagcagttcagtatagattaccaataaaaatatttatctttaaataat

SEQ ID NO: 232176 - DNA, 949 bp, Unknown
  Bacterial polypeptide expressing nucleotide sequence isolated from the Sargasso Sea
cattattgtgacttaatgataaatattggcgcgaggtttgatgacagaataacaggaaaagtagatgaattttcacctggctcaaaaaaaattcacgttgatattgatccatcttcaattggaaaaaatattaaagttgatctagctgtggtaagtgacgtaactcaacttttaaaatctttaatcaaaagatttaaagaaaaaaataaaaactttgcgagctctaacaaacaaaagacatcgaaatggtgggaacaaattgaaaaatggagagaaaaaaagtccttaaactttattaacagcagtaaagttatcaaacctcaacatgcagtacaaagattgtatgagatgactaaaaatcaggatacttttgttacaactgaggttggacaacatcaaatgtgggcagctcaacattataaatttaataaacctaataggtggatgacatctggaggtcttggaacaatgggctatggacttccggctgcaatcggtgttcaaattgcaaatcctgggaaattagttgttgatattgctggcgaagcttctgttttaatgacaatgcaggaaatgtctactgcagtacaatatagactaccaataaaaatattcattttaaataatgagtacatgggcatggtaagacagtggcaagaacttttgcatgaaaaaaattattctgagagttacacagctgcattaccagatttcgtaaagctcgcggagtcttatggctgtgttggaattagagcaaaaacaccaaatgagcttgatgaaaaaataaaagaaatgatcaatattgataaaccagtaatatttgactgcgttgtagataaagcagaaaactgttttcctatgataccttcaggtaagcctcataatcaaatgattttaggtcctgaggaggaagaagaaatttccgacgaggggaaagttttagtttaat

SEQ ID NO: 232177 - DNA, 749 bp, Unknown
  Bacterial polypeptide expressing nucleotide sequence isolated from the Sargasso Sea
gatggctacagcggagacgatgaccgatgggaacgggtataccggtatacgggacaaaacgaaggagatgaacggcgccgatatcctgattgcgtcagtcgtgcgagagggcgtcaacgtcgttttcggataccctggtggcgcaagcatggagatccaccaagcaatcacacgctcgaaacttcgtaacgtgctctgccgtcacgaacagggtgagatcttcgccgcggagggatatgccaaatcaagcggcagggtcggtgtctgcgtcgccacttccggtcccggtgcgacaaatctcgtgacgggtttggccgacgcaaagatggactccgtaccgctcgtcgccatcaccggtcaggtgccaagtggaaatatagggcgagacgccttccaagaaacaccgatcatcgagattacccgacagatcacgaaacacaactacctgatcgagcgaattgaggacattcccaggatcgtcaaggaggccttctacctcgcatcgagcgggagaccaggtccagtcctgatcgacatcccgaaggaccttcaacaggcctgtgctgtcccggacttcccggagaaaatcgaaatcacgagttacacccctacgatccaagcgccccgagacgagctccagagagtcgccgacctgatcagaaacagcactaaaccgatcgtgtattcgggcggtggaatcatcacgggcgaagcttcgggtgagttgagagagtttgtcgagaaaacac

SEQ ID NO: 232178 - DNA, 1372 bp, Unknown
  Bacterial polypeptide expressing nucleotide sequence isolated from the Sargasso Sea
gtaaaagatattaaagatttatcaaaaataattcatgaggcttttaaagttgctacaactggaaggccaggcccagtgttggttgatataccaaaagatattcagtttgcaaaaataggatattcaaaaccaaaacctacaaaaaaattgaatggcaagtcattaaattatttttctcagaaagatgtagatgaattaataaatttgatgaacaaatccaaaaaacctataatttattcaggaggaggagtaataaattctggtcctgaagcaagtgaagtcttaagagaacttgttcaattaactggttttccaatcacatcaaccctacaaggtcttggagcttatcctggtgatgataatcaatttttaggaatgttaggaatgcatggaacttacgaggcaaataatgctatgcatgattgtgatcttttaataaacataggggcaagatttgatgataggataactggaaagattgatgagttttctccaaaatcaaaaaaagttcatattgatattgatccttcctcgataaataaaattattaaagtagatttagctttagttggagatgttaaagatgttttaaagggtataaataaaacatttaaaaagaaaaatagtgattttaaaaattcaaataaacaaaaaatatctaaatggtgggagcaaattcaaaaatggagaacaaaaaactctttacactttaataacagcgatgaaacaataaaaccacaacatgctgttcaaaggctttatgagctgacaaaagacaaagatactttcattactactgaggttggtcagcatcaaatgtgggcagcccaacactataagtttaataaacccaatcgttggatgacttctggaggattgggtaccatgggctatggattaccagcagctgtgggtgttcaaatagctcatcctaaaaaattagttattgatatagctggcgaagcatctgttttgatgacaatgcaagaaatgtcgactgcagttcaatataatttaccaattaaaatttttattttaaataatcaatatatgggaatggtaagacaatggcaggaattattacatgaaaaaaattactcagagagttattctgaggcattacctgattttatcaaacttgcagaagcttatggatgtaaaggtattaaagctgataatccaaatgaacttgacgaaaaaattagggaaatggttcaatttgatggtcctgttatttttgattgtcgtgtagatccaaatgaaaattgttttccaatgataccgtcaggaaaacctcataatcaaatgatattaggtccaactgataaagaggaaaataaaattactgaaaaaggtaaagcattagtttaat

SEQ ID NO: 232179 - DNA, 547 bp, Unknown
  Bacterial polypeptide expressing nucleotide sequence isolated from the Sargasso Sea
aatgccaaaattatatacaggtgcggaaatagtattcaagtgtctcgaagatcaggaggtagattttatttttggttacccaggaggagcagtattaccaatatacgacgaattaaaaaattttgaaacgataaaacatatcttagttagacacgagcaaggtgcgggacatgctgctgaaggatatgcaagatcatctggcaaacctggggtagttttagtaacgtctggaccaggagcaacgaatgctgtaacagcattaactgatgcatacatggattctattcctttagtttgtatatcaggacaagttcctacacatttaattggaactgacgcatttcaagaatgtgataccacaggtattacaagaccatgcaccaaacataattggttagttaaagatataaaagatttacaaaaaactattcataaagcttttgaagttgcgactactggtcgaccaggaccagttcttgtagacattccaaaagatattcaatttcaaaaaataaaatatttaccatttaaaaaaacaaaaaaacta

SEQ ID NO: 232180 - DNA, 1324 bp, Unknown
  Bacterial polypeptide expressing nucleotide sequence isolated from the Sargasso Sea
aatgccaaaattattaactggagcagaaattgtattcaaatgtcttgaggaccaaaaggtagaacatatctttggctatccaggtggtgcagtgttaccaatttatgatgaattaaaaaaccatccttctataaaacatattttggttagacacgaacaaggcgctggtcacgcggcagagggttatgctagatcatcaggaaaaccaggtgtagttttagttacatcaggtcctggagcgaccaatgttgttacagctttaacagatgcttatatggactctgtaccattagtttgcatttctggtcaagttccaacacatttaattggaacagatgcatttcaagaatgtgacactacgggaattacaagaccttgtacgaaacataattggttagttaaagatataaatgatctttcaaaagttatgcatgaagcttttagagttgcaacaactggaagacctggaccagttttgattgatattccaaaagatattcagtttgcaaaagcaaaatataaaaaaccaaataaagaaaaaaaattaaatggaaaatcccataataaattttctcaatatcaaattgatgaattagtaaaattattaagcaaagctaaaaaaccaataatttatagtggtggaggagtaattaattcaggaccaaaagcaagccaggctttaagagaatttgttgagttaactggttttcctataacttcaacacttcaaggattgggtgcatatcctggagatgataatcaatttttaggaatgcttggtatgcatggtacttatgaagcaaataatgctatgcatgattgtgatctattaattaacattggtgcaagatttgacgatcgtattactggaaaaattgatgagttttcaccaaattcaacaaaggttcatattgatatagatccatcatcaattaataaaattatcaaagtagatcttgcaatagttggagacgttacgagtgtaattagtaaaattaataaaacaatgtctaaaagaaaaaatggtcatagcaagtcaaataaatcaaatatagctaagtggtgggagcaaattggaaaatggagagaaaaagactctcttaattttgtaaatagtgatgaaagcataaaacctcaatatgccgttcaaagactttatgaattaactaagaataaagatacttatgttactaccgaggttggacaacatcaaatgtgggctgctcagcattacaaatttaataaaccaaatagatggatgacatctggcggtttaggaactatgggatatggattgccagcagcagtcggcgttcaaattgct

SEQ ID NO: 232181 - DNA, 823 bp, Unknown
  Bacterial polypeptide expressing nucleotide sequence isolated from the Sargasso Sea
atgccaaaattgttatcaggagctgaaattgtttttaaatgtttggaagaccaaaatgtagaatatatttttggttatccaggaggagcagttctaccaatttatgatgaactaaaaaatcattcatcaattaaacatattctagttcgtcatgaacaaggagctggtcacgcagcagagggttatgcaagatcttcgggtaaacctggcgttgtccttgttacatctggtccgggtgcaacaaacgtagtaacagcattaacagatgcttacatggattctgttccattagtttgtatttcaggacaagtcccaactcatttaattggaacagatgcattccaagaatgtgatactacaggaattacaagaccttgtacaaaacataactggttagttaaagatattaaagatttatcgaaaataattcacaaagctttcgaagtagcaacaactggaagaccaggaccagttcttgttgatatcccaaaggacatacaatttcagaaaacggattatccaaaatttaaaaagaaaaataaattaaatggaaaagttcataatcatttttcacaaaaagaaatagatgaattagttaagctgatgtcaaaatcaaaaaaaccaattttttatactggtgggggcgtaataaactctggccctaaagcaagtgagttattaagagagcttgtagctgcgactggttttccaattacatctacattgcaaggtttaggttgttttcctggtgatgataataattttctgggcatgttaggaatgcatggtacctatgaagctaataatgcaatgcatgattgtg

SEQ ID NO: 232182 - DNA, 1117 bp, Unknown
  Bacterial polypeptide expressing nucleotide sequence isolated from the Sargasso Sea
aattctggacctaaagctagcgagttacttagagagttagtaagactgacaggttttccaataacatctacattgcaaggacttggagcatttcccggaggtgacaatcaatttattggaatgttgggaatgcatgggacttatgaagcaaataatgcgatgcatgactgtgatttattaattaacattggagcaagatttgatgaccgtattacaggaaaaattgatgagttttcaccaaaatcaaaaaaagttcacattgatatagatccatcatcaattaataaaattgttaaggttgatctatcaatagaaggagatgtagcagaagttataaatttaataacaaaaacattaaaaaataaaaatttgaatttagaaaaatctaataaacaaaaaatatctaaatggtgggaacagattgaaaaatggaaaacaaaaaaatcacttaattatataaatagtgataaaatcattaaacctcaacatgctgttcagagactatatgaattaacaaaaaataaagatacttatataactactgaggttggacaacatcaaatgtgggctgcacaacattataaatttgataaacctaatagatggatgacttcaggtggtttaggaacgatgggatatggattgcccgcagcagttggtgttcaaatagctcatccagaaaaattggtagtagatatagcaggtgaggcttcagttctgatgacaattcaagaaatgtcaactgctgttcaatacaatttaccaataaaaatatttattcttaataatgaatacatgggaatggtcaggcaatggcaagaattacttcatgaaaagaattactctgaaagttattctgctgcattaccagactttgttaaattagcagaagcttatgggtgtgttggtattagagccaaaaccccagatgaactagatcaaaaaattgaaaagatgattaatattaataaaccagtaatttttgattgccttgttgatcctcatgaaaattgttttccaatgataccatctggaaagccacataatcagatgcttttaggtccaaaggatcaagaagaaaataaaattacaggcaagggaaaagagttagtttaaa

SEQ ID NO: 232183 - DNA, 736 bp, Unknown
  Bacterial polypeptide expressing nucleotide sequence isolated from the Sargasso Sea
gatataaatgattctgatatcaaaaaagcgatcaaattgatagaggagtctgagagaccacttctttatgttggtggtggtgcaatatcttcaggagctcataatgaaataagaactttggcgaataattatcaaataccagtaactactacattaatgggaaagggcgcttttgatgaaaaagataaattatcagtggggatgttgggtatgcacggaactgcttacgcaaactttgctgttacagaatgtgatcttctggtagctattggagctagatttgatgatagggtgacaggaaaattagatacttttgctccaaacgcaaaggttattcatatagatattgatccagcagaagttaataaaaatagacgtgtagatgttgcaattgtctctgacgtttcaaaagctgttcgtaaaattaatgaaaaatctcttagtaacaaatttgcttttaggacgaagaattggctagaaaaaattgatttttggaaaaataaacaccctttgtatcaacctcctgaagaaggagaaatttatcctcaggaagttcttttaaaagttagggaactttcaccggaagcatatgtaactacagacgttggacagcatcagatgtgggctgctcaatatcttaggaattctccaagaaaatggattagtagtgcagggcttaggaactatgggttttggattgccagcagcaattggagtgaaggcagctttacctaac

SEQ ID NO: 232184 - DNA, 1443 bp, Unknown
  Bacterial polypeptide expressing nucleotide sequence isolated from the Sargasso Sea
tatgaatatttcagggtcagaagcagttattaaattcctattaaaagaaaatgttgatacaatttttggatatcctggaggagcgattatgcctatttatgatgcactatataattacgtaaataaaataaatcatatattaactagacatgaacaaggtgctattcacgcagctcaagggtatgcaagagtatctggaaaaacaggtgtttgttttgcaacatctggacctggtgcaacaaatttaattactggattaaatgatgctttaattgattctactcctattgtttgtattacaggtcaagttccttcaaatttattaggaacagatgcgtttcaagaatctgatgtaattggaatatcaatgccagtgacaaaatggaatcatcaaataacaaattcatcagaaattgttgaaatcctttctaaagctttttatatagcaagatcaggtagacctggaccggtactaatagatattacaaaagatgctcaattctcaaaaacaaaatttagatataaaaaatgtgaaaagataagaagctatcatccgtatccagttttgaaatcaaaggaaataaatgatgcagctaaaattattaatcaagctaaaaaacctctaattcttgttggtcaaggagttctactctctaaagctgaaaatgagttaattaagttttcagaaataacaggaattccattagcatctacattacttggattatctgcaataagctgtgatcacaaaaactatgtaggatatttaggaatgcatggaaattatggcccaaacgtaaagacaaatgaagcagatttaatcatcgctattggaatgaggtttgatgatagagttactggtgataccacaaaatatgcagtgaatgctaaaattattcacatagaaatagatccttctgagattgacaaaattataaaaactgatgtagcaataaatgcagacgctaaagaagctttaatagatctaaataaaatcgtccaaaaaaatagtcatgaaaaatggattaatgaattcagaaaatgtgataagctagaatttgataaaataattaataaagaaataaatggcccttataataaattgtccatggcagaaataattcataaaatatcagaatttacaaagggtaaatctataattgtaactgatgttggacaacatcaaatggtagcatcaagatattataaatttaaagaaccaaatagtaatattacatccggtggattaggaactatgggatttgcactccctgcagcaatggggtcaaaaattggtaatccaaatagagacgttatagctgttattggtgatggaggaatccagatgacaattcaagaactagctaccatatcacagtacaatataaaagttaaaattttaattctaaataacaactttcttggtatggtaagacaatggca

SEQ ID NO: 232185 - DNA, 1843 bp, Unknown
  Bacterial polypeptide expressing nucleotide sequence isolated from the Sargasso Sea
atgactacaaaatcactcacaaaaaatcatccgctagcaggaaagaagatgatgggtgccgacatgatcgtccaaatattggctgatgaaggtgtcgacacgatatttggttatagtggaggggcaatactacctacatatgatgctgtctttcgattcaatgaagaaaacaaagactcagatggaaatcaaccaatgccactaatagttcctgcaaacgaacaaggtgcaggatttatggcttcaggatatgcgagggcaagtggcaaggttggtgttgtgatggttacgtcaggtcctggagcaacgaatactgtaacaccgatacgtgattgtatggctgattctatcccaattgttgtgatatcaggtcaagtccctacaacagcaattggtactgatgcatttcaggaggcacctgtttctgcgataatgggagctgtctccaaacatatttttcttgtcacagacccgctccttctagaatctacaatccgctctgcgtttgaattagcaaaaacaggtagaccaggaccagtggtagttgatataccaaaggatattcagaattgggagggtgagttcctcggctctggatcactccctttgactggctaccgaaacagactagaaactgtaatgaataataaccttaacgatgaattggctaaaaacttctacaaattacttagcaaatcaaaaaaacccctcatctatgctggtggaggagtaataaatgcagatgctagctcgcaattgaggcagttttctgaaacttataaaataccaattgtcaccacactaatggcattgggtgcaagtgacacgacaaaatcattatcacttcacatgttgggaatgcatggcttagcatcagcaaattatgcagttgaggattgtgactttttgattgccataggagctagatttgatgatagagttgctggagatccaaagggttttgcgccaaatgctaaaaaaattgctcattttgatatcgatatatcagaaataaacaaagttaagagtgtaaattggtaccatgtaggtagcctcaaaaaagatttaaatgatctgattgcattaggggaaaaaatagaatttgtgtcagattttagtgattggcacagtcacattgaaaagctgaaagaagagtataaattaaattacaataaaaacagtgaattgattcaaccctatgaagtaattgaagaaattaataaactaagtcgtggagaagcgatcatatcaaccggtgttgggcaacatcaaatgtgggcagctcagtattttgattacaaggaacccagattgtggttgacttcaggaagcatgggaacaatgggttttggcctgcctgcagcgataggtgctcagttcgcaaaacccaatacattggtaatcgatatagatggtgatgccagtataagaatgaacattggtgaattagaaacagcaacaacatacgatctgccgatcaaagttcttgttctaaataattatggagatggtatggttcgtcagtggcagaaactatactacaagggtcgaatgtcagcgagtgacaaatcccttcatcgaaaagattttgttaaaactgcagaggcagatggttttgagtttagcgaaagattagataataagagtgaaataaagaacactgtaaaaaaatttattgagttcgatggcccagcatttttagaagttattattgatccggacgcaggcgtgtatccaatggtagggccaggacaaacttacaataagatgattaccggtgattggataaaaaatcgaaatgagattgtagacgaagagctagacaagagcagtatgttttagt

SEQ ID NO: 232186 - DNA, 1273 bp, Unknown
  Bacterial polypeptide expressing nucleotide sequence isolated from the Sargasso Sea
ccaaaagatgtacaatttgcaacctctgagtatatcgagaagtctaaaattcctgtttcgcactaccaaccgaaaaccaagggtgatccccgacaaatagcgagcctggtagatgcgatagaaaatgctaaaaagcctttattttataccggtggtggcgtcattaattcaggtgcaaatgcgagtaaattattgagagaattggttgatgagaccaatttcccaataacctcaaccttaatgggattggggtgttaccctgcttcgggtaagagatggttgggtatgcttggaatgcatggtttatatgaggcaaatctggccatgcacgattgcgatctaatgattaatatcggtgctaggtttgatgaccggatcacaggcaggattgacgcattcagcccaaattctaaaaaagcgcatgtagacatagatccgtcctcaataaataaggtgataaatgttgatataccaattattggtgacgttgaaagtgtactcaaagatatgcttaaactttggaaatccagaggacaaaagacaaatacttcagcagtaaacggttggtggaaacagatcgaagattggaagtccactaactgtcttgcatttgaccaaaaagggaaaacgattaagcctcagtttgctattgctaggctagaagagcttaccaaaaaatataaggaccgcttcatctccaccgaagtagggcaacatcaaatgtgggccgctcaatacttgggttttgaaaagccaaatcagtggatgacatcaggtggacttggaacaatggggtatggatttccggcttcaataggtgttcaaattgctcacccagaagctcttgttatcaaaatagctggagaagctagttggctcatgaatatgcaagaaatggggactgcagttcaatatagattgcccgtcaaacaattcatcctaaacaacgaaagattaggtatggttaggcaatggcaggagctattacatggtgaacgttattctcacagttggtcagatgccctacctgattttgtcaaattagccgaagcttttggcgcaaagggtattttgtgtgatgatcccaaaaatttagatgatgcaataatggaaatggttgagtatgatgggcctgttatttttgattgtcttgttgaaaagcatgaaaattgtttcccaatgattccatcaggagaaccccataataaaatgttgttgggggaggcgagcactaaaggtgcaattacatcttcaggcgcagtgctagtttagg

SEQ ID NO: 232187 - DNA, 1663 bp, Unknown
  Bacterial polypeptide expressing nucleotide sequence isolated from the Sargasso Sea
atttatgatgaacttaaaaatcattcaacaattaaacatatattagttagacatgaacagggagcaggtcatgcagcagaaggatatgctagatcatcaggcaagcctggagtagttttagtaacatctggaccaggtgctactaatgttgttactgcattgactgatgcgtatatggactcagttcctttagtttgtatctctggtcaagtacccacgcacttaataggtactgatgcctttcaagaatgtgatacaacaggaatcacgaggccttgcacaaaacataattggttagttaaagatattaaagaattaccaaaagtaatgcatgaagcttttaaagtagcaacaactggaagacctggacctgtattaattgatattcctaaagatattcaatttgcaaaaactaattatacaaaatttaaaaaagaaaaaaaattaaatggaaaaatacataataaattttctgaaaatgaaattaatcaattaattgatttgatttcaaaagcaaaaaaaccagttgtttataccggaggtggagtaataaattctgggcctcaagctagtgaaactttaaaagagtttgttagattaattggttttccaatcacatcaactctacaaggtctaggtgcatttccaggggatgataatcaatttattggaatgctaggcatgcatggaacttatgaagctaataatgctatgcatgattgtgatttgatgattaatataggcgcgaggtttgatgatagaataacaggtaaagtagatgaattttcaccaggatcaaaaaaaattcatgttgatatcgacccatcttcaattggtaaaaatataaaagttgatttagcaattgttagcgacgtgactacacttttgaaatctttaattaaaagattcaaagaaaaaaataaaaactttgtaaattccaataagcaaaaaatatctaaatggtgggaacaaattggaaaatggagagaaaaaaagtctttaaactttatcggcagtgataagattattaaacctcaacatgcagttcaaagactatatgaactaacaaaaaatcaagatacgtttattactactgaggtgggtcaacatcaaatgtgggcagctcaacattacaaatttaataaacctaatagatggatgacatctggaggtcttggaacgatgggatatggcctgcctgcagcaatcggagttcaaattgcaaatccaggaaaacttgttgttgatattgctggagaggcatctgttttaatgacaatgcaagaaatgtctacagcggtacaatatagattgcctataaaaatatttattttaaacaacgagtacatgggaatggttagacagtggcaagaacttttgcacgaaaaaaattattctgaaagctacacagctgcattaccagattttgtaaagctagcggagtcttatggttgtgttggtataagagctaaaacaccaaatgaactggatgaaaaaattaaagaaatgattagtgttgatagaccagtaatttttgattgtgttgtagacaaagctgaaaattgttttccaatgataccatcaggtaagccacataatcaaatgatcttaggacctgaggaagaggaagatatttcagacgaagggaaagttttagtttaat

SEQ ID NO: 232188 - DNA, 699 bp, Unknown
  Bacterial polypeptide expressing nucleotide sequence isolated from the Sargasso Sea
catggctacagcctctcgcacccacgctaccgacgcctttgtaagtggtgccgatgtggttgttgagtcactcatcaggcaaggtgtagaggtcatctttgcctatccaggtggtgccagcatgccgctgcatcaatcactcaccaagtttcaagaaaaaattcgaacgattcttccccggcatgaacaggggggaggctttgcggctcagggttatgcacggacgacgggaaagcctggggtttgcatggcgacgagtgggccaggagcaacaaatctcgtaacagctattgctgatgcaaagatggatagcattcctttgattgcgcttacaggtcaggttggtacgagtgtgattggaacagacgcctttcaggaaaccccaattgttgaggtgtgtcgaggtattacgaagcatcattacctgattacagatgcagaggacattccccgcgtcatgcgcgaagcatttcatatcgccacgaccggacgaccaggtcctgtcctcatcgatctgccgaaaaatatccaactctcgaatattgtgcccgactatgaggcaccgatgaatcttcccggatatcgtcctgaagtgcggcagcctcatgcagaacagattgcgcaggtcgctgctgcaatcaagcgttcaaaaaggcctgtgatttacgctggaggaggcgttatcaatggagacgcctc

SEQ ID NO: 232189 - DNA, 1222 bp, Unknown
  Bacterial polypeptide expressing nucleotide sequence isolated from the Sargasso Sea
aatgccaaaattattttctggagctgagatcgtatttaaatgtcttgaagaccaagatgtatctcatatctttggttatccaggtggtgcggtacttccgatatatgacgaattaaaaaatcataattctgtaaaacatattttagtaagacacgaacaaggagcaggtcatgctgcagagggttatgctagatcaactggaaaaccaggtgttgttcttgttacatcgggaccaggtgcaacaaatgtagttacagcattaacagatgcttatatggatagtgtacctttagtttgtatctctggacaagtaccaacacacttaattggtacagatgcatttcaagaatgtgacacaacaggaattacaagaccgtgcacaaaacataattggttggttaaagatataaacgatttagcagaaataatgcataaagcatttgaagttgcaacaacgggtagaccaggcccagtacttgttgatattccaaaagatattcaatttcaaaaagcactttacaaaaaatttaaaagaaaaaataaattaaacggtgcgagtcataataatttttctcaagaaagtattaatgaattaattaatttaatgagcaaagcaaccaaacctatcttttatacaggcggaggtgttattaattcaggtccaaaggctagtgaattactaagagaattagtttatacaacaggttttccaataactacaacattacaaggattaggatcttttcctggagatgacaatcaatttttaggaatgctaggaatgcatggaacgtatgaagcaaataatgcaatgtacgaatgtgatttaatgatcaatataggcgcaaggtttgatgataggatcacaggaaaaatagatgagttctctcctaaatctaaaaaagttcatattgatatcgatccatcatcaattaataaaaatgttaaagcagatcttgcaattgttggagatgttaaatcagtaattacatctactttaaaaactttaaagaaatcaaaaccaaattttattaaatctaataaacaaaaaacatctaagtggtgggaaaaaattcaaaaatggagatcaaaaagatctttagattacattggtagtgaagaaactattaaacctcagtatgcaatagaacgattgtatgaacttaccaaagataaagatacttttataactactgaggttggacaacatcaaatgtgggct

SEQ ID NO: 232190 - DNA, 1051 bp, Unknown
  Bacterial polypeptide expressing nucleotide sequence isolated from the Sargasso Sea
ctgggtggaggagtaattaattcaggaccagaagcaagcaagttgttaagagaacttgtatcgttaacggggttcccaataacatctacacttcaaggactaggagcttacccaggagatgatcctatgtttcttgggatgcttggtatgcacggaacctatgaagcaaataatgcaatgtacaattgtgatttgatgataaatattggagcaagatttgatgacaggataactggtaaggtcgatgagttttcacccaaatcaaaaaaaattcatgtagatattgatccatcctctattggaaaaaatataaaagtagatttagcagttattagcgatgtagtaaattttttaaaatctttaaataaaaggtttaaagaaaaaaataaagattttttaaattcaaataagtctaatacatcaaaatggtggaaagatatcgataaatggagacaaaaaaaatctttaagttttaaaaacagtaatcaagtcattaaaccacaacatgctgtaaaaagattgtatgaattatctaaacacaaagatgcttatataactactgaggtcggccaacatcaaatgtgggcagctcagcattataagtttaataaacctaatagatggatgacgtctggtggacttggaacaatgggttacggtcttccagcagcagtaggtgtgcaagttgccaatccagataaattagttattgatatagcgggtgaagcatctgttttaatgacaatgcaagagatgtcaacagcagttcaatataatcttcctataaagatatttattttgaataatcaatacatgggcatggttaggcagtggcaagagcttcttcacgaaaaaaattattctgaaagctatactgcagcattaccagattttgtcaaactcgcagaagcttacggatgtgttggtatacaggcaaaaaaaccggatgaattagatgataaaattaatgaaatgttaaatgtaaacaaacctgttatttttgattgtttagttgatccaaatgaaaattgttttcctatgataccctcgg

SEQ ID NO: 232191 - DNA, 658 bp, Unknown
  Bacterial polypeptide expressing nucleotide sequence isolated from the Sargasso Sea
atgggtaaattattttcaggtgcagaaattgtttttaaggttttagaacaccacaaagttgagcatatttttggataccctggtggcgcggtacttccaatttatgatgagttaaaaaatcataaaacaataaaacatattttagctcgtcacgaacaaggagcgggacacgcggctgagggttatgctcgttcttcaggaaaacctggagtgatgcttgtaacatctggtccaggcgcaactaatgcggttaccgctttaaccgatgcttacatggactcagttccaattgtttgtataagtggacaggttccaactcatttgataggaactgatgcatttcaagaatgtgatacaactggaattacaaggccatgtaccaaacataattggttagtaaaggatataaaagatttagcgagagtgatggatcttgccttcgatgttgccacaactggaagaccgggaccagttttagttgatattccaaaagatattcaatttaaaaaaacagaatttgttttaaaaaataaaaaaaataaaaaattaaatggaaaatcaaatggtaagattggtaattcagatcttgataagataatccaaatgatgaaaaagtcttctaaaccagttttttatactgggtggaggagtaattaat

SEQ ID NO: 232192 - DNA, 1217 bp, Unknown
  Bacterial polypeptide expressing nucleotide sequence isolated from the Sargasso Sea
gttggagttttgttagtcacatcgggccctggtgtaacaaatgctgttactggtttaacagatgcactaatggactccattccattagtttgtataagtggacaggttcctagtcatttaattggaacggatgcttttcaagaatgtgacacagtgggaatcacaagaccttgcacaaaacataattggctagttaaagatattaatgacttatcaagaatacttcatgaggcattctatgttgcatcaaatggaagaccaggccctgtcttagtcgatattccaaaagatatacagtttcaaataggtacttatattggccccgagactgttaagcataagtcatatcgtccaaagcttaaagcaagcattgatacaattgatgaggcattacaactaatctcttcatctgaaaaacctgttttttacacaggtggaggagttataaattctggaaatgccgctgttcaattattaagagagtttgtgagacttactggatttccaattacatctaccctccagggtttgggagcgttcccaggagacgataatcagtttattggaatgcttggaatgcatggaacatatgaagcaaacatgacaatgaatcaatgtgacttaatgatcaatattggagcacgatttgatgatcgaataactggaaaggttgacgaattttcacctaactctaaaaagatacacattgatattgatccatcatcaattaataaaacagttaatgtagatgttccaataattggcgatgttgctcatgtgttagaagatgcaattaagctatggaagactaaggtatataaaacaaataaagttgagataaaaaattggtggagtacaattgatcaatggagaaaaaaagactctttaaaatttgagcaaggaaagaagacaatcaagccccagtatgcaatccaaagactttatgagttaacaaaagatcaagatacttttgttacaaccgaagttgggcagcatcaaatgtgggctgcgcagcattataaattttcgaaacctaataggtggattacctctggtggtcttggaactatgggatttggttttcctgctgctttgggcgtccaagttgcatatcctgaaaagcttgtgattgatatagctggcgaggcatcgatactgatgtgcattcaagaaatgtccacagctatacaacacaagttacctgtaaagatattcat

SEQ ID NO: 232193 - DNA, 673 bp, Unknown
  Bacterial polypeptide expressing nucleotide sequence isolated from the Sargasso Sea
atgccaaaattatattcaggagctgaaatagtattcaaatgtttagaagatcaaaatgttagtcacatatttggttatcctggaggagcagtccttccaatatatgatgaattaaaaaattttaattcaataaaacatattttagtaagacatgaacagggtgcaggacacgctgcagagggctatgcaaggtcaactggaaaaccaggtgtattgttagtaacttcaggtcctggagccaccaatgctgttactgccttgacagacgcttacatggactctgtcccactagtttgtatcacaggacaagttccaacacatttaattggtacagatgcatttcaagaatgtgatactacagggataactagaccatgcactaaacataactggttagttaaagatattaatgacttagctaaaattatgcataaagcttttgacgtggcaacaacaggtaggccgggaccagttttggtggatatacctaaagatattcaatttcaaaaatctaaatataaaaattataaaaataataaaatatcaaatggtaaatcacatgataactattcacaaaaaaatattgatgatttaattaatttaattcgaaaagcaaaaaaacctattttttacactggaggtggagtaataaattcaggaacaaaagcaagtg

SEQ ID NO: 232194 - DNA, 1115 bp, Unknown
  Bacterial polypeptide expressing nucleotide sequence isolated from the Sargasso Sea
actcggggccaaagcaagccaggctttaaggaacttcgtagagttaactggttttcctattacctctactcttcaaggtttgggcgcataccctggggatgataatcaatttttaggtatgctaggaatgcatggtacttatgaagcaaataatgcaatgcatgattgtgatttattaattaacattggcgcaaggtttgatgaccgtattactggaaaaatagatgagttttcacctaattcaaaaaaggttcatattgatattgatccatcatcaattaataaaattatcaaggtcgatcttgcaatagttggagatgttacaagtgtcataagtaaaataaataaaacaattaaaaaaagtaaaaatggtcatagcaaatcaaacaagtctaatatagctaagtggtgggaacaaatagaaaaatggagagaaaaagactctcttaattttgttaacagcaatgaaagtattaaacctcaatatgctgttcaaagactttatgaattaaccaaaaataaagatacttatgttactactgaggtagggcagcatcaaatgtgggctgctcagcattataaatttaataaaccaaacagatggatgacatctggtggcttgggaactatgggatatggattaccagcagcagtaggtgtacaaattgctcatcccgaaaaacttgtaattgatattgcaggagaagcctcagtattaatgacaatgcaagaaatgtctactgcagttcaatataaccttcctataaaaatatttattttgaataatcaatacatgggaatggttagacaatggcaggaattacttcatgaaaaaaattattctgagagttactcggaagcattaccagattttattaaaatggccgaagcatatggatgcaaaggaattaaagtagataaccctgctgatcttgatgataaaattcaagaaatgattgattacaatggaccagttatattcgattgtcatgtagatccaaatgagaattgcttcccaatgataccatctggaaaacctcataaccaaatgatattgggtccaaatgatcaacaggataataaaattaaaggaaaaggcaaagccctagtataac

SEQ ID NO: 232195 - DNA, 1768 bp, Unknown
  Bacterial polypeptide expressing nucleotide sequence isolated from the Sargasso Sea
aatgtcaaaattgtattcaggagctgagattgtattcaagtgcttggaagaccaagatgtagaatttatttttggttatcctggtggtgctgttcttcctatttatgatgaattaaaaaattttaattttttaaaacatattttagttcgtcatgaacaaggtgccggtcatgcagctgaaggatatgctagatcttctggaaagccaggagttttgttagttacctcaggccctggagccactaatgcagtaactgctttaacagacgcttatatggactcagttccattggtttgtatttccgggcaagttcctacacacctgataggaactgatgcttttcaagaatgtgatacaacaggtataacaagaccgtgtacaaagcataattggttagttaaagatgtaaaagatttagaaaaaacaattcataaagcattcgaagttgcgacaacaggtagacctggacctgttttggttgatattccaaaagatgttcagtttcaaaaaacaaattatacaaaatttaaaaagcaaaaaaaaacaaacggcaaagtccataatcatttttcacaaaaggacgttgacgaattgattgagttaatgagcaaagcttctaaaccaattttttatacaggcggaggcgttataaattcaggaccaaaagcaagtgagcttttacgagagctggtgaataaaactggttttccaataacatcaaccttacaaggcttaggctcataccctggagaagatagtcaattcttgggcatgcttggtatgcatggatcatacgaagctaacaatgcaatgcatgattgtgatttaatgataaatattggagcaaggtttgatgatcgaataactggaaagatagatgaattctcacctaaatcaaaaaaagttcacatcgatattgatccgtcttcaattaataaaaatgttaaagtagacttgccaataataggtgatgtagctgaagttattacttctacaattaaaactataaaaaaaacaaaacctaattttgcaaaatcaaataaacaaaaaatttcaaagtggtgggaacaaattcaaaaatggagatcagttaattcttttgactttgttaatagcgatgaaactataaaacctcaatatgcagtgcaaagactttatgagttaacaaaaaataaagatacatatatcacaacggaagtaggacaacatcaaatgtgggcagctcaacattataaatttgataaacctaatcgttggatgacttctggaggtttaggaacaatgggttatggattgccagcagctgttggtgtacaagttgcacacccaaataaattagtaattgatattgctggagaggcatcagttttgatgacaatgcaagaaatgtctacagcagttcaatatagtcttcctataaaaatatttattttaaataacgaatatatgggaatggttaggcagtggcaggaattgttacatgataaaaattattctgaaagctatactgctgcattacctgattttgtaaaacttgcagaagcatatggttgtgttggaataagagcctcaacaccacaagagttagatgacaaaataatagaaatgattaacactgatagaccagtaatatttgactgcagagtagataaacaagaaaactgttttccaatgataccttcaggaaaaccacataatcaaatgcttttgggtcctaaagatcaaaaagaaaataaaattactggaaaaggaaagactttagtttaa

SEQ ID NO: 232196 - DNA, 1768 bp, Unknown
  Bacterial polypeptide expressing nucleotide sequence isolated from the Sargasso Sea
aatgtcaaaattatatacaggagcagaaattgtatttaaatgcctcgaggatcaaaaggtaaaacatatttttggatatcctggaggagcagttttaccgatttatgatgagcttaaaaatcattcctcaataaaacatatattagtaagacatgaacaaggtgcaggtcatgcagcagaaggttatgcaaggtcctctggtaaaccaggtgtagttttagttacatctggacctggagccacaaatgttgtcacagcattaactgatgcatacatggactcagttcctttagtttgtatttctggccaagttccaacacatttaattgggactgatgcatttcaagaatgtgacacgacaggtattacaagaccttgtacgaaacataattggttagttaaagatattgaggatctgtcaaatataatgcatgaagcgtttaaagttgcaacaacaggaaggccaggtcctgttttagttgatattccaaaagatattcaatttgcaaaaactaaatataaaaaaccaaaaaaagaaaaaaaatcaaatggaaaacctgttaataaattttctcaaaaacaaattgatcaattagttgatctatttaacaatgcgaaaaaaccaattatttatagcggtggtggagtaatcaactcaggtccaaaggcaagtgatgaattaagagaattagtagaattaacaggatttccaataacttcaactctgcaaggtttaggtgcttatcctggtgatgacaatcaattcttaggcatgttaggtatgcatggaacttacgaggcaaataatgctatgcacgattgtgatcttttaataaatatcggggcaagatttgatgatcgaataactggaaaaatagatgaattttctcctaattcaaaaaaagttcatattgatatagatccttcatccataaataaaattattaaagttgctcttgctattgttggagacgtagcaaaagtaattgcgaaggttaataaaacaatattgaagaaaaaaaatggacacagtaaatcgaataagtcaaatattgctaaatggtgggaacaaatacaaaagtggagaagtaaaggttcccttaattttattaatagcaatgaaaatattaaacctcagcatgcagtaaagagactgtacgaattgacaaaagataaagacacttatgtaacaactgaagtaggccaacatcaaatgtgggcagcacaacattataaatttaataaaccaaatagatggatgacatcaggaggcttaggcaccatgggttacggtttgccagctgcagttggagtacaaattgcgcatcctgagaagctagtagttgatattgctggtgaagcctccgtattgatgacaatgcaagaaatgtcaactgcagttcaatacaatttaccaatcaaaatctttattttaaataatcagtacatgggcatggttaggcaatggcaagaacttttgcatgaaaagaattattcagagagttactctgaagcacttcctgattttttaaaaatggctgaagcttatggctgcaaaggaattaaagcagaaaatccatcagaattagacgacaaaatacaagaaatgatcgattataatggtccagttatttttgactgtcatgttgatccaaatgaaaattgctttccgatgataccttcaggtaagccacacaatcaaatgatcttaggacctaatgatcaagaagataataaaatcaagggaaaaggcaaagccttagtctaa

SEQ ID NO: 232197 - DNA, 1078 bp, Unknown
  Bacterial polypeptide expressing nucleotide sequence isolated from the Sargasso Sea
tatgactagccaaataactggagccaaaatggttgttcaagcccttaaagatcaaggggttgatactgtgtttggatacccgggtggagcagtactgccaatctacgatgaaattttccaacaaaatgagataaggcatatcctagttagacatgaacaaggagcagttcatgcggctgaaggatacgctaggtcaactggaaaacctggagtggttttagtaacatctggaccaggcgcgaccaacgctgttacaggattaaccgatgctttaatggattctattcctttagttgttcttactggacaggtacctacttttatgatcggctcagacgcttttcaggaagcagatacggttgggatcacaagaccatgtactaaacataattggcttgttaaagacacagatcagttggcaccgattttacatgaagctttccatgttgcaaaatctggtcgccctgggcctgttttagttgatattccaaaagatgttcaatttgcttctggtgtttacatttcaaataaaaaagcaccaacctcccaatacaggcctaaattaaagggcgatattgaacaaattacaaaactcgttgaagcaattgagcaatcaaaaaaaccaatcttctacacaggtggcggagtgattaattctggcacaggtgcgagccaacttctgagagaattggttaaaggtactaatttcccaatcacttccactctaatgggcttggggtgctatcccgcgtccggcagcaactggcttgggatgttaggaatgcatgggctttacgaggccaacatggcgatgcacgattgcgatcttatgataaatatcggtgctcgatttgatgatcggattaccggtagaatagatgcttttagcccaagctccaagaaagcgcacattgatattgacccatcatctattaataaagtaattcacgttgatattcctatcataggcgatattgcacacgtattagatgatgttttgaatatgtggaaagcccgaggacgcaagacgaactctgccgctatcgataaatggtggggtcaaataggcgaatggcga

SEQ ID NO: 232198 - DNA, 1157 bp, Unknown
  Bacterial polypeptide expressing nucleotide sequence isolated from the Sargasso Sea
aaaagaagctgtagatttaattgaaactgctaagagaccagtaatttattccggagggggagtaatccagaatgatgcttcagacgaattaatagagttagcaaaactgcttaatttcccagttacaaatactttaatgggattgggcgctttccctggttcagatccacaatttatgggcatgttaggcatgcacggtacttatcaagcaaatatggccatgcataatgctgatttaataatagctattggagcaagatttgatgacagaattactaatgatcctaagcaattttctctcgaagctaagaagatacatatcgatgtagaccctgcatctgtatcaaaaattatacacgcagacattccaattgttggctctgccaaagaatgtttatctgcacttcttttagaacttaattctagaaatctaaaactaaatgaatccgatattgcagaatggaataaacaaatatctgcttggagggatgctcatggcttgaatcattccctattagagcttggacctcaaaacggaaagatattgcctcaacaagtcgttcagtcactttacaaagaaactaatggggaagcatttatcacgtcagatgtaggacagcatcagatgtttgctgctcagtattatcattttgataaacccaggcagtggattaattctggtggacttggaactatgggttttggtcttccatctgcaatgggcgttcaattagccttccctgaatctacggtagcctgcgtgactggtgaaggaagtattcagatgtgtatacaagaactgtcgacctgtctgcaatacggactgccaatcaaaataatcaatttaaacaatgctgctcttggaatggttaggcagtggcaagatatgcaatatggaggaagacattcttctagtacttatgaaaattcacttcccgattttattgctttagctgaatcctatggccatgttggaatcaaagttgccaagtttgaggatttagaagctgccatgaaggaatgcgtatcacttaaagataggttggtatttttagatgttgatgtcgatccaaatgagcatgtataccctatgcttgaagctggaaatgctatggatcatatgtggttaggaaaagaagaaaagacttggaaatgaa

SEQ ID NO: 232199 - DNA, 1231 bp, Unknown
  Bacterial polypeptide expressing nucleotide sequence isolated from the Sargasso Sea
gtgcctaattaaagaaggtgtagaagtggtctttggatatccaggaggagctatccttccaacgtatgatgcccttagtaaatatagtggcagcgtacaccatgttcttactaggcatgagcagggagccacacatatggcggatggatatgcaagggctagtggtaaggtgggcgttgcgatagcgacatcaggtccaggggcagcgaatatgattacaggcttagcaacagctatgatggactcatccccgattgtttgcattactggccaagttcccagacctgcaatcggtagtgatgcttttcaggaaatggacatctctggtgcggtaattcccgtaacaaaacacagctacttagtaatggaaatcaaggaccttgcaaaaacaataaaagaggcctttgctatcgcacgttcaggaaggccaggacctgttctcatagatatacccaaagatttacaggctgaggaatttgaatttatttatccagaagaaaaagtcactattccaggagaaaatccgattaagagtgatataagtagcgttgatttagatagtgcagtaaagatgattgctaatgcaaaaaaacctgtcatattagctgggcatggggttttaatatcaggtgcctcagatgaggtaatcagtctttcagaaaaaagtagtattcctattagttggacccttcttggttcaggtgcggtgcctgctagccatccgctaaacatgggaatgatggggatgcatggggagttcgcagcaaataatgctattcacaatgctgacttattaatcgcatgtgggatgaggtttgatgatagggttacgggtaatacaaaaacatactcaccagattcaagaaagattcacatagaagttgatccatcagaaataaataaaaatgtaaaagttgaccttgcacttaatggtgatctaaaatttatcttagacaatttagttcctaaggtctcaaaaaaagaaaatagagagtggtttgatcagatttcttcttggcaaaatgagtctgcctcgagagacatcattaatatggatacggaaatcttatatggtgctcaagttatcagtgatctttggaaggagactaatggcgatgctatcattgtatcagacgttggacaacatcagatgcttgaagcgcagtattacaaacatgatgagccaaacactctattaacatcaggtggcctaggaacaatggggtttagc

SEQ ID NO: 232200 - DNA, 1165 bp, Unknown
  Bacterial polypeptide expressing nucleotide sequence isolated from the Sargasso Sea
attgagcaagtctaaaaaaccaatcatctatagtggtggaggtgtaattaattctggtccaaaagcaagtcaggctctaagagaatttgttgagctaactggttttcctataacctctacacttcaaggattaggtgcgtatcctggagatgataatcaatttttaggaatgcttggtatgcatggtacttatgaagcaaataacgctatgcatgattgtgatcttttaattaatattggcgcaaggtttgatgatcgtattactggaaaaatagatgagttttcaccaaattcaaaaaaggttcatattgatatagatccatcatcaattaataaaattatcaaggtagatcttgcaatagttggagatgttacgagtgttatcagcaaaattaataagacattttctaaaagaaaaaatggtcacagcaaatcaaacaaatcaaatatagctaagtggtgggaacaaattgaaaaatggaaagaaaaagattcacttaattttataaatagtgatgaaagtataaaacctcaacatgccgttcaaagactttatgaattaactaagaataaagatacttatgttactactgaggttggtcaacatcaaatgtgggctgctcaacattataaatttaataaaccaaacaggtggatgacatctggtggcttaggaaccatgggttacggattgccagctgcagttggtgttcaaattgctcatcctgaaaaattagtagttgatattgctggagaagcttcggttttaatgactatgcaagaaatgtctacggcagttcaatataatcttcctataaaaatatttattttaaataaccaatatatgggaatggtaagacaatggcaggaattactgcatgaaaaaaattactctgaaagttattctgaagcattaccagattttatgaaaatggcagaagcttatggatgcaaaggaattaaagcagacaatccatcagatctggatgataaaattcaagaaatgattgattatgacggaccagttatatttgattgccatgtggatcctaatgaaaattgttttccaatgataccatctggaaaacctcataaccaaatgatcctaggtccaaatgataaagaagataataaaatcaaaggaaaagggaaagccttagtttaa

SEQ ID NO: 232201 - DNA, 1768 bp, Unknown
  Bacterial polypeptide expressing nucleotide sequence isolated from the Sargasso Sea
atgccaaaattatttactggagcagaaattgtatttaaatgtcttgaagaccaaaaggtagaacatatctttggttatccaggtggtgcagttttaccgatttacgatgagttaaaaaatcatccttctataaaacatattttagttagacatgaacaaggtgctggtcatgcagctgaaggctatgcgaggtcatcaggaaagccaggtgtagttttagttacatcaggtccaggggcaactaatgttgttacagccttaacagatgcttatatggattcggtacccttagtttgtatttctggtcaggttccaacacatttaattggaactgatgctttccaagaatgtgacactacaggaattacaagaccttgtacgaaacacaattggttagtaaaagatattaatgatctttctaaagttatgcatgaagcatttagggttgcaacaaccggaagacctggaccagttttaattgacattccaaaagatattcagtttgcgaaaacaaaatataaaaaaccaaataaagaaaaaaaattaaatggaaaatcgcataataaattttctcaagatcaaattgatgaattagttaaattattaagcaaggccaaaaaaccaatcatatatagtgggggaggagtaattaactcaggtccaaaagcaagtcaggctctaagagaatttgttgagctaactggttttcctattacttctacacttcagggattaggtgcgtaccctggagatgataatcaatttttaggaatgcttggtatgcacggtacttacgaagcaaataatgctatgcatgattgtgatcttttaattaacattggcgcaagatttgatgatcgtattactggaaaaattgatgagttttcaccaaattcaaaaaaggttcatattgatatagatccatcatcaattaataaaattatcaaagtggatcttgcaatagttggggacgttacgagtgttataagcaaaattaataagacaatttctaaaagaaaaaatggtcatagcaaatcaaataaatcgaatatagctaagtggtgggaacaaatcgaaaaatggagagaaaaagattctcttaattttgtaaatagtgatgaaagtataaaacctcaacatgctgttcaaagactttatgaattaactaagaataaagatacttatgttactaccgaggttggacaacatcaaatgtgggctgctcagcattataaatttaataaaccaaatagatggatgacatctggcggtttaggaaccatggggtatggattaccagcagcagttggtgttcaaattgctcatcctgaaaaattagtaattgatattgctggagaagcttcagttttaatgactatgcaggaaatgtctacagcagttcaatacaatcttcctataaaaatatttattttaaataatcaatacatgggaatggtaagacaatggcaggaactattgcatgaaaagaattattctgaaagttattctgaagcattaccagatttcatgaaaatggcagaagcttatggatgcaaaggaattaaagcagataatccatctgatctggatgacaaaattcaagaaatgatagattatgatggaccagttatatttgattgtcatgttgatcctaatgaaaattgttttccaatgatcccatctggaaaacctcataaccaaatgatcttaggtccaaatgatcaagaggataataaaattaagggaaaaggcaaagccttagtataat

SEQ ID NO: 232202 - DNA, 1210 bp, Unknown
  Bacterial polypeptide expressing nucleotide sequence isolated from the Sargasso Sea
atgtcaaaattgtattcaggtgctgaaatagtatttaaatgtttggaagaccaaaatgtaaaatttatttttggttaccctggaggagcagtattgccaatatatgatgaacttaaaaattttaattttataaaacacattttagttcgtcatgagcaaggagcgggacatgctgctgagggttatgctagatctacaggaaaaccaggagttcttttggttacttcaggaccaggagctactaatgcggttactgctctaacagatgcttatatggactcaataccacttgtttgtatatcgggacaagttccaacacatctaattggaactgatgcttttcaagaatgtgacacaacaggaataacaagaccatgcacaaaacataattggttagttaaagatataaaagatttacaaaaaacaattcataaagcttttgaagttgcaacaacaggtaggcctggacctgttttagttgatattccaaaagatgttcaatttcaaaaggtaagctactcaaaattcaaaaaacaaaaaaaattaaatggcaaaatcaaaaatcaattttctcaaaaagatataaatcaattgatagatttaatgaacaatgcttcaaagccaattttttataccggtggaggagttatcaactctggcccaaaagcaagtcagcttttaagagaattagttaatacgactggttttcctataacaacaactttacaaggtcttggatcttttcctggggatgatagtcaatttttaggaatgttaggtatgcatggttcatatgaagctaataacgcaatgcatgactgtgacttaatgataaacataggcgcaagatttgatgatagaattacaggaaaaattgatgagttttcaccaaaatcaaagaaagttcatattgatattgatccttcttcaattaataaaaatgttaaagtagatttaccaatagtaggagacgttgcagaagttattacttctacaataaagactataaaaaaagtaaaacctaactttgcaaaatctaataaacaaaaaatttctaagtggtgggaaaaaattcagaaatggagatcagtaaattcttttgattttgtcaacagtaacgaaacaattaaaccgcaatatgcaattcaaagactttatgagttaacaaaaaataaggatacttacattacaactgaagtaggccaacata

SEQ ID NO: 232203 - DNA, 1720 bp, Unknown
  Bacterial polypeptide expressing nucleotide sequence isolated from the Sargasso Sea
atggagaagttatccggcgccagcatgattgtgcgttcccttattgatgaaggggtaaagcacatatttggttatcctggcggctcagtgttagatatctacgacgccctgcaccttatccccggtattgaacacatccttgttcgccacgaacaggccgccgtgcatatggccgatggttatgcccgagctacgggaaaagtaggcgtagtactcgtgacctcaggcccaggcgccaccaatgccattactggcatcgccaccgcctatatggattcgattccattagtggtgttatctggccaagtgccgagcaatctaatcggtaacgatgcgttccaagaatgcgacatgattgggatttcacgcccagtcgtcaaacacagctttttagtccaagatcccactcaaattcctgagatcattaaaaaagccttttatattgcctccacgggtcgtcctggccccgtcgtggtagacttgcccaaggattgcctcaatccggcattactgcacgactatatttaccccgagagcataaaaatgcgctcctataatccaacgacatcgggccataaaggtcaaattcgtcgaggattacaggcattattagcagcgaaaaaacccgtgctctatgtgggtggtggtgcgattatttctagcagtgaaaagcagatcttaaccctagcagaaaagttaaatatccccgttgtcagcaccttaatgggccttggcgccttccctggcacccataaaaacagcttaggtatgttggggatgcacggtcgctatgaagctaacatgaccatgcataactgcgatcttatcttcgggattggcgtgcgtttcgatgacagaaccaccaacaacatcgaaaaatactgccctaacgccaccatcttgcatattgatatcgacccctcatcgatttcaaaaaccgtacgagtggatatcccgatcgttggctcggccgatattgtattagacagcatgttagccctgcttgaagaatcgaaggagagcaacgatagcgaggcgctcaatcaatggtggcaagaaatcactgtgtggcgcgagcgtaactgcttggcatacgataaggaaagtcatcggatcaaaccacagcaagtgattgaaactctctacaaactcactaatggtgaggcctatgtcgcctcggatgtgggccagcatcaaatgtttgccgcactctattatccctttgataaaccccgccattggattaactccggtggccttggcactatgggctttggtttacccgcagcaatgggggtcaaaatggcaatgccagacgaaaccgtcgtgtgcgtaacgggcgatggttcgattcaaatgaatattcaagagctttcaaccgctctgcaatacgatacgccggttaaaattatcaacttaaacaaccgtttcctcggcatggtcaaacagtggcaggatatgatctactcgggtcgccattcccattcctatatggattcggtacccaacttcgccaaaattgccgaagcctatggccatgttggcatgacgattagcgatcctgcagagcttgagtctaagatggccgaagcccttgccatgaaagacagactggtatttatcgacattatggtggatgagactgagcacgtatatccgatgcttatccgcggcggcgcgatgaatgaaatgtggttaagcaaaacggagaaatgctaat

SEQ ID NO: 232204 - DNA, 811 bp, Unknown
  Bacterial polypeptide expressing nucleotide sequence isolated from the Sargasso Sea
atgaaaattgcaggaaacgacatattaattcagtccctgataaatgagggggtggaatatatctttggttaccctgggggtgctgctcttcatatctatgatgcaatctttaatcaaaaagagatgcaacatattttagtaaggcatgagcaaggagctacacatgctgctgatggttacgcaagagctactggtaagcccggcgttgttttagttacctctgggccgggagctacaaatgcaataaccgggattgcaacagcctttatggattcaattcctatggttgttatatctggtcaagtgcaaagtcatttaattggaactgatgcttttcaagagacagatatgataggagtatcaagacctatagtaaaacatagctttacagtggataaacaagaaaatattgcacaaattgttaaggaagcttttcatatagcaacttccggaagacaaggcccagtagttattgatgtgccaaaagatttaacaaatcctgatgaattatttgattttaactatcccgaaaaagctaacatcagatcctataatcctccagtgaaaccagaaaatcatcaagtttctcgggctgtggatgcaatactaactgctgagaggccagtaatttatgctggcggtggaacaatctcgagcaatgcatctgatgaattaagagagctaaatgaactgattgattttccagtaacaaatactttgatgggtttgggagtctacccaggaacaggaaaaagatttttaggcatgctgggtatgcatggaacttatcaagcaaataggcaatgcataa

SEQ ID NO: 232205 - DNA, 1285 bp, Unknown
  Bacterial polypeptide expressing nucleotide sequence isolated from the Sargasso Sea
tatgagcaaaacacagacatcaggcggagatgcattaataaaatcgcttcacgaagaaggggttgagcttgtgtttggctatccaggcggtgctgcattacacatatatgatgctttgtttaatcaatctgaagtagaacacatcttagtcaggcatgaacaaggagctgttcatgctgcagatggatatgcaaggtctacaggaaaaccaggtgttgctcttgtcacttcaggacctggagccactaatgctataacgggtcttgctacggcttttatggattcaacaccagttattgttatttcaggacaagttaaatctgaattgatcggaacagattccttccaagaaactgacatgattggagtttctagaccaatagtaaagcatagtttcttagtccaaaaagcagaagacatccctgaaattgttaaaaaggcttttcatatagctacaacaggtcgaccaggaccagttgtcattgatgtgcctaaagattttacagacccgaatcacactttcgattttgtttaccccagtgaaataaacatgagatcttataagcccgctaaagttggagattctaagcaaataaagaaagctgtagatctaatgttagaagcaaaacaacctgttatttattctggaggaggagtcatacaagacaatgcttcaggagaattaacagagttagcaaaattacttcaatttccaattacgaatactttaatgggtcttggtgcttttccaggaaccgatcctcaatttttgggtatgcttggaatgcatggtacctatgaagcaaatatggttatgcataatgccgatttaattattgctgttggcgcaagatttgatgatcgaattacaaatgatcctaaacaattcgctttaaaagctaaaaagattcacattgacgtagatccagcttcattatctaaaataattcatgcagatatccctatagctggttcggctaaagagtgcttgctagccctgattgctgaacttaaagaacaaagtatagataccaacaaacttgaaccttggcacaaacaaatcaatgaatggcgtaaagagcatggattaaatcattcgatgttagatgtagttccagaaaatgggaaaattcttcctcaacaagtcattcaatctttatataaggaaactgggggaaaagcttttgtcacatctgacgtaggccaacatcaaatgtttgctgcccaatattacttcttcgataagcctaggcaatggattaattctggaggcctaggaaccatg

SEQ ID NO: 232206 - DNA, 1765 bp, Unknown
  Bacterial polypeptide expressing nucleotide sequence isolated from the Sargasso Sea
atgtcaaaattgtattcaggtgctgaaatcgtttttaaatgcttggaagaccaaggagtggagtttatttttggatatccaggcggagcagttttaccaatttatgatgaactaaaaaattataattctgtaaaacatattttagttcggcacgaacaaggagcaggtcatgcggccgaaggttatgcaagatcttcaggaaaaccaggagtacttttagttacttcaggaccaggtgcaacaaatgcagttaccgctttaactgatgcatatatggattcaatcccattagtttgtatttcaggtcaagttccaactcatctaatcggaacagatgcattccaagagtgtgacacaaccggaataacgagaccatgcacaaagcataattggcttgttaaagatataaataaattagaaaaaactattcataaagcttttgaagttgcaacaacaggaagaccaggacctgtattagttgatattccaaaagatgttcaatttcaaaaaacaaaataccaaaaatataaaaaaccgaaaaaattaaatggtaaaacacatagaaacttttcccaaaaagatattgatgagttaattcaattaatgagtaaagcttctaaaccaattttttatacagggggaggagttgtaaactctggtccaaaagcaagcgaacttttaagagaattggtaaatgcaacaggttttccaatcacttcaacattacaagggttagggtcatacccgggtgatgatggtcagtttttaggcatgctgggtatgcatggatcttatgaagcaaataacgcaatgcatgattgtgatttaatgataaacattggtgctagatttgatgatagaataactggcaagctagatgaattttctcctaaatcaaaaaaagttcacattgatattgatccatcatcaataaataaaaatgttaaagtagatctaccaattgtgggagatgttacagaagtaattaatgcaactattaaaacaataaaaaaagttaaacctaattttgtaaaatctaacaaacaaaagatttccaaatggtgggaaaaaattcaaaaatggagatctgtaaattcttttgattatataaatagtacagaaactataaaaccccaatatgctgttcaaagactttatgaattaaccaaagataaggatacctatattacaactgaagtcggccaacatcaaatgtgggcagctcaacattacaaatttaacaaacctaatcgctggatgacttctggcggattaggaacaatgggttatggtttgcctgctgcagtaggagttcaagttgcacatccaaacaaattagttgttgatatagctggtgaagcttctgttcttatgaccatgcaagaaatgtcaactgcagttcaatatagtttaccgattaaaatatttattttaaataacgaatacatgggaatggtcaggcaatggcaagaacttcttcatgataaaaattattcagaaagttatactgctgccttgccagattttgttaaattagcagaagcttatggatgtgtgggtttaagggcaacaactccagaagaattagatgataaaattatagagatgattaatactgacagaccagtaatattcgattgtttggttgataaacaagaaaattgctttccaatgataccatctggaaaagctcataatcagatgcttttaggtccaaaagatcaaaagaaaaataaaataactggaaaaggtaaaactttagtct

SEQ ID NO: 232207 - DNA, 1774 bp, Unknown
  Bacterial polypeptide expressing nucleotide sequence isolated from the Sargasso Sea
atgggtaaattattttcaggtgcagaaatcgtttttaaagttttagaacatcataaagtagagcatatatttggctaccctggtggtgcagtacttcctatttatgatgagttaaaaaaccataaaacaataaaacatattttagctcgacacgaacaaggcgcagggcatgcagcagagggatacgcacgttcatctggaaagccaggagttttattagttacttctgggcctggagctacaaacgctgtaactgctcttacagatgcttatatggactcagttccattagtttgcataagtggtcaagtcccaactcatttaatcggaacagatgcatttcaagaatgtgatacgaccggaattactagaccttgtacaaaacataattggttggttaaagacgtaaatgatttggcaaaaataatggatttagcatttgaagttgcaacaaccggtaggcctggaccagttctagtagacataccaaaagatattcaatttaaaaaaacaaattttgttttaaaaagttcaaacaagaaaaaattaaatggcaaatctagatcaaacggaaaaataagcgcaagtgttttagacaatgttattaatttaatgaaaaaatcttcaaaaccaattttttatactgggggtggagtaatcaattctggtccagatgcaagcaaatcattaagggaactagtttcattaactggttttccaataacatctactttacaaggtcttggggcttacccaggtgacgatcctttgttcttaggaatgcttggaatgcacggaacatatgaggcaaacaattctatgtatagttgtgatctaatgataaatattggagcgaggttcgatgataggataactggaaaagtagatgagttttcaccaaaatcaaaaaaaattcatgtagatattgatccatcatcgattgggaaaaatattaaagtagatcttgcagttgtaagcgatgttgcaggctttttaaaagctttaaacaaaagaataaaagaaaagcacaaagactttttaaactctaataaacaaaatatttcaaagtggtggaaagatatagataaatggagacaaaaaaaatctttaagctttaaaaatagtaaagaagttatcaaaccacaatatgcagtacagagactttacgagttatctaaaaatcaagatacttacatcacaactgaagtaggtcagcaccaaatgtgggctgctcagcattacaaatttaataaaccaaatagatggatgacctcaggtggacttggcacaatgggatacggtttgccagccgctgtaggtgttcagattgctcacccagataaactggttattgacattgctggggaagcatctgttttgatgactatgcaagaaatgtctacagctgtgcaatataaactaccaattaaaatatttattttaaataatcagtacatggggatggttagacagtggcaggaacttctacatgaaaaaaattattctgaaagttatactgcggctttaccagattttgttaaattagcacaggcatatggttgtgtaggaattcaagcaacaaagccagatgaattagatgaaaaaataaatgagatgatcaatacaaaagaaccagttatatttgactgtagagtagatccagctgagaattgttttccaatgataccttctggaaaaccacataatcaaatgttacttggtcctgaagacgaaaaagaagaagtatcagatgaaggtaagactttagtataat

SEQ ID NO: 232208 - DNA, 1168 bp, Unknown
  Bacterial polypeptide expressing nucleotide sequence isolated from the Sargasso Sea
ttatctaattactgacgtgaaagaaattccccagatacttcttgaagctaagcatattgctacatctggtaggcctggccctgttttagtagatattccaaaagatattttgaatgacaaaactagctgggtagaacctaagttagaagaactaccaggatataaaccaaccttagaagccaacccaagaatgatccaacaagcagttgagttaataaaaaattctaaaaaaccaatcctatatgttggtggtggaataatacattcaaaagcaaatcaagagttgtttgagttgtctacaaaatataatatacctgtagttacaactctcatgggtagaggagctttccctgatggtaacgacttatgtataggaatgcctggtatgcatggtaattatacagctactacctcaatacagaattctgacttacttattgctttaggagtaaggtttgatgaccgagttaccgcaaatcctaaattttttgctcaaaaggccaaagtcatccatgctgacatagatcctgctgaaataggtaaagtaagggagccagaagttcctattgttggagatgcaaaaagtgtaattaaaggattgattgaaacattaggagatacagaagtagatacaaaagattggcttaaagagataaaagaaatgaaaaaaagttatcctttaagttacaaccaagaagaaaaaggtccacttaaagttccatatgttctagaagagctacaaaaaatgtcagaagaagattccattgttgtttctggagttggccaacaccaaatgtggatttctcttcattggaaatttacctcccctaacacttggttaaattcaggaggattaggaacaatgggatattcacttccagcagcaataggagcaaaagctgcatttcctgataaacaagttcttgctcttgatggagatggttgtttccaaatgacttgccaagaattaattactgcttctactgaaaatatacctttaaagatagtagtttttaacaatggaaatcacggcatggtaaggcagtggcaaaaaatattttatgatcatagattctcagcatctgaactaactcaccatacgccagattatgtagctcttgctgaagctatgggagcagttggacttaggatggtggaaaaatcagat

SEQ ID NO: 232209 - DNA, 1681 bp, Unknown
  Bacterial polypeptide expressing nucleotide sequence isolated from the Sargasso Sea
atgatcggcgctactgcgctaatgaaagcattggaaaaagaaggagtaaaggaggtcttcggtctaccgggaggtgcgaaccttccaatgtatgacgagttgggtaaaagtaacattcgtcatattttggtaagacatgaacaatctgctgcacatatggcagatggttttggtagagttagtcgaaaacctggtgtatgttttgcaacctctggtcctggcgcaacaaatttgttaactggaattgcaactgctcaagcagattctgcaccaatggttgcagttactggacaggtacctgttgcaatgattggaaaagatgcatttcaagaaagtgatataattggaatggcaaatcctgctttgaaatattcatatcaacctagaactcctgaagaaattccaactatggttaaacaaggattttacattgctgaaacaggaagacctggacctgttttgttagatattcctaaagatgttcaacaaaatgaaggtaacattccattcccagatgaagttcgagttccaggatatcatccatggactgatcctgacatgcaaaatactggacgtgcagtagaattactattgtctgcaaaaaaaccaataattcttgcaggcggtggtgtaatcatttcatctgcatttgcagaattacaatcaattgctgaattactaatgattcctgtggtaaccactttcaaaggtaaaggtgcatttcctgaaaaccatcctttatcattaggtccaattggaatgcatggacatgctgaggccaataaattaatgacagaagctgactgtgtgttggcaattggtacaagattctcagaccgttctgtaggtacatttgaggaatttgaaaagaacttaaagattattcatatggatgttgatcctgcagaaattggaaagaatcaaacaacatctgtagctgttgtaggtgatgttcgtacatcgttgagaatatttggaaaattattgatggataaagcagttagagcttctgatgacaatccttggttaaaacatgttaaagagacaaaacaatactggcgtgaaaatttaaaaatacatcctggagaaatgggagcagctaaaattcttagaaaattaagagaattactcccaaaggaatctattgttacaactgaagtcggacaacaccaaatgtgggcatcattattttttgatgcaatacatcctggtactttcttcagttctactggtttaggtactatgggttggggatttcctgctgctattggtgcaaaaactgcacgtcctgatgtacctgtagttgacatcgcaggtgatggtagcttcaatatgacagaacattcacttgcaactgcagtcttagaagatttacctgtaattgtctttttgataaataattattctttaggaatggttgcacaatggcagagaactttctatgaccgtcgaatggttggtgtcgaccttaagaaatgtcctgattatgttaaattagctgagtcatatggcgcacaaggaattcgtgcacaatctatggatgaacttgaaaaggcaatcaaagatggattaaacagtgatgttgcaactgtaattgacattccaattgatcctgaagaagacgttttaccatttgttgcacctggaactggattaaaggatatgatcttaccttcatagt

SEQ ID NO: 232210 - DNA, 1441 bp, Unknown
  Bacterial polypeptide expressing nucleotide sequence isolated from the Sargasso Sea
attgacagatgcttatatggattcagttcctttggtatgtatttcaggacaggttccaacacacttaattggaacagatgctttccaagaatgtgatacaacaggtatcactagaccttgtacaaaacataattggctagttaaagatgtaaaagatttatcaaaaacaatccataaagcttttgaagttgcaaccacaggaagacctggcccagtattagttgatattccaaaagatattcaatttaataagtcttcttattcaaaaccaaaaaaacaaaaaaaattaaatggaaaaaatcataatttttattctcaaaaagaaattgatgaattaattaaattaattattaaatcaaaaaaacctataatttattcaggaggtggagtagtaaattcaggaacagaagcaagtcaacttttaagagaattagtagaagcaactggttttccaataacttcaactcttcaagggcttggagcatatccaggtgaagataatcaatttttaggaatgcttggaatgcatggcacttacgaagcaaataatgcgatgtacggatgtgatctaatgataaatgtgggtgctagatttgatgatagaataacaggtaagattgatgaattttctccaaaatcaaagaaagtccacattgatattgatccatcttctataaataaaaatgtaaaagttgacttagcaattgtaggcgatgttgcttcagtattaaaaaatacaattaaaacattgaaaaaacaaaaacctaacttttctaaatcgaataagtcaaatatttcgaaatggtgggaacaaattcaaaaatggcgttcgataaattcattgggttatattaaaagtgaggagagtataaaacctcaatatgcagtacaaagattatatgaacttactaaaaataaagatacttttattacaactgaagtaggtcaacatcaaatgtgggctgcacaacattataaatttgataaaccaaatagatggatgacctcaggtggactaggaacaatgggctatggtcttccagctgcaattggagttcaaatagccaatccaaataaattagtaattgatattgctggagaagcttctgtacttatgacaatgcaagaaatgtcgaccgcagttcaatacagtcttccaattaaaatatttattttaaataatgaatacatgggaatggtaaggcaatggcaggaattattacatgataaaaattattctgaaagttatacagcagctctaccagattttgtgaaattagcagaagcatatggctgcgtaggaatcagagcaaaaaaaccagaagaattagatgacaaaataattgaaatgataaatacagataggcctgtaatttttgattgtttagttgataaagttgagaactgttttccaatgataccatcaggaaaacctcataat

SEQ ID NO: 232211 - DNA, 1738 bp, Unknown
  Bacterial polypeptide expressing nucleotide sequence isolated from the Sargasso Sea
tatgaaaattgcaggaaacgacatattaattcagtccctgataaatgagggagtggaatatatctttggttaccctgggggtgctgctcttcatatctatgattcaatctttaatcaaaaggagatgcaacatattttagtaaggcatgagcaaggtgcaacacatgctgctgatggttacgcaagagctactggcaagcccggtgttgttttggtcacctctggaccgggagctacaaatgcaataactgggattgcaacagcctttatggattcaattcctatggttgttatatctggtcaagtgcaaagtcatttaattggaactgatgcttttcaagagacagacatgataggagtatcaagacctatagtaaaacatagctttacagtggataaacaagaaaatattgcacaaattgttaaggaagcttttcacatagcaacttctggaagacaaggcccagtagttattgatgtgccaaaagatttaacaaatcctgatgaattatttgattttaactatcctgaaaaagctaatatcagatcttataacccccctgtcaaaccagaaaatcatcaagtttctcgggctgtggatgcaatactaactgctgagagccctgttatttatgctggcggtggaacaatctctagcaatgcttctaatgaattaagagaacttaatgaattgattgattttccagtaacaaatacattgatgggtctgggagtttacccaggaacaggaaaaagatttttaggtatgcttggtatgcatggaacttatcaagcaaatatggcaatgcataacgctgatttaataattgcagtgggagctagatttgatgaccgcattaccaatacgccagagaaatttgctccaaaagcaaaagttattcattttgatgtagaccattcatcggtatcaaaaataattgaggcagatattgctgtatttggacaagtcaaggactccttgcaagccattaataaccatttaaagtcgagaaaggatgaaataaagaaggaaaagctttctccttggcatcagcaaataagcgaatggaaagaaaagcatggccttgatcatgaactctacaagaataattcagatgagcatccaattttacctcaagcagttgtgcaacacatatatcaagaatctgaaggcaaagcgtttgttacatcagatgttggtcagcaccagatgtttgctgctcagtattatcactttgatgaaccaagaaaatggataaattctggcggtcttggaactatgggttttggtcttccttcagcaatgggagttaaactggcttatcctgaagaagaagtaatttgcattactggagagggaagtatccaaatgtgtattcaagaactatcaacatgttcacaatataaattaccaataaaaatatttaacattaataatcttgccctcggcatggtaaagcaatggcaagacatgaattatgaaggcagacattcatctattagctatgaggactcattaccagattttgttggactagcagaatcttatgggcatgttggcattaaaattactaaaaattctgaactcaaagaaggaattgctaaagcatttgccattaaagataagttggtttttgttgatatatatgttgatccaaatgagcatgtgtatccaatgcttgttgctcccaacggaagcttaaaagatatgtggctgggtaaaggtaaaaaaacatga

SEQ ID NO: 232212 - DNA, 1768 bp, Unknown
  Bacterial polypeptide expressing nucleotide sequence isolated from the Sargasso Sea
atgccaaaattttatacaggagcagaaattgtttttaaatgccttgaagatcaaaaggtagaacatatttttggatatcctgggggagcagttttaccaatttatgatgagttaaaaaatcattcctcgattaaacatattttagtaagacatgaacaaggtgcaggccatgcagcagaaggttatgcaagatcatcaggtaaacctggagttgttctagttacatcaggtcctggagcaacaaatgttgtaacagcattaactgatgcctatatggactctgttccacttgtttgtatatctggtcaagttccaacccacttaattggaacagatgcatttcaagaatgtgatactactggtatcactaggccgtgtactaaacataattggttagtaaaggatgttaacgatctttcaaaaattattcatgaagcttttaaagttgctacgaccggaaggccaggaccagtattaattgatataccaaaagatattcagtttgctaaagcaaaatatacaaaaccaaaaatagaaaaaaaattaaatgtcaaatctcataataaattttctcagaaagatattgatgaattaattaaattactaagtaaatcaaaaaaaccaattatatatagtggtggaggggttattaattctggtccaaaggcaagtgaagcattaagagaatttgcaactttgagtgggtttccaattacttctactcttcaaggtctaggggctttcccaggtgatgacaatcaatttttaggtatgcttggaatgcatggtacttatgaagcaaacaatgcaatgcatgattgtgatttactaatcaatatcggagcaagatttgatgaccgtattactggaaaaattgatgaattctctccaaattcaaaaaaagttcatattgatatagatccctcttcaattaacaaaattattaaagttgatctcgctattgttggtgatgtttcaagtgtgattaataaaattaataaatcaattatcaaaattaaaaatggtaatggcaaatctaataaatcaaatattgcaaagtggtgggaacagatagaaaaatggagaaaaaaagattctttgaattttattaatagcgataaaactatcaaaccacagtatgcagtccaaagactttatgaattaaccaaaaaggaagatacatatgtaactacagaagtaggccaacatcaaatgtgggccgctcaacactataagtttgataaaccaaatagatggatgacatcaggaggtttgggcacaatgggatatggattacctgcagcagtaggtgttcaaattgctcacccaaataaattagttattgatatagctggagaggcctcggtattaatgactatgcaagaaatgtcgacagctgttcaatacaatttgccaataaaaatttttattctgaataatcagtatatgggaatggtaagacagtggcaggagttgttgcatgaaaaaaattattcagagagctattctgaggctttaccggattttatgaagatggcagaagcttacgggtgtaaaggtattaaagcagacaatccagcagatcttgatgaaaaaatccaggagatgattgattatgatggaccagttatttttgattgtcatgttgaccctaatgagaattgttttccaatgattccatctggaaaaccacacaatcaaatgatactaggccctaatgatcaagaggataataaaattaagggaaaaggcaaagccttagtataat

SEQ ID NO: 232213 - DNA, 1768 bp, Unknown
  Bacterial polypeptide expressing nucleotide sequence isolated from the Sargasso Sea
atgaaagaagaaattacaggctcagacatagtgcttaaatgccttgctgaacaaggtgtagaagttgtttttggatatccgggtggagcagtgctgcctatatatgatacgatgttcaaacaaaattctattagacatattttagtacgtcaagaaggtggagctattcatgcagcagaaggctatgctagatcaacaggaaaaataggagttgttttagttacttcaggtcctggagcaactaatgttgttacaggtttaacagatgcaatgatggacagtgtacctattgtatgtattacaggtcaggtaccccaacatttaattggaagtgatgcttttcaagaatgtgacacaactggtattacaagagcttgcacaaaacataattatttagttaaagatgtaaataaattatcttatgtttttcatgaagcatttgaaattgctaataatggaagacctggacctgttctaatagatattcctaaagatgttcaatttgcaaatggaaattatgaatcaaaaaaatcaattacaataccttcacatcgtttatttgaacctgttttaaaaaacaattctgaaaatataaaaaatgcagttgatttaatttcaaaagcaaaaaagccaattttttatattggtggtggttgtataaattcaggtaaagaagcttcaataaaagtaactgaatttgttgagttagttggagcgccagcaacaatgactttgatgggtttaggagtaataccttcttctcataaacagtctttaggcatgcttgggatgcatggaatgtatgaagcaaatatggcaatgcacgaatgtgatgttatgattaatattggagctagatttgatgatagagtaacaggaagattggatgcgttttctcccaattctaaaaaaattcatattgatattgacgaaagcaatattaacaaaactataaatgttgacattcctttagtaggtgatgttaaattaatggttaaagaaatgttaagtatttggaaaaaaaataatttttcagtaaataaatcaaatttagaatcttggtggaaaagagttaatgaatggaaagaagttgattgtttaaaatataatcaaaagactaaaaatataaagcctcaatatgctattcaaaaattatatgaattaactaaaaatagagacacttttattacaactgaagtaggtcagcatcaaatgtgggctgcacaatattataaatttgaaaaaccaaatagatggttaacttcaggaggtcttggtacaatgggatatggttttccagcagcaattggcgcccaaattgccaaccctaatgctcttgtcatagatatagctggagatgcatcgatattaatgaatattcaagaaatgagtacagctgtgcagtatcgtctaccagtaaaaatttttatattaaataacgaatacatgggtatggttcgtcaatggcaagaattgttgcacggaggaagatattcagaaagctatactgatagtctaccagattttgttaaacttgctgaaagttatagagccttgggtttaagagcaaaaaatgcagatgaattggatgatgtaattgaagaaatgataaattcagataaaacagtaattgcagatatatgggttgataaagaggaaaattgttttccaatgatacaaagtggttctgctcataatgaaatgttacttagcaaagatcaagaacaagataaaaagtcagctgagaaaggaaaaatattagtctaat

SEQ ID NO: 232214 - DNA, 1768 bp, Unknown
  Bacterial polypeptide expressing nucleotide sequence isolated from the Sargasso Sea
atgccaaaattatatacaggagccgaaattgtatttaaatgtcttgaggaccaaggtgtaagcaacatttttggttatccaggtggagcagtgcttccaatatatgatgaattaaaaaattttaaatcaataaaacattatttagtaagacacgaacaaggagctggtcatgcagctgaaggttatgcaagatcaacgggcaaaccgggagttttattagtaacatctggaccaggtgcaacaaatgcggttacagctttaacagatgcttatatggactcagtaccattagtttgtatatcaggacaagtgccaactcatcttattggaaccgatgcttttcaagaatgtgatactacaggtattactcgtccatgtacaaaacataattggttagtaaaagatgtaaaagatttagctaaaactattcataaagcttttgaggtagcaacaactggtaggcctggaccagttttggtagatattccaaaagatattcaatttcaaaaaaccaattatattaattttaaaagaaaaataaaattaaatggcaaatctcataatcaattttcaaaaaatgatattgaggaacttgttaatcttttgaagaaagcctcaaagccaattttttatactggaggaggtgttgtaaactccggtccaaaggccagtgaacttttaagagaattagttcgcgcaactggctttccaattactagtactttgcaaggcttaggttgttaccctgcagatgataatcagtttttaggtatgcttggtatgcatggtacttacgaagcaaacaatgcaatgtacgaatgtgatttgatgataaatatcggtgcaagatttgacgacagaattactggaaaaatagatgaattttctccaaattcaaaaaaagtgcatattgatattgatccttcatcaataaataaaaatgttaaagtagatttagcaattgttggagatgtaaaatcagtaattgagtctacaataaaaactttgaaaaaaacaaaacacgatttcttaaaatctaataagcaaaaaacttctaaatggtgggaaaaaattcaaaaatggagagctagaagatctttagattatattgggagcgaagaaacaattaaacctcaatatgcggtagaaagattatacgaacttacaaaagacaaagatacctatatcacaacagaagttggacaacatcaaatgtgggctgcacaacattataaatttaataaaccaaatcgatggatgacatctggtggattagggacaatggggtatgggttgcctgctgctgttggagttcaagttgcacacccaaataaacttgttatagatatagctggtgaagcatctgttttgatgacaatgcaagaaatgtcaacagcggttcaatatggattaccgattaagatatttattttgaataacgaatacatgggaatggtaagacaatggcaagaattgcttcacgataaaaattattctgaaagctataccgcagcattaccagattttgttaaattagctgaagcgtatggttgtgttggtttgagagcaaaaactcctgaggaattagacgataaaattattgaaatgctgaataccgaccaacctgtaatatttgattgcttagtggataaacaagagaactgctttcctatgataccttcaggaaaaccacataaccaaatgctattaggaccaaatgatcaaaaaagtaaaaaaattactggaaaaggaagaactttagtctaat

SEQ ID NO: 232215 - DNA, 1681 bp, Unknown
  Bacterial polypeptide expressing nucleotide sequence isolated from the Sargasso Sea
atgatcggcgcaactgcgcttatgaaagcattggaaaaagaaggagtaaaggaagtcttcggtctaccgggaggtgcgaaccttccaatgtatgatgaattgggaaaaagtaacattcgtcatattttggtaagacatgaacaatctgctgctcatatggccgatggttttggtagagttagcagaaaacctggtgtatgttttgcaacttctggacctggtgcaacaaatctcttaactggaattgcaactgctcaggcagattcagctccaatggttgcagttactggacaagtacctgttgcaatgattggaaaagatgcatttcaagaaagtgatattattggtatggcaaatcctgctttgaaatattcttatcaacctagaactcctgaagaaattccaactatggttaaacaaggattttacattgctgaaactggtcgtcccggacctgttctattagatatacctaaagatgttcaacaaaatgaagctaacatcccatttcctgatgaagttagagtgccaggttatcatccatggactgatcctgatatgcaaaatactgcacgtgcagtagaattattattatctgctcacaagccaattattcttgcaggcggtggtgtaattatttcatcagcatttgcagaattacaatcaattgctgaattactaatgattcctgttgtgactacattcaaaggaaaaggtgcattccctgaggatcatcctttatcgttaggtccaattggaatgcatggtcatgctgaagctaataaattaatgactgaggctgattgtgttttagcaattggaacaagattctcagaccgttctgttggtacttttgaagaatttgaaaagaacttgaagattattcatatggatgttgatcctgcagaaattggcaagaatcaaacaacttctgttgccgtagtaggtgatgtacgtacctcattgagaatatttggtaaattattgatggacaaagctgttagaccttcagatgacaatccttggttaaaacatgtaaaagaaacaaaacaatattggcgtgaaaatttaaaattacatcctggcgaaatgggtgctgcaaaaatccttagaaaattaagagaattacttcctaaggaatctattgttacaactgaagttggacaacatcagatgtgggcatcattattctttgacgccatacatcctggaactttctttagttctaccggtttaggaactatgggttggggatttccagctgctattggtgcaaaaactgcacgtcctgatgtacctgttgttgacattgcaggtgatggtagctttaacatgactgaacattcacttgcaactgctgtcttagaagacttgcctgtaattgtattcttgattaataattattcattaggaatggttgcacaatggcagcgaactttctatgaccgcagaatggttggtgttgatcttaagaaatgccctgattatgttaaattagctgaatcatacggtgcacaaggaatacgtgcacaatcaatggacgagcttgaaaaggcaatcaaagatggattaaacagtgatgttgcaactgtaattgacatcccaattgatcctgaagaagatgttttaccatttgttgcacctggaactggattaaaggatatgatattaccttcatagt

SEQ ID NO: 232216 - DNA, 351 bp, Unknown
  Bacterial polypeptide expressing nucleotide sequence isolated from the Sargasso Sea
aatggcaaaattatcaaccggcgctgaaattgtatttaaatgcctggaagatcaaaatgtagaatttatttttggttatcctggtggtgctgtattgccaatttatgatgagttaaaaaatcattcatcaataaaacatattttagtaagacatgagcaaggtgcaggtcatgctgcggaaggatatgcaagatcatcaggtaaacctggtgtagtattagtaacttcaggcccaggtgctaccaatgtggttactgcgctcacggacgcttacatggattctataccactagtttgtatttctggacaagttccaactcatttaattggaactgatgctttccaagaatg

SEQ ID NO: 232217 - DNA, 1717 bp, Unknown
  Bacterial polypeptide expressing nucleotide sequence isolated from the Sargasso Sea
atgttaattaaatcccttgtagatgagggagttgaatacctatttgggtaccccggaggagctgcgcttcatatttatgatgcaatttttaatcaaaaagaactccaacatattcttgttagacatgaacaaggggcaactcatgctgctgatggttatgcaagggccacgggtaaacccggcgttgtattggttacatcaggcccaggagcaacgaatgcaataacaggaatagctacagcttttatggattcaattccaatggtagttctttccggtcaagttgcctcacaccttattggaacagatgctttccaagaaacagatatgataggcatatcaagaccaatagttaaacatagttttagcattgaaagtgcagaagaaattcctaaagtaatcaaagaagctttttatattgcaacctcaggaagaccaggtccagttgtaatagatatccctaaagatacaacagccccagataaattatttgagtataatcctccagaatcagtaaaaattagatcttacaatcctccggttgaaccagactctaaacaaattgctagagcagtttctgaaattttaaaggcaaagaaaccagttatttatgcgggaggaggtgcaataaatagtaatgcatctaaagaactatttgaactaaatgagcttctaaattttcccgttacaaatactttaatgggattaggcgtttatcctgccaaaaatcaaagatttatgggaatgttaggaatgcatggcacttatcaatcaaatatggccatgcataatgcagatttgattattgccatcggagctaggtttgatgataggataacaaataccccagatctatttgctccaaatgcaaagataattcatttcgatgttgatcaatcttctgtttcaaaaattatcgaagcaaatgttgcagtttttggacaggttaagaactctttaattgaattaaataaacaattaaaagataaaattgatttaattgatagtgctttaattcagccctggcttgatcaaattgatgaatggacctcacttcatggactaaatcatgaattatataaagaaaattctgatgaaaaaatgataatgcctcaatcagtagttcaacatgtttatcaaataactgatggaaatgcttttgtcacttctgatgtaggacaacatcaaatgtttgctgctcagtattatcatttcaatgaaccaagaaaatggattaattcaggtggactaggaactatgggttttggattaccagcagcaatgggtgttaagttagcctttcccgaagaagaagttgtttgcattacaggagaaggaagtatacaaatgtgtattcaagaactttcaacttgttctcaatataacttacctatcaaaataattaatataaataatgaagcattgggaatggtcaaacaatggcaagatatgagttacggaggacgacattctgagagtacatatcaaagctctctcccaaactttattgatctagtcgaatcatatggacatattggttttaaaattgaaaaaaattctgatttaaaaggcatcttagatcaagctttttctataaaagataaattagtctttgtcgatgtatatgtagatccagatgaacatgtgtatccaatgttagtagcgcccaatggaagtcttaaggatatgtggattgataaagataagaaagtatgat

SEQ ID NO: 232218 - DNA, 1061 bp, Unknown
  Bacterial polypeptide expressing nucleotide sequence isolated from the Sargasso Sea
tatgaaattggccggtaatgacatattaattcagtctcttatagaggagggagttgaatatatttttggttatccaggcggtgcagctcttcatatatatgactcaatttttaagcaaaaagaaatggaacacattcttgttagacatgaacaaggcgctactcatgccgctgatggttacgcaagagcaacaggaaagcctggagtagttttggttacttctggtcctggggccactaatgcaataaccggaatagcaactgcatttatggactctataccaatgattgttatatcaggccaagttgcaaaacaccttattggcacagacgcttttcaagaaactgatatgattggtatttcacgtccgattgtaaaacatagcttcactgtcgatagtgcagaaaatataccagaaattgttaaacaagcctttcatattgcaacttctggaagacctggccctgtcgtaatagacgttcctaaagatactactgcgccagataagttatttgaatttaaatatcctaatgatgtagatattagatcttataaacctccaattgatcctgatccaagacaaattgaaagagctgtagatgcaatcatagaatcaaataaacctgttatttatgctggaggtggtgcaataaatagcaatgcctctgaagagcttattcgattaaatgaaatcttagattttccagttaccaatactcttatggggttaggtgtttatcctgctactcataaaagattcttgggaatgcttggcatgcatgggacataccaagcgaatatgtcaatgcataatgcagatttgataattgcaattggagcaagattcgatgacaggattaccaacacaccaaaattatttgctcctaaagcaaaaataatacatttagatgttgattactcatcagtatctaaaattattgaggcaaatattgcagtatttggtcaagttaaaaacgcattattagagatgattaaattattagaagttaaaaaagaattaattgacccaaaaaagatctccctggaaagaacaaattcgg

SEQ ID NO: 232219 - DNA, 1759 bp, Unknown
  Bacterial polypeptide expressing nucleotide sequence isolated from the Sargasso Sea
catgcccagcgcggaattctccacgtcggaacccctttcccctcccgatagcgactccatcggcggtaccgtgctcatgaaggcactggccgatgaaaacgtcgaattcatctggggctaccccggcggctcggtactctacatctacgacgagctttacaagcaggacaagattcagcacgtgctggtgcgccacgaacaggcggccgtgcacgcagccgatgcgtatgcgcgttccaccggcaatgtcggcgtctgtctcgtgacgtcgggccccggtgtcaccaacgcggtgaccggcatcgccacggcgtacatggattcgattccgatggtcgtgatcagcggccaggtgcccacggccgcgatcggccaggatgccttccaggagtgcgacaccgtcggcatcacgcgtccgtgcgtgaagcacaacttcctcgtgaaggacgtgcgcgacctcgcggaaaccgtcaagaaggcgttttatatcgcccgcaccggccgtccgggcccggtgctgatcgacatcccgaaggacatctcgaagacgccgtgcgaatacgagcccgtcaagagcgtgtcgctgcgttcgtacaacccggtcacgaagggccattcgggccagatccgcaaggccgtgtcgctgctgttgacggcgaagcgtccgtacatctacacgggtggcggcatcatcctcgccgacgcatcgcgcgaactgaaccagttcgcggacctgctcggctacccggtcacgaacacgctgatgggcctcggcggctatcgcgcgtcggacaagaaattcctcggcatgctcggcatgcacggcacctacgaagcgaacatggcgatgcagcactgcgacgtgctgatcgcgatcggtgcccgcttcgatgatcgcgtaatcggcgacccggcgcacttcgcgtcgcgtccgcgcaagatcatccacatcgacatcgacccgtcgtcgatctcgaagcgtgtgaaggtcgacatcccgatcgtcggcgacgtgaaggaagtgctgaaggagctgatcgagcagctgcagacggccgagcatggccccgacaccgaggcgctcgcgcaatggtggaaggacatcgagggctggcgcgcgaaggactgcctgaagtacgaccgcgaaagcgagatcatcaagccgcagtacgtggtcgagaaggcgtgggagctgacggacggcaatgcgttcgtgtgctcggacgtcggccagcaccagatgtgggcggcgcagttctaccgtttcaacaagccgcgtcgctggatcaactccggcggcctcggcacgatgggcttcggcctgccggcagcgatgggcgtcaagatggcgcacccggacgacgacgtgctgtgcatcacgggcgaaggctcgatccagatgtgcatccaggaactgtcgacctgcctgcagtacgacacgcccgtgaagatcatttcgctgaacaaccgctatctcggcatggttcgccagtggcagcagatcgaatacagcaagcgctattcgcattcgtacatggatgcactgcctgatttcgtgaagctcgccgaagcgtacggccatgtcggcatgcggatcgaaaagacctcggatgtggagccggcgctgaaggaagcgctgcgcctgaaggaccgcaccgtgtttctcgacttccagaccgatccgaccgaaaacgtctggccgatggtacaggccggcaagggcatcaccgagatgctgctcggatcggaagatctgtaa

SEQ ID NO: 232220 - DNA, 928 bp, Unknown
  Bacterial polypeptide expressing nucleotide sequence isolated from the Sargasso Sea
atgcatggaacagcttatgcaaattttgctgtaacagaatgcgatcttttaattgctattggggctagattcgatgatagggtgacaggaaaattagatacttttgcacctaatgcaaaggtaattcatatagatatcgacccagcagaagttaataaaaatagacgtgtagatgttgcaattgttgctgatgtttcaaaagctgttctgaaaattaatgaattatctctaaaaaataaatttacttgtcgtacgaagaactggttagaaaaaattgatttttggaaacataaacaccctttatatgacccgcctaaagaaggagaaatttatcctcaggaagttcttttaaaagtgagggaactttcaccagaagcttatataactacagatgtaggacaacaccaaatgtgggctgctcaatatcttaggaattctccaagaaaatggattagtagtgcaggtttaggaaccatgggttttggattgccagcggcaattggagtaaaagcagccttacctaattcagatgtaatttgtattgcaggagatgcaagtgtcttaatgaatattcaagagttaggaaccttatctcaatatggtctaaaggtgaaattgattattatcaataatcgttggcaagggatggtgagacaatggcaggaaagtttctatgatgagagatattcctcatctgatatgagttgtggcgaacctgattttgtaaaacttgctgagtcttttggagttaaaggttatttaatttctgatagaaaaaaactacagaatgaattaaaaaatgcgcttgatcatgacggtcctgccttgattaatatccttgtcagaagaggtgaaaattgttatccaatggttcctcctggtaaaagtaatgctcaaatggttggatatgttaattgtgaagactaat

SEQ ID NO: 232221 - DNA, 940 bp, Unknown
  Bacterial polypeptide expressing nucleotide sequence isolated from the Sargasso Sea
aatgtctaaattatataccggtgcagaaattgtatttaaatgtcttgaggatcaagaggttgaatatatttttggttatccaggtggagcagttttaccaatctacgatgaacttaaaaatcattcatcaataaaacatatacttgttagacatgagcaaggagcaggtcatgcagcagaagggtacgcacgatcatcaggtaagcctggggtagttttagtaacatctggacctggtgcaaccaatgttgttactgcattaactgatgcttatatggactcaatacctttagtttgtatttctggtcaagtacctactcatttaataggcaccgatgcttttcaagagtgtgacaccacaggaatcacaaggccttgtacaaaacataattggttagttaaagatataaaagaattaccaaaagtaatgcatgaagcttttaaagtagcaacaactggaagaccaggacctgtactaattgatatccctaaggatattcaatttgctaaaacaaattatacaaaattaaaaaaagaaaaaaaattaaatggaaaaacgcataataagttttctcaagatgaaattgatcaattaattgaactaatttcaaaagcaaaaaaaccagttgtttacactgggggcggggtaataaattcaggtcctcaggccagtgaaactttgaaagagttcgttagattaattggttttccaatcacatcaactttacaaggattaggcgcatttccaggagatgataaccagtttattggaatgctaggtatgcatggaacttatgaagctaataatgcaatgcatgattgtgatctgttaattaacataggcgcaagatttgatgacagaataacgggtaagatcgatgagttttctccgaaatcaaaaaaagttcatattgatattgatccatcgtcgatcaataaa

SEQ ID NO: 232222 - DNA, 1768 bp, Unknown
  Bacterial polypeptide expressing nucleotide sequence isolated from the Sargasso Sea
aatgtctaaaaattattcaggtgcagaaatagtatttaagtgtctcgaggatcaaggtgtagagaatgtatttggttatcctggtggtgctgttcttcctatttatgatgaattaaaaaatcatgaatctgttaaacatattctagttcgacatgaacaaggagcgggccatgcagcagaaggatatgcaaggtctacagggaaaccaggtgttgttttagttacgtcaggccctggtgctacaaatgtggttacagctttaacagatgcttatatggactctattccattagtttgtatatctggacaagttccaactcatcttattggtacagatgctttccaagaatgtgatactactggaataacaagaccatgtacaaaacataactggttagtaaaagatataaaagatctagcaaaaactattcataaagcttttgaagttgcaactactggaagaccgggtccagttttagtagatattccaaaagatatacaatttcagaaaactaaatatcataaatataataagaaaaaaaaattgaatggtaaaaatactaatcatttttctcaaaaagaaatagataaactaattcaaatgatgtcaaaatcatctaaaccggttttttatactggaggtggagtaataaattctggtccacaagcaagtaatttattaagagaacttgtgagcataacaggttttccaattacaacaactttacaaggattaggatcttatccaggtgatgacaatcaatttttaggaatgctaggaatgcatggaacttatgaagctaacaatgctatgtatgaatgtgatttaatgatcaacattggtgcaaggtttgatgatagaattactggaaaaattgatgaattttcaccaaattcaaaaaaggtccatatagatattgatccgtcttcaataaataaaaatgtaaaagttgatttaccaattgttggtgatgtatctgatgttataaaatcaacaataaaaaccatttcaaagaaaaaactcaatttttcaaaatctaataaacaaaaaatctctaagtggtgggaaaaaatacaaaaatggagatcaataaaatctttagattatataaaaagtgaagatagtattaaacctcagtatgcaattgagaggttatatgaattaacaaaaaacaaagaaacgtttataactacagaggtaggtcaacatcagatgtgggcagcacaacattataaatttaataagccaaataggtggatgacatctggaggtttaggaacaatgggctatggtttgccagcagcagtaggagttcaagttgctcatccaaataaattagttattgatattgcaggagaagcatcagtgctaatgaccatgcaggaaatgtctactgcagttcaatatagtttgccaataaaaatatttatacttaacaatgaatatatgggtatggtaaggcaatggcaggaacttttacatgacaagaattattctgagagttatacagctgccttacctgactttgttaaattagcagaggcttatggttgcgttggaataagagccaaaactcctgaagagttagatgataaaatcattgaaatgctcaatactgatagaccagtaatttttgattgtttggtagataaggaagaaaattgtttcccaatgataccatctgggaaacctcataatcaaatgcttttaggtccaaaagaccaaaaaaataataaaatcactggcaagggtaaaactctcgtataa

SEQ ID NO: 232223 - DNA, 1311 bp, Unknown
  Bacterial polypeptide expressing nucleotide sequence isolated from the Sargasso Sea
aatgtccaaattatattcaggtgctgagatagtatttaaatgtcttgaagatcaagatgttaagtttatttttggatatccaggtggagctgtactaccaatttatgatgagcttaaaaatcatacaactattaaacatattttagttagacatgagcagggtgctggacatgctgcagagggttatgcgagatcctcaggtaaacctggagtagttctagtaacatctggtccaggtgcaactaatgttgtcacagctttaacagatgcttatatggattccgttcctttagtatgtatatcaggacaagtaccaactcatttaattggaaccgatgcttttcaagaatgtgatacaacaggaattactagaccatgtacaaaacataattggttagttaaagacattaaagatttacctaaaattatgcatgaagcctttcgagttgcaacaacaggaagaccaggcccagtactagttgatatacctaaagatattcaatttgctaaaacaaattattcaaaaccaaaaatagaaaaaaaaattaatgaaaaattacataataaattttcacaagatgaaattaatgaattaattaatttaatttcaaaagcaaaaaaaccagtaatttatactggtggtggagttattaattctggtccaaaagcaagtgataccttaagagagtttgttagattaattggctttccaattacatctacattgcaaggacttggtgcatttcctggcgatgacaatcaatttataggaatgctaggaatgcatggaacctatgaagcaaataacgccatgcatgattgtgatttattaatcaatattggagcaagatttgacgataggataacaggaaagatagatgaattttcaccaagatcaaaaaaggtacatattgatattgatccatcatcaattaataaaattataaaagtagatttagcaatagttggtgacgttaatgaggttcttaaaactacgattaaaaagattaataaaaaacaaaatggttctaagatatcaaataagcaaaatatttctaaatggtgggaacagatacaaaaatggagaacaaaagattctttaggttttattaatagtgaaaaaactattaaacctcaacatgctgttcaaagactatatgaattaacaaaaaaccaagacacctttataactacagaagttgggcaacatcaaatgtgggctgcacaacattacaaatttaacaaaccaaatagatggatgacatctggaggacttggaactatgggatatggtcttcctgcagctgtagg

SEQ ID NO: 232224 - DNA, 1714 bp, Unknown
  Bacterial polypeptide expressing nucleotide sequence isolated from the Sargasso Sea
atgagtgaagaaaaattaagtggagctgaacttgtcgtaagaagtttagagtacatgaatatatcaactatttttggtttacctggtggtgcaatattacctgcctatgatccgctatatgacagtccaataagacatatcttggccagacatgaacaagggtctggacatatggcagagggatatgcacaagcaacaggtgaattaggagttgtaattgctacttctggcccaggtgcaactaacttaattaccccacttacaaatgcactgatggactctactcctcttctagcaataactggtcaggtagcttccgaagcaattggtaatgacgctttccaggaagcgtacactgttggattaactatggctgcaacaaaacataactacttgataactagtgcagaagagataccacaagtgttacttgaagcaaaacatattgctacgactggaagacctggccctgttcttgttgatataccaaaagacatattaaatcaaaaagttgaatggatcgagcctaaattaatagaaatgccaggatataagccaacattagaaccaaatccaaaaatgattagtcaagcggctgaattaataaaacaatcaaaaaaaccaattctttatgtaggtggcggaattattcattccaaagcaaatcaagagttatttgaactggcaacgaaatttaaaattccagttgtaacaacattgatgggaagaggtgcattcccagatggaaatgaactatgttttgaaatgcctggaatgcatggtaactatacagcgactacatcaattcaaaaatcagacctcttaattgctattggtgtgaggtttgatgatagagttactgcaaatccaaaattctttgctcaaaatgcaaaagtcattcatgcagatattgaccctgcagaaattggaaagattagagagcctgaagttccaatagttggagatgcaaaaagtgtaataactggattaattgaaaaattagctgatacagatttaaatacatcagattggcttgatgaactaaatcaaatgaaaaaggaatatcctctttcatataatcaagaagaaaaagggcctttaaaagttccttttgtactagaagagttacaaaaactagccgacgatgatgcaattgttgtttcaggggttggtcaacatcaaatgtggatatcacaacattggaattttacgtcccccaatacctggttaaattctggtggtttaggaacaatgggttattccttacctgcagctattggtgcaaaagctgcctatccagatcgtcaaattttagctttagatggtgatggatgtttccaaatgacatgtcaagaattgatcaccgcttcaactgaaaatattcctataaaaattgttgtctttaacaatggaaatcatggaatggttaggcaatggcaaaaaatattttataaaaatagattctctgcatcagaattaacacaccatacacctgactatgttgccctcgcagaatcaatgggggctacaggattaagaatgattgaaaaatctgatgtaaaaaaagtttttgaaaaaatgttagaaattgatgacaaacctgtccttgtagagtgcatagttgatccagaagatatggttttccctatggttcccgcaggaggaagtaacgatgttgttattctaaatgaggatgatctaaagaatttatgag

SEQ ID NO: 232225 - DNA, 613 bp, Unknown
  Bacterial polypeptide expressing nucleotide sequence isolated from the Sargasso Sea
atgccaaaattatctacaggagctgagattgtttttaagtgtcttgaagaccaaaaagttgaatatatttttggttatcctggtggcgctgtattaccaatatatgacgaattaaaaaatcactcctcattaaaacacattttagtaagacacgaacaaggtgctggccatgcagctgagggttatgcaagatcatctggtaaaccaggagtagttttagttacgtctggacctggcgcaacaaacgttgtgacagctttgaccgatgcttatatggactctattccattggtttgtatatcgggacaagtaccaacacacctaattggtacagacgcttttcaagaatgtgatacaacagggataacaagaccatgtacaaaacataattggctagttaaagacattaaagatctatcaaaaataattcataaagcttttgaggttgcaactacaggtcgcccaggacctgtcttagtagatatccctaaagatatccaatttcaaaagacaacttattcaaaatataataaaaagaaaaaattaaatggaaaaaaatctaactcatttaataaatctgatattgatgaattaactaaattaatgtcaaatg

SEQ ID NO: 232226 - DNA, 1138 bp, Unknown
  Bacterial polypeptide expressing nucleotide sequence isolated from the Sargasso Sea
atttatggactctataccaatgattgttatatcaggccaagttgcaaaacacctattggcacagacgcttttcaagaaactgatatgattggtatttcacgtccgattgtaaaacatagcttcactgtcgatagtgcagaaaatataccagaaattgttaaacaagcctttcatattgcaacttctggaagacctggccctgtcgtaatagacgttcctaaagatactactgcgccagataagttatttgaatttaaatatcctaatgatgtagatattagatcttataaacctccaattgatcctgatccaaatcaaattgaaagagctgtagatgcaatcatagaatcaaataaacctgttatttatgccggaggtggtgcaataaatagcaatgcctctgaagagcttattcgattaaatgaaatcttagattttccagttaccaatactcttatggggttaggtgtttatcctgcgactcataaaagattcttgggaatgcttggcatgcatgggacataccaggcgaatatgtcaatgcataatgcagatttgataatcgcaattggagcaagattcgatgacaggatcactaacacaccaaaattatttgcacctaatgcaaaaataatacatttagatgttgattactcatcagtatctaaaattattgaggcaaatattgcagtatttggtcaagtcaagaactcattattagagatgattgaattattagaagctaaaaaagaattaattgacccaaaaaagatactcccttggaaagaacaaatttcggattggaaatcacaacatggtttaaatcatgaaatgcacttatgtgaaacggatgataaaccaataatgccacaagcagttgttcaacatttatacaacattacaaatggaaaagcatttataacttctgatgtaggacaacatcagatgtttgccgctcagtattatcattttgatgaaccaagaaaatggatcaattctggtggcttgggcacaatgggctttggtttacctgctgctatgggagcaaaacttgcatacccaaatgatgaagtaatttgtattacaggcgagggcagtattcaaatgtgcattccaggaattgtctactttgcactca

SEQ ID NO: 232227 - DNA, 928 bp, Unknown
  Bacterial polypeptide expressing nucleotide sequence isolated from the Sargasso Sea
caacaacgccatgcagaactgcgacgtgctgctggctgtgggtgcccggtttgacgaccgcgtgatcggcaaccccaagcactttgcacaaaacgaccgcaagatcatccacgtcgacatcgacccgtcgagcatctccaagcgcgtgaaggtggacattccgatcgtcggtgacgtgaaggatgtgctcaccgagctgatctccatgatccgcgagagcagcacccgccccgatgctggtgccctggcagcctggtgggacaccatcgaaggctggcgcaagcgtgagtgcctgaagtacagcatgggcagcggcgacgtgatcaagccccagtacgtggtcgaaacgctgtggaacatgaccaaggatggtgatacctacatcacatccgacgtgggtcagcaccagatgtgggcggcgcagtactaccgctttgacgaaccccgtcgctggatcaactccggtggcttgggcaccatgggtgtgggcatcccttacgccatgggcatcaagctggccaagccgcagtccgaagtgttctgtattaccggcgaaggctcggtgcagatgaacatccaggaactgtccacctgcctgcagtacaacacgccgatcaagatctgctcgctgaacaaccgctacctgggcatggtgcgccagtggcaggagatcgagtactccggccgctacagccacagctacatggatgcgttgcccaacttcgtgaagctggccgaggcctatggccacgtgggcatgctgatcgagcgtcctcaagacgtggagccggcgctgcgcgaggcccgcaagctcaaggaccgcacggtgttcatggacttccgcaccgaccccaccgagaacgtgttcccgatggtgcaggccggcaagggcatcaccgaaatgctgctggggtcggaagacctttaa

SEQ ID NO: 232228 - DNA, 1155 bp, Unknown
  Bacterial polypeptide expressing nucleotide sequence isolated from the Sargasso Sea
ttaaatcatcaaaaccaattttttatacaggtggcggagttataaattctggacctgaagcatcgaaagcattaagagaattggtcaagctatctggatttccagtcacttcaaccttacaaggtttgggcgcgataccaggagatgatcatcaatttttagggatgcttggaatgcacggcacatacgaagcaaataatgccatgcatgattgcgatttattaataaatattggagcaagatttgatgataggattacaggaagagttgatgcgttttcgccaaattcaaaaaaaatacatattgatattgatccatcctcaataaacaaaatcgtcaaaacggacttatcaattgttggagattctttaacggtaatctctgagatgataacaatactaaaaactaaatactcaaactttaacagctcaaacaaagaaaaaattagtgcctggtggagtcaaattgaaacttggcgaaaaaagaagtcattatcgtacaaaaaagataaaaaattaattatgcctcaacaagcagtagaaaggctatacgaattaacaaaaaaacaagatacttttattacaactgaggttggccagcaccaaatgtgggctgctcagttttataagtttaaagagccaaacagatggatgacttcaggtggtttaggaactatgggttatggtttgcctgcagcaattggtgttcaattagctcatccaaaaaaattagttgtagatatagcaggggaagcttcaatactcatgaatatacaagaactatcaactgctgtacaatatagattaccaattaaaatttttatattaaataaccaatggatgggcatggttcgccaatggcaagaattacttcatgaaaaaaattattcagaaagttacaccgaagccttacctgactttgttaaattagcagaagcatacggggcagttggcattagagcaactaatccaaatgagttagatggcaaaattgaagagatgatggaaattaacaagccggtaatttttgattgtgttgtaaaaaaagatgaaaattgttttccaatgataccatccggcaaacctcataatgaaatgatactcggaccagatgacgaggaggaaatttcagaagaaggaaaagttttagtttagt

SEQ ID NO: 232229 - DNA, 516 bp, Unknown
  Bacterial polypeptide expressing nucleotide sequence isolated from the Sargasso Sea
tatgaaattaccaggaaatgacattcttattcaatcccttattaatgaaggcgttgaatatatatttggttatccaggtggggcagctcttcatatttacgatgcaatctttaatcaaaacgaaattgaacatattcttgttagacatgaacaaggagcaacccatgcggctgatggatatgcaagagcaacaggaaaacctggggtagttttggttacttccggaccaggagcaactaatgcaattactggaattgctactgccttcatggattcaattcccatggttgtattgtctggtcaagttgcaactcatttaataggaactgatgcatttcaagagactgacatgataggtatatccagaccaattgttaaacatagttttacagttgaaagcgcagacaaaatatctgaagtaatcaaacaggctttttttatagctacttcaggtagaccaggaccagttgtaatagatattccaaaagatacaacagctccagataaattattgat

SEQ ID NO: 232230 - DNA, 1366 bp, Unknown
  Bacterial polypeptide expressing nucleotide sequence isolated from the Sargasso Sea
tatgggaaaattaatatcaggcgctgaaatagtttttaaagttttagagcatcacaaggtagaacatatattcgggtatccaggtggagctgttttaccaatttatgatgaacttaaaaaccataaaacaataaaacatattttagcacgtcacgaacagggcgcaggtcacgcagctgaaggatatgcgcgctcatctggaaaacctggagttttgttagttacttctggacctggagctacaaacgctgtaaccgctcttacagatgcttacatggactcggttccactagtttgcataagcggtcaagtcccaacccatttaattggaacggacgcatttcaagaatgtgatacgactggaattactagaccttgtacaaaacataattggttagttaaagatgttaacgatttagctaaaataatggatttagcatttgaagttgcaacaactggtagacctggaccagttttagttgacataccaaaagatattcaatttaaaaaaacaaattttgttttaaaaagttcaaacaagaaaaaattaaatggcaaatcaagtcagaatggaaaagtaagctcaagtgatttagataatgttattaatttgatgaaaaagtcttcaaaaccaattttttataccgggggcggagtaattaattcaggtccagatgcaagtaaatcattaagggaacttgtttcattaactggtttcccaataacatctactttacaaggtcttggggcttaccccggagatgatcctttatttttaggaatgttgggaatgcatggaacgtatgaggcaaacaactctatgtatagttgtgatctaatgataaatattggagcaaggtttgatgacaggataaccggaaaagtggatgagttttcacctaaatcaaaaaaaattcatatagatattgatccgtcatcaattgggaaaaatattaaagtagatctaccagttgtgagtgatgttggaagctttttaaaagctttaaataaaagaataaaagaaaaacataaagattttttaaactctaataaacaaaatatttcaaaatggtggaaggatatagataagtggagacagaaaaaatctttaagcttcaaaaatagtaaagaagtaataaaaccacagtatgcagtgcaaagactttacgaattatcaaaaaaccaggatacttacatcacaactgaggtgggtcagcaccaaatgtgggctgctcaacattataaatttaataaaccaaacagatggatgacctcaggtgggcttggcacaatggggtacggtttaccagcagcagtaggcgttcaaattgctcacccagataaattagttatagatattgctgga

SEQ ID NO: 232231 - DNA, 712 bp, Unknown
  Bacterial polypeptide expressing nucleotide sequence isolated from the Sargasso Sea
tctaagtggtgggagcaaattgataaatggagagagaaaaaatctcttaattttataaatagtgataaaattataaaacctcagcatgcagttcaacgactttatgaattaactaaggaaaaagatacttttataacaacagaggttggccaacatcaaatgtgggcagcccaacattacaaatttaataagcctaatcgttggatgacatccggtggattgggaacaatggggtacggattaccagcagcaatcggtgttcaaatagctcatcctggaaaattagttgtagatatagcaggggaggcctctgttttgatgactatgcaagaaatgtctacagcagttcaatataagctaccaatcaaaatatttattttaaataatgaatatatgggaatggtaaggcagtggcaggagcttttacatgaaaaaaattactctgaaagttatacagcagctttacctgattttgtaaaactagcagagtcttatggttgcgtgggaataagagcaaagtcacctgatgaacttgatgaaaaaattaaagaaatgatcgatgttcaaaaaccagttatattcgactgcgtagtagataaatctgaaaactgttttccaatgataccttcaggaaagcctcataatcaaatgattttaggaccagaagaagaagaagaagaaatttctgatgaaggaaaaatattagtttaat

SEQ ID NO: 232232 - DNA, 664 bp, Unknown
  Bacterial polypeptide expressing nucleotide sequence isolated from the Sargasso Sea
tttgttaatagtaccgaaactataaaaccacaatatgcagttcaaagactttatgaactaaccaaaaacaaagatacttatataacaactgaagttggtcagcatcagatgtgggcagcacaacattataaatttgataaacctaatcgttggatgacttctggtggtcttggaacaatgggatatggattgccagccgcagttggagtgcaggttgctcatccaaataaattagtaattgatattgctggagaagcatctgttttgatgactatgcaagaaatgtctactgcggttcaatacagtcttccgattaaaatatttattttaaataacgaatatatgggaatggtaagacagtggcaggaattactacatgataaaaactattcagaaagttatacagctgcactaccagattttgtaaaacttgcagaagcatatggctgtgtaggcataagagctcaaacacctgaagagttagacgataaaataatagaaatgattaacacggacagaccagtaatatttgattgtagggtagacaaacaagaaaattgttttcccatgataccttctggaaaagcacacaatcaaatgcttttaggtccaaaagatcaaaaagaaaataaaattacagggaaaggtaagactttagtttaat

SEQ ID NO: 232233 - DNA, 1026 bp, Unknown
  Bacterial polypeptide expressing nucleotide sequence isolated from the Sargasso Sea
ttccaggagatgataatcagtttttaggaatgttgggaatgcacggtacttatgaggcaaataatgctatgcacgattgtgatttaatgatcaatataggagcaaggtttgatgatagaattactggaaagattgatgaattctcacccaaatcaaaaaaagtacatattgatattgatccatcttcaataaataaaaatgtaaaagttgatttaccaatagttggagatgttcaggcagttatgactgctgctattaaaacgataaaaaaaaataagtcaggttttataaaatctaataaacaaaatatctctaaatggtgggagcaaattcaaaaatggagatcaaaaaaatctttagattttataaacagcagagaaactataaagccacaatatgcaatacaaagactatatgagcttacaaaaaataaagacacttatattacaactgaagttggtcaacaccaaatgtgggcagctcagcattacaagtttgataaaccaaatagatggatgacttcaggaggattgggaactatgggatatggattacccgcagcagtgggtgtacaaattgctcatccaaataaattggtagttgatatcgcaggtgaggcttcagttttaatgactatgcaagaaatgtccacagcagttcaatacagtttacctattaaaatatttattttaaataatgaatatatgggaatggtgagacaatggcaggaacttttgcatgataaaaattactcagaaagttatacagccgctttaccagattttgtaaagttagcagaggcatatggatgtattggaattagagctaaaacgcctgaagaattggatgataaaataattgagatgataaatactgatagacctgtgatatttgattgtctagttgacaaacaagagaattgttttccaatgattccatctggaaaaccacacaatcaaatgcttctaggaccaaaagatcaagaggataataaaattactggaaaaggaaaaactttagtttaat

SEQ ID NO: 232234 - DNA, 1729 bp, Unknown
  Bacterial polypeptide expressing nucleotide sequence isolated from the Sargasso Sea
atgaaattaagtggatcagaaattattatacaggcgctcaaaaaagagggtgtagaatacatatttggctatccaggtggagcagttcttcatatttatgatgcgctatttaaagagaaaaatattaagcatgttttagtaagacatgagcaaggagctacccatgctgcagatggctatgcacgtgcatgtggtagacccggagttgttcttgtaacttcaggaccagggataaccaattgtgtaacaggtatggcgactgctcacatggattcaataccgatgatagttatttcgggtcaagtatcacggcaatatgttggaagtgatgcatttcaagaagctgatgcaactggaataactagaccaataactaaacataattttttaattgacagtagagagtctatagcagaggtatttaagaaagcatttgaaattgcaacaacaggtagaccaggacctgtattgattgatattcccaaagatttgacagacccaaatatcaaaattgattttaaatatccgagcaaagtaaaaatacgttcatataaacctcagaaaaatgataagcaagaaaaaattgatcaggctgcaaaaattttatgttcagcaaaaaaaccaatgatttatactggtggtggtattatattaggaaatgcacacaaacatctgtataagatagttaaaaaacttaactatccgatcactaatacgttaatgggtttgggaggatttccagcgacggatgctcagtttttagggatgctaggtatgcatggcacctatgaagcaaatatggcaatgcatgattgtgacgtactccttgcagttggagcaagatttgatgatcgtgtaacaggtgatacatctaaattctgtcctaatgcaaaaataattcatatagacgtagacccatcatcaatctcaaaaataattgaagttgatctctctcttattggtgaaacatcattgatattgaaaagtctatctaaagcaatagaactccattcaaaaaaaattagtaagacagctattaaaaaatggtggaaacaaattgagaaatggcgtgataaaaaatgtcttaaatataaaaaatcaaaaacaattattaagcctcaggaagttatagaaacactttacgatatcacaaaaggtaatgccttcgtgacatctgacgtaggacaacatcaaatgtgggcagctcagtattacaaatttgataaacctaatcgttggataaattctggcggactagggactatgggatttgggttacctgcagcaatgggagcaaagcttgcatttccaaaatccgaggttgtgtgtgtcactggtgaggcgagcatactcatgtgcattcaagagcttgcaacatgtcttcagtatatgttgccaataaagattgttaatttaaataataggtatatggggatggtgagacaatggcaagaatttttttatgagggcagatatgctatgtcctatatggaggcgttacctgatttttgtaagctatcgagtagctttggacatgtagggatacagattgataaaccatccgagctcagaacaaaattaaatgaggcgatgaaaattaaaaatagactagtatttattgatgtaataaccgatcaggaggaaaatgtttatcccatgattaaaagcggcaaagcacataatgaaatgcatttatcacctacaaatgaggatacagagttagcataat

SEQ ID NO: 232235 - DNA, 866 bp, Unknown
  Bacterial polypeptide expressing nucleotide sequence isolated from the Sargasso Sea
aaaaaaaatacatgttgatattgatccatcctctataggaaaaaatataaaagttgatttagcaatagtaagtgatgtatcagaattcttaaaatctttaataaagagatttaaggaaaaaaataaaaattttttaagctctaacaaacagaaaacatcaaaatggtggagcactattgaaaagtggagagaaaaaaagtctcttaactttataaatagcaacaaaataatcaaacctcaacacgcagttcaaagactatatgagttaacgaaagataaagacacatttgtgacaactgaggttggccaacatcagatgtgggctgcacaacattataagttcaataagcctaacagatggatgacctctggaggattaggtactatgggctatggtttaccagccgcaattggtgttcaaatagccaatcctggcaaattagtagtagatatagctggggaagcttcagttttaatgacgatgcaagaaatgtctacagcagtgcaatataagttgccaattaaaatattcattttaaacaacgaatacatgggaatggtcagacaatggcaagaattgttgcatgaaaaaaactattctgaaagttataccgctgcactacctgactttgtaaaacttgctgagtcatatggatgcgttggaatgagagcaaaaactcctgatgagcttgacgaaaagataaaagagatggttaatatagacagaccagtaattttcgattgtttggttgataaagctgaaaattgttttccaatgataccttctggtaaaccacataatcaaatgattttaggacctgaagaagaggaagaaatttctgatgaaggaaagattttagtttaat

SEQ ID NO: 232236 - DNA, 868 bp, Unknown
  Bacterial polypeptide expressing nucleotide sequence isolated from the Sargasso Sea
aatgatgtcgggcgcagccatggtggttgaagcgctaaaagatgtaggagtgacacacgtgttcggttacccaggtggtgccgtattagacatttatgatgcgttatttgcgcaagatgatgtcaaacacgtcctcgtacgtcatgaacaggcagccgcccacatggcggatggttatgcacgttcaactggcaaaaccggcacagtgctcgtcacatcaggtcctggcgctacgaatactattacaggtattgctactgcatatatggactctattccgatggttattttatcgggacaggtgccgtcgaagcatattggtgaagacgcattccaagaaactgacatggtggggtgctcacgccctatcgttaagcacagctttttggtaaagcgcgcggttgatatcccagaagcgattgctaaagcttattatattgccaacacaggtcgtcctggcccggtggtagtagatttgccaaaagatattgtgaacgtagcagaagaacacccgtacgtgttcccaactgacgtgaccatgcgttcttacaacccaactgaaaaaggccatcctaaacaggtcaaaaaggcagttgagtcgctacttaaagcagaacgtcccgtactgtatgtaggcggtggagctgtagcttgcgatgcgtctgcaaaggttattgagttagccgagaagcttaatgcaccggtaacttgtacgctaatgggccttggtgctatgccgggtacacacaagcaatttatcggcatgctaggtatgcacggtacgcttgaagcgaacaagaccatgcataatgccgactgcatcattgcactaggcgcacgttttgatgaccgtgttaccaaacacgtt

SEQ ID NO: 232237 - DNA, 757 bp, Unknown
  Bacterial polypeptide expressing nucleotide sequence isolated from the Sargasso Sea
aatgaccacgaaaaataaaaaatcaacagaaaaaaagattacctcgaaaaaggctccgaaacctgccggacacccgatgaaaggccgcgatattctcgtaaaagccctcgagaacgaaggagttacagtaatttttggttacccgggtggagcatccatggaaattcatcagggtcttacattatccaaaaaaatccgcatggttttgccgcgacatgaacaaggtggatcttttgcagcaagtggatacgccagagctacgggtgacgttggcgtatgtctggcaacttctggaccaggtgcaacgaacctgatcacagggattatcgacgccaaaatggattccatccctatggttgctatcacgggacaagttcccagcacagttttgggtagtgatgcgtttcaagaaaccgatatcatgggctctacgtttcctttggtaaagcatagctacatggtccaaaacattgcggatataccccgcattattaatgaagcttttcatattgcaaaaacgggacgacctgggccggttcttgttgatattccaaaagacattcaacaacaagaaagcgttgttaactttaatgtaaaatttgattgcccaagttataaacctaacttaagtccctcggttttccaatgcaagaaagcggcgcatgcaattcaaacagcaaaacgcccgcttatatatgcaggtggtggcatcattgccagtgatgcttctaaggagctaacagcatttgtaaaaagg

SEQ ID NO: 232238 - DNA, 985 bp, Unknown
  Bacterial polypeptide expressing nucleotide sequence isolated from the Sargasso Sea
aatgacaggggcagaaattgtattacaatcacttgtagatcaaggggttgaggtagtatttggttatcctggtggtgccgttttaccaatatatgataccttatttaaacaaaattctattaaacatgttttagttcgccaagaaggtggtgcaattcatgcggctgaaggatatgcacgctcaacaggtaaagttggtgtagtattagttacatctggtccaggggcaacaaatgtagtgacaggtttaacagatgctatgatggatagtattccaattgtttgtatcactggtcaagtacctcaacatttaattggaagtgatgcatttcaagaatgtgacactacaggaattactagaccttgcactaaacataattatttagttaaagatccaaataaattatcacctgtttttcatgaagcttttacaatagctaaagatggaagaccaggccctgttttaattgacattccaaaagatgttcaatttgcaaaaggaaattatacacaaaaagaaaaaataataattccatcacatagattatttgaaccagagattttcaagaatgatgaaaaaattaatgaagttgttaatttaatatcaaaagcaaaaaaacctattttttatataggtggcggatgtattaactctggaccaaaagcttcagaactagtttcacaatttgtcgaaacgacaggagcaccagctaccatgacgttaatgggcttaggtgttcttggatcctctcattccaactcgctaggaatgcttgggatgcatggtatgtatgaagctaatatggcgatgcatgaatgtgatttattgattaacattggagcacgttttgatgatagggtaacaggaaggcttgatgcattctctccaaattctaaaaaaattcatattgatattgatgaaagtaatattaataaaacaataaaagttgatgtgccagttgttggtgatgttacaagtatttaa

SEQ ID NO: 232239 - DNA, 1768 bp, Unknown
  Bacterial polypeptide expressing nucleotide sequence isolated from the Sargasso Sea
atgtctaaaatatattcaggtgcagaaatagtatttaaatgtcttgaagatcaaggtgttgaaaatgtatttggatatcctggaggtgcagttcttcctatctatgatgaattgaaaaatcatcaatctgtaaaacatattttagtaagacacgaacagggggctggtcacgctgctgaggggtatgcaagatctactggaaaaccaggtgtagttttagttacttcaggtcccggcgcaacaaatgtagttacagctttaaccgatgcttatatggactcggtcccgttagtctgtatatctggacaagttccaacccatctaataggaactgatgcttttcaagaatgtgataccacaggtataacaagaccatgtacaaaacataattggttagtaaaagatgttaaagatttagctaaaactattcacaaagcttttgaggtcgctactagtggaagaccaggtccagtattagtcgatattccaaaagatattcagtttcaaaaaactaaataccaaaaatatagcaaacttaaaaaattaaatggaaaaggtaaaaaccttttttcacaaaaagaaattgatgaactaattaaattaatgtcaaattcatctaaaccagttttttatactggtggaggagtaataaactcaggtccacaagccagtaccttgttgagagagctagtaagtattactggttttccaattactacaacattacaaggattaggttcttatccaggagatgataaccaatttttgggtatgttaggaatgcatggaacttatgaagctaataatgcaatgtatgagtgtgatttaatgattaacattggagcaagatttgatgatagaattactggaaaattagatgagttttcacctaagtcaaagaaggttcatattgatattgacccatcatcaataaataaaaatgtgaaggttgatctaccaattattggtgatgtaactgatgttattaaagcaacaattaaaaccatttcaaagagaaaacttaatttttcaaaatctaacaaacaaaagatttctaagtggtgggaaaagattcaaaaatggagatccattaagtctttggattacattaatagtgaagaaagcattaaacctcagtatgctatagagaggttgtatgagctaacaaaaaacaaggaaacatttattacgactgaagttggacaacatcaaatgtgggcagctcaacattataaatttaataaacctaatagatggatgacttctggaggtttgggaacaatggggtatggtttacctgctgctgtcggggttcaggttgcacatccaaataaattagttattgatattgcgggtgaggcatcagtattgatgactatgcaggaaatgtccactgcagttcagtacagtttaccgataaaaatttttatattaaataatgaatatatgggaatggtcagacaatggcaggaacttttacatgataaaaattactccgaaagttatacagctgcccttcctgattttgtaaaattggcagaggcgtacggttgtgttggtattagagctaaaacacctgaagagttagatgataaaattatcgaaatgcttaatacagatagaccagtaatttttgattgtttggttgataaagaggaaaattgttttccaatgataccttcaggtaagccacataatcaaatgcttttaggtccaaaagaccaaaaaaataacaaaatttcaggcaagggtaaaattttagtttaat

SEQ ID NO: 232240 - DNA, 1735 bp, Unknown
  Bacterial polypeptide expressing nucleotide sequence isolated from the Sargasso Sea
atgaaaattgcagaaaacgacatattaattcagtctctgataaatgagggagtggaatatatctttggttaccctgggggtgctgctcttcatatctatgattcgatctttaatcaaaaggagatgcagcatattttagtaaggcatgagcaaggtgcaacacatgctgctgatggctatgctcgtgcaacaggaaaacccggagttgttctagttacatcaggaccaggcgcaacaaatgctataacaggtattgcaacagcattcatggattcaattccaatggtaataatatctggtcaggttcagagtcatttaattggaactgatgcctttcaagagacagacatgataggcgtatcaagacctattgttaaacacagtttcaccgtagacaaacaagagaatattgcaaatatagtggctgaagctttccatatagcaacatcaggaagacaaggacctgttctcattgatgttccaaaagatttaacaaatccagatgaattatttgattttgtctatcctgataaggttcacataagatcttacaatccacccacaaatccagaaaatcatcaggtatcccgtgcggttgatgcaattcttgcttcagaaaggcctgtcatttatgcaggaggagggaccatttcaagtaatgcttccaaagagcttagggagctaaatgatttaatagatgctcctgtaacaaatactcttatgggtttaggcgtattcccaggcacacacaaaagattcttgggaatgcttggcatgcatggaacctatcaggcaaatatggctatgcacaatgctgacctaataattgctctgggtgcaagatttgatgacaggattactaatgcacctgataaatttgctcctagagctaaagttattcattttgatgtcgaccattcttcagtctcaaaaattatcgaagctgatattgctgtttttggccaaataaaagattcattacaagctgtaaacaatcatctaaagactaaaatagatgaaattgataacgaaaaacttgccccatggcatcaacagataagcgattggaaagaaaagcatggcctcaatcatgatttatataagattgaagatgacagtggaccaattttgcctcaagctgctgttcagcacatatatcaagaatctcaaggaaaggcatttgttacttcagatgttggtcagcatcagatgtttgccgctcagtattatcactttgatgagccaagaaaatggataaattctggcggtcttggaactatgggatttggtcttccatcagcaatgggagttaaattagcttatcctgatgaagaagtaatttgcatcactggagaaggaagtattcaaatgtgcattcaagaactttcaacatgttctcaatataaactgccaataaagatatttaatataaataacttggctcttggcatggtaaagcaatggcaagatatgaactacgatggaagacactcctcaatcagctatgaagactctcttccagactttgttggacttgctgagtcttatggtcatgttggaattaaaataactaaaaactcagaacttaaaaaaggaatagcaaaagctctatccataaaggataggttagtttttgtcgatatttatgttgatcctgatgagcatgtttatcctatgcaagttgcaaatggcagccttaaagatttatggcttagtaaaggagaaaaaacatgat

SEQ ID NO: 232241 - DNA, 1108 bp, Unknown
  Bacterial polypeptide expressing nucleotide sequence isolated from the Sargasso Sea
atgccaaaattatacacaggagcagaaattgtttttaaatgccttgaagatcaaaaggtagaacatatttttggatatcctggtggagcagttttaccaatttatgatgaactcaaaaatcataattctattaaacatatattagttagacacgaacaaggtgctggtcatgcagctgagggatatgccagatcatcaggtaagcctggagttgttttagttacatctggacctggtgctaccaatgttgttactgcattaacagatgcatatatggactcagttcctttggtttgtatttctggtcaagttcctacccatttaataggaactgatgcatttcaagaatgtgataccaccggtattactaggccctgcacaaaacataactggttagtaaaagatataaatgatttatcaaaaataatgcatgaagcatttaaagttgcaactacaggaagaccaggtcctgttttagttgatattccaaaagatattcaatttgcaaaaactaaatataaaaaacccaaaaaagaaaaaaaattaaatggaaaatcaaataataagttttctcaaaaacaaatagatcaattaattgatttattaaaaaatgcaaaaaaaccagttatttatagcggtggtggagtaattaattcaggacctaaggcaagtgatgcattaagagagtttgtagaattaacaggatttccaattacttccacccttcagggtttaggtgcatatcctggtgatgataatcaattccttggaatgttaggtatgcatggaacttatgaggccaacaatgctatgcatgattgtgatcttttaataaatattggtgcaagatttgatgatcgtattactggaaaaatagatgaattttcaccaaactcaaaaaaagttcatattgatatagatccttcgtctataaataaaattataaaagttgatcttgctatagtaggagatgttacgaaggtaattggtaaagtaaataaagcaatcttaaagaaaaaaaatggtcatagtaaatccaataaatcaaatattgctaagtggtgggaacaaatacaaaaatggagaggcaaagactctcttaattttg

SEQ ID NO: 232242 - DNA, 1115 bp, Unknown
  Bacterial polypeptide expressing nucleotide sequence isolated from the Sargasso Sea
tttaatcaaaaagtcaaagaagccaattctttatgtcggtggaggaattattcattcgaaagctaataatgaactctttgaactagctactaaatttaatattccagttgttacaacacttatgggaagaggtgctttccctgatggtcatgaattgtgtcttgaaatgccaggtatgcacggcaattatacagctaccacttcaattcaaaatgctgacctgttaattgcaataggcgtaaggtttgatgatagagttactgcaaatccgtcattttttgctcagaatgcaaaagttattcatgctgatattgatccagcggaaattggaaaagtacgtgatgcacaagttcctattgtaggtgatgcaaaaagtgtaattaaaggacttattgaagctttgggagatgaaaaactagatactgaaaattgggtttcagaactaaaagaaatgaaaactgaatttcctttgtcttataagcaagaagacaagggtcctcttaaggttccatatgttttagaagaacttcaaaagttaacaaaagaagaagcaattgttgttgctggtgtaggtcaacatcaaatgtgggtatcccagcattggaactttactgaaccaaatacctggttaaattcaggaggactaggtactatgggttacgcattaccagctgctatcggtgcaaaaacagcttatcctgacaaactagttttagcattagatggggatggatgttttcagatgacatgtcaagaattaatcactgcctcaacagaaaatatacctattaaaattgttgtctttaacaatgggaaccatggtatggttcgtcagtggcaaaagattttctacaatagtaagttttctgcttctgaactaactcatgacacaccagattatcttaaactagccgaatctatgggtgcagttggcctaagaatgatggaaaagtctgatatagaaaaagtttttaacaaaatgttagaaatcaatgatagaccagttttagttgattgtgttgtagatccagatgatatggtatttcctatggtgcctgctggtggaagcaacgatcaaatcattatgaatgaagaggatcttaaaaacctatgag

SEQ ID NO: 232243 - DNA, 913 bp, Unknown
  Bacterial polypeptide expressing nucleotide sequence isolated from the Sargasso Sea
atgcacaacgccgatgtgatttttgcagtaggcgcgcgttttgacgatcgcgtgaccaacgccaccaaaaaattctgcccgaacgccaccattattcatatcgacattgacccggccagcatctccaaaaccatcaatgcccatattcctattgtgggcttagtgaagcctgtattgcaggaaatgctgcatcaactggagaaaaacaaaggcgaactggatcaagacgccttaggtcagtggtggcatcaaatacagcaatggcgtgaagtgcatggtggccgttatgacagcagcgcatcgcatttaaaacctcaggccgtaattgaagctgtgcaccgccataccaaaggtgatgcctatgtcacgtcagacgtaggtcagcaccagatgtttgctgcacagtattataagtttgataaaccgaatcgctggatcaattcaggtggccttggcaccatgggctttggtttaccagctgctatgggcgtcaagctgcattaccctgatgctgaagtggtctgtgtaacaggcgaaggctctattcaaatgaatattcaggagctgtccacctgcaaacaatatggccttggcgtcaaaatcattaacctgaataacggttacttaggcatggtaaaacagtggcaggatatgaactacgacagccgctactccagctcttatatggattctttgcctgactttgtaaagctggccgaagcttatggccatgttggtattcgggtcaccaaagctgaagagttagagcctgcgttagagcgcgcttttgccctcaaagacaaactggtgtttttagatattcatgtcgacccgaccgagcatgtgtatccaatgcaaataccaggtggtgctatgaatgaaatgtttttaagcaaaacggagcggacttaaa

SEQ ID NO: 232244 - DNA, 1333 bp, Unknown
  Bacterial polypeptide expressing nucleotide sequence isolated from the Sargasso Sea
aaacacaactatttaataacaaatgcttctgaaataccccaagtgttaaaagaggcaaagtatattgcaacttcaggaaggcctggacctgttttaattgatattccaaaggatatcttaaatcaaagatctgattgggttgaaccaggtccacttgatttacctggatacaagcctacattagaaccaaatccaaaaatgattcagcaagcagccaacttaattaaaaattcaaataaaccaatactttatgttggtggtggaattatccactccaaagcaaaccaagaactttttgatttagcaactaaatttaatattcctgttgttacaacattaatgggtagaggtgcttttcccgacggtcatgagttatgtttagaaatgcctgggatgcatggaaactatacagctacaacttctatacaaaaatcagatttgcttattgctataggtgttcgatttgatgatagagtaactgctaatccttcattttttgcacagaatgcaaaagtaattcatgctgacattgatcctgctgaaattggaaaagtaagagaagctcaagtgcctatagttggtgatgcaaagagcgtaatattaggtcttattaatgcccttggagatacaaaacttaatactgaaaattggataaatgaattaaacagtatgaaaaatgaatttccactttcttataatcaaaacgaaaatggtcctttgaaagttccgtttgttcttgaagagcttcaagatttaactgaagaagaggcaattgttgtatcaggtgttggacaacaccaaatgtggatttcacaacattggaattttactgaaccaaatacttggttaaattcagggggtcttggaactatggggtattcattacctgcagctattggtgctaaaactgcatatcctgaaaaattggtacttgctctagatggagatggttgttttcaaatgacttgtcaggaattgattactgcctctacagaaaatataccagtcaaaattgtagtatttaacaacggaaatcatggaatggttagacagtggcaaaaaatattttacaatagtaaattctctgcatctgaattaggtcatgtagttcctgattatgtaaagctagctgagtcaatgggtgctgtaggtttaagaatgactaaaaaatcagaagtaaaaaatgtcttttcagaaatgttaaaaataaatgataaacctgtgttaattgactgtgttgtagatcctgaagatatggtatttcctatggtcccagctggtggtagcaacgaccaaataattttaaatgaagaggatttgaaaaatttatgag

SEQ ID NO: 232245 - DNA, 522 bp, Unknown
  Bacterial polypeptide expressing nucleotide sequence isolated from the Sargasso Sea
aatgccaaaattatattcaggagctgagattgtatttaaatgtttagaagatcagggtgtcagtcatatttttggatatccaggaggagcagttcttccaatttatgatgaattaaaaaattttaattctatcaaacatattttagtaagacacgaacaaggtgccggccatgctgccgagggctatgcaagatcaacaggtaaaccaggtgttttattggtaacatcaggacctggcgcaacaaatgccgttactgcattgacagatgcatacatggactctgttccgttagtttgtattacaggacaagttccaactcatcttattggaactgatgcatttcaagagtgtgatacaactggaattactagaccttgcactaaacataattggttagttaaagatataaatcatctatcagagataatgcataaagctttcgaagtggcaaccactggtagaccaggaccagtgttagttgatattccaaaagatatacaatttcaaaagacaaaatataa

SEQ ID NO: 232246 - DNA, 940 bp, Unknown
  Bacterial polypeptide expressing nucleotide sequence isolated from the Sargasso Sea
atgtcaaaattatattctggtgctgaaattgtatttaagtgttttgaagatcaaggagtgagtcatatttttggctatcctggtggagcggtacttccaatatatgatgagttaaaaaattttaaatcagttaaacatattttagttagacatgaacaaggcgcaggtcatgcagctgaaggttatgcaagatcttcaggtaagccaggagttttattagtaacttctggaccaggagccacaaatgcagttacggctcttactgatgcctacatggactctattcctttagtttgtataactggacaagtgcctactcatttaattggaaccgatgcttttcaagaatgtgatactacagggatcacaagaccatgtacaaaacataattggttagtaaaagatattaacgaccttagcaaaattattcataaagcttttgaagttgctacaacagggagacctggacctgtattagttgatattccaaaagatgttcagtttcaaaaaacaaaatatgtaaattataaaaaacaaaaaaaggtaaacggtaattcaaataattatttttctcaaaaaaatattgaagaattgattcaattaatgagtaaggcaaaaaaacctattttttatacaggaggaggtgtaataaattcgggacccaaagccagtgagttgctaagagaacttgtttatgcaactggctttcctatcacatcaactttgcaagggttaggttcttttccagctgatgataatcaatttttaggaatgttaggaatgcatggaacctatgaagcgaacaatgcgatgtatagttgtgatttaatgattaacattggcgcaagatttgatgataggataactggtaaaattgatgaattttctcctaaatccaaaaaagtacatatagacatagacccatcatcaattaataaaa

SEQ ID NO: 232247 - DNA, 1747 bp, Unknown
  Bacterial polypeptide expressing nucleotide sequence isolated from the Sargasso Sea
atgactaaattaactggcgcagaggtgatactgaaggttttaaaagatcattcagttgatcatatttttggatatcctggtggtgctgttttgccattatatgatgagatattcaaaagcaatgactcacctagacatattttagtaaggcatgaacaaggcgctgcacatgcagctgaaggatatgctagatcaacaggaaaacctggagttttagttgtaacatctggacctggagctaccaatgctgttactggattaactgatgcaatgatggattcaattcctctagtttgcatttcaggccaagtaccaactcatttaattggaactgatgcttttcaagaagcagatactgttggaataacgagaccatgcacaaaacataattggcttgtaaaagatcctgatgacttatgtcgtattttacatgaagcttttcatgtagctacttcaggaagacctggtccagttgttgtagatattccaaaagatattcaatttgctgatgcaaaatattttccaccaagtgaaataaaatcagaaaactataatcctcagattaagcccgatatgcgttttatcgatgaagctatagaattgatggcaaatgctaaaaaacctattttttatactggtggaggagttataaactctggttcagaagcaagtcatttattaaaagagcttgtgttattaactggttttcccattactagtactttaatgggtttaggtgcatttccatcaaatgaaagtaattggcttggaatgcttggaatgcatggaacctatgaagctaatttagcgatgaatgaatgtgatcttttaataaatattggcgcaaggtttgatgatagggttactggaagattagatgctttttcacctaattcaaaaaaaatacacattgacattgatccttcatcaatgaataagactgtaccagttgatgtttctgtagttggtgattgcgcccacgcaattgaaggtattttattaaaatggaaatcgaaaggcctaagggtaaatattgactcatggatggaacaaattgaaaaatggagaaataaaaaatctctagattataaaaattccactgatgtgataaagcctcaatatgcggtagaaagattatatgagctaactaaagataatgattcatatataactactgaagtagggcagcatcaaatgtgggctgctcaatattataaatttgatgaacctaatagatggatgacatctggtggacttggaacaatgggttatgggttacctgctgcaattggcgttcaagtggctcacccaagcagtttagttattgatattgctggcgaagcatcaatattgatgaatattcaagagctatcgacagctgttcagcacaaacttcctattaaggtatttatactaaataatcagtacatgggaatggtaaggcaatggcaagaattattgcatggaggaagatattctcattcatatacagattctttacctgattttgtaaaacttgctgaggcatatggctgtcttggtcttagagcaataaaacctgacgaactggatcaaaaaatacaagaaatggtcgattatcaaggtccagttattttcgattgtgtggttgaccaagatgagaattgctatccgatgattccttcaggagcagcgcataatgaaatgttattaggagaaagcgacgataacccagaggtttctgatgaagggaaggtattaatttaat

SEQ ID NO: 232248 - DNA, 1457 bp, Unknown
  Bacterial polypeptide expressing nucleotide sequence isolated from the Sargasso Sea
tatgaataataaaaaaataaaaatttctggtgctgaggcagttattagatcattaattgctgaaggtgttgatttgatatatggttaccctggtggcgctattatgccagtttatgatgagttatataagtttaaagataaacttaatcacatattaacacgtcatgaacaaggcgcagttcactcagctcaaggtttcgctagaacctctggaaaagttggagttgctatagcaacatctgggcctggagctactaatttggttaccggaattgctgatgctcagattgactcaacacctattgtttgtattactggtcaggtagcatctcacttgctaggttcagatgcattccaagaaacagatattatcggaatatcaacgccagtaacaaaatggaattatcaaataactaaagcaattgaaataccaattataatttctaaggctttttatattgctaaatctggtcgtcctggaccagttctaattgatatcactaaggatgcgcaatttgaaagttttgatttttcatataagcattgtttaggagtaagaagttataaacctgaacctgacatagatttaaaaattatcaaagatgctgcaaaaattataaatagctcaaaaaaaccaatgattgtgtggggtcaaggagtgattttaggtgaggcagaaagtatttttaagaattttgttgaattaactggcataccagctgtttggactattttaggtgcatcggctattccgacttctcatcctctaaataaaggaatggttgggatgcacggaaattatggtcctaatattttaacaaatgaatgtgatcttttaattgctattggtatgcgtttcgatgatagggtaacaggtgatttaaaaacttatgcaaagcaagcaaagataattcattttgaaattgatccagctgaagtaaataaaaatgtaaaagttgatttagccattttgggtgattgtaataaaacattaaatgcaattataccccatgttaaaaataaagatcactctaaatggattaaacaatttgattcctatatgaagattgaggaagaaaaggtcattcaacacgatttatttcccaaaaaaaaagggttaacaatgggtgagtctataaatgcaataaataagtttacaaatggaaatgctattattgtgactgatgttggacaacatcaaatggtagcatgtagatatgcaaaatttactaaatcaaagagcaatattacctctggcggattaggaacaatgggttttgcgttacctgcagcaattggagcaaagatgggagatccgaaacgagaggttatagcagtgattggtgatggaggatatcaaatgacaattcaagaacttggtactatctttcaaaacaaagttgccgttaagattgttgttttaaataatgattttttaggaatgggtaagacaatgg

SEQ ID NO: 232249 - DNA, 757 bp, Unknown
  Bacterial polypeptide expressing nucleotide sequence isolated from the Sargasso Sea
aatgaaccacaatctggaagagttggagaccatcgagaacgccgctgtcagcggtgtcgatcttttcggtgcggagatgattgtcgcggcgctgcgcgcagaggctgtccaatatatttggggatatcccggtggcgccgtgctccccatttacgatgccttgagcaagcaggatcacgtgaagcatatcctggtgcgccacgagcagggtgccctgcacgcggccgatggtttcgcaagagccactggcgaggtgggcgtggcacttgtgacttccgggccgggtgtaaccaatgccgttacagggatcgccacggcgcacttcgactcgatcccgttggttatcatcgcagccaatgttccgaccagtgtcatcggtgaagacgcttttcaggaatgtgacgcggttggtattacgcggccagtcaccaagcacaatttcacggtgcgggaggtctcggaactcccgaatgtcctcaagaaagccttctatctggcgaaatcgggacgccctggccccgtcctcgtggatgttccaaaggacgtccttctgaaccgcgcatctttcgtctacccgcaatcggtgaaaatccgctcttactcgcttccaaagcacggtcacgacgggcaggtccagaaagctgctgatgcgctggcgcgagcaaagcggccctacatctacgtcgggggcggcgtagtacttgcggacgcggctgattcgttaagggagctcgccgaccttctcaatttccagtga

SEQ ID NO: 232250 - DNA, 718 bp, Unknown
  Bacterial polypeptide expressing nucleotide sequence isolated from the Sargasso Sea
atatctaattggtgggaaaaaattcaaaagtggagatctaaacgctctttagattatattggcagtgaagaaacaattaaacctcaatatgcaatagaaagattatacgaacttactaaagataaagacacttatatcacaactgaggttggtcaacatcaaatgtgggcagctcaacattacaagtttaataaaccaaatagatggatgacttcaggcggtcttggaactatgggatatggtttgccagcagctgttggagttcaagttgctcatccaaaaaaattagttattgatattgctggggaagcttctgttttaatgacgatgcaagaaatgtcgacagctgttcaatacaacttaccaatcaaaatatttattttaaataatgagtacatgggtatggtgagacaatggcaagaattacttcatgataaaaattattcagaaagttatactgcagctttgccagattttgtgaaaatggccgaagcttatggatgtatgggcattagagccaaaactcccgaagaattagatgataaaattgtacaaatgcttgaaaatgatggacctgttatatttgattgtttggtagataaacaagaaaattgctttccaatgataccatctggcaaacctcataatcaaatgttattgggacctaaagatcaggaagagaaaaaaatcacaggcaaaggaagagctttagtttaac

SEQ ID NO: 232251 - DNA, 1384 bp, Unknown
  Bacterial polypeptide expressing nucleotide sequence isolated from the Sargasso Sea
acaatgggctgtgacaaagcacaattatcttgtgacagatcccgctgatattccgagaattgtgaaggaagcctttcatatagctactactggtcgtcctgggcctgtgttgattgacgttcccaaagacgtaagtaatcaggtgatggaatggcactggcctgaggatctctcgctgcctggctatgagccggttactgatgttgatccgcagaaaattgctgaagctatcgaccttatttttgcggccgagcgtcccgtaatctacgccggtggcgggcttcttaaagctagggcagcagaagtactggcagaatttgttgatctgaccgatatccacgtggtgacgactcttatggctcgcggcgtatttcccgatagagaccctcgttgtctaggcatgccaggaatgcacgggaactacgcggcagttatggcctttcaacgagctgaccttctaatcaacttgggggctcgctttgatgaccgagtcaccggcaatccagagttttttgctcctgatgccaaaattattcacgttgatatcgatccagctgaacacggcaaggtcaggcaagccgatgttccagtgcgaggggacgcgaagcttgctatagaagcattgattcaagctcacaaggcatcgggtgcaatcaaaaccgatcgaactgcatggaaatcaaccataagtggttggcaggagcagtacccgttgcaatacgagcaatcggacagtgggttcccattaaagccgcagtacgtcttggagcagattcgagataacacgccagacgacacaattgttgtggcgggcgtcggccaacaccagatgtgggcaagccagttctggaagtttgactacccctatacctgggtcaattcgggtggacttggaactatggggtttgctgtcccggcggccatcggagcgaaggctggccagcccgaccgaatggtatgggccatcgacggagatggttgcttccagatgactgcccaagagttgattaccgcggcagctgagaaaattccggtcaaaattgcaatcttaaataatgcttatctgggcatggttaggcagtggcaggagcttttctacgatgagcgatatagcgaggtctatttgagcccggaccaccctgactatgttgcgtgggctgaagcgatgggatgcgctggtatccgcgttgaatcggctgaagaggtgctttccgcaatcgagaaagctaacgcaatcaacgatcgacccgtcgtagtggactttcgtgttgacgcgtttgaaaaggtctacccgatggtgcctgctggtggatcaaacgacgacataatcttgggaccagagggtgacgcagacgcgaaggccaaaggtacagccccctcatga

SEQ ID NO: 232252 - DNA, 722 bp, Unknown
  Bacterial polypeptide expressing nucleotide sequence isolated from the Sargasso Sea
aaaaatttcaaaatggtgggagaaaatgaaaaaatggagatctgtaaattcatttgattttattaacagcgatgagactataaaaccacaatatgcaattcaaagactttatgagttaacaaaaaacaaagatacttatataacaactgaagtaggccaacatcaaatgtgggctgctcaacattataaatttaataaaccaaatcgttggatgacctcaggtggtcttggcacaatgggttatggtttacctgcagcggtaggagttcaagtcgctcatccaaataaattagttattgatatagccggagaagcatcagtattgatgactatgcaggaaatgtctactgctgttcaatacagccttccaattaaaatatttattttaaataatgaatatatgggaatggttagacaatggcaagaattactacatgataaaaactattctgaaagctatactgcagcattacctgactttgttaaacttgcagaggcatatggctgtgttggtattagagctgaaactccagatgaacttgatgataaaataatagaaatgataaatactgacagacctgtaatatttgattgtagagtagacaagcaggagaactgttttccaatgataccatcaggaaaacctcataatcagatgcttttaggaccaaaagaccaaaaagaaaataaaattaccggcaaaggaaagattttagtttaat

SEQ ID NO: 232253 - DNA, 1495 bp, Unknown
  Bacterial polypeptide expressing nucleotide sequence isolated from the Sargasso Sea
ccgatggttatcatatgcgggacagtcagcaggcaagcaattgggagcgatgcttttcaagaggcgccagtaacaagcgtaatgggatctgttgcgaagcatgtttttttagtcacagatgaaaataagctcgctgcaactttaaaagcagcatttgaagttgccacatctggaaggccagggcctgttgttgtggatattccaaaggatgttcaaacagctgagatatccgaagaagattatgaggacaccaatatctcagcttattctaatagaatattggccattgaaaaatcacgcttgaatgaagaaaaatcatccgaattctttacacatctcagcaattcaaagaggccactgatttactttggaggcggtgtaatctcagcgagtgcatcaaaagagctgagagaatttgttgattattttaatctgccggctgtttcaaccctgatggggctaggtgcagtggatactcgacatccctcatctctgcacatgcttggcatgcatgggactccttatgcaaactatgccgttcaagaaagcgacttcttgatagcgataggttctcgttttgacgatcgtgttgcaggcgtgcctgaaaaatttgccccgaaagccaaagtcattgcacactttgatgtcgatccctccgagatcaataaagtcaagaacgctgcttggtctcatctcggagtattgtcattggcactgaaagatctcataaaacatgccaaatcaaatgatcttgagtttaattttggagattggctcagtcacacaggcgaactaaaatcaaaatatcctttaaacttcaatcgctcatccgatttgattcagccggaacatgtcattgagtgcatcaataagatcacaaagggtgatgcaatcgtcacaaccggtgtaggtcaacaccaaatgtgggcagcgcagtactttgacttcaaagagcccaggctttggctaacgtctggcagcatgggaacaatgggttttggtatacctgctgcgatcggcgctcaaattgcacatcccgataaaacagtcattgatgtggatggcgatggaagcattaggatgaacttaggagacttagaaaccattacaaattatgacttaccggttaaagtccttttgctgaataattccggtgacggaatggttaagcaatggcaaaaactttattatggcggccgtctatcagcaagcgataaaacacttcacacaaaagacttcattatgtccgcaaaatcagacggctttcagtttgccgaacgattgagtgaacaatcaaaagtggaagaaacaatcgaacgatttatcaattttgagaaagcagcatttcttgaagttgtcattgatcctgatgcaatggtctttcccatgatcggcccaggaatgtcttacgatcaaatgattacaggtccttttatggatggcaaagatcccgatcctgaaatcgatggaaacgatcctaagtcaatgttttaag

SEQ ID NO: 232254 - DNA, 1738 bp, Unknown
  Bacterial polypeptide expressing nucleotide sequence isolated from the Sargasso Sea
catgaaactttcaggcggagatctgttattacgagctcttaaggaagagggagtaaaattcatatttggctatccaggtggcgctgccctgcatatttatgattctatttttaaacaaaaggcttgtgatcatattttagttcgccatgaacaaggggctactcatgctgcggatggctattctcgagccacaggaaaacctggagttgctttagtaacttctggccctggtgcaacgaatgcaatcacaggattagcaacagcttatatggactcgattcctttgattgtaatttctggtcaagtacagagtcatttaattggtacagattcttttcaggaaacagatatgataggcatctcaaggccaatagttaaacacagttttattgttcaaaatactcaagatattccaagaattattcaagaggcatttcacatagctaccacaggaagacctggaccagttgtgattgatattccaaaagataaaactgatccatcaaaattgtatgaatacaagaaaccaaaagaggtctcgctcaggtcatatcaaccaagagtttcaccacatcctgggcagataaaaaaagcatgcaaaaatattttatcagctgagcgtccagtaatttatgcaggcggcggtgtaattttaggaaatgcacacaaagagctcatggcattaaataaattattaaaagctcctgttactaatactttgatgggactgggtgtttatcctgcaaaggatagatattttatgggaatgttaggtatgcatggaacctaccaggccaatatggcaatgcacaatgccgatgtcataattgcaattggtgcaagatttgacgatcgcattaccaataccccatcattatttgctccgaacgcgagaattattcacatcgatgttgatcccgcttcgatctcaaaaattattaatgcggatattccaatcgttggacaagtcaaagaatccctcaatgcacttataaaggagattaagcgttctaaaatcaaaattgatacagaggctcttgagtcatggaatcaacaaatttctaaatggagaaaaaagcatggtcttgatcatgagttataccttaagaaaaataaatctcaaatgattctgcctcaggtagttgttcaagaactatatcatgcaacaaatggcaatgcctgggttacctctgacgtaggccagcatcaaatgtttgtagcccagtattatcattttaacaagcccagacgttgggtaaattctggcggattagggactatgggttttggtttgcctgcagccatgggagttaaattagcctttccaaaagatgaggttgtatgtgttaccggcgagggaagtattcaaatgtgtattcaagagctttccacctgccttcagtacaatctaccaataaaaattataaatattaataatgaagccttgggtatggttagacaatggcaggatatgaattatggagggcgtcattcagcaagcacctattctgactctttacctgattttgtaaaacttgctgagtcttatggccatattggtatgaaagttaccaagaaagcagatctcaagaagaccttagataaggcattttctatgaaggatagattggtatttgtagatgtttatgtcgatccaaatgagcacgtttatccgatgttagttgctccaaatggaagcatgagagacatgtggattaaaaagaatgttaaagcatga

SEQ ID NO: 232255 - DNA, 1594 bp, Unknown
  Bacterial polypeptide expressing nucleotide sequence isolated from the Sargasso Sea
catattctggcacgacatgaacaaggcgctggtcatgcagcagagggttatgctagatcaagtggcaagccaggagtattacttgttacttccggtccaggagctactaatgcagtaacagccttaactgatgcttacatggattcagttccgttagtttgtatttcagggcaagttccaactcatttaattggaacggatgcatttcaagaatgtgacactacaggtataactcgaccgtgcacaaaacataattggttagtaaaagatgttaatgatcttgctagaattttacatttggcttttgaggttgctaccactggaagaccaggaccagtcttagttgatattcctaaagatattcagtttaaaaaaggtaaatataaatttacaaaggatacattaaagaaaaaacttaatggtaaagttactcataaattatctaacaaagaattagataagtttattgaattaataaaaaaatcatcaaaaccaattttttatacaggaggcggagttataaattctggcccggaagcaagcaaacatttaagagaattaatttcattaaccggttttccaattacatctacccttcaaggacttggtgcataccctggagatgatcctcagtttttaggaatgttaggaatgcatggaacttatgaagcaaataatgcaatgcatgattgtgacttaatgattaatataggagcaaggttcgacgatagaattactggtaaagttgatgagttttctcctaaatcaaaaaagatacatgttgatatagatccatcttcaataggaaaaaatattaaagttgatttagcagttgtgagcgatgtatcagatcttttgcaaagtttaattaaaagatttaaagagaaaaataaaaattttttaaattcaaataaacaaaaaacagcaaaatggtgggaacaaattaacaagtggagagaaaaaaaatctcttaattttgttaatagcaataagataattaaacctcaacatgcggttcaaagactttatgaattaactaaagataaagacacatttattacaactgaagttggccaacatcaaatgtgggctgctcaacattataaatttaacaaacctaatcgttggatgacatctggaggtttgggaactatgggctatggtcttcctgcagctattggtgttcaaatagcaaatcctgggaaattagttgttgatatcgcaggcgaagcttcagttttgatgactatgcaagaaatgtcgacagcagttcaatacaaattacctataaaaatatttattttgaataatgaatatatgggaatggtaagacagtggcaggaactcttacatgaaaagaattattctgagagctatactgctgcgttacccgattttgtaaaattagctgagtcttatggttgcgttggaataagagcaaaaacacctgatgaactagatgtaaaaatcaaggaaatgattgatgttcaaaaaccagtaatatttgactgtgtggtagataaatctgaaaattgttttccaatgataccatcaggaaaaccacataatcaaatgatattaggacctgaagaag

SEQ ID NO: 232256 - DNA, 907 bp, Unknown
  Bacterial polypeptide expressing nucleotide sequence isolated from the Sargasso Sea
aaactttgcagttacggaatgtgatctcttagtagctattggagctagatttgacgatagggtgacaggaaaattagatacttttgctcctaatgcaaaagtcattcatatagatattgatccagctgaagttaataaaaatagacgagtagaagttgcaattgtctctgacgtttcaaaagctgttggtaaaattaatgaaaactctctaaataacaaatttacttttaagacaaaaaactggttagaaaaaatagatttttggaaaaataaacaccctttgtatgtaccgcctgaagaaggagaaatttatcctcaagaagttcttttaaaagttagggaactttcaccagatgcttatgtaactacagatgttggacagcatcagatgtgggctgctcaatatcttaggaattctccaagaaaatggattagtagtgcaggcttaggaacaatgggttttggattaccagcagcaattggagtgaaggcagctttacctaattcagatgtaatttgcatagcaggagatgcaagcgttttaatgaatattcaagaattaggaactttgtcccaatatggtttaaatgtaaagttgatcatcattaataatcgctggcaaggaatggtaaggcaatggcaggaaagtttctacaatgagaggtattcctcatcggacatgagttgtggtgaacctgattttgtaaaacttgctgagtcttttggagttaagggatacctaatttctgatagaaaacagttaaaaaatgaattgcaacatgcctttgatcataacggccctactttgattaatgttcttgttagaagaggtgaaaattgttatccaatggtacctcccggtaaaagtaatgctcaaatggtgggatatgttaattgtgaagaataa

SEQ ID NO: 232257 - DNA, 925 bp, Unknown
  Bacterial polypeptide expressing nucleotide sequence isolated from the Sargasso Sea
atgccaaaattattaactggagcagaaattgtatttaaatgtcttgaagaccaaaaggtagaacatatctttggttatccaggtggtgctgtattgccaatttatgatgagttaaaaaatcatccaacaataaaacatattctagtaagacatgaacaaggtgctggtcacgcagctgaaggttatgcaagatcgtcaggaaaaccaggcgtagttttagtcacatcaggccctggagctaccaatgttgttacagccttaacggatgcttatatggactctgttccgttagtttgtatttctggtcaggttccaacacatttaattggaactgatgctttccaagaatgtgacactacaggaatcacaagaccttgtacgaaacataattggttagttaaagatataaatgatctttcaaaagttatgcatgaagcttttagagtagcaacaacaggaagaccaggaccggttttgattgatattccaaaagatattcagtttgcaaaaacaaaatataaaaaaccaaacaaagagaaaaaattaaatggaaaatctcataataaattttctcaagatcaaattgatgaattagtaaaattattaagtaaagctaaaaaaccaataatctatagtggtggaggagtaattaactcagggccaaaagcaagtcaggctttaagggaatttgttgacttaactggttttcctataacttcaacacttcaaggattaggtgcgtatcctggggatgacaatcaatttttagggatgcttggtatgcatggtacttatgaagcaaataatgctatgcatgattgtgatcttttaattaacattggtgcaagatttgacgatcgtattaccggaaaaatagatgagttttcaccaaattcaaaaaaggttcatattgatatagatccat

SEQ ID NO: 232258 - DNA, 1001 bp, Unknown
  Bacterial polypeptide expressing nucleotide sequence isolated from the Sargasso Sea
aatgaataatgaaataactggtgctgaaattgtcttgaaaagcttagctgaacaaggcgtagaagttgtatttggatatcctggtggggcagtattacccatttacgatactttgtttaaacaaaattcaattaagcacgtattagtaagacaagaaggtggcgccatacatgcagctgagggatatgctagatcaactggcaagactggagttgtccttgtcacatcaggacctggcgcaacaaatgttgtaactggtttaactgacgcaatgatggacagtgtacctattgtatgtataactggacaagtacctcaacacttaattggcagtgatgcatttcaagaatgtgacacgacaggtataacgagaccttgtacaaaacataattatttagttaaagatgttaataaattgtcttctgtatttcatgaagcatttaccattgctcaaaatggaagaccaggtcctgtgttaattgatatacctaaagatgttcaatttgcttcaggaacttatgaagaaaaaaataaaattattattccctctcatagattgtttgaaccaagtcctgattttgaaaaaaataaaattgaagaagcagtagaattaatttcaaaagctaaaaaaccaattttttatattggtggtggatgtattaattctggtccaaaagcttcaaaattagttagagaatttataaatatagttggttcaccagtaacaatgacattaatgggtctgggggttgttggttcatcagataaaaactcacttggtatgcttggtatgcatggaatgtacgaagctaatatggctatgcatgaatgtgatgtcatgattaatatcggtgcaagatttgatgatagagttacaggaagacttgatgctttctcacctaactcaaagaaaattcacattgatattgatgaaagtaatatcaacaaaacaataaacgttgatgttccaataataggtgatgtcaaacaagttgtcgaaa

SEQ ID NO: 232259 - DNA, 1042 bp, Unknown
  Bacterial polypeptide expressing nucleotide sequence isolated from the Sargasso Sea
aatgacattgatgggacttggtgtagtaggctcatcagataaaaactcacttggcatgcttggaatgcacggaatgtatgaggctaatatggcaatgcatgaatgtgatgtaatgattaatattggagcaaggtttgatgatagagttacaggtaggcttgatgcattttctccaaattcaaaaaaaatccatattgatattgatgaaagtaacattaataaaactataaatgtcgatgttccaataataggtgacgttaaagaggttgtcgaaaagatgatttcagtttggaaagaaaagaaattccaaatagatgatgaagcattaaaattatggtgggataaaataaataaatggaaagaagtagattgcttaaactttaataatgaaggtaaacagattaaacctcagtttgcagttcaaagactctatgagttaacaaaaaatacaaaaacatttattactacagaagtaggtcagcatcaaatgtgggctgctcaattttataaatttgaggaaccaaatagatggctgacctcaggtggtttaggaactatgggatatggttttcctgctgctattggagctcaagttgggcacccagatgctctagtagtcgatatagcaggagacgcatctatactgatgaacattcaagaaatgagcacggctattcaatatagattaccagtaaaaatatttattttaaataatgaatatatgggaatggtaagacaatggcaggaacttttacacggtggaagatattctgaaagttatactgatagcttgcctgattttgttaaattagctgaaagttataaagctgttggcttaagagcaaaaacaactgatgaacttgatgatgtaataactcaaatgataaaaacaaaaaatacagtaatagcagatatttgggttactaaagaagagaattgctttcctatgattcaaagtggatctgctcacaatgaaatgatgttaagtaaagatcaaaaacaagataaaaaatctgccgaaaaaggaaaaattttagtttaa

SEQ ID NO: 232260 - DNA, 1768 bp, Unknown
  Bacterial polypeptide expressing nucleotide sequence isolated from the Sargasso Sea
atgccaaaattatattcaggagctgaaattgtatttaagtgctttgaggaccaaggtgtaacgaatatctttggttatccaggaggagcagttcttccaatatatgatgaattaaaaaattttaaaacaattaaacatatattagtcagacatgaacaaggtgcaggtcatgcagctgagggttatgcaagatcatcgggtaagcctggagtagtattagtaacttctgggccaggtgcaactaatgctgtaacagctttaacagatgcatatatggattctattcctttagtttgtatatcaggacaagtaccaactcatttaattggaacagatgcatttcaagaatgtgacacaacgggtattactcgtccatgtacaaaacataattggcttgtaaaagatattaaagatttatcaaaaacaattcataaagcttttgaagttgcaacaacaggcagaccaggtccagttttagttgatatacctaaagatattcagtttcaaaaaacttcatataaaaattataaaaaagtaaataaatcaaatggtaaatctcataatcatttctcccaaaatgatattgatcagctaattaatttgatgggaaaagcttcaaaacctattttttatactggaggaggagtaattaattccggaccaaaggcaagtgaacaattaagagagctagttcgtacaacaggttttccaattacttctactttacaaggtttaggttcttacccagcagatgacaaccaatttttaggtatgctaggtatgcatggaacttacgaagctaataatgctatgtacgaatgtgatctgatgataaatattggagcaagatttgacgatcgtattacaggaaaaatagatgaattttctcctaagtcgaaaaaagttcatattgacattgatccatcttcaataaataaaaatgtaaaagtagatttggctattgtcggagatgttaagtcagttgtttcttccataataaaaactttaaataagaaaaaacctaattttgtaaagtcaaataaacaaaaaacttcaaagtggtgggaaaaaattcaaaaatggagatcaaaaagatctttagattatattggaagtgaagaaacaattaaaccacaatatgctatcgaaagattgtatgaactgactaaggataaagatgcttatatcacaacagaggtaggacaacatcaaatgtgggctgcgcaacattataagtttaataaaccaaaccgatggatgacttctggtggtttaggaacgatgggatatggtttgccggcagcagttggtgttcaagtggcacatccaaacaaactagtaattgatattgcaggagaagcatcagtactaatgaccatgcaagagatgtcaacagcggttcagtatagtttaccaattaaaatttttattttgaataatgaatacatgggaatggttagacaatggcaagaattattgcatgataaaaattattccgagagttatacagctgcattacctgatttcgtaaaattggcagaagcttatggttgcgttggtttaagagcaaaaactccagaagaactagatgataaaattatagagatgttaaacaccgatcgacctgtaatttttgattgtcttgtagacaagcaggagaattgttttcctatgataccttcgggaaagccacataatcagatgttattaggaccaaaagatcaaaaagataagaaaattactggaaaaggaagaactttagtttaat

SEQ ID NO: 232261 - DNA, 940 bp, Unknown
  Bacterial polypeptide expressing nucleotide sequence isolated from the Sargasso Sea
ttaattaacattggtgcaaggttcgatgatcgaattactggaaaaatagatgagttttcacctaattcaaaaaaggttcatattgatatagatccatcatcaattaataaaattatcaaagtagatcttgcaatagttggagacgttacgagtgtcatcagtaaaattaataaaacaattactaaaaaaaaaaatggtcatagcaagtcaaacaagtctaatatagctaagtggtgggagcaaattgaaaaatggagagaaaaagattctctaaattttgttaatagcaatgagagtattaagccacaacatgcggttcagagactttatgaattaactaaaaataaagatacttatgttactacagaggttgggcaacatcaaatgtgggctgctcagcattataaatttaataaaccaaaccgatggatgacttctggcggtttaggaactatgggctatggattgccagcagcagtcggtgtccagattgctcatcctgaaaaattagtaattgatattgctggagaagcgtcagttttaatgactatgcaagaaatgtctacagcagttcaatataatcttcctataaaaatatttattttaaataaccagtatatgggaatggtaagacaatggcaggaattacttcatgaaaaaaattattctgaaagttattccgaagcattacctgattttatgaaaatggcagaagcttatggatgcaaaggaattaaagctgacaatccatcagacttggatgataaaattcaagaaatgattgattatgatgggccagttatatttgattgccatgtagatcctaatgaaaattgctttccaatgattccatctggaaaacctcataaccaaatgattttaggtccaaatgatcaagaggataataaaattaaaggaaaaggcaaagccttagtgtaat

SEQ ID NO: 232262 - DNA, 1357 bp, Unknown
  Bacterial polypeptide expressing nucleotide sequence isolated from the Sargasso Sea
aaattatcttctgtatttcatgaagcatttaccattgctcaaaatggaagaccaggtcctgtattaattgatatacctaaagatgttcaatttgcttcaggaacttatgaagaaaaaaataaaattattattccctctcatagattgtttgaaccaagtcctgattttgaaaaaaataaaattgaagaagcagtagaattaatttcaaaagctaaaaaaccaattttttatattggtggtggatgtattaattctggtccaaaagcttcaaaattagttagagaatttataaatatggttggatcaccggtaacaatgacattaatgggtctaggggttgtaggttcatcagataaaaactcacttggcatgcttggtatgcacggaatgtatgaagctaatatggctatgcatgaatgtgatgtcatgattaatatcggtgcaagatttgatgatagagttacaggaagacttgatgctttctcacctaactcaaagaaaattcatattgatattgatgaaagtaatatcaacaaaacaataaacgttgatgttccaataataggtgatgttaaacaagttgttgaaaaaatgatttcagtctggaaagacaaaaaatataaaatagattctgactcattaaaattgtggtgggataaaataaataaatggaaagaagtagattgtttaaactacaataatgagggcaagcagattaaaccgcagtatgcggttcaaagactttatgagttaacaaaaaatacaaaaacatttattacaactgaagtaggtcaacatcagatgtgggctgctcaattctataaatttgaagaaccaaatagatggctaacttcaggtggtttaggaactatgggatatggttttcctgctgctattggagctcaggttggacatcctgacgctttagtagtcgatatagcaggagacgcctctatactcatgaatattcaagaaatgagcactgctattcaatatagattgcctgtaaaaatatttattttaaacaatgaatacatgggaatggttaggcaatggcaggaacttttacatggtggaagatattccgaaagttatactgatagtttacctgattttgtaaagttagctgaaagttataaagctgttggtttaagagcaaaaacaactgatgaccttgataatgttataaatcaaatgatagaaacaaaaaatacagtaattgcagatatttgggtaactaaagaagagaattgctttccaatgattcaaagtggatctgctcataatgaaatgatgttaagtaaagatcaaaaacaagacaaaaaatctgccgaaaaaggaaaaattttagtttaat

SEQ ID NO: 232263 - DNA, 1102 bp, Unknown
  Bacterial polypeptide expressing nucleotide sequence isolated from the Sargasso Sea
tggtcctaaagcttcacaactagttacaaattttgttgaagaaacaaaagctcctgcaacaatgacactaatgggacttggtgtaataggagctaaaaataaatattctttgggtatgttaggaatgcatggaatgtatgaagctaatatggctatgcatgaatgtgatgtaatgattaatattggagctagatttgatgatagagttacaggaagacttgatgcttttgctcctaattctaaaaaaatacatattgatatagatcctagcaacatcaataaaactataaaaatagatgtccctattattggagatattgaatctgttatgaatcaaattttttcatcttggaaaaataataattatagaagccaaaaagaagatttaataaaatggtgggataaaatagaagaatggaaaaaagttgattgtttaaattataatcaaggcgaaggttcaattaaaccacaacatgctataaaaagattatatgaactgacgaaagataaaaaaacttttattacaacagaagtaggccaacatcaaatgtgggcagcccaatactataaatttgaagaacctaatagatggctaacatctggaggtttaggtactatgggttatggttttccagcagcaattggagctcaaatagctaacccagactcattagttgtagatattgctggagatgcttcaattttaatgaatattcaagaaatgagtactgcagtacaacatcgacttccagttaaaatttttattttaaataacgaatacatgggcatggttagacaatggcaagaattattgcatggaggtagatattctgagagttatactgatagtttacctgattttgtaaaacttgctgaaagttttaaagctaaaggtttaagagctaaaaatgttaaggaacttgatgatgttattttgcaaatgatttcttctaaagaaacagttattgctgatatatgggtagataaagaagaaaattgctttcctatgattcaaagcggatctgcacataatgaaatgttattaaataagtaccagaagcaagatgaaacatctgctgaaaagggaaaggtattagtataa

SEQ ID NO: 232264 - DNA, 1699 bp, Unknown
  Bacterial polypeptide expressing nucleotide sequence isolated from the Sargasso Sea
atgaaaaaagatttattcaaaggaagtgaaatagtttgtaaggctctaataaaagagggtgtcgatacagtctttggcattccaggtggagcaatattacctttgtatggaacattaaataattttcctgaattaagacatatcttaacaagacatgagcagggtgcatgtcatgctgctgatggctattcaagaactactggaaaagtcggggtagcatttgctacgtcaggtcctggggcaacaaatttaatcacaggcttagctactgcaatgatggattctgttcctgttgttgctataacaggtcaagtaggaagaccagcaattggaacagatgcttttcaagaaactgatataactggagctactttgccagttactaagcataactacttagttatgaaagcatcagatataggcccaataattcatgaagctttttacattgcaaaaactggtagaccaggtcccgtactaatcgatattcctaaagatgtttttgaagaattatctgattacaactataaaaaagattcaaaagttaatttaccgggatataaaccttatcctgagatagatgagtcacaaatagagaaagctatagagctaataaatgaatctaaaaaacctataatacttgcaggacatggagttattatatctagagcccaagaaaggcttttagaattagctgaaagatgtcaaatacctgtggtaacaacattacttggaatttcatctttccctgaaaatcacattttgtctgcaggatttcctggtatgcatggaatggcttatgcatccatagctcttgatgaagcagatctaataatcggtataggatctagatttgatgatcgaattgtaggtaatgcaaaaagatttggtaaaaattctaaaaaaattcatattgacatagacccagcagaaattaataaaacagttaaaatagatgcacctgttgtaggtgacatagaccaagtattgaatttattaaacccaaaacttaatactcaaaatcatacggattggctcaaacaggtagagcacattaaagctgaacatccttcgcttttaataccggaatcagatagtttattaggtcaacaggtaataaaaactttatctgatattactaagggtaatgctattatttgcactggagtaggacaacatcaaatgtgggctgctcaacattatgaatttactaaaccaaatacttggctttcatcaggtggattaggaactatgggttatgaaattccaagtgcaattggtgcgcaagttggatcaccagatgatacggtttggtcaatatgtggtgatggtgggtttcaaatgacaataggtgaattagctactgttgcagaaaataaattacctattaagtatgcgatattaaataataatcatttaggtatgataacccaatggcaagatatgttttatcaaggtaaaagaaatgcagaaacatatacaggcaatcctgattttgtaaaacttgcagaagcatatggaataaaaggaataagggttgaaaatcaagatgatttacaatccgctataaatgaagcgaataatcatgatggaccagtaattgttgattttgttatagaaaaagtagattatgtttatccaatgataccagctggaggaagtgtagatcagctaatagaggaggataaaaacaaatgat

SEQ ID NO: 232265 - DNA, 733 bp, Unknown
  Bacterial polypeptide expressing nucleotide sequence isolated from the Sargasso Sea
aatgccaaaattaataactggagcagaaatagtatttaagtgtcttgaagaccaaaaggtaaaccatatttttggttatcccggtggagctgtactaccaatatatgatgaattaaaaaatcatccatctattaaacatattcttgtaagacacgaacaaggtgcaggtcatgcagcagaaggttacgcaagatcaactggaaaacctggtgttgttttggttacatcaggccctggtgcgaccaatgtagttactgctttaactgatgcatacatggactctgttccaatggtttgtatttctggtcaagttccaacacacctaattggaacagatgcatttcaagaatgtgatacaactggaattacaagaccatgtacaaaacacaactggttagtaaaagatattaatgaactttcagatgttatgcatgaagcttttaaagttgcaacaactggaagaccgggtccagtattaattgatattccaaaagatattcaatttgcaaaatcaaaatatacaaaacctaaaaaagaaaaaagtttaaatggtaaatctcataataagttttcagctaatgaaattgatcaattaattaatttaattaataaagcaaagaagccaattatttatagtggtggaggtgtaatcaattcaggaccaaaagcaagtgaagctctaagaaaatttgttgaattaacaggattcccaatcacttcatctttacaaggt

SEQ ID NO: 232266 - DNA, 863 bp, Unknown
  Bacterial polypeptide expressing nucleotide sequence isolated from the Sargasso Sea
tttctctaaatcaaagaagattcatatagatatagatcttgcatcattatcaaagatcatagatgtagacgtgcctatagttggttcagcaaaaacttgcctgagtcagctcataaaagaactagaaaggagatcttcagattacgattcttctaaacttgatccttggtggaaacagattaacgaatggagagataaacatggcttaaatcattccatgttagatacgcctcctaagaacggcaagatattacctcaacaggttattcagtctttatataaagaatcaaaaggcaaagcttatgtaacttctgacgttggacagcatcagatgtttgcagctcagtattatcattttgatagccctagacaatggattaactctggaggactaggaactatgggatttggtttgcctgcagctatgggtgttcaattggcttttcctgatgctgatgttgcatgtgtaacaggagaaggaagtattcagatgtgcatacaagagctttcaacttgtttgcaatatggtctaccaataaaaattataaatctaaacaattctgcattaggtatggttaagcaatggcaggatatgcagtatggaggtaggcattcacaaagcacatatggtgagtctttacctgattttgttaaattgtctgaatcatatggacatgtgggtattaaagtagaagatttcaatgatttagaaggtgcaatgaaggaatgtctttctatgaaagatagattagtttttcttgatgttgtaatagatgaagaggagcatgtttatcctatgctggaagcaggcatggagatgagtgcaatgtggttagataaagataagaaaacttgggaatgaa

SEQ ID NO: 232267 - DNA, 1720 bp, Unknown
  Bacterial polypeptide expressing nucleotide sequence isolated from the Sargasso Sea
atggagaagttatccggcgccagcatgattgtgcgatccctcatcgatgaaggtgtaaagcacatatttggttatcctggcggctcagtgttagatatctacgacgccctgcaccttatccccggtattgaacatattctggttcgccacgaacaagccgccgtacatatggctgatggttatgcccgcgccacgggtaaagtaggcgtggtactcgtgacctcaggcccaggtgccaccaatgccattaccggcatcgctaccgcctatatggattcaattccattagtggtgttatccggccaagtacccagcaatctcatcggtaacgatgcgttccaagaatgcgacatgattgggatttcacgcccagtcgtcaaacacagctttttagtacaagatcctacccaaatacctgagatcattaaaaaagccttttatatcgcttccacgggtcgccccggccccgtcgttgtagacttgccaaaggattgtctcaatcctgcattgttgcacgactatatttaccccgagagcattaaaatgcgctcctataatccaacgacatcgggccacaaggggcaaattcgccgaggattgcaggcattactggcggcgaaaaaacctgtactctatgtgggcggcggcgccattatctccagcagtgaaaagcagatcttaaccctagcggaaaagttaaatatccccgttgtcagcaccttaatggggcttggcgccttccctggcacccataaaaacagcttaggcatgctggggatgcacggtcgctatgaagccaatatgaccatgcataactgcgatcttatcttcgggattggcgtgcgtttcgacgacagaaccaccaacaacatcgaaaaatactgcccaaatgccactattttgcatatcgatattgacccttcatcgatttcaaaaaccgtccgagtggatatccccatcgttggctcggccgatatcgtattagacagcatgttagccctgctggaggagtcgaaggaaagcaacgatagcgaggcaattaatcaatggtggcaagaaatcacagtgtggcgtaaccgcaactgcttggcatacgataaagaaagcaaccggatcaaaccacagcaagtgattgaaaccctttacaaactcactaatggtgaggcctatgtctcctcggatgtgggccagcatcaaatgtttgccgcgctctattatccctttgataaacctcgccattggattaactccggcggtcttggcaccatgggctttggtctacccgctgccatgggagtcaaaatggcaatgcctgacgaaaccgttgtgtgcgtcacgggcgatggttcgattcagatgaatattcaagagctttcaaccgctctgcaatacgatacgccggttaaaattatcaacttaaacaaccgcttccttggcatggtgaaacagtggcaggatatgatctactcgggtcgccattcccattcctatatggattcggtacccaactttgccaaaattgccgaagcctatggccatgttggcatgacgattagcgatcccgctgagcttgagtctaagatggccgaagcccttgccatgaaagacagactggtatttatcgacattatggtggatgagactgagcacgtgtatcccatgcttatccgcggcggcgcgatgaatgaaatgtggctaagcaaaacggagaaatgctaat

SEQ ID NO: 232268 - DNA, 1123 bp, Unknown
  Bacterial polypeptide expressing nucleotide sequence isolated from the Sargasso Sea
atgatggatagtgttccagttgtatgtattacaggacaagtaccaactcatttaatagggagtgacgcttttcaagaatgtgacacaactggaataacaagaccatgtacaaaacataactatttagtgaaagatgtaaataagctatcatcggttttccatgaagcttttaccatagcacaaaatggaaggcccggacctgtattaattgatattccaaaagatgttcagtttgctaagggtacttatgaagaaaaaaataaaattattatcccatctcataggttgtttgagccaagtcctgattatgaaaaaagtaaaattgaagaagctgttgaattaattgcaaaagcaaaaaaaccaattttttatattgggggtggatgtattaattctggaccaaaagcttcaaaattagttagagaatttataaatatggttggatcaccagttacaatgacattaatgggtcttggtgtagtaggttcttcagataaaaattcacttggaatgcttggaatgcatgggatgtatgaagctaatatggcaatgcatgaatgtgatgtcatgattaatattggtgcaagatttgatgatagagttactggaagacttgatgccttctctcctaactcaaagaagatccatattgatattgatgaaagtaatatcaataaaactattaatgttgatgttccaataataggtgatgttaagcaagttgtagataaaatgatttttatttggaaagaaaaaaattataaaatagaaactgagtcattaaaatcatggtgggataaaattaataaatggaaagaaatagattgtcttaattataataatgaaggtaaacagattaagcctcagtatgcggtacaaagactttatgagttaacaaaaaatacaaaaacatttattactactgaagtaggtcagcatcaaatgtgggctgcacaattttataaatttgaggaaccaaacagatggctgacttcagggggtttaggaactatgggatatggttttcctgctgcaattggagcacaggtaggtaatccagatgctttggttattgatatagctggtgatgcatcaatccttatgaatattcaagaaatgagta

SEQ ID NO: 232269 - DNA, 1768 bp, Unknown
  Bacterial polypeptide expressing nucleotide sequence isolated from the Sargasso Sea
atgccaaaattatacacaggagcagaaattgtttttaaatgccttgaagatcaaaaggtagaacatatttttggatatcctggtggagcagttttaccaatttatgatgaacttaaaaatcatacttctattaagcatattttagtgagacacgaacaaggtgctggtcatgcagctgagggatatgccagatcatcaggtaagcctggagtagttttagttacatctggacctggagctaccaatgttgttaccgcgttaacagatgcgtacatggactcagttccattggtttgcatttctggtcaagtcccaacccatttaataggaactgatgcatttcaagaatgtgataccaccggtattactaggccctgcacaaaacataattggttagtaaaagatataaatgatttatcagaaataatgcatgaagcatttaaagttgcaaccacaggaagaccgggccctgttttagttgatattccaaaagatattcaatttgcaaaagctaaatataaaaaacctaaaaaagaaaaaaaactaaatggaaaatcaaataataaattttctcaaaaacaaatagatcaattaattgatttattaaaaaatactaaaaaaccagttatttatagtggtggtggagtaattaattcaggacctaaggcaagtgacgcattaagagagtttgtagaattaacaggatttccaatcacctctacgcttcaaggtttaggtgcatatcctggtgatgataatcaattccttggaatgttaggtatgcatggaacttatgaggccaacaatgctatgcatgattgtgatcttttaataaatattggtgcaagatttgatgatcgtattactggaaaaatagatgaattttcaccaaactcaaaaaaagttcatattgatatagatccatcgtctataaataaaattattaaagttgatcttgcaatagtaggcgatgttacgaaagtaatcggtaaagtaaataaaacaatattgaagaaaaaaaatggccacagcaaatctaataaatcaaatattgctaagtggtgggaacaaatacaaaaatggagaggcaaagactcccttaattttgttaacagtaatgatagtatcaagcctcaacatgcagttcaaagattatatgagttaacaaaagataaagatacttatgtaacaacagaagttggtcaacatcaaatgtgggcagcacaacattacaaatttaataaaccaaatagatggatgacatctggaggtttaggcacaatgggctatgggttaccagcagcagtaggtgtgcaaattgcccaccctgaaaaattagtagttgatattgctggtgaagcctctgtattaatgacaatgcaagaaatgtccactgcagttcaatacaacttaccaattaaaatttttattttaaataatcagtacatgggaatggttagacaatggcaagagctgttacatgaaaaaaattactcagagagttactctgaagcacttcctgattttttaaaaatggctgaggcttatggttgtaagggaattaaagcagaaaacccttccgaattagatgagaaaattcaagaaatgatagattataaaggtccagttatttttgattgtcatgttgatcctaatgaaaattgttttccaatgataccttcaggaaaacctcataatcagatgatcttaggacctaatgatcaggaagagaacaaaatcaagggtaaaggcaaagccttagtttaga

SEQ ID NO: 232270 - DNA, 1642 bp, Unknown
  Bacterial polypeptide expressing nucleotide sequence isolated from the Sargasso Sea
tatgattctatatttaaacaaaaagcttgtgatcatattttagttcgtcatgaacaaggggctactcatgcagcagatggctattctcgagctacaggaaaacctggagttgctttagtaacttctgggcccggtgcaacgaacgcaattaccggtttggcgactgcatatatggattcaattcctttgatcgtaatttctggacaagtacagagtcatctaattggcactgattcatttcaggaaactgacatgataggtatttcaagaccaatagttaaacacagctttattgttcaagatactcaagatattccgagaattatccaagaggcatttcatatagctactacaggcaggcccggccctgttgttattgatatacctaaagataaaactgatccaacaaaattatatgaatacaaaaaacctaaagaggtctcacttaggtcatatcaacctagagttttaccccatcctgggcagattaaaaaagcatgtaaaaatattttatcagcagaacgcccagtaatttatgcaggtggtggtgtaattcttggaaatgctcataaggagctaattgccttaaataaattattaaaagcacctgttactaacactttgatgggactgggtgtttatccagcaaaggataagtatttcatgggaatgttaggtatgcatggaacctaccaagcaaatatggcgatgcataatgccgatgttattattgcggttggcgcaagatttgatgatcgcattactaatactccatcattgtttgctccaaatgcaagaattgttcatatcgatgttgatcctgcttcaatctcaaaaattattaatgcagatatacccatagttggacaagtaaaagactctcttagcgcactaattaaagagattaaacgttctaaaattaaaattgatacagatgctcttgaatcatggaatcaacaagttactaaatggagagaaatgcacggcctcgatcatgagctatatcttaagaaaaacaaatctcaaatgattcttcctcaagttgtagtgcaagaactctatcatgcgacaaatggaaatgcttgggttacctctgatgttggacaacatcagatgtttgtagctcagtattatcatttcaataaacctagacgttgggtgaattctggtgggttgggaactatgggttttggtttgcctgcagcaatgggagttaaattagcttttcccaaagacgaggttgtttgtgttactggcgagggaagtattcagatgtgtattcaagagctttctacttgccttcagtacaatctaccaataaaaattataaacattaataatgaggcccttgggatggtcagacaatggcaagatatgaattatggtggacggcattcagcaagtacctattctgattctttgcctgattttgtaaaactcgctgaatcttatgggcatattggtatgaaaattaccaaaaaagcagatctcaagaagtcattagaaaaggcattctctatcaaggacagattagtatttgtcgatgtctatgtcgatccaaatgaacatgtctatccaatgctagttgctcctaatggaagcatgaaagacatgtggataaaaaagaatgtaaaggcatgaa

SEQ ID NO: 232271 - DNA, 382 bp, Unknown
  Bacterial polypeptide expressing nucleotide sequence isolated from the Sargasso Sea
aatgtcaaaattatactcgggtgctgaaattgtatttaagtgtatggaggatcaaaatgttgatcatatttttggttatcctggaggagcagtcctaccaatttatgacgaattacaaaattttaaatcaattaaacatattttagttagacatgaacaaggtgcaggtcatgccgctgaagggtatgcaagatcttccggcaaaccaggtgttattttagtgacctcaggaccaggagcaacaaatgtagtaacagctttaactgatgcttacatggattctattccattagtttgtatttctggacaagttccaactcatttaattggtacagatgcatttcaagaatgtgatacaactggaataactaggccttgcact

SEQ ID NO: 232272 - DNA, 1012 bp, Unknown
  Bacterial polypeptide expressing nucleotide sequence isolated from the Sargasso Sea
aatggataacgcaaaaaaatctggtgcagaggctttgattcactcacttcatcttgaaggggtggagcttatgtttggatatcccggaggagctgccctacatatttatgatgccatttttaatcaaaattatgttgaccacatattggttagacatgagcaaggagctgtccacgctgccgatggttacgctagagctacaggcaagcctggcgttgctttagtgacttcaggtcccggggcaacaaacgcaattacaggtctagctacagcctatatggattcaacgcccattgtagttatttctggtcaggttaaatcaggtttaattgggacagattcctttcaagagacagatatgattggtgtttctaggccaatagttaaacatagtttcttagttcagaaagcggaagaaatacctgaaataataaagaaagctttccacatagctacaaccggaaggcctggccctgttgtcattgatataccgaaagacttcacagatcctgactataagttcgactatagctatcctgaagaaataaagatgaggtcctacaatccgcctattaaaggagatcctaaaagaataagcgacgcagtagatctcatagagaacgctcaaagaccagttatttattcaggaggaggagttatacaaaatgacgcctctgccgaattaacagaatttgcaaaattacttaattttcctgtaaccaatacgttaatgggattgggtgcttttccaggttctgatcctcaatttatgggcatgttgggaatgcatggaacttatcaagccaatatggctatgcacaatgcagatttaatcattgctattggagcaagatttgatgaccgaatcaccaatgaccccaagcaatttgcgttgggtgcaaagaaaattcatatagacgtggatgcagcttcagtttctaaaattatatatgctgatgtgcctatagtaggttctgaaaaagactgtatttcttctctaatccaagagtta

SEQ ID NO: 232273 - DNA, 1336 bp, Unknown
  Bacterial polypeptide expressing nucleotide sequence isolated from the Sargasso Sea
tgatacaacaggtataacgagaccttgtactaaacataattacttagttaaggatgttaataaattatcttctgtatttcatgaagcatttaccattgctcaaaatggaagaccaggtcctgtattaattgatataccaaaagatgttcaatttgcttcgggaacttatgaagaaaaaaataaaattattattccttctcatagattgtttgaaccaagtcctgattttgaaaaaaataaaattgaagaagcagtagaattaatttcaaaagctaaaaaaccaattttttatattggtggtggatgtattaattctggtccaaaagcttcaaaattagttagagaatttataaatatggttggatcaccagtaacaatgacattaatgggtctgggggttgtaggttcatcagataaaaattcacttggcatgcttggaatgcatggaatgtacgaagctaatatggctatgcatgaatgtgatgtcatgattaatatcggcgcaagatttgatgatagagttacaggaagacttgatgctttctcacctaactcaaagaaaattcatattgatattgatgaaagtaatatcaacaaaacaataaacgttgatgttccaataataggtgatgttaaacaagttgtcgaacaaatgatttcgatttggaaagacaaaaaatataaaatagatactgattcattaaaattgtggtgggataaaataaataaatggaaagaagtagattgtttaaactacaataatgaaggcaagcagattaaaccgcagtatgcggttcaaagactttatgagttaacaaaaaacacaaaaacatttattacaactgaagtaggtcaacatcaaatgtgggctgctcaattctataaatttgaagaaccaaatagatggctaacttcaggtggtttaggaactatgggatatggttttcctgctgctattggagctcaggttggacatcctgatgctttagtagtcgatatagcaggagacgcttctatactcatgaatattcaagaaatgagcactgctgttcaatatagattgcctgtaaaaatatttattttaaacaatgaatacatgggaatggttcggcaatggcaggaacttttacatggtggaagatattctgaaagttatactgatagtttacctgattttgtaaagttagctgaaagttacaaggctgttggcttaagagcaaaaaccactgatgaacttgatgatgttataactcaaatgatagaaacaaaaaatactgtaattgcagatatttgggttactaaagaagagaattgctttccaatgattcaaagtgga

SEQ ID NO: 232274 - DNA, 1546 bp, Unknown
  Bacterial polypeptide expressing nucleotide sequence isolated from the Sargasso Sea
aatgccgaaattattaagcggagcagaaattgtttttaaagcactagaggatcaaaaagtagaatatatttttggttaccctggaggtgcagttttacctatttatgatgaattaaaaaatcataaatctattaaacatattttagccagacatgagcaaggagcaggccactcggctgagggatatgcaagatcaagtggtaagccaggagttttattggttacatccggtccaggcgcaacaaatgctgtaactgctttgacagatgcttacatggactcaattcctcttgtatgtatctcaggacaagtgccgacacatctaatcggaacagatgcatttcaagaatgtgatacgactggaataacacgaccttgtacaaaacataattggttagtaaaagatgtaaatgatctctcaagagttttacacttagctttcgaggtagcaaccacggggcgtcccggaccagttttagttgatattccaaaagatattcaatttaaaaaaggtaaatataaattttttaagaatacaattaaaaaaaaacttaatggcaaagcatctcacaaaatatctaactcagaattagataaatttatcgatttgatgaaaaaatcctcaaagcctatcttttatacaggtggaggagttataaactcaggacctgatgctagtaaacatttgcgagaattagtttctctaaccggctttccgattacttcaactctacaaggactcggggcttatcctggcgatgatcctcaatttttgggtatgcttggtatgcacggaacttatgaagcaaacaacgcgatgcatgactgtgacttaatgataaacattggagcaagatttgatgatagaattactgggaaagttgatgagttttcacctggttcaaaaaaaattcatgtcgatattgatccttcttcaattggaaaaaatataaaagttgaccttgctatagttagtgatgttacggagcttttgaagtctttaaacaaaagattcaaagagaaaaataaaaactttgtaagttctaacaaacagaaaacatcaaaatggtgggagcaaataggaaaatggagagaaaaaaagtctttaaattttataaatagcaataaggttataaaacctcaacatgcagtacaaaggctgtatgaactaacaaaaaaccaagacacttttattacgacagaggttggtcaacaccaaatgtgggcagcacagcattataaatttaataaacctaacagatggatgacatctggcggacttggaacaatggggtacggacttccagcagcaattggtgttcaaattgcaaaccctggaaaacttgtagttgatatcgcaggtgaggcatctgtcttaatgactatgcaagaaatgtctacagctgttcaatacaggttaccaataaaaatatttattttaaataatgaatacatgggaatggtaaggcagtggcaagaacttttacatgaaaaaaattattctgaaagatacactgctgctcttccagacttcgttaaactagca

SEQ ID NO: 232275 - DNA, 244 bp, Unknown
  Bacterial polypeptide expressing nucleotide sequence isolated from the Sargasso Sea
atgaaattagctggaaacgatatgttaattcaatctcttataaatgagggagttgaatatatttttggatatcccggaggagcagccttgcatatctatgattccattttcaagcaaagtgagatgcagcatattctggtaagacatgaacaaggtgcaacacatgctgctgatggttatgctagagcaactggtaagcctggagttgtaatggttacatcaggaccaggagcaaccaatgcta

SEQ ID NO: 232276 - DNA, 1162 bp, Unknown
  Bacterial polypeptide expressing nucleotide sequence isolated from the Sargasso Sea
attatcaaaaactcttcatgaggcctttagagttgccacaacaggaaggccaggtcctgttttagtagatattccaaaagatattcaattcgcaaaaatcaaatatactaaaccaaaaaaagaaaaaaaatctaatggaaaattgcataacaatttttctcaagaagaaattaatgaattagttgacttaattgcgaaagcaaaaaaacctgtagtttacactggtggtggagttatcaactcaggcccagaagcaagtgaatcactaagagagtttgtgcgaatgattggttttccgattacgtcaacattacaaggtctaggggcttttcctggagatgatagtcagtttataggtatgcttggcatgcatggaacttatgaagcaaataatgctatgcatgattgcgatttattaataaatattggagcaagatttgatgacagaattactggaaagatagatgaattttctcccaaatctaaaaaagttcatattgatattgatccatcttcgataaataaaataattaaagttgatttagcgatcgtgggtgatgtgaatgaggttctcaaagcagccgttaaaactattagtcaaaaaaaaaatggttttaaaaattcaaataaacaaaatgtttctaaatggtgggaaaaaattgaaaaatggagagaaaaagactcactcggttttataaatagtaaagaatctattaaaccccagcacgcggtgcaaagattatacgaattaacaaaaaatcaagatacttttattactacagaagtcggtcaacatcagatgtgggccgcacaacattataaatttaataaaccaaatagatggatgacatctggcggacttgggacaatgggatatggtctcccagctgcggtaggtgttcaaattgcgcatcctgataagcttgttattgatattgctggagaggcatcggtactaatgactatgcaagagatgtcaacagcagttcagtataatttgccaattaaaatatttgttttgaataatcaatatatgggaatggtaaggcaatggcaggaattacttcatgaaaaaaactattctgagagttattcagaagcattgccagattttgtaaaattagcagaggcatatgggtgtaaaggaattaaagctgataat

SEQ ID NO: 232277 - DNA, 823 bp, Unknown
  Bacterial polypeptide expressing nucleotide sequence isolated from the Sargasso Sea
atgagtaaaacaaagacatcaggcggagatgccttaatacaatcgcttcataaagaaggggttgatcttgtatttggctaccctggaggcgctgcgctacatatatatgatgctttattcaatcaatctgatgtagaacatattttagttaggcatgaacaaggagctgttcatgctgcagatggatatgctagatccactggaaaacctggtgtagctttagtgacttctggaccaggagctactaatgctataacagggctagcaactgccttcatggattcaacgccggttgtcgttatttcaggacaagttaaatctgagttaataggaacagattcttttcaagaaactgacatgattggagtctctagaccaatcgttaaacatagtttcttagttcaaaaagcagaagatataccggaaatagttaaaaaggcttttcatatagcaactactggaagaccaggaccggttgttattgatgtacctaaagattttacagaccctaatcatactttcgattttgtttatccaagtgagattaacatgagatcttacaagcctgctaaagctggagatcctaaacaagttaaagaagcagttaatttaattttagaggcaaaaaaaccagtcatttattctggagggggagttatacaagataatgcttcagccgaattaaccgagttagcaaagttaactaaatttcctataactaatacattgatggggcttggtgcttttcctgggaccgatcctcaatttttggggatgcttggaatgcacggaacttatgaagccaaatatggcaatgcatgaa

SEQ ID NO: 232278 - DNA, 1738 bp, Unknown
  Bacterial polypeptide expressing nucleotide sequence isolated from the Sargasso Sea
atgaagttagctggaaatgacatattaattcaatcgctcattgaagagggggttgagtatatttttggttatccaggaggagcatccttgcatatttatgatgcgatctttaatcaaaaagaaatgcaacatattcttgttaggcatgaacaaggcgcgactcatgctgctgatgggtatgcacgagccactggtaagcccggggttgtaatgctcacatctggtccaggagcaactaatgctattacaggtattgcaactgcatttatggactcaattccaatgattgtaatatcaggtcaagttcaaagccatttaatcggaacagatgcatttcaagaaacagatatgatcggagtgtctcgtcctattgtgaagcatagcttcacagttgaccatcaaagtaatatagcaaaaattattaaagaagctttttacatagcaacatcaggaaggcaaggccctgtagtgatagatgtacctaaagatttaacaaatccggtagatttattcgaatataaatatccaagtgaagtaaatataagatcatataatcctccaattgagcctgaacaatctcagattgatagagctgtggaagcaataattaaatcaaaacaaacagttatttatgcaggaggcggcactatttcaagtaatgcctctaaggaactttttgaacttaatagttatataaatgctcctattacgaataccttaatggggttaggtgtatatcctgctagcgataaaaattttcttggtatgttagggatgcatggaacgtatcaagcaaatatggctatgcataatgctgatcttataattgcaattggagctagatttgacgacagaataacaaatacgcctgaaaaatttgctcctaatgcgcaaattattcattttgatgttgaccattcatctgtatcaaagattattgaagctgacatagcagtttttggccaagttaaaaattctttacaagcaatgaacgcaaaacttaaatcgagattgtcagaaattaatgattcaaggttagatgtctggcgtaaacaaatagcggaatggaaagaaatgcatggattagatcatgatctatataagaataattcagacgatactccaatactacctcaggcagtcgttcagcatatttatcatgcctctaatggtgatgcttttgtaacttcagatgtgggtcaacatcaaatgtttgctgctcaatattatcactttgatgagccaagaaaatggattaattctggtggtcttgggacaatgggttttggtctacctgctgcaatgggtgtgaaattagcatatccagaagaagaagtaatatgcataactggagaagggagtatacaaatgtgcatacaagaattatcaacctgcacccaatataaattaccaataaaaatatttaatataaataatctagctcttgggatggtcaaacaatggcaggatatgaactatgatggaagacattcatcaattagctatgaagactcacttccagattttacaaagttagtagaatcttatggtcacgtcggtataaaaattacaaaaaactctcaattaaaagcagggattgaagaggcgatctcaattaaagataaattagtttttgttgatatatatgttgatccaagtgaacacgtttacccaatgttagttgctcccgatggcagtcttaaagatatgtggctgggtaaaggagaaaaaacatgat

SEQ ID NO: 232279 - DNA, 1438 bp, Unknown
  Bacterial polypeptide expressing nucleotide sequence isolated from the Sargasso Sea
gcacagatgcttttcagaatgtgatactactggtattactagaccatgtactaaacataattggttagtcaaagatattaatgatttatcgagaattatgcatttagctttcgaggttgcaactactggtagaccaggtccagtattagttgatattccaaaagatattcaatttgcaaaagcaaaatacatacctgccaaaaaaataaagagagagaaaattttaagtaataatagatttaatcaaaaagacattgataagttaattcaattaatgaacaaagcttcaaaaccaattttttacacaggaggaggtgtagttaattcaggaccagaagctagtaaattattaagagaattagtatcgttaactggatttccaataacatcaactctacaaggactaggtgcatatccaggaaatgataatcaatttataggaatgcttggtatgcatggaacttatgaagcaaataatgcaatgcatgattgcgatttattaataaatataggagctagatttgatgatcgaattacaggtaaaatagatgaattttctccaaaatcaaaaaaagttcatattgatattgatccttcttcaattaataaaattataaaagtagatctatcaattgttggtgacgtaaaggatgtaattaaattaacaaccaaaactctaaaacaaaaaaatataaatttagaaaaatctaacaaacaaaaaatttcgaaatggtggcagcaaattgaaaaatggaaaacaaaagattctttgaattttattaatagtgataaaattattaaaccacaatatgccgtacaaagactttatgaattaaccaaaaatcaagatacttttataaccacagaagttggtcaacatcaaatgtgggctgcacaacattacaaatttgacaaacctaatagatggatgacttctggtggactaggaactatgggatatgggttaccagccgcagtaggcgtacaattagcacatccaaagaaattagttattgatgttgcaggagaagcatcagttttaatgacaatgcaagagatgtctacagctgttcaatataatttgcctattaaaatctttattttaaacaatcaatatatgggaatggttagacaatggcaggaattacttcatgagaaaaattattcagaaagttatactgaggctttacctgattttgtaaaattagctgaggcatatggatgtgttggtattagagcaaataatccagacgaattagatcaaaaaattcaagaaatgattgatatagataaaccagtgatttttgattgccgagtagatcaagcagaaaactgttttccaatgatcccatcaggaaaacctcacaatcaaatgttgttaggcccaaaagatcaagaagaaaacaaaattacaggaaaaggaaaggcactagtataa

SEQ ID NO: 232280 - DNA, 1024 bp, Unknown
  Bacterial polypeptide expressing nucleotide sequence isolated from the Sargasso Sea
cctggagatgataatcaatttttaggaatgcttggaatgcatgggacttatgaagcaaataatgcaatgcatgattgtgatttattaattaatattggtgctaggtttgatgatcgtattactggaaaaatagacgagttttcaccaaattcaaaaaaggttcatattgatatcgatccctcatcaattaataaaattatcaaggtagatcttgcaatagttggagatgttacaagcgttattggtaaaattaataaaacaatttcaaaaagtaaaaatggtcatagcaaatcaaataaatcaaatattgctaaatggtgggaacaaatagaaaaatggagagaaaaaaattctcttaattttgttaacagcgatgaaagtataaaaccacaacacgctgttcaaagactttatgaactaactaagagtaaagacacttatgttactactgaggtggggcaacatcaaatgtgggcagctcagcattataaatttaataaaccaaacagatggatgacatctggtggattaggtactatgggatatggattgccagcagctgttggagtacaaattgctcatcctgaaaaattagtaattgatattgctggagaagcttcagttttaatgactatgcaagaaatgtctacagcagttcaatacaatctccctattaaaatatttattttaaacaatcaatatatgggaatggtaagacagtggcaggaattactgcatgaaaaaaattattctgaaagttattcagaagcattaccagattttatgaaaatggcagaagcttatggttgcaaaggaattaaagctgacaatccatctgatcttgattataaaattcaagaaatgatcgattacgatggacctgttatatttgattgtcatgtagatcctaatgaaaattgctttccaatgattccatctggaaaacctcataaccaaatgatcttaggtccaaatgatcaagaggataataaaattaaaggaaaaggcaaagccttagtataac

SEQ ID NO: 232281 - DNA, 865 bp, Unknown
  Bacterial polypeptide expressing nucleotide sequence isolated from the Sargasso Sea
agttcatattgatattgatccatcatcaattaataaaaatgttaaagtagatttaccaattgtaggtgatgttgctgaagttattacagcaacaattaaaactatcaaaaaagttaaaactaattttacaaaatcaaacaaacaaaagatttctaaatggtgggaaaaaatccaaaagtggagatctataaattcttttgactatataaatagtacagaaactattaagcctcaatatgctattcaaagattatacgaattaaccaaaggcaaagatacctatataacaaccgaggtaggacaacatcaaatgtgggcagcgcaacattataaatttgataaacctaatcgctggatgacctcgggcggattaggaactatgggttatggactacctgctgccgtaggggttcaggtcgctcacccaaacaaattagtagttgatattgcaggagaagcttctgtgcttatgactatgcaagaaatgtcaacagcagttcaatatagtttacctattaaaatattcattttaaataatgaatacatgggtatggtaagacaatggcaagaattacttcatgataaaaattattcagagagttatactgctgctttaccagattttgttaagctagctgaagcttatggatgtgttggtattagagcaacaactccagacgaattagatgataaaataatagagatggttaatacggatagaccagtaatatttgattgtttagttgataaacaagaaaattgttttccaatgataccatctgggaaaccacataatcagatgctcttaggtcctaaagatcaaaagaaaaataaaataacaggaaaaggaaaaactttagtttaa

SEQ ID NO: 232282 - DNA, 1649 bp, Unknown
  Bacterial polypeptide expressing nucleotide sequence isolated from the Sargasso Sea
tcatatatatgactcaatttttaagcaaaaagaaatggaacacattcttgttagacatgaacaaggcgctactcatgctgctgatggttacgcaagagcaacaggaaagcctggagtagttttggttacttctggtcctggggccactaatgcaataaccggaatagcaactgcatttatggactctataccaatgattgttatatcaggtcaagttgcaaaacaccttattggcacagacgcttttcaagaaactgatatgattggtatttcacgtccgattgtaaaacatagcttcactgtcgatagtgcagaaaatataccagaaattgttaaacaagcctttcatattgcaacttctggaagacctggccctgtcgtgatagacgttcctaaagatactactgcgccagataagctatttgaatttaaatatcctaatgatgtagatattagatcttataaacctccaattgatcctgatccaagacaaattgaaagagctgtagatgcaatcatagaatcaaataaacctgttatttatgctggaggtggtgcaataaatagcaatgcctctgaagagcttattcgattaaatgaaatcttagattttccagttaccaatactcttatggggttaggtgtttatcctgctactcataaaagattcttgggaatgcttggcatgcatgggacataccaagcaaatatgtcaatgcataatgcagatttgataattgcaattggagcaagattcgatgacaggattaccaacacaccaaaattatttgctcctaatgcaaaaataatacatttagatgttgattactcatcagtatctaaaattattgaggcaaatattgcagtatttggtcaagttaaaaactcattattagagatgattaaattattagaagctaaaaaagaattaattgactcaaaaaagatactcccttggaaagaacaaatttcggattggaaattacaacatggtttaaatcatgaaatgcacttatgtgaaacggacgataaaccaataatgccacaagcagttgttcaacatttatacaacattacaaatggaaaagcatttataacttctgatgtaggacaacatcagatgtttgccgctcagtattatcattttgatgaaccaagaaaatggatcaattctggtggcttgggcacaatgggctttggtttacctgctgctatgggagcaaaacttgcatatccaaatgatgaagtaatttgtattacaggcgagggtagtattcaaatgtgcattcaggaattgtctacttgcactcaatataatttacctataaaaataattaatattaataatgaggctcttggcatggttaaacaatggcaagacatgaattatggaggacgccattcagctagcacctatcagagctcattacctaactttgttgaactagcagaatcatatggacatgttggaataaaaattgaaaaaaactctgaattaaaaagcggacttgagaaagcactttctatgaaagatagattagtatttgtagatgtttatgttgaccctaacgagcatgtttatccaatgcttgttgcgccaaacggtagtttaaaagatatgtggctagataaagagactaaaacatgat

SEQ ID NO: 232283 - DNA, 1366 bp, Unknown
  Bacterial polypeptide expressing nucleotide sequence isolated from the Sargasso Sea
agatccaaataaattatcacctgtttttcatgaggcatttactattgcccaagatggaaggccgggtcctgttttaattgacattccaaaagatgttcagtttgcaaaaggtaattacacagaaaaagaaaaaattataattccaccccatagattatttgagcctgaaatttttcaaaatgatgataaaattaatgaagttgttgatttaatttcaaaggcaaagaaaccaatattttatattggtggaggatgcattaattctggtccaaaggcatcagaattagtatcccagtttgttgaaatgacaggtgctcctgcaacgatgacgttaatgggtcttggagtaattggttcttcacatccaaactctcttggcatgcttgggatgcacgggatgtatgaagcaaatatggcgatgcatgaatgtgatgtcatgataaatataggcgcacgttttgatgatagggtaactggaagattagacgcattttcaccaaattcaaaaaaaattcatattgatattgatgaaagtaatattaataagacaattaaagttgatgttccagtagttggagatgtaactaacgttttaaataaaattattcaaacttggaaagatagaaaattaacaactaattcatctgatttaaaaatttggtgggataaaataaataattggaaaaaaattgattgtttaaatttttcaaatgatgaaaaagaaattaaacctcaatatgcaattcaaagattatatgacttaacaaaagataaaaacacttttattacaactgaagtaggtcaacatcaaatgtgggctgctcaattttataaatttgaaaaacctaatagatggttaacatctggtggtttaggtactatgggatatggctttcctgcagcaattggagcacaggtagcaaatcctgattcattagtaatagatatcgctggcgatgcgtcgatattaatgaatattcaagaaatgagcacagctgttcaatataggttgccagtaaaaatatttattctcaataatgagtacatgggaatggtaaggcagtggcaggaacttttacatggaggtcgctattctgaaagttatactgatagtttgccagattttgtgaagttagctgagagttataaagcagttggtctaagagcgaaaaaaccagaagaattagacgatgtaattaatgaaatgattaacactgataaaactgtaattgcagatatctgggtagcaaaggaagaaaattgctttcctatgatccaaagtgggtcagctcataatgaaatggttttaagtaaggatcaaaaacaggatgaaagttcagcagagaaaggcaaaattttagtttaa

SEQ ID NO: 232284 - DNA, 358 bp, Unknown
  Bacterial polypeptide expressing nucleotide sequence isolated from the Sargasso Sea
atggataaaagtaataagtctggtgctgaagcattaattcactcccttcatctagaaggagtagagcttatgtttggatatcctggaggagcagctctacatatttatgatgctatatttaatcaaaattatgttgatcatattctagtaagacatgaacaaggtgcagtacatgctgcagatggatatgctagagctacaggcaagcctggtgtagctttagtaacatctggtccgggtgctaccaatgcaattactggcttagccacagcctatatggattcaactcctatagttgttatttccggtcaggttaaatcagggttaatagggaccgattcctttcaggaaacagata

SEQ ID NO: 232285 - DNA, 682 bp, Unknown
  Bacterial polypeptide expressing nucleotide sequence isolated from the Sargasso Sea
gatgtcaaaattatattcaggagctgaaattgtatttaaatgtcttgaagatcaaggtgttgaatttatttttggttatccaggaggtgcagtgctgccaatttatgatgaattaaaaaatcataaaagcataaaacatattttagcaagacacgaacaaggagctggtcatgctgcagaaggttacgctagatcgtcaggtaagcctggcattgtattagtaacatcaggccctggtgcaacaaacgttgttacagcattaacagatgcgtacatggactctgttcctttggtttgtatttcaggacaagttcctactcatttgattggaactgatgcttttcaagaatgtgatacaactggtataactagaccttgtacgaaacataattggttagtcaaagatgtaaaagatttagaaaaaactattcacaaagcttttgaggtagcaacaacgggaagacctggccccgtgttagttgatattccaaaagatattcaatttaataaatataaatattcaaaactaaaaaaacaaaaaaaactaaatggtaagtcacataatttttattcacaaaaagatattgatgaattaattaatttgataactaaagcaaaaaaaccaataatttattcaggtggcggagtaataaattcaggtatagaagcaagccagctttaa

SEQ ID NO: 232286 - DNA, 1699 bp, Unknown
  Bacterial polypeptide expressing nucleotide sequence isolated from the Sargasso Sea
atgaaaaaaaacaaaaaaatatctggtgcagaagcagtaattaagtcattaattaaagagaatgttgatcttgtttatggataccctggtggagctataatgccagtatatgatgaattctttaaatttcaacataaagttcatcatgtattaactagacatgagcagggagctgtccatgctgctcaaggatatgcgaggtcttctggaagagttggtgtagcaatagctacttcaggtccaggagctactaacttggttacaggaattgccgatgctcagattgattcaacaccaatagtttgtattactggtcaggttccagctcatttactaggttctgatgcatttcaagaaactgatattattggtatctcaatgcctgtaacaaaatggagctatcagattactaaagcttctgaagtacctgatgtaattgcaaaagcattttatatagctaaatctggaagacctgggccagtattaattgatattacgaaaaatgctcaaattgaaatgcttgattttaagtataagaaatgtgttggtattagaagttatagtccagtgcctaagattgataaaaataaaatattagaggcagctgaacttattaataatgcaaaaaacccattaattgtttggggtcaaggtgttattcttggaaatgcagaaaaagaatttaagaattttgttgaaaaaagtggaattcctgcagcttggacaatattaggtgcttcagctattcctacatcgcatgaattaaatgttggaatggttggtatgcatggaaattatggacctaatattttaactaataaatgtgatttattaattgctattggaatgagatttgatgatcgtgttactggtgatacttcaacatatgctaaacaagctaagattattcatttggaaattgatccagcagaagtcaataaaaatattaaagtagatgttcctgttattggaaactgtaaggattcattaagaatgcttacaagaaatataaaagcaaaatcatataaaaaatgggtgaataaattcgatgaattaatgaaaaaagagtttaaaaaagtaattaaaagtgatcttgctccaaagaaaaaaggattaacaatgggtgagtcaataattgctattaataagtttacaaaaggaaaagctataattgttactgatgttggtcaacatcaaatggtagcttgtagatatgctaactttattgattctaaaagtaatattacttcaggaggattgggtacaatgggttttgctcttccagctgctataggagctaagatgggtgcacccaaaagggaagtagtagctgtaataggtgacggtggatatcagatgactattcaagaattaggcacaatatttcaacttcaattgcctgttaaaatagtaatattaaataatgattttcttgggatggtaagacaatggcagcaattattttttgataaacgatatgcttcaactgagatggttaacccagactttgtttctatagctaaagcttatttcttagattcagaaagggttgagactagatcagaccttgagcctgcagttaaaagaatgatagaatcaaagaaaccatttgttcttgaaatatgtgttgaaaaggaagataatgttttccctatgataccatcaggagcttcagtttctgacataagactagaataaa

SEQ ID NO: 232287 - DNA, 1044 bp, Unknown
  Bacterial polypeptide expressing nucleotide sequence isolated from the Sargasso Sea
ggttatgcacgatcatcaggtaagcctggagtagttttagtaacatctggaccaggtgcaacaaatgttgttacagcattaaccgatgcttatatggactcaatacctttagtttgtatttctggacaagtacctactcatttaataggcactgatgcgtttcaagagtgcgatactactggaattacaagaccttgtacaaaacataattggttagttaaagatattaaagaattaccaaaagtaatgcatgaagcttttaaagtagcaacaactggaagacctggacctgtattaattgatattcctaaagatatccaatttgcaaaaactaattacacaaaatttaaaaaagaaaaaaaattaaatggaaaaatacataataaattttctgaaaatgaaattaatcaattaattgatttgatttcaaaagcaaaaaaaccagttgtttacactgggggtggagtaataaattctgggcctcaggctagtgagactttaaaagagtttgttagattaattggttttccaatcacgtcgactctacaagggttaggggcatttccaggggatgataatcaatttattggaatgctaggtatgcatggaacttatgaagctaataatgcaatgcatgattgtgatttgttaattaacattggtgcaagatttgacgatagaataactggtaagatcgatgagttttcgccgaaatcaaaaaaagttcatatcgatattgatccatcgtcaatcaataaaattataaaagtagatcttgcaatagttggagatgttaatgaggtaataaagtcagctatcaagaaaataaataaaaaacaaaatggattaaaagattcaaataaacaaagaatttcaaaatggtgggagcaaatccaaaagtggagaacgaaagactcattaggatttgttaatagtgacaaagagattaagcctcaacatgctgtaaaaagattatatgagctaacaaaaaatcaagatacatttatcacaactgaggtaggtcagcatcaaatgtgggctgcc

SEQ ID NO: 232288 - DNA, 1768 bp, Unknown
  Bacterial polypeptide expressing nucleotide sequence isolated from the Sargasso Sea
atgccaaaattatacacaggagcagaaattgtttttaaatgccttgaagatcaaaaggtagaacatatttttggatatcctggtggagcagttttaccaatttatgatgaacttaaaaatcatacttctattaagcatattttagtgagacacgaacaaggtgcgggtcatgctgctgaaggatatgccagatcatcaggtaagcctggagttgttttagttacatctggacctggcgctacaaatgttgttaccgcattaacagatgcatatatggactcggttccattggtttgtatttctggtcaagttccaactcatttaataggaactgatgcatttcaagaatgtgataccaccggtattactaggccctgcacaaaacataattggttagtaaaagatataaatgatttatcagaaataatgcatgaagcatttaaagttgcaaccacaggaagaccgggccctgttttagttgatattccaaaagatattcaatttgcaaaagctaaatataaaaaacctaaaaaagaaaaaaaactaaatggaaaatcaaataataaattttctcaaaaacaaatagatcaattaattgatttattaaaaaatgctaaaaaaccagttatttatagtggtggtggagtaattaattcaggacctaaggcaagtgatgcattaagagagtttgtagaattaacaggattcccaatcacctctacccttcaaggtttaggtgcatatcctggtgatgataatcaattccttgggatgttaggtatgcatggaacttatgaggccaacaatgctatgcatgattgcgatcttttgataaacattggtgcaagatttgatgatcgtatcactggaaaaatagatgaattttcaccaaactcaaaaaaagttcatattgatatagatccttcatctataaataaaattataaaagttgatcttgctatagtaggagatgttacgaaggtaattggtaaactaaataaagcaatcttaaagaaaaaaaatggtcatagtaaatccaataaatcaaatattgctaagtggtgggaacaaatacaaaaatggagaggcaaagactctcttaattttgttaatagtaatgatagcatcaagcctcaacatgcagttcaaaggctgtatgagttaacaaaagataaagatacttatgtaacaacagaagttggtcaacatcaaatgtgggcagctcaacattacaagtttaataaaccaaatagatggatgacttctggaggtttgggcacaatgggctatgggctaccagcagcagtaggtgtgcaaattgcccaccccgaaaagttagtagttgatattgctggtgaagcctctgtattaatgacaatgcaagaaatgtccactgcagttcaatacaacttaccaattaaaatttttattttgaataatcagtacatgggaatggtcagacaatggcaagagcttttacatgaaaaaaattactcagagagttactctgaagcacttcctgattttttaaaaatggctgaggcttatggctgtaagggaattaaagcagaaaacccttctgagttagatgggaaaattcaagaaatgatagattataaaggtccggttatttttgattgtcatgttgatcctaatgaaaattgttttccaatgataccatcgggaaaacctcataatcagatgatcttaggacctaatgatcaggaagagaacaaaatcaagggtaaaggcaaagccttagtttaga

SEQ ID NO: 232289 - DNA, 1249 bp, Unknown
  Bacterial polypeptide expressing nucleotide sequence isolated from the Sargasso Sea
atgtctaaattatatacaggtgctgaaattgtattcaaatgtctagaagatcaaggagttgattttatttttggttatccgggtggtgcagtattaccaatttatgatgagttaaaaaatcataacacaattaaacatattctagttagacatgaacaaggtgcgggtcatgctgcagagggttatgcaagatcatctggcaaaccaggtgttgtacttgttacctctggacctggagcaactaatgttgttaccgcattaacagatgcatatatggactctgtcccactagtttgtatatcaggacaagtgccaacacatttaattggaacagatgcatttcaggaatgtgatacaacaggaattacgagaccatgcacaaaacataattggttagtcaaagatattaaagatttatcaaaaactcttcatgaggcttttagagttgcaactacaggaagacctggaccagttttagttgatatacctaaagatatccagtttgctaaaataggttattcaaaacctaaagttgaaaaaaaacttaacggaaaatcattgaatcatttttcgcaaaaggacattgatactttgatcagtttaatgaataaatcaaaaaaacctatcatttattctggtggtggagttataaactctggaccagaggcgagtaatgttttaagagaacttgttgaacttacaggttttccaatcacttctacgttgcaaggtttaggagcgtatccaggagatgacaatcaatttttaggcatgctgggtatgcacggaacttatgaggctaataacgcaatgcatgattgtgatttattaataaatattggtgctagatttgatgatagaataactggtaaaattgatgagttctctccaaaatcaaaaaaggttcatatcgatattgatccctcatcaataaataaaatcattaaagttgatttagcattagttggtgatgttaaagaggttttaaaaggaattaccaaaactctaaagaaaaaaaacttagatttgaaaaaatctaataagcaacaaattgctaaatggtgggaacagatacaaaaatggcgaacaaaaaattcacttcattttaaaaacagtgatgaaaccataaaacctcaacatgcagtacaaagattatacgagcttactaaacataaagatacttatgtcacgactgaggtaggtcaacatcaaatgtgggcagctcaatattataaatttaataaaccaa

SEQ ID NO: 232290 - DNA, 1177 bp, Unknown
  Bacterial polypeptide expressing nucleotide sequence isolated from the Sargasso Sea
actgattgatttgatgagcaaatcaaaaaaacctattttttatactggaggaggagtagtaaactctggacctgaagctagtaatttgctgagagaacttgtatcaatgacgggatttccaattacatctactttacaaggacttggatgttttcctggagatgataatcaatttttaggaatgttaggaatgcatggaacatatgaagctaacaatgcaatgcacgactgtgatttgatgattaacattggtgcaagatttgatgatagaataactggaaaaattgatgagttttctcctaaatcaaaaaaagttcatattgatatagacccatcctctataaataaaaatattaaagtagacttaccaattgttggagatgttggagaagttatgcaatcaataataaaaactacaaaaaaaaacaaaccatcatttttaaaatcaaataaacaaaatattgcaaaatggtggtctcagatagataagtggagagctaaaaaatctcttaattttataaatagtgaaaaaaaaataatgccacaacatgcagtacaaaggttatatgaacttacaaaaaaatacgatacttacgttacaacagaagtaggacagcatcaaatgtgggctgctcaacattataaatttaacaaacctaatagatggatgacatctggtggtttaggaacgatgggatatggagtgccagcagctgttggagtgcaaatagcacatccaaaaaaattagttatagatattgcaggtgaagcatcagttttaatgactatgcaagaaatgtctactgcagttcaatacaatcttccaattaaaatatttatactaaataacgagtatatggggatggtaagacaatggcaggaacttttgcatgaaaagaattattcagaaagttattctgctgcacttccagattttgttaaattagctgaagcatatgggtgtgtaggtattagggctaaaactcctgacgaattagatgaaaaaattttagaaatgattaatgttgataaaccagtaatttttgattgtgttgttgatcaaaacgaaaactgttttccaatgataccttctggtaagcctcataatcaaatgcttctgggtccacaggatcaaaaaagtaagaaaatttcaagcaaaggaaagacactagtataa

SEQ ID NO: 232291 - DNA, 589 bp, Unknown
  Bacterial polypeptide expressing nucleotide sequence isolated from the Sargasso Sea
aatgccaaaattatattcaggagctgaaattgtttttaaatgtttagaagatcaaaaagtaagccatctttttggttatcctggtggagcagttctcccaatatatgatgaattaaaaaatcatccatctattaaacatattttagttagacatgaacaaggagcgggtcatgctgctgaaggctatgctagatcaacaggaaaacctggagtagttttggttacatctggtccaggagcaacaaacgtagtaactgctttaaccgatgcatatatggactctgtaccaattgtttgtatatcaggacaggtgccaactcatttaataggaacagatgcatttcaggaatgtgatactacaggaattactagaccttgtactaaacataattggttagttaaaaaaattgaagatttaccaaaaattatgcatgatgcttttactgttgcaatgtctgggagaccaggaccagtattagttgacatacctaaagatattcaatttgcaaaaacagtctataaaaactttagtaataaagttttaaaacaaaatggaaaaatcataaatctttttctattaatgaaataa

SEQ ID NO: 232292 - DNA, 1101 bp, Unknown
  Bacterial polypeptide expressing nucleotide sequence isolated from the Sargasso Sea
aagtgatgcgtttcaagaatgtgataccactggaattacacgaccttgtaccaagcataattatttagttaaagatgtaaataaactttcttcagtttttcatgaggctttttctattgcagcaaatggtagacctggacctgttttaattgatattccaaaagatgttcaatttgcaaagggtagttatcaaagttctaaagaagtaacgatcgaatctcatagattatttgaaccaaaaattagagctaatgatcaaaatatagaagaagcaacaaaattaatagcaaatgcaaaaaaaccaatattttatattggtggagggtgtataaattctggtccaaaagcttcggaactagttacaaaatttgttgaagaaacaaaagctcctgcaacaatgacgttaatgggccttggtgtaataggagctaaaaataaatattctttgggaatgttaggaatgcatggaatgtatgaagccaatatggctatgcatgaatgtgatgtaatgattaatattggagccagatttgatgatagagttactggaaggcttgatgcttttgctcctaattcaaaaaaaatacatattgatatagatcctagtaacattaataaaactataaaaatagatgttcctattattggagatattgaatctgttatgaatcaaattttttcatcttggaaaaataataattataaaagtcaaaaagaagatttaataaaatggtgggataaaatagaaaaatggaaaaaagttgattgtttaaattataatcaaggcgaaggatcaattaaaccacaacatgctattaaaagattatatgaactgacgaaagataagaaaactttcattacaacagaagtaggccaacatcaaatgtgggcagcccaatactataaatttgaagaacctaatagatggttaacatctggaggtttaggtactatgggttatggttttccagcggcaattggagctcaaatagctaaccccgactcattagttgtagatattgctggagatgcttcaattttaatgaatattcaagaaatgagcactgcagtacaacatcgacttccagttaaaatttttat

SEQ ID NO: 232293 - DNA, 1720 bp, Unknown
  Bacterial polypeptide expressing nucleotide sequence isolated from the Sargasso Sea
catggagaagttatccggagccagcatgattgtgcgatcccttatcgatgaaggtgtaaagcacatatttggttatcctggcggctcagtgttagatatctacgacgccctgcaccttatccccggtattgaacatattctggttcgccacgaacaagccgccgtgcatatggccgatggttatgcccgcgccacgggtaaagtaggcgtggtactcgtgacctcaggtccaggtgccaccaatgccattactggcatcgccaccgcctatatggattcaattccattagtggtgttatctggccaagtacccagcaatttaatcggtaatgatgcgttccaagaatgcgacatgattgggatttcacgcccagtcgtcaaacacagctttttagtacaagatcctactcagatacctgaaatcattaaaaaagccttttatattgcctctacgggtcgccccggccccgtcgttgtcgacttgccaaaggattgcctcaatcctgcattgctacacgactatatttaccccgagagcattaaaatgcgctcctataatccgacgacatcgggccacaagggccaaattcgccgtggattgcaggcattactggcggcgaaaaaacccgtgctttatgtaggtggcggcgccattatctccagcagtgaaaagcagatcttagccctagcggaaaagttaaatatccccgttgtcagcaccttaatggggcttggcgcattccctggcacccataaaaacagcttaggcatgctagggatgcacggtcgctatgaagccaacatgaccatgcataactgcgatcttatcttcgggattggagtgcgtttcgatgacagaaccaccaacaacatcgagaaatactgccctaatgccactattttgcatatcgatatcgacccttcatcgatttcaaaaactgtacgagtggatatccccatcgttggctcggcagacatcgtattagacagcatgttagccctgctggaggagtcgaaggagagcaacgatagcgaggcaattaatcaatggtggcaagaaatcactgtgtggcgtaaccgcaactgcttggcatacgataaggaaagcaatcggatcaaaccacagcaagtgattgaaaccctttacaaactcactaagggtgaggcctatgtcgcctcggatgtgggccagcatcaaatgtttgctgcgctctattatcccttcgataaacctcgccattggattaactccggcggccttggcaccatgggctttggtttacccgctgccatgggagtcaaaatggcaatgcctgacgaaaccgttgtatgcgtcacgggcgatggctcgattcagatgaatattcaagagctttcaaccgctctgcaatacgatacgccggttaaaattatcaacttaaacaaccgcttccttggcatggttaaacaatggcaggatatgatctactcgggtcgccattcccattcctatatggattcggtacccaactttgccaaaattgctgaagcctatggccatgttggcatgacgattagcgatcccgctgaacttgagtctaagatggccgaagcccttgccatgaaagacagactggtatttatcgacattatggtggatgagactgagcacgtgtatcccatgcttatccgcggcggcgcgatgaatgaaatgtggttaagcaaaacggagaaatgctaa

SEQ ID NO: 232294 - DNA, 1137 bp, Unknown
  Bacterial polypeptide expressing nucleotide sequence isolated from the Sargasso Sea
gcctgtgccccgacagcctgcggatgctggccgagcgttatcagctcccggtcaccaccaccttgatgggaaaaggtgcctttgatgagaacgatgctctctcggtgggcatgctcggtatgcatggcaccgcctacgccaacttcgccgtcaccgaatgcgacctgttgatcgccgtcggtgcacggtttgatgaccgcgtcaccggcaagctggacaccttcgccccccgggcccgggtggtgcacttcgagatcgatccggcggagatcggtaaaaaccgcaaggctgatgttgccgtgctcggtgatctcggcctgagcctggcgcggatggtggagatcagcctgcaacgcacggcggagccccgcactgcagcctggctggagcgcatcaacacctggaaggatcgttatcccctcacgattccgccaacggaaggggcgatctatccccaggaggtgctgctggcggtgagggatctggcccccgacgcaatcgtcaccacggacgttggtcagcatcagatgtgggctgcgcagtacctgcgcaacgggcccaggggctggatcagcagcgctggtctcgggacgatgggcttcgggatgccggctgccatgggggcccaggtggccatgccggatcggcaggtggtgtgcattgccggtgatgccagcatcctgatgaacatccaggaactcggaaccctggcggcctatggcctgccggtgaaggtggtgatcgtcaacaaccactggcagggcatggtgcgtcagtggcaggaaagcttctacgacgagcggtattccgcctccgacatgctcaatggcatgcctgatttcatcgccctggcccgttccttcggcgtggatggcgtcaagatcaccgagcgtgagtcgctgcaccgcgacctcgccgcagccctgcaatcaccaaccccgatgatgattgacgtgcacgtgcggcggggagagaactgctacccgatggttccgccgggcaagagcaatgcacagatggtgggtctcccctcgcacccggagttggcgatgggcaccacccgcacctgcagctcctgtggcgctatcactgcccatgaacatcgcttctgtccgcagtgcggcgcttctttgtgat

SEQ ID NO: 232295 - DNA, 850 bp, Unknown
  Bacterial polypeptide expressing nucleotide sequence isolated from the Sargasso Sea
aatgtcaaaattatattcaggtgctgaaattgtatttaagtgttttgaagatcaaggtgtaagtcatatctttggctatcctggtggagcggtacttccaatttatgacgaattaaaaaattttaaatctgtaaaacatattttagttagacatgagcaaggcgctggtcatgcagcagaaggatatgcaagatcatcaggcaagcctggggttttattggttacttctggaccaggagctacaaatgcagttacagctttaactgatgcttatatggactctgtacctttagtttgtataacaggccaagtaccaactcatttaattggaacagatgccttccaagaatgtgacactacaggcataacgagaccttgcactaaacataattggttagttaaagatattaatgatttaagtaaagttattcataaagctttcgaagtagctacaactggaagaccaggtcccgtattagttgatattcccaaagatatacagtttcaaaaaacaaaatataaaaattacaaaaaacaaaaaaaattaaatggcaaatcacataattatttttctcaaaaaaatattgatgaattgattaaattaatgaaaaaagcaaaaaaaccaattttttatactggtggaggggtaataaattcaggacctaaagcaagtgaattgttaagagagcttgtctatgcaaccggtttcccaataacatcaactttacagggcttaggttcttttcctgcagatgataaccaatttttaggaatgcttggtatgcatggaacttacgaagcaaataacgcaatgtatagttgtgatttaatgattaacattggagcgaga

SEQ ID NO: 232296 - DNA, 1489 bp, Unknown
  Bacterial polypeptide expressing nucleotide sequence isolated from the Sargasso Sea
tctgttccacttgtttgcatctcaggacaagtacctactcatttaatcggaacagatgcttttcaagaatgtgatactactggaattaccagaccctgtacaaagcacaattggttagttaaagacgtaaaagatttagaaaaaacaattcataaagcttttgaagttgcaaccactggaagaccgggacctgttctagttgacattccaaaagatgttcaatttcaaaaaacaagctacacaaaatttaaaaaacaaaaaaaactgaacggcaaaattaacaatcaattttcacaaaaagatatagatgaattaataaaattaatgagtaaagcatcaaagccaattttttatactggtggaggtgttataaattctggcccaaaagcaagtgaacttttaagagagttagttaatgtaactggcttccctataacatctacattacaaggcttaggttcttatcctggtgaagatagtcaatttttgggtatgctaggtatgcacggatcctatgaagctaacaatgcaatgcatgattgtgatttaatgataaatattggtgcaagatttgatgatagaataactggaaagatagatgaattttctcctaaatcaaaaaaagttcacattgatatagatccatcttcaataaataaaaatgttaaagtaaacttaccaattgtaggagatgttgctgaagttattaattctacaattaaaactataaaaaaagtaaaaccaaattttgctaaatcaaataaacaaaaagtttcaaaatggtgggaacaaattcaaaaatggagatcaattaattcatttgattttgttaatagtaatgagacgataaaaccacagtatgcagtacaaagactttatgaattaactaaaaacaaagacacatacataacgactgaagttggacaacaccaaatgtgggcagcacaacattataaatttgacaaacctaatcgctggatgacttctggtggattaggaactatgggttatggattgccagcagcagttggagttcaagttgcccatccaaataaattggtaattgatattgcgggagaagcatctgttttgatgaccatgcaagaaatgtccaccgcagttcaatacagtcttcctattaaaatatttattttaaataatgaatatatgggaatggtcagacagtggcaggaactgctccatgataaaaattattcagaaagttatactgccgctcttccagattttgtaaaacttgcagaagcatatggctgtgttggaattagagcacaaactcctgaagaattagacgacaaaataatagaaatgattaatactgatagaccagtaatttttgattgtagagtagacaaacaagaaaattgttttccaatgataccttcaggaaaaccacataatcaaatgcttttaggcccaaaagaccagaaagaaaataaaattacagggaaaggcaagactttagtttaat

SEQ ID NO: 232297 - DNA, 910 bp, Unknown
  Bacterial polypeptide expressing nucleotide sequence isolated from the Sargasso Sea
aatgccaaaattattttcaggagctgaaattgtattcaaatgtcttaaggaccaaggtgtgactaatatatttggctatcctggaggagccgttctcccaatatatgatgaattaaaaaattttaattctattaagcatattttagtaagacacgaacagggagcgggccatgcagctgaaggatacgcaagatcatcaggaaaaccaggagtgctattagtaacttctggaccaggagcaactaatgctgttacagcattaacagatgcttatatggattctgtccctttggtttgtatatcaggacaagtaccaactcatttaattggaacagatgcttttcaagaatgtgatacaacaggtattactcgtccatgtactaagcataattggcttgtgaaagacataaaagatttagccaaaactattcataaggcttttgaagttgcaacctcaggcaggccaggtcctgtgctagttgatattccgaaagatatccagtttcaaaaaacggcttacaagaattataaaaaaattaataaactaaacggtaaatctcacaatcgtttttctcaaaatgatattgataaaattattaatttaatggggaaagccacaaaacctattttttataccggaggcggggtaattaattcaggtccaaaggcaagcgaactattaagagaactagttaatgcaactggttttccaattacatctacattacaaggcttaggttcttatccagcagatgataatcaattcttaggaatgctgggtatgcacggaacatatgaagctaataacgcaatgtatgaatgtgatttaatgataaacattggcgcaagatttgacgatcgtataacaggcaaaattgatgagttttctccaaaatcaaaaaaaatacat

SEQ ID NO: 232298 - DNA, 490 bp, Unknown
  Bacterial polypeptide expressing nucleotide sequence isolated from the Sargasso Sea
atggacaaaagtaataaatctggtgctgaagcattaatccattctcttcatcttgagggggtagatcttatgtttgggtacccaggcggagcagcactgcatatctatgatgcaatatttaatcaaaactatgtagatcatattcttgttagacatgaacaaggagctgttcatgctgctgatggatacgcgagagcaactggaaaaccaggcgtcgcattagtcacctcagggccaggagccactaatgccattacaggtttagccactgcttacatggattccacgcccatcgtagttatttcaggacaagttaaatccaatttaattggtacagattcttttcaagaaactgacatgattggcgtatcgcgacctattgttaagcatagctttcttgttcaaagagcagaagatatacctgatattgtaaaaaaggcttttcatatagctacaacaggaagaaaaggtccggttgttattgatatcc

SEQ ID NO: 232299 - DNA, 832 bp, Unknown
  Bacterial polypeptide expressing nucleotide sequence isolated from the Sargasso Sea
taacgcgaccattattcatatcgatattgacccggccagcatatccaaaaccatcaatgcgcatattcctattgtgggtttagtcaaacctgtattgcaggaaatgctgcatcagctggagaaaaaccagggcgaattggatcaagacgctttaggccaatggtggcaacaaatccaacaatggcgtgaagtgcatggtggccgttatgacagcagcgcatcgcatttaaaacctcaggccgtcattgaagctgtgcaccgtcatactaaaggcgacgcttatgtcacgtccgacgtaggccagcaccagatgtttgccgctcagtactacaagtttgataaacccaatcgctggatcaactcaggtggcctcggcactatgggctttggtttacctgccgctatgggcgtcaaactgcattaccctgatgctgaagtagtctgcgtgacaggcgaaggctctattcagatgaatattcaggagctgtcgacctgtaaacaatatggcttgaatgtaaaaatcatcaacctgaataacggttatttaggtatggtcaaacagtggcaggacatgaactacgacagccgctactccagctcttacatggattccttgcctgattttgtcaaactggccgaagcttacggccatgtcggtattcgggtcaccaaagccgaagagttagagccagccttagaacgcgcttttgccctgaaagacaaactggtgtttttagatattcatgtcgacccgaccgagcatgtctatccaatgcaaataccaggcggtgctatgaatgaaatgtttttaagcaaaacggagcggacttaa

SEQ ID NO: 232300 - DNA, 1774 bp, Unknown
  Bacterial polypeptide expressing nucleotide sequence isolated from the Sargasso Sea
atggacaatgaaaatgaatttacgggagcagatattctacttaaggccctcaaagaccaagaagtagatacaatttttggttatccaggcggagctgttcttcctatttatgatgcaatttttggccaaaattttttaaaacatgttttggtaagacaagaagctggtgcagttcatgcagcagagggatatgcaagatcaagtgggaaagtaggtgtcttgttagtgacttcaggccctggggttaccaatgtggtaacaggcttaactgacgcattaatggatagcattcctatagtttgtattagtggacaagtcccttcacatttaataggtacagatgcgtttcaagaatgtgatactactggaattacaagaccttgcactaaacataactatttagtcaaagatgttagcaagctctccgaaacaattcatgaagcatttaagatagctagctcaggaagaccaggccctgtgttaattgatattcctaaagatgtacaatttgcaaagtcaaaatacataccaaaaaaagacattagttttaaagagcacagaattaaagctggatctaaaaatgttgataaaaattttgttcaagagcttgtaaatcatattaaaaaatctgaaagacctattttttatgttggtggtggttgtttaaactctgggcctcaagctagccaagaattaatcaagctcgtaaataaaaccaatatcccaattacaacaacacttcatggtttagggtgttttccaggcgaagataaaagttcactagggatgttgggaatgcatggaaattatgaagcaaacttggccatgaataaatgtgatttaatgatcaatgttggtgcaaggtttgatgatagagtaacaggaagattagatgcattttctccagactctgtaaaatttcacatagatattgaccaaagctcaattaataaaaatgtaaaggttgattttcatacaaatactgacattactctgacactaaaagaaataaactcttttatagagtcaaataatattgaacttgaaaaaaaagattacactaattggtggagtcaaattaatgattggagaaaaaaagaatgccttcactatgaacaaggtgaagagactatcaaacctcaacatgccatttccaggttgtatgatttaaccagtcaaaaagacacttttattaccactgaagttggacaacatcaaatgtgggcagcgcagtattataaattttcaaaacccaataggtggattacttctggaggtcttggcacaatgggttttggcatgccagcagcagttggagcacaaatggcaaatcctgactcgctagttatagatattgctggagaggcatcttttctgatgaacgttcaagaaattgctacagcagttcaatacaaattaccaattaagattttcattttaaataatgaatatatgggaatggttagacaatggcaggaacttcttcatggaagtagatactccgaaagttatgttgatgcccttcctgattttaaaaaacttgctgaaagttttaatgcagttggagtgagagcaaaaaatatttcagagttagacgatgctattaatgaaatggtttccatagacagacctgttattgctgatatttgggttgataaaaaagaaaattgttttccaatgataccatctggggctgcgcaccatgaaatgcttttatcaaaatatgataaagaaaatcttgaaaatcaagaaaagggaaaagtactagtttaat

SEQ ID NO: 232301 - DNA, 1129 bp, Unknown
  Bacterial polypeptide expressing nucleotide sequence isolated from the Sargasso Sea
atgagtggggcagacgcaatacttagggttttagaagaacaaggtgttgaagtcatttttggttatccaggtggagccattttgccaatttatgattcattgtttaaatcaaacagtataaagcacatacttgttagacatgaacaagctgctgtgcatgcagctgaaggttatgcaagatcaaccggaaaagttggagttgtattagttacttctggtccaggtgccactaatgctgttacaggattgactgacgctttaatggactctgttccaatagtttgtttgtcagggcaagtcccaactcatttaataggaaatgatgccttccaagaagctgatacaactgggataactagaccttgcactaagcataactatctggttaaggaaagtgaaaaattatgttcaacactacatgaagccttccatgtggcacgctctggaaggcctggacctgtggtagttgatttgcctaaagatattcaattatcagagtgcgaatatattaatagacaggacagacatggaagaaggtataagccaattataaatcctgagaaaaataagattattgaggtagctaaacttcttgtaaatgctaagaaacccataatttatgggggcggtggaattattaattcaggaccagaagcctcaaatttattaagagaattagttgatttggttgagattcctaccactcttacattaatgggtcttggtgctttacctcatgataacaagttttttttaggaatgcttggaatgcatggcacttatgaagcaaatctttctatgtataattgtgatgttatgctcaatattggagcaaggtttgatgacaggattacaggaaatctaaaagaattttcacctaactcaaaaaaaattcatattgatatagatccatcttctattaataagtcagttcctgttgatattcctataatttcagatgctggtagtgcattaaaagagttaatatatgaattaaaaaaattaaaatttaaaaactctgaaaataggataggagtttggctaaggcaaataaatgaatggagatccaaggaaatgcttagatttcaatcaaacaggaaagattataaaaccacaatacgcaattaaa

SEQ ID NO: 232302 - DNA, 694 bp, Unknown
  Bacterial polypeptide expressing nucleotide sequence isolated from the Sargasso Sea
atgaatggagatccaaggaaatgcttagatttcaatcaaacaggaaagattataaaaccacaatacgcaattaaaagactttttgaaaaaaccaaaaacattgaaacatatataacaactgaagttggtcagcatcagatgtgggctgcccaatattatggtttttcaaagcctaacagatggatgacgtctggtggattaggaaccatgggttatggattaccttccgctatgggtgttcaaattgcacacccagaaaaacttgtcattgatatttcaggtgaggcttcttttctgatgaatatgcaagaattatcaacacttaagcaatataaattacctgttaaagtttttataataaacaaccaatggatgggtatggttaggcaatggcaacaactaattcatggaggaagatattcagaaagttatacagattctttgcctgactttaagtctcttgcagagtcttttgggctcgaagggttgagagcagaaaatgttgatcaactagatgatgttatagatcaaatgatggcatctaaatctgcagttttgtgtgacatacaagttgccaaagaagaaaattgctttcctatgataccctcaggtgctgcccattatgatatgctattaggcccagaagataaacaaaacaaaaaagtttcaaaagatggcttggcattggtttaat

SEQ ID NO: 232303 - DNA, 1269 bp, Unknown
  Bacterial polypeptide expressing nucleotide sequence isolated from the Sargasso Sea
aatgccaaaattatttactggagcagaaattgtatttaagtgtcttgaagaccaaaaggtagaacatatctttggttatccaggtggcgcagtgttaccgatttatgatgaattaaaaaatcatccttctataaaacatattttagttagacacgagcaaggtgctggtcatgcagctgaaggctatgcaaggtcatcaggaaaaccaggtgtggttttagttacatcaggtcctggggcaactaatgttgttacagccttaacagatgcttatatggactctgttccgttagtttgtatttctggtcaggttccaacacatttaattggaactgacgctttccaagaatgtgacactacaggaattacaagaccttgtacgaaacataattggttagttaaagatataaatgatctttcaaaagttatgcatgaagcttttaaagttgcaacaacaggaagacctggaccagttttgattgatattccaaaagatattcagtttgcaaaagcaaaatataaaaaaccaaataaagaaaaaaaattaaatggaaaatcccataataaattttctcaagatcaaattgatgagttagtaaaattattaagtaaagctaaaaaacctattatttatagtggtggaggagtaattaactcagggccaaaagcaagtcaggctttaagggaatttgttgagctaactggttttcctataacttcaacacttcaaggattaggtgcttatcctggagatgataatcaatttttaggaatgcttggtatgcatggtacgtatgaagcaaataatgctatgcatgattgtgatctattaattaacattggcgcaagatttgacgatcgtattactggaaaaattgatgagttttcaccaaattcaaaaaaggttcatattgatatagacccatcatcaattaataaaattatcaaagtggatcttgcaatagttggagacgttacgagtgtcatcagtaaaattaataaaacaattgctaaaagaaaaaatggtcatagcaagtcaaataaatcaaatatagctaagtggtgggaacaaattgaaaaatggagagaaaaagactctcttaattttgtaaatagtaatgaaagtataaaacctcaacatgccgttcaaagactttatgaattaactaaagataaagatacttatgttactaccgaagttggacaacatcaaatgtgggctgctcagcattataaatttaataaaccaaatagatggatgacatctgg

SEQ ID NO: 232304 - DNA, 1407 bp, Unknown
  Bacterial polypeptide expressing nucleotide sequence isolated from the Sargasso Sea
aatgactggtgcacaaatggttctgaaggccttggaagatcaacaagttgatacaatatttggttatcctggtggtgcagttttgccgatatatgatgaattagcaaaaactaaggatacaaatcatcaaatacgtcattttttagtaaggcacgaacaaggtgcatcccatgctgctgaagggtatgcaaggtcaagtggtaaagttggagtaatgttagttacctctggccctggagttactaacgcagtgactggattaactgatgctatgatggactcaattcctcttgtttgtattagtggacaagttcctacgcacttaattggaacggatgcatttcaggaatgtgatgcggttggaattacgcgcccatgcactaagcataattggctcgttaaggatataagtgatctatctcgaattttacacgaagctttttatgtagcttccagcggcagacctggacctgttcttgtagatatacccaaagatattcaattccaaaccggaacatatattgggcctgatacgattaaacataagtcctatagaccaaaattaaaagcgaacattgataatattgatgatgctctaaagttaatctcagaagctgaaaagccaataatttacactggagggggagtaatcaactcgggaaatgcagccgttcaactcctacgagagtttgttcgtcttactggtttcccaattacatccactcttcaaggacttggcgcgtttccaggtgatgatactcagtttgttgggatgcttggcatgcacggtacatacgaagcaaacatggcgatgaataaatgtgatctcatgataaacattggcgcacgttttgatgatagaattactggaaaaattgatgagttttctccaaaatcaaaaaaaatccatatcgatattgatccatcatcaattaataaggttgtcgatgtagatgttgctttggttggtgatgttgctcatgtacttgaagatgccattaagctatggaaatcaaaagtttacaaggttaataaatctctgattaaagactggtggaaacaaatagataaatggaaagaagtagactcattagggtttaatgaggataaaaaaacgattaagccgcagtatgcaatacaaagattgtatgagttgactaaagaaaaagatgtctttgtaaccactgaggttggtcagcatcaaatgtgggctgcgcaatattacaaatttaatagacctaataggtggattacatccggaggtttaggcactatgggctttggcttgcctgccgcgataggtgctcaagttgctcatcccgataaactcgtaattgatattgcaggagaagcctcaatattgatgtgtatacaagaaatgtcgacagctattcagcacaaactacc

SEQ ID NO: 232305 - DNA, 1099 bp, Unknown
  Bacterial polypeptide expressing nucleotide sequence isolated from the Sargasso Sea
atgagtaaatcgtcaaaacctattttttatactggtggtggagtaattaattctggacctaaggctagtgaacttttaagagaacttgtttatgcaacaggttttcctatcacatcaactttacaaggattgggatcttttccaggtgatgataatcaatttttgggaatgttgggtatgcatggaacctatgaagcaaataatgcaatgcacgattgtgatttaatgattaatattggggcacgttttgatgataggataacaggaaaaatagatgaattttcaccaaattcaaaaaaagttcacattgatatagatccatcatctattaataaaaatgttaaagttgatttagctattgtgggagatgtaaaaactgttctttcatctactttgaaaagtttgaaacaaaaaaaatcaaaatttttaaaatcaaataaacaaaagacttccaaatggtgggaaaaaattcaaaaatggaggttggttagatctttagattatattggaagtgaggagactataaaacctcagtatgcgattgaaagattatatgaattaactaaagataaagattcctatattacaaccgaagtaggacagcatcagatgtgggctgcacaacattataaatttaacaaaccaaatcgctggatgacatctggtggtttaggtacaatgggatatggtttaccagcggcagtaggtgtacaagttgctcatccaaaaaaattagttattgatattgctggagaggcttcagtattaatgacaatacaggaaatgtctacagctgtacaatacaaccttccaattaaaatatttatattgaataatcaatacatgggtatggttagacaatggcaagaactattacatgataaaaactattctgaaagttatactgctgctctaccagattttgttaaattagcagaagcatataactgtgttggtataagagcaaaaacaccagaagagttagacgataagattattgaaatgttgaatatagatagacctgtaatatttgattgtatggttgataaagtagaaaattgttttccaatgataccatcaggaaagcctcataatcaga

SEQ ID NO: 232306 - DNA, 1640 bp, Unknown
  Bacterial polypeptide expressing nucleotide sequence isolated from the Sargasso Sea
tacaaaccaccaaatacgccattttttagtaaggcatgaacaaggtgcatcccatgctgctgaagggtatgcaaggtcaagtggtaaagttggagtaatgttagttacttctggccccggagttactaacgcagtgactggattaactgacgctatgatggattcaattcctcttgtttgtattagtggacaagttcctacgcacttaattggaacggatgcatttcaggaatgtgatgcggttggaattactcgtccgtgcactaagcataattggctagttaaggatataaatgatctatctcgaattttacacgaagctttttatgtagcttcaagcggcagacctggacctgttcttgtagatatacccaaagatattcaattccaaaccggaacatatattgggcctgatacaattaaacataagtcctataggccaaaattaaaagcgaacattgataatattgatgatgctctaaagttaatcgcagaagctgaaaagccaatcttttacactggagggggagtaatcaattcgggaaatgcagccgttcaactactaagagagtttgttcgtctcactggttatccaattacatctactctgcaaggtcttggtgcctttccaggtgatgacactcaatttgttggcatgttgggtatgcacggtacatacgaagctaacatggcgatgaatgaatgtgacctcatgataaacattggcgcacgttttgatgatagaattactggaaaaattgatgagttttctccaaattcaaaaaaaatccatatcgatattgacccatcttcaattaataaagttgtcaatgtagatgttgctcttgttggtgacgttgctcatgtacttgaagatgctattaagctgtggaaatcaaaagtttataaggttaataaatcgcaggttaaggattggtggaaacaaatagataaatggaaagagcgagattcattagggtttaatgaagataaaaaaacgataaagccacaacatgcaatacaaagattgtatgaactgactaaagaaaaagatgtttttgtaaccactgaggttggacagcatcaaatgtgggccgcgcaatattacaaatttaatagacccaacagatggattacatctggaggactgggcactatgggttttggtttgccagctgcaataggcgctcaagttgctcatcccgataaacttgtaattgatattgcaggagaagcttcaatattgatgtgcatacaagaaatgtcgacagccattcaacacaaactgcctgtaaagattttcattattaataatcaatacatggggatggtaagacagtggcaagaacttcttcacgacaaaagatactctcacagctatacagatgctttacctgattttgtaaagcttgctgaagcttacggcgctaagggtataagggcccaaagtccgagtgaacttgacaaggcaataaatgaaatgattgatcatgatggccctgtaatatttgactgcgtagttgatgaaaacgaaaatgtttttccaatgataccatctggtaaggctcacaatgaaatgttgcttggtgatgaaacagaaaaagaagagatctcagatgaaggaaaagtattagtataat

SEQ ID NO: 232307 - DNA, 1225 bp, Unknown
  Bacterial polypeptide expressing nucleotide sequence isolated from the Sargasso Sea
tatacccaaagatgtaggtcaggagttctttaattaccaaagagttttgcctggtgagattattcctaaaggatttaaaaggaatggagaaattaatgattccgatatcgaaaaagcaattaaattaatagaagattctgagagacctcttctatacgtaggaggtggggcaatatcttcaggagcccatgatgaaataaaaactttagcaaagaattatcaaataccagttaccacaaccttaatggggaagggcgcttttgatgaaaaagataatttatctgtagggatgttaggaatgcatggaactgcttacgcaaatttcgctgttacagaatgcgatcttttaattgctattggagctagattcgatgatagggtgacaggaaaattagatacttttgcacctaatgcaaaggtaattcatatagatatcgacccagcagaagttaataaaaatagacgtgtagatgttgcaattgtttctgatgtttcaaaagctgttctcaaaattaatgaacaatctcaaaaaaacaaatttacttgtaagacgaaaaactggttagaaaaaattgatttttggaaaaataaacaccctttatatgacccgcctaaagaaggagaaatttatcctcaggaagttcttttaaaagtgagagaacttttaccagaagcttatgtaactacagatgtaggacaacatcagatgtgggctgctcaatatcttaggaattctccaagaaaatggattagtagtgcaggcttaggaactatgggttttggattgccagcggcaattggagtaaaagcagccttacctaattcagatgtaatttgtattgcaggagatgcaagtgtcttaatgaatattcaagaattaggaactttatctcaatatggtctaaaggtgaaattgattattatcaataatcgctggcaagggatggtaagacaatggcaggaaagtttctacgatgaaagatattcctcatctgatatgagttgtggtgaacctgattttgtaaaacttgctgagtcttttggagttaaaggatacttaatttctgatagaaaacaattacagaatgaattaaaaaatgcgcttgatcatgacggccctgctttgattaatatccttgtcagaagaggtgaaaattgttatccaatggttcctcctggtaaaagtaatgctcaaatggttggatatgttaattgtgaagactaa

SEQ ID NO: 232308 - DNA, 1248 bp, Unknown
  Bacterial polypeptide expressing nucleotide sequence isolated from the Sargasso Sea
tttgcatatttatgatgcgatctttaatcaaaaagaaatgcaacatattcttgttaggcatgaacaaggcgccactcatgctgctgatgggtatgcacgagctactggtaagcctggggttgtaatgctcacatctggtccaggagcaactaatgctattacaggtattgcaactgcatttatggactcaattccaatgattgttatatcaggccaagttcaaagtcatttaatcggaacagatgcatttcaagaaacagatatgatcggagtttctcgtcctattgtgaagcatagcttcacagttgaccatcaaagtaatatagcaaaaattattaaagaagctttttacatagcaacatcaggaaggcaaggtcctgtagtgatagatgtccctaaagatttaacaaacccggtagatttattcgaatataaatatccaagtgaagtaaatataagatcatacaatcctccaattgagccagaacaatctcagattgatagagctgtggaagcaataattaaatcaaaacaaacagttatttatgcaggaggtggcactatttcaagtaatgccgctaaggaactttttgaacttaatagttatataaatgctcctattacgaataccttaatggggttaggtgtatatcctgctagcgataaaaattttcttggtatgttagggatgcatggaacatatcaagcaaatatggctatgcataatgctgatcttataattgcaattggagctagatttgacgacagaataacaaatacgcctgaaaaatttgctcctaatgcgcaaattattcattttgatgttgatcattcgtctgtatcaaagattattgaagctgacatagcagtttttggtcaagttaaaaattctttacaagcaatgaacgctaaacttaaatcgagattgtcagaaattaatgattcaaggttagatgcttggcgtaatcaaatagcggaatggaaagaaatgcatggactcgaccatgatctatataagaataattcagatgatagtccaatactacctcaggcagtcgttcagcatatttatcatgcctctaatggcgatgcttttgtaacttcagatgtgggtcaacatcaaatgtttgctgctcaatattatcactttgatgagccaagaaaatggattaattctggtggtcttggaacgatgggttttggcctacctgctgcaatgggtgtgaaattagcatatccagaggaaga

SEQ ID NO: 232309 - DNA, 1741 bp, Unknown
  Bacterial polypeptide expressing nucleotide sequence isolated from the Sargasso Sea
atgacacgccaaatgacaggtgcaagaatggttgttcaggccttgaaagatcaaggtgtagatacagtatttggctatccaggtggagccgttttacctatttatgacgaggttttcttacaaaatgatattaggcacattttagttcgtcatgaacaaggagcagttcatgcagctgaagggtatgcccgttccacgggaaagccaggcgtggtgctcgttacgtccgggccaggcgctacaaatgctgtaacggggcttacagatgctctaatggacagtattccattagtcgtattaactgggcaagttccaacctttatgattggctcagatgcttttcaagaagcagataccgtaggtattacccgtccctgcaccaagcataactggttggtcaaagatacaaatgaactagctgaagtgatccatgaggcatttcatgttgctacctcaggaagacctggcccagtactagttgatattccaaaagatgtacaatttgccacttcagagtatattgagaagtctaaaatacctgtttctcattaccgaccgaaaaccaagggtaatccccaacaaatcgccagcttggtagatgctattgaaaatgctaaaaaacctttattttacactggtggtggcgtcattaattcaggcccaaatgccagtaaattattgagagaattggttgatggaaccaattttccgataacctcaaccttaatgggattggggtgttaccctgcttcaggtaagagatggctgggtatgctgggaatgcatggtttatatgaggcaaatctggccatgcatgattgcgatctaatgattaacattggtgctaggtttgatgacaggatcacaggcagacttgacgcatttagcccaaattccaaaaaagcgcatgtagacatagatccctcttcaataaataaggtgatacatgttgatatacccattattggtgacgttgaaagtgtgctcaaagatatccttaaactttggaaatctagaggacaaaagacaaatacttcagcagtgagcggttggtggaaacagatcgaagattggaagtctactaactgtcttgcatttaaccaaaaagggaaaacgatcaagcctcagtttgctattgctagactagaagagcttaccaaaaaatataaggaccgcttcatctccaccgaagtggggcaacatcaaatgtgggccgctcaatacttgggttttgaaaagccaaatcagtggatgacatcaggtggactagggacgatgggctatggatttccagcttctataggtgtccaaattgctcatccagaagctcttgttatcaatgtagctggagaagctagttggcttatgaatatgcaagaaatgggaactgctgtgcaatatagattgcctgtcaaacagttcatcttaaataacgaaagattagggatggttaggcaatggcaggagctattacatggtgagcgttattcacacagttggtcagatgccctacctgattttgtcaaattagccgaagcttttggcgcaaagggtattttatgtgacgatcccaaaaatttagatgatgcaataatggaaatggttgagtatgatgggcctgtgatttttgattgtcttgttgaaaagcatgaaaattgtttcccaatgataccatcaggagaaccccacaataaaatgttgttgggggaggcaagcactaaagatgcgattacatcttcag

SEQ ID NO: 232310 - DNA, 559 bp, Unknown
  Bacterial polypeptide expressing nucleotide sequence isolated from the Sargasso Sea
taaagcctacgtaagttctgacgtaggtcagcaccaaatgtttgctgcgctttattacccttatgataagccgcgtcagtggatcaactcaggtggtcttggcaccatgggctttggtttaccggctgcaatgggtgtgcagtttgcgcacccaggttcaacctctgtggtagtaacgggtgacggcagtattcaaatgaatattcaagagctatctacttgtttgcagtacaacctgcctatcaagattatctcattgaataaccgtgccctaggtatggttcgtcagtggcaggatatgatttacaaaggacgtcactcacactcttacatggattcaatgcctgactttgtgaagttggcagaagcttacggacatgtgggcattaaagtagacaagcttgacgagctagacgcagcaatggagaaatgtttcagttacacagatcgcttagtgtttatggacatagcagtagaccaaaacgaacacgtatatccaatgcaaattaagtttggcgcaatggatgacatgcgcttaagcaagacggagcgaacctga

SEQ ID NO: 232311 - DNA, 1768 bp, Unknown
  Bacterial polypeptide expressing nucleotide sequence isolated from the Sargasso Sea
aatgtctaaattatttactggtgcagaaatagtttttaaggccttagaggatcaaaaagttgattatatttttggttatcctggaggggccgttcttcctatttatgatgaacttaaaaaccacaaatcaataaaacatattttagcaagacatgaacaaggtgcaggacatgctgctgaaggttatgctagatcaagtggcaaaccaggcatcttgttagttacttctggtcctggtgcaacaaatgctgttacagctttaacggatgcatatatggactcagttccgttagtttgtatatctgggcaagtaccaactcatttaattgggactgatgcttttcaggaatgtgacacaactggtattactcgtccttgcacaaaacataattggttggttaaagatgttaatgatctagcgagagttttacatttagcttttgaagtagccacaacgggaagacctggtccggtattagttgatattccaaaagacattcaattcaaaaaagggaaatatagtttttctaaaagcactcttaagaaaaaacttaatggcagagctacacataaaatttcaaacaatgaattagataaatttattgatttattaaaaaaatcttcaaaaccaattttttatactgggggaggagtaattaattctgggcctcaagccagcgaatatttaagagagctagtatctttaacaggctttccaatcacttcaacattgcaaggactaggtgcttaccctggagatgatccacaatttttaggaatgttaggtatgcatggaacatttgaagctaataacgctatgcatgattgtgatttaatgattaacattggtgcaagatttgatgacagaattactggcaaggttgatgagttttcccctggatcaaaaaaaatacacgttgatattgatccatcctctataggaaaaaatataaaagttgacttagcgattgtaagtgatgtttctgagtttttaaaatcattaataaaacgatttaaagaaaaaaataaaaattttttaagttctaacaaacagaaaacatcgaaatggtggagcacaattgaaaaatggagagaaaagaaatctctaaactttattaatagtaacaaaataattaaaccacaacacgcagttcaaagactatatgagttaacaaaagacaaagacacatttgttacaactgaggttggtcaacatcagatgtgggctgcacaacattataagttcaataaacctaacagatggatgacctctggaggattaggtactatgggctatggtttaccagccgcaattggtgttcaaatagccaatcctggcaaattagtagtagatatagctggggaagcttcagttttaatgacgatgcaagaaatgtctacagcagtgcaatataagttgccaattaaaatattcattttaaacaatgaatacatgggaatggtcaggcaatggcaagaattgttgcatgaaaaaaactattctgaaagttataccgctgcactacctgattttgtaaaacttgctgagtcatatggatgcgttggtatgagagcaaaaactcctgatgagcttgacgaaaagataaaagagatggttaatatagacagaccagtaattttcgattgtttagttgataaagctgaaaattgttttcctatgataccttctggcaaacctcataatcaaatgattttaggacctgaagaagaggaagaaatttctgacgaaggaaagattctagtttaa

SEQ ID NO: 232312 - DNA, 847 bp, Unknown
  Bacterial polypeptide expressing nucleotide sequence isolated from the Sargasso Sea
tccatcatcaattaataaaattatcaaagtagatcttgcaatagttggagacgttacgagtgtaataagtaaaattaataaaacaattgctaaaagaaaaaatggtcacagcaagtcaaataaatcaaatatagctaagtggtgggaacaaattgaaaaatggagagaaaaggattctcttaattttgtgaatagtgatgaaagtataaaacctcaatatgccgttcaaagactttatgaattgactaagaataaagatacttatgttactaccgaggttggacaacatcaaatgtgggctgctcagcattataaatttaataaaccaaatagatggatgacatctggaggcttaggaactatgggttatggattgccagcagcagttggtgttcaaattgctcatcctcaaaaattagtagttgatattgctggagaagcatcagttttaatgactatgcaagaaatgtctactgcagttcaatataatcttcctataaaaatatttattttaaataatcaatatatgggaatggttagacaatggcaggaattactgcatgaaaaaaattattctgaaagttattctgaagcgttacctgattttatgaagatggcagaagcttatggatgtaaaggaattaaagcagacaatccagatgatcttgattataaaattcaagaaatgatcgattatgatggaccagttatatttgattgtcatgtggatcctaacgagaattgcttcccaatgataccatctggaaaacctcataaccaaatgatcttgggcccaaatgatcaagaggaaaataaaatcaaaggaaaaggcaaagccttagtataa

SEQ ID NO: 232313 - DNA, 1210 bp, Unknown
  Bacterial polypeptide expressing nucleotide sequence isolated from the Sargasso Sea
attgtttgaagcaagaattaaagcgaatcaaacacaaattgaagaagctatgaaattgattgttaatgcaaaaaaaccaatattttatattgggggaggttgcattaactcaggtccaaaagcatcaaaattagttagagaatttgtaaaagaaacaaaagctccagcaactatgacattaatgggtttaggaactttaccttcatctaacgaatattctttgggaatgttaggaatgcatggaatgtacgaagccaatttagcaatgcatgaatgcgatgtaatgataaatattggagcaagatttgatgatagggttactggaaggcttgatgctttttctccgaattcaaaaaaaatccatattgatattaatgcaagtaacattaataaaaatataaaagtagatgtaccaattgttggcgatattgaaaatataatgaatcaaatgttagaagtatggaagaaaaataaattttctactaataaaaaagacataagtgattggtggcaaaagatagatgaatggaagaaaattgattgtttaaaatttgaacaaacaggagaaattataaagccacaattagctataaaaagattatacgaattaacaaaggaaaagaacacaataataaccacagaagttgggcaacatcaaatgtgggctgctcaatattataagtttgaagaaccaaataaatggcttacttcaggaggattaggaactatgggatatggttttcccgctgcaatcggtgctcaagttgctaaccctgatgccttggttatagatattgctggtgatgcctctattttgatgaatattcaagaaatgagtacagctgttcaacatagactgccggttaaaatttttattttaaataatgaatatatgggtatggttagacaatggcaggagttattgcatggaggaagatattcagaaagttatactgacagtttaccagattttgttatgttggcagagagttataaagcaaaaggtttaagagctacaaaagtaagtgagttagataacgttatagaggaaatgataaaaagtgacaaaactgttatagctgatatttgggttgataaggaagaaaattgtttcccaatgattcaaagtggttcagctcataatgaaatgttattaaataaaggccaaaaacaagataaagaatctgctgagaaaggaaaaactttagtt

SEQ ID NO: 232314 - DNA, 1492 bp, Unknown
  Bacterial polypeptide expressing nucleotide sequence isolated from the Sargasso Sea
gattccgttccattagtttgtatttctggacaagttcctacacacttaattggaactgatgcttttcaagaatgtgatacaacaggaataactagaccatgtacaaaacataattggttagtaaaagatataaaaaatttagaaaagacaattcacaaagcatttgaagttgcgaccacaggaagaccgggaccagtcttggttgatattccaaaagatgttcaatttcaaaaaacaatttatacaaaatataaaaaacaaaaaaaattaaatggcaaaattaataatcaattttcacaaaaagacattgatgagttaataaaattaatgaacaatgcatctaagccaattttttatactggtggaggtgttgtaaactctggaccaaaagcaagtgaacttttaagagaattagtaaatacaactggctttcctataacatcaacattacaaggattaggatcctatcctggtgaagatagccaatttttgggaatgcttggtatgcacggttcatatgaagcaaataacgcaatgcatgattgtgatttaatgataaacataggcgcaagatttgatgatcgtataacaggaaagatcgatgagttctctcctaaatcaaaaaaagttcatattgatattgatccatcttcaataaacaagaatgttaaagttgatttgccaattgtaggcgatgttacagaagttattacttctacaattaaaacaataaaaaaaacaaaacctagttttgctaaatcaaataagcaaaaaatttcaaaatggtgggaaaaaattgaaaaatggcgatctgttaattcatttgattttattaatagtgatgaaactataaaaccacaatatgcaattcaaagactttatgagctaacaaaaaataaagatacttatataacaactgaagtaggccagcatcaaatgtgggcagcgcaacattataaatttaataaaccaaatcgttggatgacttcaggtggtcttggtacaatgggctatggtttacctgcagcagtaggcgttcaagttgctcatccaaataagttagttatagatatagctggagaagcatcagtattgatgactatgcaagaaatgtctaccgcagttcaatatagtcttcctattaaaatatttattttaaataatgaatacatgggaatggttaggcaatggcaagaattattgcatgataaaaattattctgaaagctatacagcagctttgcctgattttgtaaaacttgcagaggcatatggatgtgttggtattaaagctgaaactcctggtgagctggatgataaaataatagaaatgataaatactgacagacctgtaatatttgattgtagagtagataaacaggagaactgttttccaatgataccttcaggaaaacctcataatcagatgcttttaggtccaaaagatcaaaaagaaaataaaattactggcaaaggaaagactttagtttaat

SEQ ID NO: 232315 - DNA, 1660 bp, Unknown
  Bacterial polypeptide expressing nucleotide sequence isolated from the Sargasso Sea
gatgataagaggcgcagacgcggttataaaagtgttggcagcacatggtgttaccacagtatttggttacccaggtggtgccattatgccaatctacgacgccctctatggaagccctgtcgaacatctcttaagccgccacgaacaaggcgcagcctttgccgccgtaggttacgccagagccagtggtaaaactggcgtgtgctttgccacctctggcccaggcgccactaacttaattacttcgcttgccgatgcgctattggattcagtgcctgttgtcgctatcacaggtcaggtttcaaccgccgtgattggcacagatgcgtttcaagagattgatgtgttggggatgtcgctaagctgcactaagcacagttttatggtgacggatgtaaacgatcttatcccaaccttgtaccaagcttttgaaatcgccgcatcgggtcgacctggcccagtgctggtggatatccctaaggatatccaaatcgctcaccttgaataccgcactcccttgctagcggtaaccaatgaaccacaggcgagcgccagtgagattgaggcggctcgcgccctgttagcagcagctaagcaacctatgctgtacgtgggtggcggcgtcgggatggcgggggcggtcgatcagttgcgggattttatcaaagccacgggtatgccatcggtcgccacgttaaagggcttgggcagtattgcccatggtacgcccggttatttaggcatgttaggtatgcacggcggaaaggcggccaacctcgcggtgcaggattgtgatttattagtggttgccggtgcgcgctttgatgaccgagtaacaggccgtttagcgacttttgccaacaaggccaaagtcattcatttagatatcgacgccgccgagctaggcaaattgcgccagccggatgtggctatcgccggggatttacgccagattttccccgcccttgctatgtcgctggatatcactccttggcaagcagaggttgaacatcttgcccgtaaacatcaatgggattatcaacatcccggcagcttaatctacgcccccgctatgctgcgccgccttgctaataaactgcccgaagacagcgtagtgtgctgcgatgtgggtcagcatcaaatgtgggtcgcccagcacatgtggttccgccgccctgaagatcatttatccagcgcaggtttaggcactatgggctttggtttacccgccgctatcggtgcccaagtggctcgccccgatgcaactgtggtcacagtgtctggcgatggctcttttatgatgaacgtgcaggaactgaccaccatcaagcgccgcaaattaccggtgaagatcctgctgattgataaccaaaaactggggatggtgaaacagtggcagcagctattttttgaagagcgctacagcgaaactgatttatctgacaaccccgattttgtgttattggcctctgcatttgatattcctggccgcacgattttctcttccgacgaggtggaagaggccttaaccgaaatgttagcggctaagggcccgtatttgttacacgttgcaattgacgatgcttttaacgtttggccactggtgccccctggtgcatcaaacagcgatatgatggacgaaatggagaaacaaacatga

SEQ ID NO: 232316 - DNA, 1738 bp, Unknown
  Bacterial polypeptide expressing nucleotide sequence isolated from the Sargasso Sea
atgaagttagctggaaatgacatattaattcaatcgctcattgaggagggggttgagtatatttttggttatccaggaggagcatccctacatatttatgatgcaatctttaatcaaaaagaaatgcaacatattcttgtcaggcatgaacagggtgccactcatgctgctgatgggtatgcgcgagctactggcaagcctggggttgtaatgcttacatctggtccaggagcaactaatgctattacaggtattgcaactgcatttatggattcaattccaatgattgttatatcaggccaagttcaaagtcatttaatcggaacagacgcattccaagaaacagatatgattggagtttctcgtcctattgtgaaacatagcttcacagttgaccatcaaagcaatatagcaaaaattattaaagaagctttttatatagcaacatctggaaggcaagggccagtagttatagatgtcccaaaagatttaacaaatcctgtagatttatttgaatataaatatccaagtgaagtaaatataagatcatacaatcctccgattgaaccagaagactctcagattgatagagctatagaagcaataattaactcaaagcaaccagttatttacgcagggggcggcactatttcaagtaatgcctctaaggaactttttgaacttaatagttatataaatgctcctattacaaatactttaatgggtttaggtgtatatcctgccagcaataaaaattttcttggtatgttaggcatgcatggaacataccaagcaaatatggcaatgcataatgctgatcttataattgcaatcggagctagatttgacgatagaataacaaatacgcctgaaaaatttgctcctaatgcgcaaattattcattttgatgttgaccattcatctgtttcaaagattatcgaagctgacatagcagtttttggtcaagttaaaaattctttacaagcaataaactcaaaacttaaattgagatcatcagaaattaatgattccaatttagatgcttggcgtaaacaaatagagcaatggaaagaaatgcatggattagaccatgatttgtataagaataattcagatgatggtccaatattacctcaggcagtggttcagcatatttatcatgcttctaatggtgatgcttttgtaacttcagatgtaggtcaacatcaaatgtttgctgctcaatattatcattttgatgagccaagaaaatggattaattctggtggtcttggaacaatgggttttggtttacctgctgcaatgggtgttaaattagcgtatccagatgaagaagtaatctgcataactggagaaggaagtatacaaatgtgtattcaagaattatcaacctgcacgcaatataaattacccataaaaatatttaacataaataatctagctcttgggatggttaaacaatggcaggatatgaactacgatggaagacattcatcaattagctatgaagactcacttccagatttttcaaagttagtagaatcttatggtcatgtcggcataaaaattacaaaaaattctcaattaaaagcaggaattgaagaggcaatgtctattaaagataaattagtttttgttgatatatatgttgatccaaatgaacacgtttacccaatgctagttgctcccgatggcagtcttaaagacatgtggttaggtaaaggagaaaaaacatgat

SEQ ID NO: 232317 - DNA, 1648 bp, Unknown
  Bacterial polypeptide expressing nucleotide sequence isolated from the Sargasso Sea
gatgaacggcgcgcagtttttggtacaggctctcaagcaacagggtgtgactcaggtgtttggttacccgggcggggccatcatgccggtctacgatgccctgtatgacggtggcctggcccatcagctctgccgccacgagcagggtgccgccatggcggcggtgggttatgcccgcgcctccggtcaggtgggggtctgtatcgccacctctggtcccggcgccaccaatctggtgaccggtctggcagaggcgctgctcgattcggtgccgctggtggccatcagcggtcaggtgccctgcgccgccgtcgggaccgatgcctttcaggaggtcgacgtgctcggcatgtccctctcctgcaccaagcactccttcatggtgaccgatgtggccgatctgccgcaggtgatcgccgaagccttcgccatcgccagtgaggggcgcccgggccctgtgctgatcgacctgcccaaggatgtgcaactggccaaggtgccaacccagagcccgctgtttgcggtggcagagcccgagcatctgagccaggccgaactgacggccgcccgcaccctgctggccgccgccgagcgcccggtgctctacgtcggcggcggagtgggcatggccaatgccgagcggaagctgcgcgagtttgccgccgccaccggcatgcctgcggtcaccaccctcaaggggataggagcactagaccccgacagccccgtttatctcggcatgctcggcatgcacggcaccaaggccgccaactacgcggtgcagcagtgcgacttgctgctggtggtgggcgcccgtttcgacgacagggtgaccggcaagctggaggagttcgcccccgaagccaaggtgatccacctcgatgtggacgccgccgagttcggcaagcgccgcactgccgaggtgggcatcacccaggatctcaaacaggtgctgccgcgcctcgccatgtccctctccatcgacccatggcgtgagcactgcgcgaacatggcccgcgagtatgcctttcgctacgaccatcccggccagcccatctatgccccggcgctgctcaagcagctctctgcctggttgccggagaccagcgtggtggcttgcgacgtgggtcagcaccagatgtgggtggcccagcacatgcgcttcaccagcccgcgcaaccacctctccagcgctggtctcggcaccatgggcttcggcctgcccgccgccatcggcgccaagatgtcgcgcccggaggatgaagtggtgctggtgagcggcgatggctctttcatgatgaacgtgcaggagctcggcaccatccgccgcgcccagcttaaggtgaagatggtgctgctggacaaccagcgcctcggcatggtgcgccagtggcaggagctgttcttcgatggccgctacagcgagaccatcctctccgacaaccccgatttcatcgctctggctgccgccttcggcatccccggcgaaaccatcacatgcaaggatcagatagccggcgccctcgatcgcctgctggctagcgagagtgcctacctgctgcatgtggccatttcagaggaagaaaacgtctggcccctggttccgccaggagtcgccaaccaccagatgatggagcaacgcccatga

SEQ ID NO: 232318 - DNA, 1085 bp, Unknown
  Bacterial polypeptide expressing nucleotide sequence isolated from the Sargasso Sea
tgatgcttctgaagagttaactgccttggccaagcttttaaatttccctgttactaatactttaatggggttgggggccttccctggttctgacccacaatttatgggtatgctaggtatgcacggtacctatcaagcgaacatggctatgcacaatgcagatttaataattgctgtgggtgctaggtttgacgatcgaataactaatgaccccaagcaatttgctcttggagcaaaaaaaattcatatcgatgttgatgcagcatcagtttcaaagattattcatgcagatattccaattgttggttcagcaaaagagtgccttgcagctcttattaaagaaattaattctagggacctgcaactcaataattcagctatagcagagtggaatcaaaaaatatctgattggcgagataatcatggcttgaatcattctatgttggaacttggacctcaaaatggcaagattctgccccaacaagttgtacagtctctctacaaggaaactgaaggtcaggctttcatcacatccgatgtaggacagcatcaaatgtttgcagctcagtactaccattttgataaaccaagacaatggataaattcaggcggattaggaactatgggttttggcttgccatctgctatgggagtacagttagcttaccctgatgcaacagtagcctgtgtgactggtgagggtagcattcaaatgtgcattcaagagctttcaacatgcctacagtatggcctgccaataaaaataataaatattaacaatgcagctttgggaatggtaagacagtggcaagatatgcaatatggaggcaggcactcttcaagtacttacgaaaattcacttccagatttcgttgctcttgcggaatcatatgggcacgtaggtatcaaagtaacaaaatttgaagaactcgaatctgcaatgaaagaatgtatttccttaaaggaccgtttggtttttctagatgtcgatgtagatcctaatgagcatgtttatcccatgctagaagctggtaatgctatggatcatatgtggttaggaaaggaagaaaaaacctggaaatgaa

SEQ ID NO: 232319 - DNA, 1033 bp, Unknown
  Bacterial polypeptide expressing nucleotide sequence isolated from the Sargasso Sea
aatgaaagaaaatttaataaaaggtagcgaaatagtatgcaaagcacttataaatgagggtgtggatactgtctttggtattcctggaggagcaatattgccactttatgggactttaaataaatttcctgaaattaagcatattcttactaggcacgaacagggtgcatgtcatgcagcagatggttattctagaacaactggaagagtaggtgttgcatttgctacatctggtccaggagcaacaaatcttataactggtatggcaactgcaatgatggattctgtacctcttgttgcaatcacaggacaagttggaagaccggctattggaactgatgcttttcaagaaacagatataactggtgctacattacctgttaccaaacataattatttagttatgaaagcttcggatattggatctgtaattcacgaagcttttcatatagctcgaactggtaggccagggcctgttttaattgatattcctaaagatgtttttgatgagttagctgagtatgatttttcaaaggattctaagatcaatcttcctggatataatccatatcttaaggttgatcagaaccagattgaaaaatcagttgatctaataaataaagctaaaaagccaattattttagcaggacatggagtaattatttctagagcacaaaataaacttttagaactcgctgaaaaggctcagatccctgtagtaactacattacttggtatttctgcatttccagaagatcatattctttcaacaggtttcccaggaatgcatggaatggcctatgcttcaatagctcttgatgaagctgacttgattattgcaattgggtctagatttgatgatcgaattgttggtaatgcaaaaaggtttggaaaaaactctaaaaagattcatattgatatagatccagccgaaataaataagacagttaaggttgattctcctattataggagatataaatgaagttctagaattattgaatcctaaagtcaattctgaaactcatacttct

SEQ ID NO: 232320 - DNA, 1261 bp, Unknown
  Bacterial polypeptide expressing nucleotide sequence isolated from the Sargasso Sea
atgagtgaagaaaaattaagtggtgctgaacttgttgtaagaagtttagaatatatgaatatttctactatttttggcctacctggcggagcaatactgcctgcatatgatccgttatatgacagtccaataagacatatattagccagacacgaacaaggatctgggcacatggcagaaggttatgcccaagcaactggtgaacttggtgtagtaattgctacatctggaccaggagctactaatttgataacacccttaacaaatgcactaatggactctactccactattagcaattactggacaagttgcttcagaagcaattggaaatgatgcatttcaagaagcatatacagtaggtttgacaatggccgcaactaagcataattatttaattactaatgcagaagagattcctcagatattgctcgaagcaagacatattgctactactggtaggcctggacctgttttagtagatataccaaaagatatattaaatcaaaaagttgaatggattgaaccaaaattaattgatttgccaggatataaaccaactttagaaccaaatccaaaaatgattaatcaggcagcagatttaattaagaaagcagaaaaacccatactttatgttggtggtggaataatacattcaaaagcaaatgaagaattatttgagctcgctacaaaatttcaaataccagttgtaacaacattaatgggtagaggtgctttccccgatggaaatgaactatgttttgaaatgccaggtatgcatggaaactatacagccacaacttccatacaaaaatcagatctcttaattgccatcggtgtgaggtttgacgatagagtcacagctaatcctaaatttttcgcacaaaatgctaaggtaattcatgctgatattgaccctgctgaaattggaaaaataagagaacctgaagttccaattgtaggggatgctaaaagtgttatcactggcttaattgaaaggttagaagggtcagatttaaaaactactgattggataaacgaacttaatcaaatgaaaaaagattatcctttgtcatacatccaggaagaaaaaggcccacttaaggttccatttgttctggaagagcttcaaaaattatctgatgaagatgcaatagttgtctcaggagttggccagcatcaaatgtggatatcacaacattggaattttactcaacctaatacatggttaaattcaggagggctaggaacaatgggatatc

SEQ ID NO: 232321 - DNA, 1009 bp, Unknown
  Bacterial polypeptide expressing nucleotide sequence isolated from the Sargasso Sea
atcagttggactctacttggttcaggtgcggtgcctgctagccatccactaaacatgggaatgatggggatgcatggtgagtttgcagcaaataatgctattcataatgctgacctactaatagcatgtgggatgaggtttgatgatagggttacaggtaatacaaaaacatactcgcctaattcaaaaaaaattcacatagaagttgacccatcagaaataaataaaaatgtgaaagtagaccttgctctgaatggtgatcttaaatttattttaaataatttagttcctaaggtttcaaaaaaagaaaatacagcttggtttgatcagatttcttcttggcaaaatgagtctgcttcaagagacatcattaacatggatacggaagttttatacggtgctcaagttatcagcgatctttggaaggagactaatggtgatgctatcattgtgtcagacgttggacagcatcaaatgctcgaagcacagtattacaaacatgatgagccaaacaccctattaacatcaggcggcctaggaacaatggggtttagcttgccggcagcaataggagctagttttgcaaatagaaataaagaaatatgggttatcgttggtgatggaagtatccaaatgactattacagaattagcaacagcagttcaggaaaatacgaatattaaagtggcaataattaataatggttatttaggaatggttcggcagtggcagcaattgttttatgactctagatatagtgaaacacctattagtagtcctgattatgtcaaactttccgaagcatatggcctaaaaggtattagagtatgttctaggaaggagattcctgatgctataaaaaaagtaaaagaaattaatggaccttcaatgatcgagtttgtggttgaacaacatgatatggtctacccgatggtgcctgcaggtgccaatttagatgagatgataagcagaccagttcatgaacagtttgaagatgcagagatgtaga

SEQ ID NO: 232322 - DNA, 1696 bp, Unknown
  Bacterial polypeptide expressing nucleotide sequence isolated from the Sargasso Sea
atgttaattcaatctcttataaatgagggagttgaatatatttttggatatcccggaggagcagccttgcatatctatgattccattttcaagcaaagtgagatgcagcatattctggtaagacatgaacaaggtgcaacacatgctgctgatggttatgctagagcaactggaaagcctggagttgtaatggttacatcaggaccaggagcaaccaatgctataacaggaatagcaactgcatttatggattctatcccaatggttgtcatatccggtcaggttcaaagtcatttaattggaacagatgcttttcaagaaactgatatgattggtatttctagaccaattgttaagcacagttttacagttgatcatcaaagcaatattccccaaatagtaaaggaagcttttcatattgctacatctggaaggcaaggacctgtggtgattgatattccaaaagacctaacaaatccagacgacctatttgactatgaatatccagaagaggtaaatataagatcatataatcctccagtgaaaccagaagcaacacaaatagaaagagttgtggatgcaatttttaattcaaaaaaaccggtgatttatgctggtggtggaacaatttcaagcaatgcatcaaaggaactaatagaattaaatagttatataaatgttccagtaactaatacattaatgggtcttggagtatatccagcaactgatgataaatttatgggtatgcttggaatgcatggtacctatcaagcaaatatggcaatgcataatgctgatttaatattagcaattggagcaagatttgatgacaggattaccaatacccctgaaaaatttgcaccaaaagctcagatagttcattttgacgttgatcattcatcagtttcaaaaattattgaagctgatattgctgtctttggccaggtaaaagattctctgcaagcaataaatgaattaattaaagatagattatctgaattagatattacaaagtttgatgaatggcatgcacaaatctcgaaatggagatctgagcatggattgaatcataacttatataaagataattcagatgaaaatccgattcttcctcaggctgcagttcaacacatatatcaagagtcaaaagggaaggcttttgttacctctgatgtaggtcagcatcaaatgtttgctgctcagtattatcattttgatgagccaagaaaatggataaattctggtggattaggaaccatgggctttggtttaccatctgcaatgggtgtcaaactagcgtacccagatgaggaggtaatatgtattactggagagggtagcattcaaatgtgtattcaggagttgtctacatgctcacaatataagttgcccataaagatttttaatataaataatcttgctttgggaatggttaagcaatggcaggatatgaattatgacggtcgccattcatctattagttatgaggattcattaccagactttaaagaattggtggagtcttatggacatgttggaattaagatcacgaaaaattcagatcttaagaaaggtattgaagaggcattttcgataaaagataaacttgtatttgttgacatatatgtagatcctaatgagcatgtctatcctatgttagtagcaccaaatggaaagcttaaaagatatgtggtta

SEQ ID NO: 232323 - DNA, 304 bp, Unknown
  Bacterial polypeptide expressing nucleotide sequence isolated from the Sargasso Sea
atggaaaaaagtatgactaaattaactggcgcagaggtgatactgaaggttttaaaagatcattcagttgatcatatttttggatatcctggtggtgctgttttgccattatatgatgagatattcaaaagcaatgactcacctagacatattttagtaaggcatgaacaaggcgctgcacatgcagctgaaggatatgctagatcaacaggaaaacctggagttttagttgtaacatctggacctggagctaccaatgctgttactggattaactgattgcatgatggattcattcctctagt

SEQ ID NO: 232324 - DNA, 969 bp, Unknown
  Bacterial polypeptide expressing nucleotide sequence isolated from the Sargasso Sea
aaaacaacgcgatgcatgactgcgatttattaataaatattggagctagatttgacgatcgaattactggcaagatagatgaattctctcctaaatcgaaaaaagttcacattgatattgatccatcgtcaattaataaaattataaaagtagatctaccaattattggagatgttgctgatgtaattgaattaacaactaaaaccttaaagaaaaaaaatcttaatttagaaaaatctaataaacaaaaaatttcgaagtggtggcaaacaattgagaaatggaaaacaaaagactctcttaattttataaatagcgataagataattaagccacaacatgctgttaaaagactttatgaattaaccaaaaatcaggatacttttataaccacagaagttggtcaacatcaaatgtgggcagctcaacattataaatttgataaaccaaatagatggatgacttcaggcggactagggactatgggctatggtttgccagctgctgtaggtgtacaactagcacatccaaaaaaattagttgttgatattgctggagaagcatcagttttaatgactatgcaagagatgtctacagctgttcaatataatctacctattaaaatctttattttaaataatcaatatatgggtatggttagacagtggcaggagctactccatgagaaaaattactcagaaagttatactgaagctttacctgatttcgtaaaattagctgaggcttatggatgtgttggtattagagctcaaaatccagatgaattagatgaaaaaattaaagaaatgataaatatagataaacctgtgatctttgattgtctcgtagatcaagctgagaactgttttccaatgataccttcaggaaaacctcataatcaaatgttgctaggtccaaaggatcaaaaagaaaataaaattactggtaaaggaaaagcgttagtttaat

SEQ ID NO: 232325 - DNA, 1264 bp, Unknown
  Bacterial polypeptide expressing nucleotide sequence isolated from the Sargasso Sea
tcaaaaacaaaatataacagaccaaaaaaagaaaaaaaacttaacggtaaatcacacaaccattttaatcaaaatagtattgatgaattaattgaattaatgagtaaatcgtcaaaacctattttttatactggtggtggagtaattaattctggacctaaggctagtgaacttttaagagaacttgtttatgccacaggttttcctatcacatcaactttacaaggattgggatctttcccaggggatgataatcaatttttaggaatgctaggtatgcatggaacttatgaagcaaataatgcaatgcatgattgtgatttgatgatcaacattggtgcacgtttcgatgataggataacagggaaaatagaagaattttcacccaaatcaaaaaaagttcatattgatattgatccatcatctattaataaaaatgttaaagttgatttagctattgttggagatgtgaaaaccgttctgtcatctacattaaaaagtttaaaacaaaaaaaatcaaaatttttaaaatcaaataaacaaaaaacttctaaatggtgggaaaaaattcaaaaatggagatcagttagatctttagattacattggaagtgaagagactataaaaccccaatatgcaattgaaagattatacgaattaactaaagataatgactcatatattacaactgaggttggacagcaccaaatgtgggctgcacaacactataaatttaacaaaccaaatcgttggatgacctccggtggtttaggtactatgggatatggtttgccagcagcagtgggtgtacaagttgctcatccaaaaaaattagttattgatattgcaggagaggcttcagtattaatgacaattcaagaaatgtctacagctgtacaatacaaccttccaattaaaatatttatcttgaataatcaatacatgggtatggttagacaatggcaagaacttttacatgataaaaattattctgaaagttatactgctgctctaccagattttgttaaattagcggaagcatacaactgtgttggtataagagcaaaaacaccagaagagttagacgataaaattattgaaatgttaaatacagatagacctgtaatttttgattgtatggttgataaagtagaaaattgttttccaatgataccatcaggaaagcctcataatcagatgattttaggaccaaaagaccaagatagtaagaaaattaccggtaaaggtaagtccttagtttaat

SEQ ID NO: 232326 - DNA, 1447 bp, Unknown
  Bacterial polypeptide expressing nucleotide sequence isolated from the Sargasso Sea
atttaatggtaccgatgcatttcaagaatgcgatacacccggaattactagaccttgtactaaacataactggttagtcaaagatgttaatgacttagctaaaataatgcataaagcttttgaggtagcaccaacaggcagaccagggcctgttttagttgatattccaaaagatatacaatttcaaaaagctcaatataaaaattatagaaagttaaaaaaattaaatggaaagtctcataacaaatactcacaaaaaaatattgatgaattaattagtttaataagtaaagcaaaaaaaccaattttttataccgggggaggagtaattaattcaggtacaaaggcaagcgagcttttaagagaaattgtttatgcaacaggttttccaataacttcaactttgcaaggtcttggttgttttcctgctgatgataatcaattcttaggaatgttaggtatgcatggaacctacgaagcaaacaacgccatgtattcatgtgacttaatgataaatgttggtgcaaggtttgatgatagaattactggtaagattgatgagttctcacctaagtctaaaaaagttcatattgatatagatccatcctcaataaataaaaatgtaaaagtagatttagcaattgtgggagatattaagtcggttttaacatcaacactaaaaactttaaaaaaatctaaaaataatttttctaaatcgaacaaacatcaaatatcaaattggtgggaacaaattcagaaatggagatctaaaaaatcattagactacattggtagtgaagaaactattaaacctcaatatgcgattgaaagattatatgaactgactaaagataaagatacatatataacaactgaagtaggccaacatcaaatgtgggctgctcaacactacaaattcaataaaccaaatagatggatgacttctggaggtcttggtacgatgggatatggattgccagcagcagttggagtccaaattgctcatcctaagaaattagtaattgatattgctggcgaggcgtctgttttgatgactatgcaggaaatgtcaactgcagttcagtacaatttgcctataaaaatatttattttgaataatgagtacatgggaatggtaagacaatggcaggaattactacatgataaaaattattcagaaagttacacagctgcattaccagattttgttaaaatggcagaagcttatggttgtgtaggcataagagcaaaaacacctgaagaattagatgataagattattgaaatgttaaatacagatcgaccagtaatatttgattgccttgtagataaacaagaaaactgttttccaatgataccttctggaaaacctcataatcaaatgttacttggtcctaaagatcaaaaagaaaaaaagattactggaaagggtagaacactggtttaa

SEQ ID NO: 232327 - DNA, 805 bp, Unknown
  Bacterial polypeptide expressing nucleotide sequence isolated from the Sargasso Sea
aatgtctaaattatatacaggtgctgaaattgtattcagatgtcttgaggatcaaggagtagattttatttttggttatccaggtggtgcagtgttaccaatttatgatgaattaaaaaatcataacactatcaaacatattttagttagacatgaacaaggagcaggacatgctgcagagggatatgccagatcatcaggaaaaccaggtgttgtacttgtaacttctggacctggcgctaccaatgttgttactgcattaacagatgcatatatggactctgttccactagtttgtatatcaggacaagtgccgacacatctaattggcactgatgcatttcaggaatgtgacacaactggaattacaagaccatgcacaaaacataattggttagtcaaagatattaaagatttatcaaaaactcttcatgaggcttttagagttgcaacaacaggaagacctggaccagttttagttgatatacctaaagatatccagtttgctaaaataggttattcaaaacctaaagctgaaaaaaaactaaatggaaaatcgttaaatcattttttgcaaaaagacattgatactttgattggtttaatgaataaatcgaaaaaacctgtcatttattctggtggtggcgttattaattctggaccagaggcaagtaatgttttaagagaacttgttgaacttacaggttttccaatcacctctactttgcaaggtctgggagcatacccaggcgatgataatcaatttttaggcatgcttggtatgcatggaacttatgaagctaat

SEQ ID NO: 232328 - DNA, 244 bp, Unknown
  Bacterial polypeptide expressing nucleotide sequence isolated from the Sargasso Sea
gatgtctaaaatttattcaggtgcagaaatagtatttaaatgtcttgaagatcaaggtgttgaaaatgtatttggatatcctggtggtgcagttcttcctatctacgatgaacttaaaaatcatcaatctgtaaaacatattttagtaagacacgaacaaggtgcaggtcatgctgctgagggatatgcaaggtctacaggaaaaccaggtgtagttttagttacttctggtcccggtgcaaca

SEQ ID NO: 232329 - DNA, 1570 bp, Unknown
  Bacterial polypeptide expressing nucleotide sequence isolated from the Sargasso Sea
tatgagcacaaaccctaaatctactgaagattctaaccacgagataacgggagccgaaatttttgttaaaagtcttgcagccgaaggcgttgatactatattcggatatcctggcggtgctgtattgcatatctatgatgaattatataaacaaacagatgttaatcatatattagttagacacgaacaaggagctgttcatgcggcagaaggctatgctaaatcatcagacaaaccgggggttgtaatagttacttctggaccaggtgcaactaatgcgattacggggatagctgatgcttatatggactctgttccaattgtggtttttactggccaagtaagaacagcattgatagggaatgacgcctttcaagaagttgatacagttggtattacaagaccgtgtgtaaagcacaactttatgatcactgatgtgaaaaaaatggctgagacaattaaaaaagcattttatattgcttcgtcaggtagacccggcccggttgttgttgacataccaaaagatatcactgagcaaaaatgtaaattcgaatatcctaatgaagtaaatattagatcttaccaaccatatgccgatatagaagataataagattaaagaaatcatcgacgctattaaggattctaagaaaccaataatttattctgggggtggtgtaattacaagtaatgcttcaaatgaacttacagagtttacaaaacttttaggttacccaataacaaatacgctaatgggcttaggagcttacccaggaaatgataaacaatttattcaaatgttaggtatgcacggttcatatgaggcaaatatggctatgcatgattgtgatttaatgattgcaataggcgcaagattcgatgatagaataacaggaagattggatatgttcagtccaaactctaaaaaaattcatattgatattgacccatcttcaatttctaaaaatattcgagttgacgtctctgtgattggagatgtaaaaaaagtattaagtcttttgataaaaagtatcaaggaaaataaactagaacatccaaacattgaattatggtggaaggaaattgaaacatggaggaaaaaaaattcattttcatacaagcaagacgacaaaattattaaaccacagtttgttgtagataaattatatgaagtaacaagcggtgaggcatttataacttcagatgttgggcaacatcaaatgtgggcggctcaactatataagtataagtatcccaaaagatggattaattctggtggtttaggggccatgggatttggtctgccatccgcaatgggcgttcaaattgctaatccagattctttagtgtgctgtgttacaggtgaggcaagtattcaaatgtgtattcaagagttatcaacctgtcttcagtatggattacctataaaaattattaacttaaataatagatacatgggaatggttagacaatggcaagaattttttacaagggtagatatgcaatgtcctatatggatgcattacctgattttgttaaacttgcccaaagttatggtcatattggcgtga

SEQ ID NO: 232330 - DNA, 1178 bp, Unknown
  Bacterial polypeptide expressing nucleotide sequence isolated from the Sargasso Sea
aatgttaactggtgcagaattaataattagaacccttgaacatttaaaaatttctacggtttttggactcccaggtggtgcaatattacctgcttatgatcctttgtatgacagccctataagacacatattagcaagacatgaacaaggcgctggccatatggccgaaggttatgctcaagctacaggagaacttggagtagtaatagcaacctccggacctggtgcaacaaacttaataacatcattgaacaatgctttaatggattcaacccccttgcttgcaataactggacaagttgcaacagaagcaatcggcaacgatgccttccaggaagcttacacagttggcttgaccatctcagcaacaaaacataattatctaattactgatgttaaagaaattcctcagataattcttgaagctaagcatattgcaacatcaggtagacctggccctgttttagtagatattcctaaagatattttgaatgacaaagctagctgggtagaacctaagttagaagaactaccaggatataaaccaactttagaagccaacccaagaatgatccaacaagcagtggaattaataaaaaattctaaaaaacctattctatatgttggtggtggaataatacattcgaaagccaatcaagaattgtttgagttgtctacaaaatataatatacctgtagttacaactctcatgggtagaggagctttcccggatggcaatgatttatgtataggaatgcctggtatgcatggtaattatacagctactacctctatacagaattctgacttacttattgctctaggagtaaggtttgatgaccgagttaccgcaaatcctaaattttttgctcaaaaagctaaagttatccatgctgacatagatcctgctgaaatagggaaagtaagagaacctgaagtacctattgttggagatgcaaaaagtgtaattaaaggattaattgaaacattaggagatacagaagtagatacaaaagattggcttaaagagataaaagaaatgaaaaaaaattatcctttaagttacaaccaagaagaaaaaggtccacttaaagttccatatgttctagaagagctacaaaaaatgtcagaagaagattccattgttgtttctggagttggtcaacaccaaatgtgga

SEQ ID NO: 232331 - DNA, 1717 bp, Unknown
  Bacterial polypeptide expressing nucleotide sequence isolated from the Sargasso Sea
tatgttgattcaatcccttattaatgaaggggttgagtatatttttggttatccaggcggcgctgctttacatatttatgacgcaatcttcaaacaaaaagaaatgcaacatattttagttaggcatgaacagggtgcaacacatgctgcagatggatatgccagagctacaggcaagcctggagtagtaatggttacctcagggccaggtgcgacaaatgcaataactggaattgcaactgcatttatggactcgattccaatgattgttatttcaggacaagtacaaagtcatttgattggaacagatgcatttcaagaaactgatatgattggcatttctagaccgatagtgaaacatagctttaccgttgatcatcaagaaaacattcctaccattgtaaaagaagcatttcatatagctacatctggaagacaaggccctgtagtaattgatatccctaaggacttaactaatccagatgagttatttgattatgaatatcctaaaaaagttagcataagatcatacaatccacctgtagagcctgagcaaaatcaagttgatagagttatatctgctctaaaggagtctaaaaggcctgttatttatgcaggaggaggaactattgcaagtaatgcgtctgatgaattgagagagttaaatagttacattaaggtacctgtcacaaatactttgatgggtttgggtgtttatcctggaactgataaatattttcttggaatgcttggtatgcatgggacatatcaagctaatatggcgatgcataatgctgatttaattcttgcaatcggtgcaagatttgatgacagaataactaatactccatcaaaatttgcacctaaggctaaaatagttcattttgatgtcgatcattcgtctgtatcaaaaattatcgaagcagatattgcagtttttggacaagtaaaaaattctttgcaagcaatcaatgaaaagctcaaattagaatctgaagagtttgatgaaggaagatttactgattggcataatcaaattgcagattggagaaaatctcatggattaaatcatgaactttatcttgaggttgatgatagtaaacctgttcttcctcaagcagccgttcaacatatttatcaggcttctgaaggaaaagcatttgtgacatcagatgttggacaacaccaaatgtttgctgctcaatattatcattttgatgaaccaagaaagtggataaactctggtggtcttggaacaatgggatttggattaccttctgcgatgggtgttaagttggcttaccctgatgaagaagttatttgtataacaggtgagggcagtatacaaatgtgtattcaagaactttcgacctgttcacaatataaactacccataaagatttttaacattaataatcttgctctcggaatggtaaaacaatggcaagacatgaattatgatggaagacattcatcaattagttatgaagattcattacctgatttctccaagctagttgaatcctttggacatgttggcattaaaattacaaaaaattccgagctcaaagaaggaattgaaaaagcgttatcaatgaaagataagttagtttttgtagatatttacgttgacccagatgaacatgtttatcctatgcttgttgctccaaatggaagtttgaaagacatgtggctgggcaaaggaaataaaacatga

SEQ ID NO: 232332 - DNA, 886 bp, Unknown
  Bacterial polypeptide expressing nucleotide sequence isolated from the Sargasso Sea
tatgtctaaattaattacaggcgccgaaatagtttttaaagctttggaagatcaaaaagttgaatatatttttggatacccaggtggagctgtacttccaatatatgatgaacttaaaaatcataaatccataaaacatattttagctagacacgaacaaggggctggccacgctgctgaaggttatgcaagatcgagtggcaaacctggagtgttacttgtcacttcaggccctggagcaacaaatgcagttactgctttaacagacgcatacatggactcaataccattagtttgtatttcagggcaagtgccaacacatttaattggtaccgatgcatttcaagaatgtgatacaacaggtattactcgaccctgcactaagcataattggcttgtaaaagatgtaaatgatctttcaagaattttacatttagcttttgaagttgcaacaacaggtagaccaggcccagttttggtagacatcccaaaagatattcaatttaaaaaaggtaaatataaatttacaaaaaatactttaagaaaaaaacttaatggtaaagcttcttataaactatctaacaaagaattagacaagtttatcgaactgataaaaaaatcatcgaaaccgattttttatactggtgggggagttatcaactccggtcctgaagccagtaaatatttaagagaacttgtttctctaactggttttccaattacatctactttacaagggctcggagcgtacccaggtgacgacccacaatttttaggaatgcttggaatgcacggaacttttgaagctaataacgcaatgcatgattgcgatttaatgattaatataggagcaagatttgatgatagaataacgggggaaggttga

SEQ ID NO: 232333 - DNA, 1016 bp, Unknown
  Bacterial polypeptide expressing nucleotide sequence isolated from the Sargasso Sea
tgataatcaattcttaggaatgctgggaatgcatggaacgtatgaagcaaataatgcaatgtatgaatgtgatttgatgatcaatattggtgcaagatttgatgataggattacagggaaaatagatgagttttctcctaaatctaaaaaagttcatatcgacatagatccgtcatcgattaataaaaatgttaaagtagatcttgccattattggagatgttaagtcagtaattacatctactttgaaaactttaaagaaatcaaaagcaaattttataaaatctaataaacaaaaaacatctaagtggtgggaaaaaattcaaaaatggagatcaaaaagatctttagattatattggtagtgaggaaacaattaaacctcagtatgcaattgaaagattgtatgaacttacaaaagataaagatacttttataactactgaagttggacaacatcaaatgtgggcagcgcaacattataaatttaataaaccaaatagatggatgacatctggaggattgggcactatgggatatggtctgcctgcagcggttggagttcaaattgcacatccacaaaagctagtaattgatattgcgggagaagcatctgtattaatgacgatgcaggaaatgtctactgctgtacaatatagtttgccaataaaaatatttattttaaataatgaatacatgggaatggttcgacaatggcaagaattgcttcatgacaaaaattattctgagagttatactgcggcattacctgactttgtacagatggcagaggcatatggatgtgttggtattagagctaaaacacctgaagaattagacgataagatcatagaaatgctaaatacagacagacctgttatttttgattgtttagtcgataaacaggaaaattgctttccaatgataccttctggcaaacctcataatcaaatgattttgggtccaaaagataagaaagagaataaaattacaggcaaaggaagaacgctcgtttaat

SEQ ID NO: 232334 - DNA, 1240 bp, Unknown
  Bacterial polypeptide expressing nucleotide sequence isolated from the Sargasso Sea
gcccgctccaccggcaaggtgggcactgtgctggtgacctcgggtcccggcgctaccaactgcatcacggggatcgcgaccgcctacatggactccatccccctggtgatcctgtccggccaggtgccgaccagcatgatcggggaggatgcattccaggagaccgacatgatcggcatctcccgcccggtggtgaagcacagcttcctgtgcaagaaggccagcgacattcccgacgccatcaagaaggcctattacattgctgccagcggccgcccggggccggtggtggtggatctgcccaaagacgtgcagaacccgaaagagaagtttccctatcagtatcccgagacggtgtccctgcgctcctacaatccgaccaagtcgggccacaaggggcagatcaagcgggccgccaagctgctggtggaggccgagcgcccggtgatgttcgtcggcggcggtgccatcaatgccaatgcggatcacctggtgaccaagctggcggagctgttgaacctgccggtgaccaccaccctgatggggttgggggccttctccggcacccatccgcaattcatcggtatgctggggatgcacggtaccttcgaagcgaacaagacaatgcacaacgcggatctgatcttcgccgtgggtgcccgcttcgatgaccgagtcaccaacaacgtggccaagttctgccccaacgccaccatagtccacatcgacatcgatcccacctccatctccaagacggtgcaggcccatgtacccatcgtcggctcggtggaaaccgtgctggaacagatgctggaagtgatccgcgagtgtggtttcgacaacgacaagcaggtactggcggactggtggagccagatcggccagtggcgctcgcgcaactgcctggcctacgagacccaccccaccctgatcaagccgcagcaggtgatcgagaccctctacaaggtgaccaagggggaggcgttcgtggcctccgacgtgggccagcaccagatgtttgccgccctctactacccgtttgccaagccgcgccagtggatcaactccgggggcctgggcaccatggggttcggcattccggccgccatgggcgcccagtttgccaacccggatgcggtggtctgctgcgtgaccggcgacggttcggtgcagatgaacattcaggagctctccacctgcatgcagtacggggtgcccatcaagatcatctccatcaaca

SEQ ID NO: 232335 - DNA, 1129 bp, Unknown
  Bacterial polypeptide expressing nucleotide sequence isolated from the Sargasso Sea
tcagaagaagagatcaacgaagcagtacaactaattaatgacgctaaaaagccagtcattatagcaggccatggtgctttaatctcacatgctcacaatgaagtgattgaattggctgaaaaatgccaaattcccgtcataactaccctgctcggcataagcacattaccaactgaccattttttgaacctcggtatgcctggaatgcatggtatggcatacgccagtatagccatagaagaatctgacacattgatagctttgggaatgcgcttcgatgaccgagttactggcaaactcgaagcattcgcaccaaacgccagagttttacatgtcgatatagatccttctgaacttggcaagaacataaaaccacatgtaggaatacaaggagatctcaaaacagtacttaaccaactgattcctgcagtcgataataatataaatgtagattggatgaatcgaattgaacaattacgatccgaacatccgtctttgaacattcgagaaacatccgaattacttcctcaatatgtattgaaggaactagccaaagaaaccaatcaagaggctattattgttactggtgttggacagcatcaaatgtgggctgcgcaattctgcgaattcagttatccgaatagctgggtcacttctggcggtctagggactatgggattcgaagttcctgctgctcttggagcaaaagtaggacaaccagacaaagctgtgtggtcaatagcgggagatggtggtttccaaatgactttcccggaattagctacagctgttgaaaataatattgatgtcaagtttgctatcctaaacaataataacttgggaatggtaaaacaattacaagatctatcatatgatagcgaatatactgctacccaatacgcaggaaatccagactttgtaaaaatagcagaagcttatgggatcactggcatcagggtgaccgataaagctgaagtctcttcagctatacaaacagctatcaatacccctggaccagtcattgtggaatttatagttagacaggaagaaaatgtgtatccatttattccttcgggccaaacagtcaatgacatgattgaagaacctcaaccagagataaaagtatagt

SEQ ID NO: 232336 - DNA, 868 bp, Unknown
  Bacterial polypeptide expressing nucleotide sequence isolated from the Sargasso Sea
tgctttttccccaaattcaaaaaagatccatattgatattgatccttcttctatgaataagacagttccagttgatgtttcaattgttggcgactgtgcccatgcaattgaaggaattttgttaaaatggaaatccaaaggaataagggtaaatattgataattggatggaacaaattgaaaaatggagaagtaaaaaatcactaaactataaaaaggcttctgatgtaattaaaccacaatatgctgttgaaaggttatatgaattaacaaaagaaaaggatacatatataactactgaagtagggcaacaccaaatgtgggcggctcaatactacaaatttgatgaacctaatagatggatgacttcgggtggacttggaaccatggggtatggtttacctgctgctatcggtgttcaagtagctcatccaagtagtttagttattgatatcgctggtgaggcatcaatattaatgaatatacaagaattatcaacagccgttcaacacaaactgcccgttaagatttttatattgaataatcaatacatgggaatggttaggcagtggcaagagttattacatggcggaaggtattcccattcatatacagattctttacccgacttcgtaaaacttgctgaagcttatggatgcctaggtgttagagcattaaaacctgatgaacttgaccataaaataattgaaatgattgattataatggccctgttatttttgattgtgttgttgaccaagatgagaattgttatccaatgataccttccggagcagctcataatgaaatgttattgggtgagagcgatgataatcccgaagtttctgatgaaggaaaggttttgatttaa

SEQ ID NO: 232337 - DNA, 1177 bp, Unknown
  Bacterial polypeptide expressing nucleotide sequence isolated from the Sargasso Sea
gttgattaaactaatgtcaaaagctaacaaaccaattttttacacaggtggtggagttattaactctggacctaaagctagtatgttactaagagagttagttcaagcaaccggttttcctataacttcaactttgcaaggattaggatcattccctggagatgataattcttttttaggtatgcttgggatgcacggaacatatgaagcaaacaatgctatgcatgattgtgatctaatgattaatattggagcaaggttcgatgatcgtataactggaaaaatagatgaattttcgcctaagtcgaaaaaagttcatatcgatattgatccatcatcaataaataaaaatgtaaaagtagatttaccgattgtcggtgatgttcaagatgttatttcatctactataaaaactataaaaaaaactaaacctaattttgcaaattctaataagcaaaaaatttcaaaatggtgggaaacaatacaaaaatggagagaaaaaaaatctttagattatgttaatagtactgaaaccattaaacctcagtatgcggttcaaagactgtatgaactgacaaaaaataaggacacttatattacaactgaggtaggccagcaccaaatgtgggcagctcaacattataaatttgataaacccaacagatggatgacctctggaggacttggaaccatgggatatggtttgcctgctgcagtcggtgttcaaattgctcatccaaaaaaattagtaattgatatagctggcgaagcatcagttcttatgacaatgcaagaaatgtcaactgctgtgcaatataaccttccaattaaaatatttattttaaataatgaatatatgggaatggtaaggcagtggcaggaattattgcacgataaaaattactctgaaagttatacggcagcattacctgactttgttaaattagccgaggcctatgggtgtgtaggaataagagccactaatccaagcgaattagacgataaaattatagaaatgttaaatacagatagaccagttatatttgattgcttagtagataaacaagaaaattgtttcccaatgataccttctggtaagccacacaatcaaatgttactaggcccaaaagatcaagagcaaaacaaaataactggaaaaggtaaaactttagtttaa

SEQ ID NO: 232338 - DNA, 1537 bp, Unknown
  Bacterial polypeptide expressing nucleotide sequence isolated from the Sargasso Sea
cctggcgccacaaatgcagtgactgctttgacagatgcttatatggattctgttccactggtatgtatttctggacaggttcctactcacttaataggaacagatgcatttcaagaatgtgacaccacaggaataacaagaccttgcactaaacataattggctagttaaagatgtaaaagatttagaaaaaacaattcacaaagcttttgaagttgcaacaacgggaagaccaggacctgtattagttgatattccaaaagatgttcagtttcagaaaacaaattatacaaaattcaaaaagcaaaagactttaaacggcaaagttaatagtcaatttacccaaaaagatattgatgagttaataaaattaatgagcaaggcatcaaaaccaattttttatactggtggaggtgtaataaactctggaccaaaagcaagtgaacttttaagagaattagttaacacaactggatttccaataacatctacactgcaaggattaggcagttatcctggtgaagatagtcaatttttaggcatgttaggtatgcatggatcatatgaagctaacaatgcaatgcacgattgtgacttgatgataaacattggagctaggttcgatgatcgaataacaggaaagatagatgaattctctcccaagtcaaaaaaagttcatatcgatattgatccatcttcaattaataaaaatgttaaagttgatttgccaattgtaggtgatgttactgaagttattacctcaacaattaaaactataaaaaaagtaaaacctaattttgcaaaatcaaataaacaacagatttctaaatggtggcaacaaattcaaaaatggagatctattaattcatttgattttgttaatagtactgaaagtataaaaccacaatacgcagttcaaagactttatgaactaactaaaaataaagatacctatataacaactgaagtaggacaacatcaaatgtgggcagctcaacattacaaatttgataaacctaatcgttggatgacttcgggtggacttggtacaatgggatatggattgccagcagcagttggagttcaagttgctcatccaaataagttggtaattgatattgctggagaagcgtcagttttgatgactatgcaagaaatgtctactgcagttcaatatagtttacctattaaaatatttattttaaataatgaatacatgggaatggtcaggcaatggcaggaattattgcatgataaaaattattcagaaagttatactgccgctctacctgactttgtaaaacttgcagaagcgtatggatgtgtaggtatcagagctgaaacaccagcagaattagacgacaaaattatagaaatgattaataccgatagaccagtaatatttgattgtagagtagataaacaagaaaattgttttccaatgataccatcaggaaaaccacataatcaaatgcttttaggaccaaaagaccaaaaagaaaataaaattacagggaaaggcaagactttagtttaat

SEQ ID NO: 232339 - DNA, 658 bp, Unknown
  Bacterial polypeptide expressing nucleotide sequence isolated from the Sargasso Sea
tggtgcaagatttgatgatcgtattactggaaaaattgatgagttttcacctaattcaaaaaaagttcatattgatattgatccatcatcaattaataaaattattaaagtagatcttgcaatcgtgggtgacgtaacgaaagtaattgataaagtaaataaaacaattgccaaaaagaaaaatggcaatggtaaatcaaataaatcaaatattgcaaaatggtgggaacaaattcaaaaatggagaagtaaagactctttaaattttattaatagtgaagatagcataaaacctcagcatgctgttcaaagactttatgagttaacaaaaaataaagacacttatgtaacaacagaagtgggtcagcatcaaatgtgggctgctcaacattataaatttaataaacccaatagatggatgacttcaggaggattaggaactatgggttatggattacctgcggctgttggagttcaagtagctcatccagaaaaattagttatcgatattgctggagaagcctcagttttaatgacaatgcaagagatgtctacggctgttcaatacaacctaccaataaagatatttattttaaataatcagtacatgggaatggtaagacaatggcaagagttactcatgaaaagaattatctga

SEQ ID NO: 232340 - DNA, 1122 bp, Unknown
  Bacterial polypeptide expressing nucleotide sequence isolated from the Sargasso Sea
tatgaagttagccggaaatgatattttaatccaatcgcttattaatgagggcgttgaatatatttttgggtatcctggaggagctgctcttcatatctatgattcaattttcaaacaaaaagagatgcagcatattcttgttagacatgaacagggtgcaactcatgcagctgatgggtatgcaagagcaacgggaaaaccgggggtagttatggttacatcaggaccaggtgcaacaaacgccattacaggaatagctactgcatttatggattcaatacccatgattgtaatatccggccaagtacaaagtcatttaattggaactgatgcttttcaggaaacagacatgattggaatttcaagacctattgtaaaacatagtttcacggtagatcatcagagtaatattgctcaaatagtaaaagaggcttttcatatagcaacatccggcagacaaggcccggtagtaatagatattcccaaagacctaactaatccggatgatttatttgattatgaatatcctaaagaggtcaatattagatcttataacccacccctagatcctgaactttcacaaattgagagagttgtcgaagcaatattaaatgctaatcaaccagtaatatatgctggtggtggtactatttctagtaacgcctctaaagagttgatagagcttaatagttatataaactttccagttacaaatactctcatgggtctaggagtttatccagcaactgatgataagtttctgggaatgctcggtatgcatggaacttttcaagctaatatggcgatgcataatgctgatttaatattagctattggagcaagatttgatgatagaattactaatacaccagataaatttgcacctaatgcacaaatcgttcactttgatgttgatcattcatctgtatctaaaatcatagaagctgatattgctgtttttggacaagttaagaattctcttcaagcaattaactcattaatcaaagaaagattaaacgatatagataactccaaaatccaaaaatggcactctcaaattgctgaatggaaaataatcatggccttaatcatgatctttataaagataaatcagatagcaaa

SEQ ID NO: 232341 - DNA, 616 bp, Unknown
  Bacterial polypeptide expressing nucleotide sequence isolated from the Sargasso Sea
ttaaaggttccttttgtactagaagagttacaaaaactagccgacgatgatgcaattgttgtttcaggggttggtcaacatcaaatgtggatatcacaacattggaattttacgtcccccaatacctggttaaattctggtggtttaggaacaatgggttactccttaccagcagctattggtgcaaaagctgcctatccagatcgtcaaattttagctttagatggtgatggatgtttccaaatgacatgtcaagaattgatcaccgcttcaactgaaaatattcctataaaaattgttgtttttaacaatggaaatcatggaatggttagacaatggcaaaaaatattttataaaaatagattctctgcatcagaattaacacaccatacgcctgactatgttgcccttgcagaatcaatgggggctacaggattaagaatgattgaaaaatctgatgtaaaaaaagtttttgaaaaaatgttagaaattgatgacaaacctgtccttgtagagtgcatagttgatccagaagatatggttttccctatggttccagcaggaggaagtaacgatgttgttattctaaatgaggatgatctaaagaaattatgag

SEQ ID NO: 232342 - DNA, 1754 bp, Unknown
  Bacterial polypeptide expressing nucleotide sequence isolated from the Sargasso Sea
tgcagaagaaggtgttgaaaccatttttggttacagtggcggagcgattttgccaacctatgatgaagtcttcaaatacaatgaggccaacccaaaaaatccaatgccattgattgttccctcaaatgaacaaggtgctggttttatggcatcagggtatgcaagatcaacaggtaaaccaggagtggttatggtcacatcaggtccaggtgcaaccaatactgttacacctgtgagggatgcgatggccgattcaattcctatggtcatcatatgcggacaagtcagcagagcagcaatcggtagcgatgcttttcaagaagcgccaataagcagtgtaatggggtcagtggctaaacatgtttttctgataacaaatgagaataagttggccgcgacattaaaggctgcatttgaagttgcaagatctggaagaccaggccctgtcgttgttgatataccaaaagacatacaaactgcagaaatctctgatgaagatcacgaggaagccaacattgctgcctatgccaatagaatatcggccattgaagaatctcgactgagtgaagaaaaatcatcggaattttttgatcatctctccaattcaaagaaacctctcatctattttggtggaggggtcatctctgcaaatgcttcagaggaactcagagaatttgttgatcactttaatctgcctgcggtatcaactttaatgggcttgggtgcggttgatacgcaacatcgctcttccctacatatgttaggcatgcatgggacgccttatgcaaattatgctgttcaagaaagtgacttcttaattgcaatcggctctcgctttgatgatcgtgttgcaggtgttcctgataaatttgcacccaaggcgaaagtgattgctcattttgatgtcgatgcatcagaaattaataaagttaagaatgccacttggtcccatcttggttttctatctctggcattaaaagatctcataaagcatgcaaaaaataataatcttgagtttaattttgatgattgggttgatcatacccaaaaattaaaatcaaaatatcctctcaacttcaatcgatcttctgaactgattcagccagaacatgtcattgaatgcatcaataaaattacaagaggaaatgcgattgtcacaactggcgtaggtcagcaccaaatgtgggcagctcagtattttgactttaaagaaccgaggctttggcttacatcaggtagcatgggaaccatgggctttggtattcctgctgcaattggtgctcaatttgcacatccagagaaaaccgtcatcgatatcgatggagatggaagcataagaatgaatttgggagacttggaaaccatcacaaactatgacttaccagtcaaagtactgcttctaaataactcaggcgatgggatggtaaagcaatggcaaaaactttattacggcggtcgcttatcagcaagtgacaaaacacttcacacaaaagacttcattatgtcagcaaaatcagatggctttcagtttgcagaaaaattgaccgatcaatcaaaagtagaagaaacaattgagcgattcatcaattttgagaaggcggcatttcttgaggttgtcatcgatcctgatgcaatggtttttccaatgattgggcctggaatgtcatatgatcaaatgatcacggggccatttatggaaggcaaggatcctgatcctgaaattgatggaaacgatcctaagtctatgttttgac

SEQ ID NO: 232343 - DNA, 1318 bp, Unknown
  Bacterial polypeptide expressing nucleotide sequence isolated from the Sargasso Sea
agctctggtagacctggtcctgttttaattgatattcctaaagatgttcagtttgcaaagtcaaaatacatatcaaagaaagacatcagttttagagagcacagaattaaagctggttccaaaaacgtagataaaaattttgtcaaagaactattaaaccacattaaaaaatctgagagacctatattttatgttggtggtggttgtttaaattcaggtcatcaagctagtcaagagcttattaaactcgtaaacaaaaccaatattccaattacaacaactcttcatggattgggatgctttccaggtgaggataaaagttcacttgggatgttaggtatgcatggaaattacgaagctaacttggcaatgaacaaatgtgatttgatgattaatgttggagcaagatttgatgaccgtgttacaggcagattagatgctttttcaccggactctataaaattccacatagatattgatcaaagttcaattaataaaaacgttaaagtcaattttcatactaatactgacattgctctaacactcaaagaaattaacgcattcatagactccaataacattgattttggcgataaagattatgataattggtggggtcaaattaatgaatggagaaaaaaagaatgtcttcattacgaacaaggcgatgaagtgatcaaaccacaacatgctatatccagactttacgaattaacaaaacaaaaagacacttttgttactacagaagttggtcagcatcaaatgtgggcagctcaatattataagttttcaaaaccaaacagatggattacatcaggtggtttaggcacaatgggtttcggtatgcctgccgcagttggtgcacaaatggcaaatccagactcactggttatagatattgctggtgaggcatcttttcttatgaacattcaagaaatagctacagctgttcaatataagttacctatcaaaatttttatcctaaataatgaatacatgggaatggttagacagtggcaggaactattacatggtagtagatattcagaaagttacgtagatgcccttcctgattttaaaaaattagcagagagtttcaatgctgttggagttagggcaaaaaatatttctgagttagatgacacaattaatgaaatgatttcaattgataggccagttattgcagatatttgggtcgataaaaaagaaaattgttttcctatgataccaagtggagctgcgcatcacgaaatgttgttatctaaatacgataaagaaaatcccgaaaatcaagaaaaaggaaaagtactagtttaat

SEQ ID NO: 232344 - DNA, 334 bp, Unknown
  Bacterial polypeptide expressing nucleotide sequence isolated from the Sargasso Sea
atggcaaaatcagtaaccgtacgtgctccttgctctactgcaaatttaggtccaggatttgatgtgtttggcatggcactagatgcactatatgataatgtaattctaacaaaaaaaggaaagggagttgtcatagtaagttcagataatattcctcttagtccatcaaaaaatactgcgggattagtagtatctgcaatgaaaaagaagttcaagataaaagatggtatagaaattaaaattaaaaaaaatgttcctgcaggatttggtatgggaagtagtgcagcatcagctgctgcatgtgcagtaggtcttaacaaattatataattgaa

SEQ ID NO: 232345 - DNA, 228 bp, Unknown
  Bacterial polypeptide expressing nucleotide sequence isolated from the Sargasso Sea
aatgggcaattatcaatatttaaataaagtgaattttccttcagacataaaaaatttgtctatagaaaaactaaaagtcctttcaaaagaaataagagaagagatgattgatgctgtttcttttacaggtggacatttaggtgcgggcttaggcgttgtagagcttactgtagcacttcatcatgtatttgatacacctaatgataaattaatatgggatgttgggca

SEQ ID NO: 232346 - DNA, 202 bp, Unknown
  Bacterial polypeptide expressing nucleotide sequence isolated from the Sargasso Sea
atggattatgatcttttagataaaattaattttccatcagacttaagagaatttaaaaagaaagatctaaagcaaatctcagaggaattaagagctaaaaccattgagactgtttcaaaaactggtggtcatcttggtgcaggacttggtgttgttgaattaactgttgcaaatcattatgtgtttaatactcctccatgat

SEQ ID NO: 232347 - DNA, 207 bp, Unknown
  Bacterial polypeptide expressing nucleotide sequence isolated from the Sargasso Sea
aatggaaaatttactttcacatatcaacaatccaaacgatttgaagaaactttctgcaaatcaacttcctcaattagccaaagaattgcgagatttcatcatagatgttgtttcgcaaagagaaggacatttgggtgcaagtcttggagttgttgaattaactattgctttacattatgtattcaatactcctaaagatttattagt

SEQ ID NO: 232348 - DNA, 229 bp, Unknown
  Bacterial polypeptide expressing nucleotide sequence isolated from the Sargasso Sea
aatgcaaaattacaaatatttaaataatattaattttccttcagatataaaaaaactcaacaatgaagaattaaaagttctatcagaagaagtaagaagcgaaatgattgatgctgtttcaaaaacaggtggtcatctaggtgcaggtttaggtgttgtagaattgacagttgcacttcatcatgtttttgacacacctaaggacaaattgatatgggatgttggtcat

SEQ ID NO: 232349 - DNA, 196 bp, Unknown
  Bacterial polypeptide expressing nucleotide sequence isolated from the Sargasso Sea
atgagcaataattacaaatttctaaataatattaatttccctgatgatgtgagaaaattatcacaatctgatattaaaattttggcagacgaggttcgacaagagttaattgacgttgtttctgaaacaggagggcatttaggtgctggactaggagttgtagaattgactgttgtcttgcacttatatatttaac

SEQ ID NO: 232350 - DNA, 244 bp, Unknown
  Bacterial polypeptide expressing nucleotide sequence isolated from the Sargasso Sea
aatggcaaacaataagttattaaataatgtaaattttccatctgatatcaaaaagttatcaactcaagaattaaaaacattgtccgaagaacttagacaagaaatgatagaagcggtctctcaaacaggaggtcatttaggtgccggcttaggagtggtagaacttacagttgcccttcatcatacttttaatactcctaacgataaaattattttgggatgttggtcatcaatcttatcctca

SEQ ID NO: 232351 - DNA, 264 bp, Unknown
  Bacterial polypeptide expressing nucleotide sequence isolated from the Sargasso Sea
aaccactggaccgcgatgcggtgctccacgtggcggacgagcatgaactgctggtcaccctggaagagaacgtcattgcgggcggcgcgggtagcgcagtgaacgagctgctcaacgcggaaggcgttcaggtggaagtgctgaacttaggcctgccggacgcctttgtggaacacggcacccccgccgagctattgcgcgactgcggactggatgctgccggcatcgaagcagccattcgttcgcgcctgccgtcgccttgag

SEQ ID NO: 232352 - DNA, 210 bp, Unknown
  Bacterial polypeptide expressing nucleotide sequence isolated from the Sargasso Sea
aatgaaaaaaaaatataaatatttagatactattaattttccatctgatattaaaaaactttcacaatctgaattgaaattattagcagatgaagtaagagaagaaattattgatgcggtttcagaaactggtggtcatttaggtgctggtttaggtgtggtagaactaactgtggcattacattatatctttaatacaccaaatgacaa

SEQ ID NO: 232353 - DNA, 514 bp, Unknown
  Bacterial polypeptide expressing nucleotide sequence isolated from the Sargasso Sea
gggccattttgcattcgatatcctagggggaaaaggtgttcaaaaagaatggaaaacagtcatgaagtcaattcctgtaggtaaaggaagaaaattaaccgatgggaaagatctagcaatcttatctattggacatcctggtaattttgctcaagaagcaattcaacaaatgaattcggaagatattagcatcgctcattacgacatgcgttttgtgaaacctcttgatggaataatgcttcatgaaattttcagcaaatacgataaaataattactattgaagatggttgcttaatgggaggatttggatcggcaattatcgaatttatgagtgataacaattattcagcatctattcatcgccttggaattcctgataaatatataaaccatggaactcaaaaagagctttgggaagaatgtgggtttgatactaactcaattagtaaaaaaataaatgaggtccttcatttaagtgaaagaaaaaataaagtaaataaaaaaattggatag

SEQ ID NO: 232354 - DNA, 532 bp, Unknown
  Bacterial polypeptide expressing nucleotide sequence isolated from the Sargasso Sea
catgactccctctgatgagaatcttacttggaaaatgttaaacacaggatttgattacaaaggaccagtttcaataagatacccaagaggttcaggtcctggttctaaagtagaaaaagataattccactctagaattaggtaagagcacactaattaaagaccctcaagattcacgaatagcaattatgaactttggtagcactttggaactagcaaggtcattatcaaaaaaatatgatgcttgtttggttgatatgaactttgtaaagcctttggatcatataagaatcaaagaattggccaaaaaatatcaattattaattactattgaagaaaatgctgtcaaaggtggtgctggatcggcagtagccgaattcctagtagatagtaacctaaaaacttcccttcttaattttggtatttctgatgagtttgtggaacatggtagtcctgagcatcaaaaagtaagctctggtttaggcaaagaagaaattactgaaaagattaatagaagattagaagagctgtag

SEQ ID NO: 232355 - DNA, 649 bp, Unknown
  Bacterial polypeptide expressing nucleotide sequence isolated from the Sargasso Sea
tggaccaacgcatgcaggttcttttgatattacatatttatcaactttaccaaattttgtggttatggccgcaagcgatgaggcagaacttgttaaaatgattaatacttcaataaatattaacgatcgtccttcagcttttagatatcctagaggaaatggagttggaataaacttgccttcaattaatgaaactttagaaattggaaaaggtagagttattcaagagggtaaaaaagttgctttactaaatttcggtacacgtatggcgcaatgtaaggaagcctctgaaaatttattaaagaaaggtataacgtgtacaattgtagacgcaagatttgcaaaacctttagatgaaaagttaataatggaagtagcttcaaatcatgaagctttaattactattgaggaagggtccattggaggttttggctctcatgttatgcaatttttatccgatcgaggagtatttgataagggccttaagtttagatctatgattttaccagatatttttatcgatcaagatactccagaaaaaatgtacgaaacagcaggtctagatagcaaatctattgcaagcaaggtcgaagaaattttaaattcaaatattattttagctaaaagtaaaaataaaaatattaattaa

SEQ ID NO: 232356 - DNA, 193 bp, Unknown
  Bacterial polypeptide expressing nucleotide sequence isolated from the Sargasso Sea
ttgggcaagggatctaaaaccccgttgctagataccgttaaattacctgcggatcttagggacctagaggaaaatcaattaggtcagcttgcagatgagctgcgagcggagactattgacgtcgtgtcaactacaggtggccatttaggtgcggggctgggtgtcgtcgagctgacagtggcgcttcactata

SEQ ID NO: 232357 - DNA, 514 bp, Unknown
  Bacterial polypeptide expressing nucleotide sequence isolated from the Sargasso Sea
gaagaggcatggcagatgttcaatacaggctatgattataaaggtccagtggcaattagatatccaaggggtagcggaataggtatcgactttaaaaagagtgaagaaaaattggaaattggcaaaagtcatacagttttagactctgacaagaaggaagtagctattttctcatttggcacccttttagattctgcagtgaaagccagtaaaaagtttgatgcaaaggttgttgatatgagatttattaaacctttagatcataaaatcattgaggaggtaagtaaggactataaactagttgtaactattgaagataatgtaatcgccggtggagctggctctgcagtaaatgaatatttattggggttaaataccaacgtaaaagttttaaatctgggtttgccggacgaatttattgagcacggagatcaggagcaacagaaagtcctaaatggattagataaatcaggtatagagaaatctatagaggaaaagttaaaactaatctgac

SEQ ID NO: 232358 - DNA, 579 bp, Unknown
  Bacterial polypeptide expressing nucleotide sequence isolated from the Sargasso Sea
ctagtagtgaaatagagcttataaaaatgataaaaacatctgcattgatagatgatttcccatcagcttttcgttacccaagaggagctgtaaataaaattgaagttaaagatcaaaatgaaattgagatagggaaaggatgcattattgcagaaggagagaatgtggccatacttaatcttggatcaaaattagaaacttgtctagaggcaagtagagttttgtctgaaaataatgtaaaacttacaattgctgatgcacgatttgcaaaaccactagatacagaacttattgatatgcttgttgaaaatcataaatatttgataacaattgaagaaggatcgattggtggttttgcatctcatgttttaaattatatctataatgtgagagctaaaagaactacaacagttgtcaaaaatatattttttcctgataaatttgtagatcatatgacttcccaagaacagtacaatgaaataaagatggatgtaaattctattgttaacaaaattaaatatctaaataatgataaagtaattgaaatgaaaaactttaatttgaataaaaataactaaa

SEQ ID NO: 232359 - DNA, 601 bp, Unknown
  Bacterial polypeptide expressing nucleotide sequence isolated from the Sargasso Sea
atgtcgactatccttccaacaattgagtcaccgcacgaccttcagggactttctcccgacgagcttgaaaatcttgccgcagaaatgcggcaagcgttgtgccaagttgctgcgagtagaactgcacactttgcatcgaatttgggagtggtcgaactttgcctagcgcttcaccgtgtttttgactttagcaaagaccggctcatctgggacactggccaccaaatctatccccacaaacttatcacggggagatacaacaggttcgacacaatccggactcgtggtggtcttatgggtttcccaaacccttctgaaagcccttacgacttattcatgaccggccatgctggctgcagcgtgtcggcggctcttgggctcgccagtggagactcgctacaaggacacgatgatcgccatagtgttgcggtcattggagacggcgccctcccatccgggattgtttttgaagcgctcaacaacgctggttttttgaaaaagcgtctcattatcatcctcaatgacaacagaatgtcgatctgcccacgggttggcgctttggcagagtaccttgatgtggttcgaactaatccttggtacc

SEQ ID NO: 232360 - DNA, 227 bp, Unknown
  Bacterial polypeptide expressing nucleotide sequence isolated from the Sargasso Sea
aatgagcagtaattacaaatttttaaacaatgtcaattttccaagtgatatcagaaaattatctcaatctgagataaaagttttggctgacgaggtcaggcaagaattaattgacgttgtttcagaaactggtggacacctaggagctggtcttggagttgtagagctcactgtggtcttgcattatatatttaatactccacatgataaattaaatttgggatgtt

SEQ ID NO: 232361 - DNA, 235 bp, Unknown
  Bacterial polypeptide expressing nucleotide sequence isolated from the Sargasso Sea
tatgtttttaaataatattaattttccaaaagatataaaaaaattatctcagaaagaattaaaaatattagctcaagaggtaagagaggagatgattagcgcagtttctgaaacaggaggtcatttgggtgctggattaggtgtagtagagttatctgttgtattgcattacgtcttcaatacaccaaatgataaacttatatgggatgttggtcatcagtcttatccacattaa

SEQ ID NO: 232362 - DNA, 244 bp, Unknown
  Bacterial polypeptide expressing nucleotide sequence isolated from the Sargasso Sea
aatgataaaaaaatacgaattcttaaatgacattaattttccttcggatctaaaaaagattcctgaagcaaaattacaaaaagtggcagatgagttaagagaggaaatgattgacgcggtatcagttaccggtggtcatctaggagcaagtttaggagttgtagaattaagtgtagcattacactatatttttaacacacctaatgataaattaatatgggatgttggtcaccaatcttatcct

SEQ ID NO: 232363 - DNA, 240 bp, Unknown
  Bacterial polypeptide expressing nucleotide sequence isolated from the Sargasso Sea
aatggcaaaatcagtaaccgtacgtgctccttgctctactgcaaatttaggtccaggatttgatgtgtttggcatggcactagatgcactatatgataatgtaattctaacaaaaaaaggaaagggagttgtcatagtaagttcagataatattcctcttagtccatcaaaaaatactgcggggttagtagtatctgcaatgaaaaagaagttcaagataaaagatggtatagaaattaa

SEQ ID NO: 232364 - DNA, 656 bp, Unknown
  Bacterial polypeptide expressing nucleotide sequence isolated from the Sargasso Sea
ccgcgcaggtcttgtttgtgcagacggtcctacacatgccggatcttttgatataacctacttatcaaccttacctaattttgtagttatggctccaagcgatgagtcggaattagttaaaatggttaatacttcagttgacattaatgataaaccttcagcttttaggtaccctcgtggaactggtattggaattaaacttcctgaaatccatgaaaaaattgaaattggaaaaggcagggttattaaagaaggtaaagaaattgctttgattaactttggtgcccgtttgcaagaatgccaaaaaactttaaaaaatcttgaaaaaaaaggtttaaatcttactttgattgatgcaagattttgtaaaccactagatgaaaatttaatgtggaatacagcaaaaaatcatgaagttgttatttcaattgaagaaggttcaattggaggttttggatctcatttaagtaaatttttatcagaaaaaggcttattagaaaaaattaaatttaggtcgatgacttttcctgataagtttattgatcaagataaacctgatctaatgtatcagattgctggcttggatagcaaagctatcgaagaaaaagtttatgaggttttggactctaaagttgttgttcagaaaaaaaattaag

SEQ ID NO: 232365 - DNA, 692 bp, Unknown
  Bacterial polypeptide expressing nucleotide sequence isolated from the Sargasso Sea
agctttaggcatggatgaagcctctaaacatcaaaaaaataataagaacatattttctgtcataggtgatggtgcaatgacagccggaatagcatttgaggctatgatgcatgcaggacacttgaataataatctaaagattattcttaatgataatgatatgtccatatcaaagaataaaggtggtctatcagactatcttgctaaaatatgggcatcaaaatcatataaaaaacttaaatctagcggtaaaaaagttcttaaaaatctgccttatgggcttcatattacaagaaatcttaaagatgggattaagtctgcagtgatgccaggaaatttatttgaagatctagggcttcattatgtggggccaatagatggtcatgatattccacttttaataaaaacaattaatagaatgatggaaaaaaatgagccatatttgctacatgttattacaaaaaaaggtgctggttttgaacctgctgaaaatgaaagaattaaatttcatgcaatttcaaaaatagaaaatactccagctcctaaaaaaactaaattccaagatatttttggagattggttatgttataaagctaaacaagatagcaaattggtaggaataactcctgcaatgaaagaaggttctggaatggttaattttgaaagggaatttccagagagattttatgatg

SEQ ID NO: 232366 - DNA, 247 bp, Unknown
  Bacterial polypeptide expressing nucleotide sequence isolated from the Sargasso Sea
atgcaaaattacaaatatttaaataatattaattttccttcagatataaaaaaactcaacaatgaagaattaaaagttctatcagaagaagtaagaagcgaaatgattgatgctgtttcaaaaacaggtggtcatctaggtgcaggtttaggtgttgtagaattgacagttgcacttcatcatgtttttgacacacctaagggacaaattgatatgggatgttggtcatcaatcataccctcataaa

SEQ ID NO: 232367 - DNA, 262 bp, Unknown
  Bacterial polypeptide expressing nucleotide sequence isolated from the Sargasso Sea
ttgaaagtttttaaagaaataccggttgaaaaacctaatacccctttattagattcagttacttatccttctgatttaagatctttttcaataaatgaacttgaaactcttgcaaacgaattaagagagtttttgttgtattcagtaggtcaaagtggcgggcatttaggcgggggactaggggtaattgaacttacaataatattgcatcatctttataaaactccttatgataatcttgtgtgggatgttggacatcaag

SEQ ID NO: 232368 - DNA, 172 bp, Unknown
  Bacterial polypeptide expressing nucleotide sequence isolated from the Sargasso Sea
aatggcaaaatcagtaacagttcgtgcaccgtgctctacagcaaatttaggtccagggtttgatgtgtttggtttggcactagatgcattttatgacgaagtaactgtaactaaaaaaggaaaaggaattacaattgttagctcagatgacattccactagaaccagaacaa

SEQ ID NO: 232369 - DNA, 193 bp, Unknown
  Bacterial polypeptide expressing nucleotide sequence isolated from the Sargasso Sea
tatcctcataaaatattaactggtaggaaaaataaaattagaacactaagaaaagggaggggattgtctggttttacaaaaagatcagaaagcgagtatgatcctttcggtgctgctcatagttctacttctatatcttcggcattaggaatggctgtttgctataaatgtcaaataaatctgataatgtaat

SEQ ID NO: 232370 - DNA, 456 bp, Unknown
  Bacterial polypeptide expressing nucleotide sequence isolated from the Sargasso Sea
catgaaagaaacacagtttttagaccatttaaattttccagcagatattaaagagcttagtatagacaatcttgatattttagctcaggaaataaggcagcgacttctagaaattggagatagatgtgggggacatttagcatcaaacttaggcgttgttgaattaaccatggttcttcattctttatttgacagtccaaaagataaatttttatgggatacatctcatcaagtatatgttcataaaatgttgacaggtcgactgaatgagattttttctattcgtcaagaaggaggactgtcgggtttcgcaaaaatttctgaaagtgatcatgatacctttggtgctggacatgcttctactgctctgtcagccgctttaggggttgcgcatagccgagatctccaagatgaagattataatgttattgccgtttttggggatgcatccttgtc

SEQ ID NO: 232371 - DNA, 818 bp, Unknown
  Bacterial polypeptide expressing nucleotide sequence isolated from the Sargasso Sea
aatgacctggctaaccacacccgctgcgacagaacatcccggtcaactcctcaaacaacttttacaaaaaaaagaaatccttcgtgttcccggagcgcataatgctttgacagcactgctggcaaaggaagccggtttcgatagtgtttatctttctggaggggcactctccgcgagtcttggcctgccggatctaggcgtcatgatgcccgatgagttattaatggtggttcgttcaatctgcagagcctcaaaacttcccttaatagttgatggagatacgggttatggtgaagccttgaatgttatgcgtttaattcaggatttagaaatatctggtgccgcagcagtgcagctagaggaccagttgctgccaaaaaaatgcgggcatctatctgataagcttctcaactcaaaagaggatatggcggcaaagatttctgcagctaacgcggctcgatctaatcttcaaataattgcaagaacagatgctgcggcatctgaaggacttgacgcagcgattgaccgagcaaagtgttatatcgaagccggtgccgacatcattttcccggaagctcttactacggaacaagaaatggaaaagtttaataaggaaataaattttccaaccttagccaacatgaccgaatttggaaaaactccgtatttgtcagcaaaaaaattcgaagaactgggctttgatattgttatatggccagtaacctcattacgttgcgaagctgccgcgatgaagcagctttttagtcatctgaaagaatatggagggcagggggcttatttagataaactaatggaga

SEQ ID NO: 232372 - DNA, 151 bp, Unknown
  Bacterial polypeptide expressing nucleotide sequence isolated from the Sargasso Sea
agctgatggcccaactcatgcaggttcctttgatattacttacttatccactcttccaaattttgttgtaatggcagcaagtgatgaagcagaattagtaagaatgataaatacttcagtatatattaacgatagaccatctgcggtttag

SEQ ID NO: 232373 - DNA, 491 bp, Unknown
  Bacterial polypeptide expressing nucleotide sequence isolated from the Sargasso Sea
aatggcaaaatcagtaaccgtacgtgctccttgctctactgcaaatttgggtccaggatttgatgtatttggcatggcactagatgcactatatgataatgtaattttaacaaagaaaggaaagggagttgttatagtaagttcagataatattcctcttagtccatcaaaaaatactgcggggctagttgtatctgcaatgaaaaagaagttcaagataaaagatggcatagaaattaaaattaaaaaaaatgttcctgcaggatttggtatgggaagtagtgcagcatcagctgctgcatgtgcagtaggtcttaacaaattatataatttgaaattgacagatgcagaactagttgaatttgcaggaattggtgaaaaggctagtgcaggaacaatacattatgataatgttgcagcatcagcgttaggtggattcgtaatagttaagacaaaaccattgcacgtagtcaaaattcaaccgccaaatg

SEQ ID NO: 232374 - DNA, 922 bp, Unknown
  Bacterial polypeptide expressing nucleotide sequence isolated from the Sargasso Sea
aatggtaaaatcagtaactgttcgtgctccttgctctactgcaaatttgggaccagggtttgacgtatttggtatggcattagatgcgctatatgataatgtgatattaacaaaaaaaggaaaaggagttgttattgtaagttcagataatattccattaaacccatcaaaaaatactgcaggattagtagtatctgcaatgaaaaaaaaattcaaactaaaagagggaatagagattaaaattaagaaaaatgttccggcaggatttggaatgggaagtagtgcagcatctgctgcagcttgtgcagttggtatgaacaaactatacaatttgaaattaagtgatgcagaattggttgaatttgctggaattggtgaaaaagctagtgcaggcacaatacattatgataatgttgcagcttcagcattaggcggttttgtaatagttaaaacaaaacctttgcaggtagtaaagatgcaacctccaaatgacttggttttgtgcgtagcagtaccagaattgaaggtgcctgcaaagaaaactaaagtttcaagaggcgcaattccaaaaaaagtttcattatcagatatggtgaaaaacatctcaaatgcgtcaggaatagttgcaggtttttcacaaaaaaattcagaattagttggaagatcagtgcaggatgtaattgttgaacctgcaagaaaacatatgattcctggatttgataaagtgaagaagaatgctttagctgcaggagcatatggagttacaatcagtggtgcaggaccatcagttattgcatttacagacaagaaacatgattcaaagaaaatttctaatgcaatgaaacgtggattcaaagctgcaagaaaggaatccaaagtttttgtttgtaaaccaagtaaaggtccagtaatcagaaggtaa

SEQ ID NO: 232375 - DNA, 301 bp, Unknown
  Bacterial polypeptide expressing nucleotide sequence isolated from the Sargasso Sea
aatgaaagtttttaaagattttccaactgaaaggcctgtcactagattcttagataatattgagtctccagaagatttaaaaaaacttacaattgacgagcttgaaattttagcagatgaattaagagaatatttgctttattcagttagacaaacaggtggacattttggtgctggacttggagcaatagagattaccattgctttgcattatctattagatatgccttctgacaagattgtttgggacactggacatcaagcataccctcataaaatattaactggggagaagagataa

SEQ ID NO: 232376 - DNA, 1367 bp, Unknown
  Bacterial polypeptide expressing nucleotide sequence isolated from the Sargasso Sea
tttgtttatcaccacttttttatttgcagataaaccaatcacaggtaaaaatattattaacttagaatatgctacgcagccagctttaaatagtgacggttcaagaattgcctatgttcgtattgtttcccctgaagaaggttcaaagagtagaagttcattcagagaaatttgggtggttgatggcgatgggagcaatcaaagaaaatttacttctgctcctataaatagctggtccccacaatgggcacctaatggtaaccttacttttttatcttctagaaaagaacataataaatctacacaagtttattctattcccattaatggtggtgaagcgtacccaataactgattacaaagatggaattggatcatataaatggtctcctaatggtaaatggattgcttttacttcaagagaaaaagaaagtgccaaagtgaaaaagatgaaaaaagatggttatgatatgatagtaatgggtaaagaacatttatataataggctttggatattcaatattgaatcaaacacatataaaaaaatataccgacaagatttgaatgtatccttatttgaatgggcgccagatagcgaatcaatcgtttttcaagcgagtgaaaaagtcaatgttgatttagaatatttagaaagctcaatttatcttgtaaaaatacctaatggaaatccaaaaaaggttaccgacacgcccggcaagctatcaagtatgtccatttctcccaacaataaacaattagcatttttgggtgcaacttcatataacgatcccttagcacaaagtatatatgtggcagaaataaaaacaggcaaatcaaaattaattaccgataattttaaagaatcattcatagatgttgattggatagatgatcaaacggtaataggattatcccaaagaggaaccaagacagtgttatcagctatttttcttaataataattcatcagaaaaagtatttaatcaaaatgatatccttactccaaaagaaattattactagtatatcgtatcacagaaatacaaagcaatttcttttcacggctaacagtcatcgtcaccataatgaagtatttcttgggctttatggatctaaaaaaatgcaaaggattacatttctaaacccttcattaagtaatataaaacttgctaaacaagaaacagtttcatggaaagcagaagatggtataactatagaaggggtgctgacctatcctttatcttacagaggcgggaaaagatatcccttaatcttacaaattcatggaggtccggaaggtgttagtcaagatggttggaacacccgaacaacgtaccctgtacaattgttagctgctaatgggtacttgt

SEQ ID NO: 232377 - DNA, 562 bp, Unknown
  Bacterial polypeptide expressing nucleotide sequence isolated from the Sargasso Sea
atgaatgagtctgaactaagaaatcttatgtatactgcacaagcccacaataaaaatccttttacaataagatacccaagaggaaaaggtgttcaaattgagtgggaaacagaaatggaactagttgaaattggtagtggaagaacaatatgcgaaggagaagaaattgctattttatcaattggtcatataggaaattatgccacaaaagctattaaaaaattaaatgaagataatattttcccatctcattacgacatgaggtttgttaagcctttagatgaaaaattattgcataaaatacttaagaatcataaatatattttaacagttgaagatggatgtatcatgggtggatttggatcttctgtaattgagtttatggctgataataactataagaatcctgtacaaagactaggtatccccgataaaattattgaacatggttcacaagatgagttatataatgaatgctattatgatgataaagcaatatatgatttctgtagaaaaatgttagatcatcaaggcagtaaatacgaagaggtagttatttaat

SEQ ID NO: 232378 - DNA, 556 bp, Unknown
  Bacterial polypeptide expressing nucleotide sequence isolated from the Sargasso Sea
tttgtattgatggccccaaaagatgaggctgaattacagagaatgttaataacttccataaaccataacggtcctacagcactaagaatacctagaggctctggtttaggagtggctgtaatggacgagggttgggaaactttaaatataggtgaagctgaaatacttgaagaaggagaggatattttaattattgcttatggttcaatggttgcatcagctatcgaaacagcaaagatactaaaaaatatgaagattaatgcatgtcttattaatgcaagatttgtgaaacctctcgataaaaatcttattatgcctttagcaagtaggattcaaaaagttgtaactatggaagaaggaaccctaataggtggatttggttccgcaatagttgaattattaaacgataatgaaataaatattcctgtatacagaataggtatacctgatgttttagttgatcatgcttcacctgatcagagtaaagaaaaactaggacttatgcctgatcagatggcagataaaattgttaaaaaatttaagttagataattaaa

SEQ ID NO: 232379 - DNA, 1042 bp, Unknown
  Bacterial polypeptide expressing nucleotide sequence isolated from the Sargasso Sea
aatgagtatttccccaaatttcgaagacattaaacaagcctatgaacgtataaaaggcgacgtaaagaaaacgccgattgttgaatcttcgttgctcaacaaatggatgggcaaccgcattctgtttaaagcggagtgcttacagaccatcggggcattcaaaattcgcggcgccatgaattttttagcccggttgaaagaggaaggtcgtttaccgaaacatgtggtcgccaatagttctggaaatcatgctcaggcagtagcctatgcagcagctcactttggtattaaggccactatttttgcgagcgagaccatttcgccaataaaagctgccgctacgcaaagctatggtgctgaattaaaaatatttcctacccgtccagaagcagatgcggctgtcgagcaagcctcaaaagcaccagacacggtctggataccgccgtttaaccacaaagatattgtggcaggacaaggcacggcaacgttagaagcgcttaacgaaattggtgaggtggatgctgtctttgcgccgtgtggtggcggagggttattgtcgggctcattactggcaactcgcgcactacagccaaatgcattggtcattggcgctgagcccgccgaagcgaatgatgcctctatgtcgttgcaagctggtgagattattgctttagactatgctccaaataccttagcagacggcgctgccacgccttctgttggcgatgtaacgtttcctatactgcaagaaatagatgatttctacgaagtagatgagctgcaaattgcttattggacccaatggctacatcatttactaaagcttcatattgagcccacgtgcgcgatgaccatggctgcagtagcggcttgggctgccaacactccacctgggcaaaccgctcttgttatattgagtggcggcaacattagccagtcgagtatggctaaaatttgggagagagattttttgctgcagcctcccattcttgaccttgatgacgaagacgaatttgaagacaccgagagtgtcgaggcatag

SEQ ID NO: 232380 - DNA, 672 bp, Unknown
  Bacterial polypeptide expressing nucleotide sequence isolated from the Sargasso Sea
gagcgggattagttggagcagatggtgctacacatgcgggttcatttgatatagcttatttatcatgtttaccaaatgtcgtgataatggctccaagtaatgaaaatgaattagcattaatgttatttacagcatcagaatatgattctggtcctatattttgtagatacccgagaggtgaaggtgttggtataaaaatacaagataaattaatttctttggaaattggcaaaggaaaaattattaaaaaaggtaagcaaattgcaattttatctctaggttcaaggcttaatgatattatggaagcttctgaacttttaaagaatgatggttttgaaatcacaattgctgatgcaagatttgcaaaacctattgataaaaatttaattaaaagtttgtttttaaatcacgaagctttgttttttgtagaagaaggttctttgggaggattttcctcacaatgtttaaattacttatcatctgaaaatctcttaggtcagaagtcaacattggtgagatgtttaactttgccagatcgttttcaagatcatggttctcaagaagatcaattagttgaagcgaaactagatagagatggtatattttctgaaataaaaaatgtaatttctaaactaaaaatcagtcctcaattaacaaataaaacagggtaag

SEQ ID NO: 232381 - DNA, 813 bp, Unknown
  Bacterial polypeptide expressing nucleotide sequence isolated from the Sargasso Sea
tgaagctctcggggttcgatattttgggcctgtagaagggcacacgctcccgaacctgattcgatacctcgaactcgtcaaagatgaagaaggccccattcttttacatgtactcacggaaaaagggcatggattcaaacctgcagaagacgacccagtctttttccacacacctgcgccgttcgagtgcgatgatgacgattgtattgttgctgtcaagaaatcttcggttcggggctacacagatgctgcgagtgctgcaattgccgattgcatgaagcatgatgaccgagtgaccgtcatgacagctgccatgtgccaaggaaacaagcttgaggctgtacgagaagcatttcctgatcgcttttttgatgtcggcatttgcgaatcacatgcagttgcttttgctgccggtcaagcgaaagctggatgccgacctatcgttgacatctatagtacgtttctccagcgatcctatgaccaaatctttcaagaggtctgcttacagaatttaccagtcgtattcatgctagaccgcgctggactcactggaccagatggtccgacgcatcacggcgtctttgatctagggtacatgcgactttttccaaacatgaccgtccttgctccggccgatgaacacgacctcacgtcaatggttgcatgggcacttaagcacgacggacctgttgccattcggtatccaaaagcagttctcgaatcgggcctcagtaatcgatttggggaagacagactgcctgtaaccgtgcggcagtgcgaacctcttatcgatggaccagacgggctgattat

SEQ ID NO: 232382 - DNA, 805 bp, Unknown
  Bacterial polypeptide expressing nucleotide sequence isolated from the Sargasso Sea
ttaagtgcaatgcttggaatggcaatggcttccaaagaatcctatccagataaaaaacatgttgcagtaattggtgatggcgctatgactgcaggaatggcatttgaggcattaagtcatactggtgatttaaagccaaatgtcctaataattcttaacgataatgatatgtctatttctgaaaatattggtggattatcaaattatttttctagaatatgggcatcaaaattatataaaggaataaaaaaaagtggtgcaagctttttaaagccactacctcaagcatttcatcttgcaagaaaagttgaaactcaaatgaaggctatggttgcaccaggaacaatctttgaggaattaggattgaattatattgggccaattgacggacataatataaaagaattaattaaagttatttccaatttgaaagaatttgaagggcctcagtttttgcatattattacaaaaaaaggagcaggtttagacccggctgaagcagatagaataggatttcatgcaatagggaaaataaattcaataaaggatgaaaaatctaagcaaaaaaaatatcaagatattttcggagaatggattgttgatatggcttcatatgatgaaaatttaattggaataacacctgcaatgaaagaaggctctggccttgtggagtttagtaaaaaatatcctggaagatattttgatgttgcaattgctgagcagcattctataacttttgcagctgggcttgcagttgaaaataaaaaacactgtggttgcaatatactcaacatttttacaaagg

SEQ ID NO: 232383 - DNA, 357 bp, Unknown
  Bacterial polypeptide expressing nucleotide sequence isolated from the Sargasso Sea
agagctcagaaataataattttgaactttggagctcttttaaatgaggcaaatgaaatttcaaaagaactaaaggcaactctggtagatatgcgttttgtaaagcctttggatgaagagctattaagaaaacttcttaaaaaagcaaagatttttatttctattgaggatggttcgattatgggcggtgcaggaagtgctgttcaagaatttgcatcaaaagaaaatctaaatgttagatcaatcctttttggtattcctgataaatttattgagcatgcttctagagaagaaatgttagttgatgctggtttaaatgtagaaaatattagatctaaattaagtaaattattataag

SEQ ID NO: 232384 - DNA, 517 bp, Unknown
  Bacterial polypeptide expressing nucleotide sequence isolated from the Sargasso Sea
catgtctggtaagatttattttagttttagagagacattaaaattaatcatatctgccttctcaaaaagatttaaaaacaaagcaggaaaagcagaggattttttaagatctgcagttactggtggtactttatttaattctatgggattttattacattgggccaatagatggacatgatattgatacaatggtttctgtatttaaaaatgcaaaagaaattaattatgatggtccaattttagttcatgtaaaaactgaaaaaggaaaaggttataaatttgcagaaaaatcagaagataaattccatggagtttcaaaatttaatgtaaaaacaggagaacagataaagtcttcatctaatgcaccatcatatacaaaagtatttgctaataccttaatcaagcatgctgaaaaggatagtaaagttgttggtataacagcagcgatgccatcaggaacaggtatggatttatttggaaaaaaatttcctaacagaatgtttgatgttggaata

SEQ ID NO: 232385 - DNA, 754 bp, Unknown
  Bacterial polypeptide expressing nucleotide sequence isolated from the Sargasso Sea
aaagataagataatttgggatgttgggcatcagagttatcctcacaaaattttgacaggcagaagagatcaaatgtcaactttgagaaaaaaagatggtttatctggtttcacaaaaagagatgaaagcaaatatgatcattttggcgctggtcatagttcaacagcaacttctgctggattaggtatgtcaattggtagagatttaaaaaaaagagataaccatgtagtgtgtgttgttggtgatggcgcaatgagtgccggtcaagcatatgaggcattgaataatgcaggcgcagagaaatcaaaattaatagtaatattgaatgataatgacatgtctattgcgcctcctgctggagctatgagcgcttatttagcaaaattaatttcaggcggaacatatctaggattaagaaattttgctaagcaggttatagaaaaacttcctaaatcattagaaaagggtgcaaaaaaagctgaagaaataacgagattgattgcaggtaatggaactctatttgaagcattgggtttttattatgttggtcctcttgatggacataatcttgatcacttactccctgttattcgtaatgttaaaaatgccaataatggtccagtaattattcatgtagttactcaaaaaggaaaaggctataaacctgcagaagattcagacgaaaaatttcatggtgttactaaatttaatatagcaactggagagcaagaaaaaccaaagaaaaaaaatattt

SEQ ID NO: 232386 - DNA, 865 bp, Unknown
  Bacterial polypeptide expressing nucleotide sequence isolated from the Sargasso Sea
aagtaccatggagtaaccccttttgaacctatagacggaaaatttgttaagaaaaaaacttcagttcatggaatcagttattcgcaggtatttggtaacaaaatgagtgagttaatggagcgtgaagaaaatgtagtggttttaacagcagcaatgcttagtggtacaggaatcgcaaatttgcagacaaaataccctgatcgtgttttggatgttggcattgcggaaggtcacgcggtaacttgttcagcaggacttgcaactacaggtaacaaaccttacgttgcaatttattcaacttttctacagcgagctttagatcatattattcacgatgttgcagtacagaaactccctgtaagatttatgctcgatcgtgctggattcgtagggtcagatggtccaacacatcatggaatgtttgatctcacttaccttcgcatgataccaaatatgacgattatggttccacgtaatggtgcggaattgcgttgcatgattgaatttagttttaactacgaaactggtcctttggctattcggtatcctagagcaaatactgctgaactgaatgaaaatcaaattccacctattgaatttgggaaagcgcaaattttgcgaaaaggacaaaatgttgcacttttcgcagttggaactatggttgaaaaggcggaaaaggttgctgatcttcttgaaaagcatggggtttttgcttcagttgttaacgcccgttttgtaaagcctatagatgaggatttgatagttgaattgagtagaaaagctaaattggtggtaagtcttgaagaaaacacaattcaaggcggatttggcagtgctatactggaaatattaagtaagaataaaa

SEQ ID NO: 232387 - DNA, 439 bp, Unknown
  Bacterial polypeptide expressing nucleotide sequence isolated from the Sargasso Sea
aatgaaaaaaaaatatcaatttttagatcaaataagttttccatcagacttaaaaagaatacctgaaaaacaattacaaaaagtagctgatgaattaagagaggaaatgattgatgccgtatctgtcactggtgggcatttgggagcaagtcttggtgttgtagaattaagtgtggcacttcattatatttttaatacacctaacgataaactaatatgggatgtcggtcatcaatgttatccacataaaattttaactggcagaaaagataaaataagaacattacgtcaagggggaggcctgtctggttttacaaaaagattagaaagtgaatatgatccattcggtgcagcacatagctcaacctcaatttcttcagcactaggtattgctgaagcaaataaattagcaaataaatctgataatgttatatcagta

SEQ ID NO: 232388 - DNA, 510 bp, Unknown
  Bacterial polypeptide expressing nucleotide sequence isolated from the Sargasso Sea
ctgatgaaaatgaaacaaggttgatgctcactacagcatttaatcatactggaccagcatcagtcagatatccaagaggtaccggtccaaacactgaagtagaaaaaaaacttgtggaaataaaaattggagaagcaagaataattcatgaagcaaataaaaataaaatattgctaaattttggttctcttttacatattgctgaggaagtagcgcgcagtatagatataacactaattgatatgagattcgttaagccacttgatgaaaaaatattattgaaatatcttcaatcagcagacatgtttatttcaattgaagatggctctgtaatggggggtgctggtagtgcagtgcaagaattttgttcagaaaatggtattcatatcaaatcattgctatgcggtatacctgatagatttatagagcacgcttcaagagatgaaatgcttattgaggcaggactttctcctgagcaaattaaatctaggataaaagaattaatataag

SEQ ID NO: 232389 - DNA, 834 bp, Unknown
  Bacterial polypeptide expressing nucleotide sequence isolated from the Sargasso Sea
aatgaaaaagattgtaaaaaatgatgattctgtaagatgtgttactgcagcaatggaaataggaacaggcttatcaacttttgttgaagagtttccagagaagtgtatcgatgtaggtattgctgaagaacatgcggtcacatatgctgcagggttagccgcaaatggtttgaagcctattgtttatatatattcaacgtttatgcaaagagcctttgactgtatttttcatgatgttttattgcaagaccttccggtaattttttgtatggacagagctggtattgtaggcccagatggtcctactcatcatggagtgtttgatatttctatgcttaatattttaccaaatataattgtggctgcaccaaaagatggcgatgagtttttagatttgttattcactgctactaaaataaataaaccatttgctattaggtatccaaagtcaaatactgataattttgatgtcaatagagagccaactttaatagaggtaggaacatgggaataccttgttgaaagaaaagatgctaaaattgctattttagctacagggagcatggtggatatggttttagagtctaaagaatatattcaagaacaaataggagttgattttaatttagttaattgcagatttataaaaccattagatgctgatattttaaatgatatttctaaaaaagaaattactcatattgtaactattgaagaaagggtcattattggtggattaggttcaatgattaacgagcattttaataatacggttattaatgttaaagctatggggatacctgataaatacattgagcatggtagtagaggtga

SEQ ID NO: 232390 - DNA, 212 bp, Unknown
  Bacterial polypeptide expressing nucleotide sequence isolated from the Sargasso Sea
aatgactagtcttattaaacaaataaactttccttctgatttaagaaaatttaagaaagatgaccttagacaaatttcagacgaattaagagacgaactaatagatgtcgtttctgagactgggggacatttgggtgccggtttaggagtagtcgagttaaccgtagctttacattatgtttttaatacccctaaagacaaattagtttggg

SEQ ID NO: 232391 - DNA, 570 bp, Unknown
  Bacterial polypeptide expressing nucleotide sequence isolated from the Sargasso Sea
agagaaactgtaaagttaataatttctgctttttcaaaaagatttagcaaaaaagcgggagcagctgaagattttttgagatccgcagtaactggaggtacactatttagttcattaggtttttactatgttggaccaattgatggacacaatatagatgatttaatttcggtttttaaaaatgctcaaaatttaaattttgaaggcccaatattaattcatttaaaaactgaaaaaggaaaaggatatgagtttgctgaaaaatcagcagataaatttcatggcgtttcaaaatttaatgttaagactggagaacaagaaaaaacaaaatcaaatgtgccagcttatacaaaagtatttgcaaatactcttgtaaaacatggagaaaaagatagcaaaattattggaataacagctgcaatgccaacaggaacaggaatggatatttttggaaaaaaatttcctaacagaatgtttgatgttggaattgctgagcaacatgctgttacttttgcggcaggtttagcaactgaaggatataaaccttacgcagcaatttattcaacattt

SEQ ID NO: 232392 - DNA, 208 bp, Unknown
  Bacterial polypeptide expressing nucleotide sequence isolated from the Sargasso Sea
atgaaaaagaaatatgaactgttagacgagattaattttccatcagatttaaaaaaaatacctgagtcaaaattacaaaaagttgctgatgaattaagagatgaaatgattgatgctgtgtcagtaactggcggacatcttggggcaagtctcggagttgtagaattgaccgttgctttacattatgtctttaatacaccaaatgata

SEQ ID NO: 232393 - DNA, 159 bp, Unknown
  Bacterial polypeptide expressing nucleotide sequence isolated from the Sargasso Sea
tgataaaatacttgctgttactgctgcaatgtcttcgggaactggtcttgataagtttccagaaatttatcctagtagattttttgatgtaggtattgctgaacaacatgcagttacattttgtgcaggtatggcggttgaggggttaaaaccgttttg

SEQ ID NO: 232394 - DNA, 373 bp, Unknown
  Bacterial polypeptide expressing nucleotide sequence isolated from the Sargasso Sea
tcctaacgttaaagtagatgagaaactagatacagtcgaaattggtaaagctagagttattaatgaagcaggaaaagataaagtcattcttaactttggatctctgctgcatatagcaagagaaatatcagaaaaatttaaatttactcttattgatatgagatttgtgaagccgctagacgaacaaatcctgaatcaatatctaaaaaaagctgatctatttatatctatagaagatggatcaattatgggtggcgctggcagcgctgttcaagaattctgttcaaaaaataatatcaatatcgagtctgagctttttggtatacctgacgaatttattgaacatgcatcaagagaagaaatgctcaatgat

SEQ ID NO: 232395 - DNA, 559 bp, Unknown
  Bacterial polypeptide expressing nucleotide sequence isolated from the Sargasso Sea
gatgcttaccaaaacataactgtaatgacgcccgcgaatgaaaatgaatgtcgtcagatgttgtacacagggtttttgatagacgggcccgcagctgtgagatatccgagaggaacaggaccaggcgtggaaattagagaagagatggaagccattcctctggggaaagccacaattcttcgaaaagggagtaaggttgcgttactagcttttggttccatggtgaagttggccgaagacttgggcgcggaaattgacgcaacagtggttaatatgcgattcgttaagcctatcgatgatgaaatgatccgtgaaatggctgccagccatgatttagtcattaccattgaagagaatgtaatcgccggtggagcgggaagtgcagtgagcgaaagcttggtggctatgggcatcactgcttcggttgcccattatggcttacctgatcgattggtacagcatggatcgcgagaggatatgctacaagactcgggattaaacattgactcttttcgggaattcgtaatgaagaggcagtctgaacgaggtatgttgtagc

SEQ ID NO: 232396 - DNA, 420 bp, Unknown
  Bacterial polypeptide expressing nucleotide sequence isolated from the Sargasso Sea
aatgaaaaaaaattacgaatttttagatcagattaattttccatcagacttaaaaaaagttcctgaaacaaaactgcaaaaggttgctgaggaattaagagaggaaatgatcgatgcagtgtcagttactggaggacatttgggtgccagtttaggtgttgtagaattaagcgttgcattacattatatttttaatacgccaagtgataaattaatatgggatgtaggacaccaatgttatccacataaaattttaacaggaagaaaagataaaataagaacacttcggcaaggaggaggtctctcaggatttaccaagcgtgaagaaagtgaatatgatccttttggagctgctcatagctccacttcaatttcatcagctttaggaatcgcagaagcaaataaattatcaaaaaaatc

SEQ ID NO: 232397 - DNA, 856 bp, Unknown
  Bacterial polypeptide expressing nucleotide sequence isolated from the Sargasso Sea
aatggcaaaatcagtaactgtacgcgccccttgctctactgcaaatttgggtccaggatttgacgtgtttggcatggcattagatgcactttatgataatgtggttttaacaaagaaaggaaaaggagttgtcatagtaagttcagatgatattccactcagtccatcaaaaaatactgcaggattagttgtctctgcaatgaaaaagaaattcaaaataaaagatggtatagaaattaaaattaagaaaaatgttcctgcaggatttggtatgggaagtagtgcagcatctgctgctgcatgtgcagtaggtcttaacaaattatacaatttgaaattaactgatgcagagttagttgaatttgcaggcattggtgaaaaagctagtgcaggtacaatacactacgataatgttgcagcatcagtattaggtggatttgtaatagttaagacaaaacctttgcaggttgttaagattcaacctccaaatgacttagttttatgcgtagcagtaccagaattgaaggttcctgcaaagaaaaccaaggtttcaagaggagcaattccaaaaaaagtttcattaatcgatatggtgaaaaatatttcaaatgcatcagccattgcagcaggtttttcagagaaaaattctgaattaattggaagatcagtacaagatgtaattgtcgaaccagcaagaaaacacatgattcctggatttgataaagtgaaaaagaatgcaatagctgcgggtgcatacggagttaccattagtggtgcaggaccatcagtgatagcatttacagataaaaaacatgattcaaagaaaatttctaatgcaatgaaaagaggtttttaa

SEQ ID NO: 232398 - DNA, 192 bp, Unknown
  Bacterial polypeptide expressing nucleotide sequence isolated from the Sargasso Sea
aatgagcgaaaagttattagataaaattaattacccttcagatttgagacagcttgaaaagaaacagctggagcaggtagctagagagctacgatctgaaatggttaatgttgtttcagaaacaggaggacatttaggtgcaggccttggagttgtagaattgaccgtagccttacactatgtctttaatac

SEQ ID NO: 232399 - DNA, 217 bp, Unknown
  Bacterial polypeptide expressing nucleotide sequence isolated from the Sargasso Sea
gatgaataaaaaattactagataaaattaactacccttcagacctaaggaagtttgaaaaaaaagatttgaaacaaatttcgaatgaattaagaaatgaactaattgaagttgtttctgaaacagggggtcacttaggcgcgggtcttggagtcgtagagcttacagttgctttacattatgtctttaatactcctcaagataagttagtttgggac

SEQ ID NO: 232400 - DNA, 655 bp, Unknown
  Bacterial polypeptide expressing nucleotide sequence isolated from the Sargasso Sea
gcagatggaccaacacatgctggctcttttgatattacatatttatcgactttaccaaattttatagtaatggctgccagtgacgagtcagaacttgtaaaaatgataaacacctcagtagaaattaatgatagacctactgcttttagatatccaaggggaaacggaataggagttgaactaccctcgataaaagaggttttagaaattggaaaagccagaattattaaagagggaaaaaaggtaactttattaaattttggcacaagacttgaggaatgcaaaaaagcttcagaaaaacttttaagcaaaggcattgattgtacgatagtggatgcaagatttgctaaacctttagatgaaaaattaataatggaacttgctactaatcatgaagctttaataacgattgaagagggctcagttggaggttttggatctcatgttatgaaactgttatcagatagaggtgtttttgatactggtttgaaatttagatctatgtttttaccagatatttttattgatcaagatacacctgaaaaaatgtacgaaacagccggcttagactctttatcaatagttgataaagttgaagagactttaaattcaaacataattttagctaaaaataaaaataaaatttctaattaac

SEQ ID NO: 232401 - DNA, 658 bp, Unknown
  Bacterial polypeptide expressing nucleotide sequence isolated from the Sargasso Sea
ttggtgggctctgatggaccaactcatgcaggatcatttgatattacttacctatcaacattaccaaatttcgtagttatggcggctagcgatgaagctgaattagttagaatgataaatacatctgtaaacataaacgacagaccttctgcttttagatatccgaggggaaatggaataggagttgaattacctgacattaaagaaaccctaaaaattggcgaaggaaaaattatcactcagggcaaacatattgcaattcttaattttggtgcaagattaaatgaatgtaaaaaagcttcagagaatttagaaaaaaaaggcatcaccacaactatctttgatgcaagatttgcaaaaccacttgatgataaagctattatagaactagcatcgtgccatgaagttattttgactattgaagaaggttcaatagggggttttggatctcatgtttcaaaacttttatccgaaagaggattttttgacaaaggtttaaaatttagatcaatgtttttaccagataagtttttggatcaagatacacctgaaaaaatgtacaagtctgctggtctagattacgagggcattgcccagaaaattgaaagcactttaaattctaatattgttattgcaaagaataagaatctttcttaac

SEQ ID NO: 232402 - DNA, 661 bp, Unknown
  Bacterial polypeptide expressing nucleotide sequence isolated from the Sargasso Sea
aagccttttgtggcaatatattcaactttcttacaaagggcatatgatcaagtgatacatgatgttgtaatccaaaaacttccagtgagatttatgttagatagagcaggtttggtcggagctgatggttccactcatgcaggttcttttgatttagcatatctttcttgcttgccaaatgtagttattatggccccaagtaacgaaaatgaattatctaaaatggtttttaccgcttcaaattatgatgcaggaccaattttttgtcgatacccaagaggtgaagcagttggtttaaaaattgatgaaaaattagaaaatttaaaaattggaaaaggtagagttttaaaaaaagggaatcaaattgctatattgtcagtcggcacattgttaaattctgtattacaatcatatgaatttttagataatgatggatatagtttaacagttgctgatgctaggtttgtaaaacccatagattatgaaatgttagaaactttgtttcttaatcatcaggctttattaattgtcgaagagggggcccaaggaggattttcttcacattgtctaagctatctatctaaaaataattttttaggccgaacatctacatttgttaaatgtttaacattacctgacaaatttcaagatcatggtagcc

SEQ ID NO: 232403 - DNA, 211 bp, Unknown
  Bacterial polypeptide expressing nucleotide sequence isolated from the Sargasso Sea
atgaaaaaaaattatcaatttttaaataatatcaactttccatctgatttaagaaaagtttctgaaaataatttacaaaaagtagcagatgaggttagggaggaaatgataagtgctgtttcagaaacaggaggtcaccttggtgcaggtttaggagttgttgaattgacagttgcacttcattatgtttttgataccccaaatggataaa

SEQ ID NO: 232404 - DNA, 181 bp, Unknown
  Bacterial polypeptide expressing nucleotide sequence isolated from the Sargasso Sea
cattatgtttttgataccccaaatgataaattaatatgggatgttggccatcaatcttacccacacaaaattttaactggaagaaaagataaaattagaactttacgacagggtaatggtttatcaggttttacaaaaagatctgaaagtgagtatgacccatttggagcagcacaatagt

SEQ ID NO: 232405 - DNA, 262 bp, Unknown
  Bacterial polypeptide expressing nucleotide sequence isolated from the Sargasso Sea
atggcaaggttaataaaacaaataaattttccatccgatctaagaaaatttaaaaaagaaaatttaaaacaaatttcggatgaattaagagatgaattgattgatgtagtatctgaaaccggcggacatctaggtgctggattaggagtagtagaactaactgttgctttacactatgtttttgacactcctaaagataaacttgtttgggatgtgagccatccagtgttacccgccataaaattattactgaagaagggat

SEQ ID NO: 232406 - DNA, 685 bp, Unknown
  Bacterial polypeptide expressing nucleotide sequence isolated from the Sargasso Sea
gcagttgcaaaaagtttatcaaaaaattcaaatcatgttgttgctgttataggagatggagctatgagtgcaggaatggcttacgaggctatgaataatgctggtgcaatgaaatctaaattaattgtagttctcaatgataacgatatgtcaattgcacgtcctgtgggagcaatgagttcatatttagctagattactttcagggaaaacatattttagtttaagagaaatattaaaattaattacttcttcattttcaaaaacatttaaagataaagctggaaaagcagaggaatttgtaagagatattgtttctggaggaactttatttaatgaattaggtttttattatgtaggaccaattgatggacatgatttaaatgttttaattccggttttaaaaaatgtaaaaaattcaaattataagggcccaatattagttcatacggtaacaaaaaaagggaaaggttataaacctgcagaagaatctggagataaataccatggggttagcaaatttaacgttgcaactggagagcaatcaaaaccaaaatctaatattccttcttacacaaaaatttttgcaaatactttaattaaacacgctgaaaatgacacaaaaattataggtattactggcgctatgccttcgggcacaggaatggatgtctttggaaaaaaat

SEQ ID NO: 232407 - DNA, 328 bp, Unknown
  Bacterial polypeptide expressing nucleotide sequence isolated from the Sargasso Sea
aatgaaaaaatacgaatttttagataaaataaattttccttcagatttaaaaaaaatacctgagtcacaattacataaagtggcagacgaattgagagaggaattgatcgatgccgtatctgttaccggtggtcatcttggagcaagtcttggtgttgttgaattaagtgttgcactccattatatctttaacacacctaacgataaattaatttgggatgtaggtcatcagtgctatccacataaaattttaactggacgaaaagatagaattagaacattaagacaaggtggtggtttatccggtttcacaaaacgttctgaaagt

SEQ ID NO: 232408 - DNA, 304 bp, Unknown
  Bacterial polypeptide expressing nucleotide sequence isolated from the Sargasso Sea
aatgaataaggaatacaaatttttagatgatataaattttccgtcagatataagaaaactttctgtatcagatttaaaaaatttagctgacgaagtaagaacagaaatgatagatgcagtatctgtgactggtggacatttaggtgcaggtttgggtgttgtagaattaacagttgctttgcactacatttttaatacaccaaatgataaaataatttgggatgttagtcaccaaacttatcctcataaaatattaactggaagaaaagataaaattagaactttaagaaaaaggtgggggtct

SEQ ID NO: 232409 - DNA, 325 bp, Unknown
  Bacterial polypeptide expressing nucleotide sequence isolated from the Sargasso Sea
atgaaaaaaaaatatgaattattagataagattaattttccatcagatttaaaaaaaatacctgagttaaaattacaaaaagttgctgatgaattaagagaagaagtgattgatgccgtgtcagtgactggcggtcatcttggagcaagtcttggagtagtagaattaactgttgctctacattacatttttaatacaccaaaagataaattaatttgggacgtaggtcaccaatgttacccacataaaattttaactggtagaaaagaaagaataagaactctgagacaaggaaatggtctttctggttcacaaaaagatccga

SEQ ID NO: 232410 - DNA, 933 bp, Unknown
  Bacterial polypeptide expressing nucleotide sequence isolated from the Sargasso Sea
tttcctgcaaaggatgagagtgagcatgatgtgcttgatacaagtcatggaggtacctcgctatcagttgcatcgggtatagcgatctcaaacaggatacaaaacaagggcggtctgccgattgcaattattggtgattctgcgcttggtgagggcatggcacttgaggccttgaatcacattggttatgagaagccaaatatgctgattattgtcaatgataacggttggggtattactgaaaataagacagcaataaaatcatatttgagtcaaagatcagataatcctgagatttcagagggattcttcacctcactaggttttgattacaagggacctattgatggccatgatttagattgtttgattagagagttaaaagaaattaagcaaaatccaaatggtccaatggtccttcatgttaaaactcaaaaaggtaatgggcttgatttccctaaagatgagatcactaaccatcatttttgttttcccctagataaaactggggcaccaataactgaagataaagggactgaagaagggatattttataagcctttatctccttttaatgctggattagtgggaagtaagattgatgaattaatgcaaaaggatcccaaattagtcttgataactccagcaactcaaggagcatccgaaacactaaaagcatttaactcagtacccgatcgttcttttgatgtgggcatggctgagcaacacgcgctcacacttggagtcggtctctcacttgaaggaatgaagccagtgatatcatatcaatccactttttttcaaagatcatatgatcagctcgttcacgatgtatgtgtgaacaatgtgcccatattgattattttagcaagatcaggacttgccggactggatcatatgacgcaccacgcaaccttggatcttcttattagc

SEQ ID NO: 232411 - DNA, 309 bp, Unknown
  Bacterial polypeptide expressing nucleotide sequence isolated from the Sargasso Sea
aatgaaaaaaaaatacgaactgttagatgaaattaattttccatcagatttaaaaaaattacatgagtcaaaattgcaaaaagttgctgatgaattaagagaggaaatgattgatgctgtctcggtgaccggtggtcatcttggagcaagtcttggagttgtagaattaactgtggctttacattatatttttaatacacccaatgataagttaatctgggatgtgggtcatcagtgctatccacataaaattttaaccggcagaaaagatagaataagaactcttagacaaggaaatggtctttctgg

SEQ ID NO: 232412 - DNA, 688 bp, Unknown
  Bacterial polypeptide expressing nucleotide sequence isolated from the Sargasso Sea
gaaagtgcatatgatacttttggagttggtcattctagtacatcattgagtgcccttctaggaatggcaattgcctcaaaagaatccaatccagataaaaaacatgtagcattaattggtgatggagctatgactgctggtatagcatttgaagcattaagtcatataggtcatttaaaacctaatgtcttaataattctaaatgataatgatatgtctatttctgaaaatataggtggattatcaaactatttttcaagaatatgggcatctaaattatataaaggaattaaaaaaagtggcgcaagttttttgaagcctttgccgcaggcatttcatcttgctagaaaagtagagacgcaaatgaaagcaatggttgctcctggaacaatatttgaagaactagggttaaattatataggaccaattgatggtcataatataaaagaattaataaaagtaatatctaacctaaaagaatttgacgggccacagtttttacatattattacaaaaaaaggtgctggtttggatcctgctgaggcagatagaattggatttcatgctataggaaaaataaattctataaaagatgaaaaatctcaacaaaaaaaatatcaagatatttttggagaatggattgtcgatatggcatctaatgatgaaagattagttggtataacgcctg

SEQ ID NO: 232413 - DNA, 591 bp, Unknown
  Bacterial polypeptide expressing nucleotide sequence isolated from the Sargasso Sea
ggcctactcattcgggaaactatgatctggtttacttaaggtgcatacctaatatgatcgtgatggccccatcagatgaaaatgaaactagaaagcttttaacaactggttttttttataatgggcccgcatcaataagatatccaagaggatctggtcccaatgttgttgttgaaaatgatctttcaccagttgaaatcggtaaaggaagattgattaaaaaaggatcaaaagatttaattgtcatcaattttggagctttacttgatcaagcaaaagaagttgcaaatactttaggtcttactctaatcgatatgcgttttgtgaaacctcttgatgaagatattcttagaaaatatctatctgaagcacaagcatttatttcaattgaggatggttcagtttctggtggtgccggaagtgctgttcaagaattttgttcagataataatataaatgttaagtctaaactttttggtatacctgatatattcattgagcatcaatccagagaggaaatgatcgaagaatctggcttaaaagcttctagaataatagaagagatagaggaattaagattagaagagtaat

SEQ ID NO: 232414 - DNA, 332 bp, Unknown
  Bacterial polypeptide expressing nucleotide sequence isolated from the Sargasso Sea
aatgaaagtttttaaagattttccaactgaaaggcctgtcactagttttttagataatattgagtctccagaagatttaaaaaaacttacaattgacgagcttgaagttttggcagatgaattaagagaatatttgctttattcagttagacaaacaggtggacattttggtgctggacttggagcaatagagattactattgctttgcattatctattagatatgccttctgacaagattgtttgggacactgggcatcaagcataccctcataaaatattaactggcagaagagataagatgcatctcatgagaaagattgatggtcttg

SEQ ID NO: 232415 - DNA, 670 bp, Unknown
  Bacterial polypeptide expressing nucleotide sequence isolated from the Sargasso Sea
gctggactggttggtgctgatggaccaacccatgcgggatcattcgatattacctatttagcgacacttccgaattttgtggtaatggcagcaagtgatgaagctgaacttgtaaaaatgattaatacatctgtaaatattaatgataagccttcggcatttaggtacccaagaggaaatggtgttggtgttgaactacctgatattaaagatattttaaaaattggtaaaggcagagttataaaagaaggtaagaaagttgctttattgaactttggtgcacggcttaacgaatgtattaaagcttcttcaattttagaaaacaaaggaatatcaacaacaattgtagacgcacgttttgccaaacctttggataaaaaattaattatggatttaagtattaatcatgaggttctagtaactatcgaagaaggttcgataggaggctttggctcacatgttatgcatatgctttcagaaacaggtatttttgatagaggtttaaaaataagatcaatgatattaccagatttatttttggatcaagacactcccgaacaaatgtataaaaaagcgggattagactttgacagtattgtcgaaaaagttgaaaatgctttaagttcaaacgttgttattgcaaaaaataaaagtaaaaatattttttaac

SEQ ID NO: 232416 - DNA, 575 bp, Unknown
  Bacterial polypeptide expressing nucleotide sequence isolated from the Sargasso Sea
tagagcggggttagtgggtgcagatggcccaacacatgctggatcttttgatataacatacctttcaacattgccaaattttgtggtaatggccgcaagcgacgaggctgagcttgtaagaatgataaatacatcaatggatataaacgatagaccatcagcttttagatatccaagggggaatggtgtgggagttaaattacctgaaataactgagaaaattgagttgggtaaagcaaaaataattaaagaaggaaaaaaagttgcagttttaaattttggagcaagattacaggagtgtattttggcctccgaaaatttaaaaaaaaaaggaattgatatctctattattgatgcaagatttgcaaaaccattagatgaaaacatcatttggcaaattgcaacagaacatgaggttttgattacaatagaagaaggttcaatcgggggttttggatctcatgttagccaatttttaagtgaaaaaaatttactagacagtaatcttaaatttagatcaatgatattacctgatagatttattgatcatgataaaccacgaacttatgtataag

SEQ ID NO: 232417 - DNA, 247 bp, Unknown
  Bacterial polypeptide expressing nucleotide sequence isolated from the Sargasso Sea
atgcagaattataaatatttaaataatattaattttccttcagatataaaaaaactcaataatgaagaattaaaagttctatcagaagaagtaagaagcgaaatgattgatgctgtttcaaaaacaggtggtcatctaggtgcaggtttaggtgttgtagaattaacagttgcacttcatcatgtttttgacacacctaaggacaaattgatatgggatgttggtcatcaatcataccctcataaaa

SEQ ID NO: 232418 - DNA, 607 bp, Unknown
  Bacterial polypeptide expressing nucleotide sequence isolated from the Sargasso Sea
gatggactcctttcatgcctgtaatttgaagtcacctgcggatttgcagggtcaatcgattgagcaattgaataggctatgtgctgagattaggcacgccttgatcgaaaaagtttttcagtcaggagggcatttaggctctaatttaggagttgtagaattaacggttgcgctccataaagtatttgacttcagtcgagataaattggtgtttgatgtttcacaccagtgttatgttcataagatgctgacaggccgctaccaaggctttgatcagcttcgtcaaacaaatggcatgtcaggctttattaatcgagatgaatcagaatatgatttgttgacagctggccatgctggaacatcgatttcttttgctgctgggttggccgcgggtatgaaagattgtgtcgatgaaaatgataccccgccttggtcagttgctttcattggagatgctgcatttgcttctggtgtggcttttgaaggccttaatcaggcagcggaagctaaatctcgtatgctagttgttttgaatgataatgaatggtctattagcaagtgtgtaggggctatggcgcgttacctttctagaattcgctcttctcaa

SEQ ID NO: 232419 - DNA, 578 bp, Unknown
  Bacterial polypeptide expressing nucleotide sequence isolated from the Sargasso Sea
aatgagtgttgggcattcaagcacatcaataaatgcatctttaggcatgaatgaagcaaatcaattattgaaagggaataaaactatcttttcagttattggagatggagctatgacagctggtcttgcctttgaaggccttatgcatgctggccatctaggaagaaatcttaatattattttgaacgataatgatatgtctatttcaaaaaataaaggaggattgtcagattatctagcaaaagtatgggcatctaaaagttataaaaaacttaaatcgagtggaaaaaaagttcttaaaaatttgccctttggcttacacatttctcggtcactgaaagatggtctgaaatcagctgtgatgccaggtaatttatttgaggatataggtttgcactatatcggaccaatagatggtcatgatgtgaaattacttgttaaaactcttgaaagaatgaaagaaaaatctgaaccgtatttacttcatatcatcacgaagaaaggtgcaggatttgaacctgcagagaatgaaagaataaaatttcatgcaatatctaagattgaaaagaatccttcta

SEQ ID NO: 232420 - DNA, 517 bp, Unknown
  Bacterial polypeptide expressing nucleotide sequence isolated from the Sargasso Sea
tactccagcagacgaaaatgaaacaaggttgatgctttcaacaggatttaattataaaggacctgcttcaattagatatcctagaggggttggtcctaacgttgaagtagatgagaaactagatacagtcgaaattggtaaagctagagttattaatgaagcaggaaaagataaagtcattcttaactttggatctctgctgcatatagcaagacaaatatcagaaaaatttaaatttactcttattgatatgagatttgtgaagcctctagacgaagaaattctgaatcaatatcttaaaaaagctgatctatttatatctatagaagatggatcaattatgggtggtgctggcagcgctgttcaagaattctgttcaaaaaataatatcaatatagagtctgagctttttggtatacctgacgaatttattgaacatgcatcaagagaagaaatgctcaataatgctggattatctgtagataaaataagttctaggctaaaagagttaatataa

SEQ ID NO: 232421 - DNA, 424 bp, Unknown
  Bacterial polypeptide expressing nucleotide sequence isolated from the Sargasso Sea
aatgaacaagatagaaattaaatatctagacaaaattaagtcacctaaagatttagatgaactaaatgatgagcaacttaaagatctagcatcagagctaagatatgatgtcattgaaacagtttcaaaaacaggcggacatttgggtgctagtcttggtgtgattgaacttactattgctcttcataaaatatttgatgctcctaaagataagataatttgggatgttgggcatcagagttatcctcacaaaattttgacaggcagaagagatcaaatgtcaactttgagaaaaaaagatggtttatctgggtttcacaaaagagatgaaaagcaatatgatcattttggcgctggtcatagttcaacagcaacttctgctgggataggtatgtccattggtagagatttaaaaaagagataa

SEQ ID NO: 232422 - DNA, 328 bp, Unknown
  Bacterial polypeptide expressing nucleotide sequence isolated from the Sargasso Sea
cgatctgaaagtgagtatgatgtctttggtgctggtcatgcatatactgcaatttatgctggcttaggaatggctgtgagcagaaatttagagaatgatgattttaaagtcgtaagtattattggagatggagccttatctggtggccttgcatttgaagcccttaataatgctggaaatataagaaaacaaatgctggttattgtaaatgataatgacatgtctattagtccgaatgtaggggcatttagaaactatctggtcaaaatagcgactaataagcaatataataaattgagaagatggatttatagaactataaagaaac

SEQ ID NO: 232423 - DNA, 247 bp, Unknown
  Bacterial polypeptide expressing nucleotide sequence isolated from the Sargasso Sea
tatgctagaacaaattacttgccctgcagatctccgaaggctctcgccttctgagttgaagaaactgtctcaagaaatacgttcgtttatcgttgacacggttgaaacgaacggaggacatctagggtcaaatctcggagtcgtggaactaacaattgccctccatcgggcgtttgattcgccgcgtgatattttgctctgggatacggggcatcaagcatatgtccataaagttctaactgggcga

SEQ ID NO: 232424 - DNA, 742 bp, Unknown
  Bacterial polypeptide expressing nucleotide sequence isolated from the Sargasso Sea
cgacaacggccggtcctacgccccgaccgtcggacgcctatccgagagcctgatccggatccgctccaacccgacatacatgcggcgccaacgccacctcgaggacctggccgagcgattgccgtgggtaggtgaactagtcgagcggggcatcagtgccaccaaggcggccctgcgggagatgttcgagccaacggcattcttcgaagcgctcggcgttcactatctcggcccgttcgacggccatgacatccccgagatggaggatgctctaaccaacgcggcggagttcgagggcccagtggtgattcacgtcctgacccagaaggggcgaggccacgcccccgccgaacaagacccaatcaagcacatgcacgatacgggcggagtcaagcccggcagttatacggaggcgttcactgagtcgttgatcaaggcagccgagtcccggcccgaagtggtggccatcacagcagccatgcccgactccaccggactactccccttccgcgaccggtttcccgagcgatgcttcgacgtgggcatcgccgaacagcatgcagtcacggctgcggccggcatggccatgggtggcctccgtccggtggtcgccctctacgccacattcctgagtcgagccttcgaccaggccaatctggatgtcggcctccatgggctgcccgtggtgttctgcctggatcgggcgggaatcaccggcgacgacggcccgtcccaccacggg

SEQ ID NO: 232425 - DNA, 491 bp, Unknown
  Bacterial polypeptide expressing nucleotide sequence isolated from the Sargasso Sea
tatgaacaaggataattcattattatacacccttgatttacctggggatttaaaagggttatgcaaacaagatatggaaactcttgcgagcgaaattcgacagttacttatggaaattggggatgaatgtggcggtcaccttgcctctaatttaggcgttgttgagttaacccttgcactacattcagtatttgattctttaaacgataagtttgtctttgatgtatctcatcaaagctatgttcataagataattactgatcgacttgataaaatgtttactattaagcaatatggtggtctatctggtttttctaagatgtcagaaagcccatatgatgtatggggtgcgggacatgcatccactgccctatccgcgggattgggtatggctcaggcccgtgacagaatgaatgatgactattcagttgtttctattgtaggcgatggctcattatcaggtgggatgtgctttgaggccctgaacaata

SEQ ID NO: 232426 - DNA, 220 bp, Unknown
  Bacterial polypeptide expressing nucleotide sequence isolated from the Sargasso Sea
atggtaagacttatcaaacagattaattttccctcagacttaagaaaatttaaaaaagataacttaagacaaatctctaatgagcttagagatgaattaatcgaagtagtatctgaaacaggaggtcatttgggagcagggcttggagtagtagaattgactgtagctcttcactacgtttttgatacaccaaaagataaattagtttgggatgttagcc

SEQ ID NO: 232427 - DNA, 737 bp, Unknown
  Bacterial polypeptide expressing nucleotide sequence isolated from the Sargasso Sea
ggtggcttatctgggttttacaaaaagatctgagagtgaatatgatccatttggtgcagcacatagttcaacctcaatatcttctgctttaggaatagctattgcaaacaaactttctaacaaatctgacaatgttgttgcagttataggtgacggtgcaatgagtgcaggtatggcttatgaagcaatgaataatgcgggtgctagtaaaactaaaataattgtaattttaaatgataacgatatgtccatagcaaaacctgtcggagcaatgagagcatatttggcaaagattttatcaggaaaaatttatttcagttttagagaaactataaaacttataatatctgctttttcaaaaagatttagtaagaaagctgggaaagctgaagattttttaagatcggtagttacaggtggcactttatttagttcaatgggtttttattatataggtcctatagatggccatgatatagacgatttagtttctgttttaaaaaatgccaaagaaataaattatgatggtcctattatgattcatataaaaactgaaaaaggaaaaggatatgaatttgcagaaaaatcagatgataaataccatggagttactaaatttaatgtaaacactggagttcaagaaaaatctaaatcaagcattccttcttatacaaaagtttttgctaacactcttataaagcatgctgagaaagatagtaaaattattggagtaactg

SEQ ID NO: 232428 - DNA, 538 bp, Unknown
  Bacterial polypeptide expressing nucleotide sequence isolated from the Sargasso Sea
atggacaagaaaaaagaaacacttttagaaacacttaaccttccagatgacataaaaggtctatgtaaacaggacatggaaaatttatgtcaggaaatccgagataaattaatggaagtaaaagatgaatgtgggggccatttagcttctaacttaggcgttgttgaacttaccacagcccttcacgctgtgtttgatagtccaaaagataaatttgtatgggacgtatctcaccaatgctatgtacataaaatgctaacaaaccgattagataaaatatttacaataaaaaaacataaagggttatctggttttgcaaaaagagacgaaagtccccatgattgttttggcgctggacatgcatcaacatccctatcagctgcactcggcatggcacatgcaagagatattcaaggaaatgacaacagcgttattgcaatatttggtgatgctgctttatctggtggaatggcatatgaagcaataaataatattgaaaatatgaaaaagaactttatttgcattctaaatgacaatg

SEQ ID NO: 232429 - DNA, 252 bp, Unknown
  Bacterial polypeptide expressing nucleotide sequence isolated from the Sargasso Sea
aatgagcaagacatataaatttttagacgacataaattttccatcagatgttagaaaactttctacatcagatttaaaaacccttgctgacgaagtaagatctgagatgatagacgcagtatctgtcactggcggacatttaggtgcaggtttaggagtagtagaattaacagttgctttgcattatgtttttaatacaccaaatgacaaacttatttgggacgttggtcaccaaacttatccacacaaaat

SEQ ID NO: 232430 - DNA, 828 bp, Unknown
  Bacterial polypeptide expressing nucleotide sequence isolated from the Sargasso Sea
cggctacgagtgccgccggcctggcctacggtggattgcaccccgtggtggcggtgtatgccacgttcctcaatcgcgccttcgatcaggtcctcatggattgcgccctccacaacgcgggcgtgacgttcgtgttggaccgtgcaggcgttaccggtgacgatgggccgagccataacggaatgtgggatatggcgatgctcggcgtcgtccccggcctacacctatcggccccccgcgatgagtcaaccttgcgccgtgcgctccgggagtcgatcgcgatctccgacgcaccatcggtggtccgttttgccaagggtgctctcggtccggacatcccatccctgcgcgcgcaggggggagtcgacgttctcttcgaccacgaccaagacgaggtggacgtcctcatcgtggctatcggcagtttctgcagcgtcgcgctcgacgtggcggcgcgactacgagatcaggggatcacgacccgtgtcgtcgacccacggtgggcgttaccgatctccccggaccttgtcgagatgagccgccggggtcgacgtgtggtggtcatcgaggacggagttcggttgggcggtatcggtgcgggaatctctcaggcgatgcaggatgcctgcgtggtggctccgacccgcctctttggaattcctcggaccttccttccgcacggcaagcggcagcagattcttgagcacatcgggttgagcagtcagcagatttcccgagacatcgtcgaatgggtcgcggcggagccagccggttcgtctacgtcggaagagacgcaacgcccggtgccaagaaccgctggcccgtaac

SEQ ID NO: 232431 - DNA, 717 bp, Unknown
  Bacterial polypeptide expressing nucleotide sequence isolated from the Sargasso Sea
acatggattcaagcctgccgaggctgatcctgtattctttcatacccctgccccttttgaatgtgatgatgacgattgcattgtctccatcaaaaaatcttcatcgaaagcatacacaaatgtggcaagtgaaacgatcagtgactgcatgagcaagaattctcaagttaccgtcctgactgctgcaatgtgtcaaggaaataaacttgaaaaggtccgtgaaaagttccctgaccgtttttttgacgtcggtatttgtgaatcccatgctgttgcttttgctgcaggtcaggccaaggcaggtgctcggcctatcgttgatatctacagcacatttttgcaacgctcttttgaccaaatatttcaggaagtctgcctgcagaatcttcctgtcacctttatgctagatagagccggtcttactggcccagatggtccaacccaccacggagcttttgacttgggctacatgcgactgttccccaacatggtggtcatggctccaggtgacgagcatgacttgaaatcaatgctcccttgggcattagaacatgacggtcctgtttcactgcgttatccaaagactgttgcagacagtcatgccgggaaacgtgaccctattcaacttggtaaagccgaggttcttcgagacggttctgatggccttatcattgcgtgtggtactcttctcggagcagcgcttgaggcggcagcatc

SEQ ID NO: 232432 - DNA, 493 bp, Unknown
  Bacterial polypeptide expressing nucleotide sequence isolated from the Sargasso Sea
aggttgatgctttcaacaggatttaactataaaggacctgcttcaattagatatcctagaggagttggtcctaacgttaaagtagatgagaaactagatacagtcgaaattggtaaagctagagttattaatgaagcaggaaaagataaagtcattcttaactttggatctctgctgcatatagcaagagaaatatcagaaaaatttaaatttactcttattgatatgagatttgtgaagccgctagacgaacaaatcctgaatcaatatctaaaaaaagctgatctatttatatctatagaagatggatcaattatgggtggcgctggcagcgctgttcaagaattctgttcaaaaaataatatcaatatcaagtctgagctttttggtatacctgacgaatttattgaacatgcatcaagagaagaaatgctcaatgatgctggattatctttagataaaataagctctaggctaaaagagttaatataat

SEQ ID NO: 232433 - DNA, 331 bp, Unknown
  Bacterial polypeptide expressing nucleotide sequence isolated from the Sargasso Sea
tggaacgttaatttcaacatcagaagaagttgcaaaagagttaaatgcttctttattagatatgaggtttgtaaaaccattagataaagaattaatagccgaacactcaaaaggcaaaaaagccattattactattgaagatggcgccattacaggaggtgcaggttcggcagtaagtgaatgggcgcaagaaaataaaatcagtgtacaaattgttatttgtggcatcccagatgaatttatagatcattcaagcagggaagaaatgattaaagtggttggcctagataaagatggtattttggccaaagtaaaagattttttatcttaa

SEQ ID NO: 232434 - DNA, 787 bp, Unknown
  Bacterial polypeptide expressing nucleotide sequence isolated from the Sargasso Sea
tcattaagtgccatgctgggaatggctatagcaacaaaagaatctaaccctgataaaaaacatgtcgcaataattggtgatggtgcaatgactgcaggtatagcatttgaagcattaagccatactggccatttaaaacccaatgttctaataattttaaacgacaatgacatgtccatttctgaaaacattggaggactatctaattatttttcaagaatatgggcatcaaaaatatataaaggaattaaaaaaggtggtagaagctttttaaaaccattgccgcaagcatttcatctcgcaagaaaggtagaaactcaaatgaaggctatggttgcacctggaacaatctttgaagaactaggtttaaactatattgggccaattgatgggcataatataaaagaattaataaatgttatatcaaatttgaaagaatttgatggtcctcaatttttacatgttattacaaaaaaaggtgccggcttagaccctgcagaagcagatagaattggatttcatgctattggaaaaattaattctataaaagatgaaaaaacaaaacaaaaaaaatatcaagatatttttggggaatggattgttgatatggcatcgcaagacaaagatttaattggaataactccagcaatgaaagaaggttctggtctggttatgtttagtaaaaaatatcctgaaagatattttgacgtagcaattgctgagcaacattctgtgacttttgctgctggtcttgctgttgaaaataaaaaaccctgtggttgctata

SEQ ID NO: 232435 - DNA, 223 bp, Unknown
  Bacterial polypeptide expressing nucleotide sequence isolated from the Sargasso Sea
atgcttttaagtgagttaagtcatccaaatcaactacatggcttaacagtttcacaattagaggaaattgcttgtcaaattagagaaagacatcttcaggttgtatctacaagtggtggacaccttgggcctggattaggagtagttgaattgactttggctctatatcaaactcttgatctagattttgacaaggttgtttgggatgtgggacatcaaggtt

SEQ ID NO: 232436 - DNA, 544 bp, Unknown
  Bacterial polypeptide expressing nucleotide sequence isolated from the Sargasso Sea
atggattatgaacttttagataaaattaattttccatctgacttaagagaatttaaaaagaaagatctaaagcaaatctcagaagaattaagagctaaaacaattgagactgtttcaaaaactggtggtcatctaggtgctggattaggtgttattgaattaactgtagcaatccattatgtctttaacactccacatgataaattaatctgggatgttggacatcaaacttatcctcataaaatcattacgggaaggaaaaaaaatatagatacacttagaaaaaaagatggtgtttatggttttgtaagaagatcagaaagtgaatatgatccttttggcacagctcatagttcaacagcagtatcagcgggcttaggaattaaagccgcaaaagatataaataaagacaactcaaaagttatatgtgttgtaggagatggtgccttaagtgcaggtttagcatatgaaggattaaacaatgcaggtgcacaaaaaaagggtttaattgttattttaaatgataacaaaatgtcaatagata

SEQ ID NO: 232437 - DNA, 667 bp, Unknown
  Bacterial polypeptide expressing nucleotide sequence isolated from the Sargasso Sea
ggtttggttggagcagatgggcccactcaccagggtgtttatgacctgacctatctgaggatgattcctggaatgaccatcatggttccgagagacggtatagagttgagaatgatgatcgatttttcttatcactacgaatcaggaccgattgcggtgagatatccccggggaaataccgttttaacggagcaaaatgaaatccccccgattgaaatgggccgagcccacctcttgcaggatggaacagacatcgtgttactggcagtcggagtcatggttgaaaaagccattcaaactgcaaatatcctggaacaagaagggttttctgttgcaatcgtcaacgcacgtttcgttaaacccctcgaccaggaattgattctgaatctggcctccaatactaacctcgtggcaacgatggaagaaaacaccattctaggagggtttggtacagcagtgactgaattgttaaaccagtccgggatgaccataccgacgcttactttcggcataccggaccgttatatttcccaggggactccggaagaacaaagtttcgatgcaggattaagttcagagcaaatgagccatggaattcgggaaagatatcaacaactacccatccgaaagaaaagccttaaattaacaagaaaaaaagcttcctagt

SEQ ID NO: 232438 - DNA, 922 bp, Unknown
  Bacterial polypeptide expressing nucleotide sequence isolated from the Sargasso Sea
atggcaaaatcagtaactgtacgcgctccttgctctactgcaaatttgggtccaggatttgacgtatttggcatggcattagatgcactttatgataatgtggttttaacaaagaaaggaaaaggagttgtcatagtaagttcagatgatattccactcagtccatcaaaaaatactgcaggattagttgtctctgcaatgaaaaagaaattcaaaataaaagatggtatagaaattaaaattaagaaaaacgttcctgcaggatttggtatgggaagtagtgcagcatctgctgctgcatgtgcagtaggtcttaacaaattatacaatttgaaattaactgatgcagagttggttgaatttgcaggaattggtgaaaaagctagtgcaggtacaatacattacgataatgttgcagcatctgtattaggcggatttgtaatagttaagacaaaacctttgcaagttgttaagattcaacctccaaatgacttagttttatgcgtagcagtaccagaattgaaggttcctgcaaagaaaaccaaggtttcaagaggagcaattccaaaaaaagtttcattaatcgatatggtgaaaaatatttcaaatgcatcagccattgcagcaggtttttcagagaaaaattctgaattaattggaagatcagtacaagatgtaattgtcgaaccagcaagaaaacacatgattcctggatttgataaagtgaaaaaaaatgcaatagatgcgggtgcatacggagttaccataagtggtgcaggaccatcagtgatagcatttacagataaaaaacatgattcaaagaaaatttctaatgcaatgaaaagaggttttaaagctgcaaacaagaaatcagagatttttatttgtaaaccaagtaaaggaccaataatcagaaagtgaa

SEQ ID NO: 232439 - DNA, 343 bp, Unknown
  Bacterial polypeptide expressing nucleotide sequence isolated from the Sargasso Sea
tttaaattttggtgctttacttgaagaagcaaaagtagtttgcgataaccttgatcttactttaattgatatgcgttttgtaaaacctttagattcagagatgctattaacttatttaaataaagctaatttttttgtatcgcttgaggatggttcaattgcaggaggagcaggcagtgctgtgcaagaattttgcatggaacacaatatagaaatacgatcaaaacttttcggcattgaagataaatttattgagcatgcttcaagggaagagatgcttgaggaagcaaatttaacatctatgaaaatagaaagagtgttaaaaaatatgctggaaatatag

SEQ ID NO: 232440 - DNA, 308 bp, Unknown
  Bacterial polypeptide expressing nucleotide sequence isolated from the Sargasso Sea
tatgaaatatctagataagattaattctccaaaagatttaaaaaatattccaaaagaggaattaggagaagtatgcaaagagcttcgcacttatattattgatacaattaatgaaataggaggacatttagctccaactcttggcgcagttgaaataacaactgctgttcattatgttttcgatgctccaagagacaaaattgtatgggataccggtcatcaggcatatgctcataaagttcttacaggtagatatagtcaattcccaactatcaaaagatataaagggttaagtggttttttaaagc

SEQ ID NO: 232441 - DNA, 331 bp, Unknown
  Bacterial polypeptide expressing nucleotide sequence isolated from the Sargasso Sea
atgaaatataagtatttagataaaataaactttccatctgatttacgtaaattggctttaacagaattagaagatctttcaaaagaactaagaactaaaacaattgaagctgtatcaaaaactggtggacatttgggggcaggtttaggagttgttgaactaacaatagcccttcattatgtatttaacacaccacgagatagattaatttgggatgtgggacatcaatcttatcctcacaaaattataactggaagaaaaaataaaattgaaactttgagacaaaaaaatggtttatacggatttgtaaaaagaagtgaaagtgaatatg

SEQ ID NO: 232442 - DNA, 777 bp, Unknown
  Bacterial polypeptide expressing nucleotide sequence isolated from the Sargasso Sea
tcacatttctgcagcgaggttgggatcaggttgtacatgatgtggcattgcaaaaagtaccggtgcgttttgcgatggatcgcgcgggtctagtcggagcggacggtcctacacatgcaggagcttacgacgtgacttttatggcctgtctaccagacatggttgttatggcacccatgaatgaagcagaactgtgtcacatggtagcgacttcattagcgatcgatgaccgtccttcatgtttcaggtatccgcggggcgctggtactggtgtaaacatggaaagtgaaagtgttcaaatacttgatccaggactcaaagggatggtgctagacattggtaagggaagagtgttgcgcgaaggaacagatgtggttctcttgggttatggtactccaaccactaactgtctcttagctgcgcaactcttacaagattttggcgttagtgcgacagtcgctgacgcgcgattctgcaagcctctggatgtggaactgattcgtcgcttggcgaaatcccatcctgtattcattacggttgaggagggttcaattggtggtttttcatcgcatgtgctgcatttcctcgcaacagatggtcttctcgatgggggtttgaaggttcgacctatggttcttccagaccgacctatcgatcacggttcgtactcatttcaactgaatgaggcagggctaagtgcgtcacacatcgcgtcaacggcactctccctcgttggaaaacaacacgagtcgctagaagtcctagctaaactatagg

SEQ ID NO: 232443 - DNA, 191 bp, Unknown
  Bacterial polypeptide expressing nucleotide sequence isolated from the Sargasso Sea
aatgtataaatatttagataagataaattttccgtcagatttaaaaaaactaaaaaaatctgaattaaaagttttatcggaagaggttagaaaggaaatgataaacgccgtgtcagagacaggcggtcatttaggtgctggtttaggtgttgtagaattaactgtggcgttacattatgtttttgaaaccc

SEQ ID NO: 232444 - DNA, 562 bp, Unknown
  Bacterial polypeptide expressing nucleotide sequence isolated from the Sargasso Sea
ccaagttgtccagagatttgccaagatatgctgcatacaggttatttgtaccctggaccagcgattgttagatatcctaaagaaagtgttgaagagttaccaaataagaaagaatttcaaaaaattgaaataggaaaagcaaaagaaattattaaagggaaaaatatagtgtttctatgctttggcacattacttgataaggcaaagataattgctgaaaaatataattgtagttgtattgatatgaggtttgtaaagcctttggatgagcaattaattaaaaaatacgccaaagataattctttaataatatctatagaggataacatgttggcaggaggtgctggaagtgccgttctcgaatttttatcaaaagaagaaattaaaatagacttcctatcctttgggtctaaggatgagtttcctcaacatgcttcccgcgatgagcaactcatcgactctaatatttcagaagagaatatagaaaaattggtaaaagaatatataaaaaataataacttgttaagtatttctgactctagtaacattaaagatgactaat

SEQ ID NO: 232445 - DNA, 919 bp, Unknown
  Bacterial polypeptide expressing nucleotide sequence isolated from the Sargasso Sea
ggaaaaagtaatggtagtacaaataaaattacaaagcaggaagaggttccatcttttcaagatgcttttggttatctatcatgtgaaattgcagaaaatagaaaagatacagtgtgtattacagcggcaatgcgtgagggaacaggattagttccctttgagaaaaaatttccagatagatactatgatgtcggcattgctgaaggtcatgctgttacattttctgctggtttagcaacacaaggaattcgtccaatagttgccatatactcaacatttttacaaagggcatttgaccatatagtccacgatgtttctgtacaaaatttgcctgttattttctgtatggacagatctggaattgctggcgaagatggccctactcatcatggtgctttggatataccatattttcgctgtatacaaggtatgattttaactgctcctaaaaatggaaatgaattaagaaatttgttatacactgcattaaatcataatggtccttttggtataagatatccaaagtttagttctttagagtttgatagaaatggtcaggctgaccttttgccacttggctcatgggaggtggaaaaaaaaggtgaagacttgctgatattagctgtcggccccatggtttatagcgcattatctgttgccacagatctagatcaagaaagtatattttgcgaggtggttaattgtagatttgtaaagcctatggatacagcatatttaaattcaattataaaaaggggatttgataaaattattacaattgaagaaggagttataaatggaggttttggagatggtgtctcttcttatttattagaaaatggttatacgggagtaataaaacgattaggtctacctgactcttatgtagaacatggcagtaggaatcagatattaaata

SEQ ID NO: 232446 - DNA, 802 bp, Unknown
  Bacterial polypeptide expressing nucleotide sequence isolated from the Sargasso Sea
agtgagtatgatccatttggtgctgctcatagttcaacttctatttcttcagctttaggaatagcggtagctaataaattatcaataaatcccagcaatataatagcagtaataggtgatggagctattagtgctggcatggcatatgaagccatgaacaatgcaggtgcaagcaaaacaaagatgattgttgttttaaacgacaatgatatgtcaattgcaaaacctgttggtgctatgagaaaatatcttgcaaaaattttatcagggaaaatttattttagctttagagagacattcaagttaattatatctgctttttcaaaaagatttaaaaataaagcaggaaaagcagaagattttttaagatcagcagtcactggaggaacattatttaactctatgggattttattatattggacctatagatggacatgatattgatacaatggtctcagtatttaataatgcaaaagatattgactatgatggaccaattttgattcatgttaaaactgaaaaaggaaaaggttacacttttgctgaaaaatcagaagataagtttcatggagtttctaaattcaatataaaaactggagaacaattaaaatctatttctaaaataccttcatatacaaaagtatttgccaattcactaatcaaacatgcggaaaaagatagtaaagtagttggtataactgcagctatgccatcaggcacaggaatggacttatttggaaaaaaatttccagacagaatgtttgatgttggtatagcagaacaacatgcggttacttttg

SEQ ID NO: 232447 - DNA, 460 bp, Unknown
  Bacterial polypeptide expressing nucleotide sequence isolated from the Sargasso Sea
atgaaaaaaaaatacgaactgttagatgaaattaattttccatcagatttaaaaaaattacctgagtcaaaattacaaaaagttgctgatgaattaagagaggaaatgatagatgctgtctcagtgaccggtggtcatcttggagcaagtcttggagtcgtagaattaactgtggctttacattatatttttaatacacccaatgataagttaatctgggatgtgggtcatcagtgctatccacataaaattttaaccggcagaaaagatagaataagaactctaagacaaggaaatggtctttctggttttacaaaaagatcagagagtgaatacgatccctttggtgctgcacacagctcaacatcaatttcatcagctttaggtatagcagaagcaaacaaactgtctaataaatcagacaatgtaattgcagtaattggtgatggggcaatcagtg

SEQ ID NO: 232448 - DNA, 778 bp, Unknown
  Bacterial polypeptide expressing nucleotide sequence isolated from the Sargasso Sea
tggctcaataaataagcagcttatagttattttaaatgataacgatatgtcaatagataagcctgtaggggcaatgagcagttatctttcaaaattattatcttcaaaatcatattcaagcataagatcaataataaaaaaagtttctagaaaatttcctaaaacttttgcaaaaatgatgtaccgaacagaagagttttcaaaaggatttataaccggtggaacactttttgaagaactaggttttttttatttaggcccaatagatggacataattttaataatttaataccaattctccaaaatataaaactttcaaaacttgaaaaaccaatttttttacatgttattactaaaaagggtaaaggataccctccagctgaacaagcacatgataaatttcatggagttaataaatttgatattaattcaggttcaccattaacaaagtctaattcaaaaacatattccaagatttatggagaaacactaactcaagaagcagaaaaagatgagtcaatagttgcagttactgctgctatgaaatctggaacaggcttagataaattctcaaaaaaatttccaaaaagattttttgatgtaggtatagcagaacagcatgcagtcacaatgtgcgcaggtttagcaacagaaggtctaaaaccatttgcaactatttattcaacatttttacagagagcttatgatcaaattgttcatgatgttgcacttcaaaaattacctgtaagattgctattgatagagcaggacaagtag

SEQ ID NO: 232449 - DNA, 460 bp, Unknown
  Bacterial polypeptide expressing nucleotide sequence isolated from the Sargasso Sea
atgagcaaaaaatataaatatttagacaacgttaactttccttcagatcttaaaaaactttctcaatctgagttaagagttttagcagatgaagttagagaagaattaatagagactgtatcagaaacaggtggacaccttggtgctggactaggcgttgttgagcttacagttgttttacattatatttttaatacaccaaatgataaattaatttgggatgtgggtcatcaaacttatccacataaaatattaactggaagaaaagacagaattagaactttaagaaaaggtgatggtttatctggttttacaaaaaggtctgaaagcgagtatgatacttttggtgcagcacatagttctacttccatttcatcagccttaggaatagccgttgcaaataaattatcaaataaaacagacaatgtaattgcagttattggagacggagcaataagtg

SEQ ID NO: 232450 - DNA, 968 bp, Unknown
  Bacterial polypeptide expressing nucleotide sequence isolated from the Sargasso Sea
tgtttcagaaacaggaggtcaccttggtgctggtttgggagtggtgaaattgacagtcgcacttcattatgtttttgacactccaaatgataaattaatatgggatgttggtcatcaatcttacccgcataaaattttaactggaagaaaagataaaattagaactttacgacagggcgatggattatcaggttttacaaaaagatctgaaagcgaatatgacccatttggagcggcccatagttcaacatctatttcatcagcattaggaattgctgaagcaaataaattagacaataaatcttccaatgtaatagctgttataggtgatggtgcaattagtgcaggtatggcttacgaagccatgaataatgctggcgcatctaaaacaaaaatgattgttattttaaatgataacgacatgtcaattgcaaaaccagttggagcaatgagaacttacttggcaaaattatttactggtaaaatatattttagtcttagagaaacattaaagttaattacatctgcattttcaaaaagatttagtgctaaagcaggtaaagcagaggattttttccgctcagcagttactgggggtacattgtttagttcacttggtttttattatgcaggtcctatagatggtcatgatttatcaagcttagttccaattttaaaaaatgcaaaagaatcaagacatgagggtcctataatgattcatatcaaaactcaaaaaggaaaaggttattcttatgcagaaaaagcaaatgaccattatcatggggtatcaaaatttaatgttaagactggcgaacaagtaaagagcaaatcaaacctgccgacttatacaaaagtatttgcaaacacgttagttaaacacgccaaaaaagatagcaaaatagtgggaataacagcagcgatgccaggaggaaccggtatggatattttgggaaggagtttccaaatag

SEQ ID NO: 232451 - DNA, 760 bp, Unknown
  Bacterial polypeptide expressing nucleotide sequence isolated from the Sargasso Sea
tttaaccttacgcagctatttattcacatttttgcaaagagcttatgatcaagttgttcatgatgtagcgatacaaagcttacccgtcagatttgcaattgacagggcaggattagttggtgcagatggacctactcacgctggttcatttgatattacttatcttaccactttacctaattttattgtaatggctgcgagtgatgaggctgaacttgtaaaaatgataaatacttctatagatatcaatgatagaccttgcgcatttagataccctagaggtaatggattgggagtcgagctaccatctattgatgaaaaattaattgtaggtaaaggcaaagttgttagagagggtaagaaagttgcaatcgttaattttggagcaagattaaatgatatttttaaatcttcggaaattttacaaaaaaaaggtataaacttaaccatagtcgatgcgagatttgccaaacctttagatgaaaatcttttatggcaagtagctaatgagcatgaaattttaattactgtagaggaaggttctataggaggttttggttctcatgtctctaaatttcttacagataaaaatctacttgataacaacttaaaactgcgaaacatggtattgcccgataaatttatagatcaagataagccagagcagatgtataagattgcaggattagactttctcaacatagttgataaagtattagagactttaaactctaaggtaattattaaaaaaacaaattaa

SEQ ID NO: 232452 - DNA, 970 bp, Unknown
  Bacterial polypeptide expressing nucleotide sequence isolated from the Sargasso Sea
ttaagagaatttttgttgtattcagtcagtcagtctggaggacattttggggcaggattaggtgcgattgaattgactattgctcttcacagtatccttaatctacctgatgacaagattgtctgggatacaggacaccaagcatatcctcataaaattttgactggccgtaaggacaaaatgcacctgatgaggaaacttaatggtattgctgcctttccatctataactgaatcagtttatgacgcaatgagcgttgggcactctagcacttcaataagtgcagcacttggaatgaatgaagctaacttaagtaaagatagtaaaaaaaatgtttttgctgttattggtgatggtgcaatgacagcaggtattgcttttgaggcaatgatgcatgctggtcatcttgataataatctaaaaattattctaaatgataatgatatgtcaatttctaaaaataagggtgggctatcagattatcttgccaaaatttgggcatcaaaatcatataaaaaacttaaatctagtggtaaaagtgtattgaacaaacttccttatgctctgcatatttcaagaaatttaaaggatggaattaagtcggcaataatgccaggaaatctttttgaggatattggaattaattatattggtccaattgatggtcatgacattgaattgcttcaaaaaacaattaatagaatgatggagaaagactctccatatttacttcatataatcacaaaaaaaggtgctggatttatacctgctgaagaagaaagaatcaaatatcatgcgatttcaaagattgaacccgagaaaaacagctcaaaaccaaaattccaagacatttttggtgattggttatgcgataaggcagaaactgataaatcgcttgtgggtatcacacctgcaatgaaagagggttctggaatggtgaactttgaaaaagaataccctgaaagatttt

SEQ ID NO: 232453 - DNA, 880 bp, Unknown
  Bacterial polypeptide expressing nucleotide sequence isolated from the Sargasso Sea
tgaattattagataatattaattatccctcagatttaaggaaacttagtaaaaatcaattagatcaagtttcaaaagaattgagatctgaacttattaatgttgtatccgaaaccggaggtcatctaggagccggtctaggcgtggtagagcttactgttgctttgcattatgttttcaatactccaaaagacaaattagtttgggatgttggccatcaatgctacccacacaaattaattacaggaagacgagacagaataagaacattaagaaaaggcggtgggctttcaggatttactaaaagatcggaaagtgaatacgatccatttggagcagcacatagttctacatctatatcatcaactcttggtatggctacagctaagaagctttctaatgataaaaataatgttgttgctgttataggtgatggagcaatgagtgcaggaatggcctatgaggcaatgaataatgccggagcgatgaaatctaaattgatagttgttcttaatgataatgacatgtctattgcaccaccggttggtgcgatgagcaaatatcttgcaagacttttgtctggaaaaatatatttcagtttccgtgaaaccataaaattaatactttcagcattttcaagaagattttcaaaaagtgcggggaaagcagaggatttacttagaagcgcagtgacaggtggaacattattcagccaacttgggttttattatataggtcccattgatggacatgatgtaaacaatttagttacaattttagagaacgcaaaaaattcaaatcatcaaggtccaatattaatacatgcaattaccaaaaagggtaaaggatacaaacccgctgaagaatcgggagataaatat

SEQ ID NO: 232454 - DNA, 867 bp, Unknown
  Bacterial polypeptide expressing nucleotide sequence isolated from the Sargasso Sea
gatgttggtcaccaagcttatccccataagatattgactggtcgaaagaatcaaattagctcaataagatcaaaagatggcctagcaccctttccatcaagaaatgaaagtgattttgatgcttttggtgcgggacattcaagtacgtctataagttcagcagttggtatggctattgctaacaaattaaatgagggagagaaaaaaacagtagctgttattggagacggtgcaatgactgccggaatggctttcgaagcaatgcaacatgctggaggcataaagccagatatgctgataattctgaatgataatgacatgtcaatctctgagaatgttggaggcctaaataattacttctcaagaatatgggcttccaaactttataaagggattaaaagtaatggtaaaaagtttttaaagaatattcctgctgctcatcatctagcccgcactgttgagactcatatgaaaacaatggtagctccaggagctatttttgaggagcttggactaaattatattgggccaattgatggtcatgatatagatcaacttttgaatgtaattggaaatctaaagaattttgaggggccacagttccttcacataattacaaaaaaaggtgctggatatgatttagctgaagaggacagaattaaatatcatgcaatatctaagactaatacttcaaaaaatataggaaaaacaaaacctaaatatcaagatatatttagcaactggatagtagacatggctagagaagatattgatcttgttgcaataacaccagctatgagggaaggatcaggattagttgaatttagcaaagagtttccagagagatattttgatgttgcaatagct

SEQ ID NO: 232455 - DNA, 666 bp, Unknown
  Bacterial polypeptide expressing nucleotide sequence isolated from the Sargasso Sea
aatgaaaaaaaattatcaatttttaaataatatcaactttccatctgatttaagaaaagtttctgaaaataatttacaaaaagtagcagatgaggtgagggaggaaatgataagtgctgtttcagaaacaggaggtcaccttggcgctggtttgggagttgttgaattgacagttgcacttcattacgtttttgataccccaaatgataaattaatatgggatgttggccatcaatcttacccacataaaattttaacaggaagaaaagataaaattagaactttacgacagggcgatggtttatcaggttttacaaaaagatctgaaagtgagtatgacccatttggagcagcccatagttcaacatctatttcatctgcattaggaattgcagaggcaaataaattagaaaataagtcttccaatgtaatagctgtaataggtgatggagcaattagcgcaggtatggcttatgaagccatgaataatgctggagcatctaagacaaaaatgattgttattttaaatgataacgacatgtcaattgcaaaaccagttggagcaatgagaacttacttggcaaaattatttactggtaaaatatattttagtcttagagaaaccctaaaattaattacatctgcattttcaaaaagatttagtgc

SEQ ID NO: 232456 - DNA, 826 bp, Unknown
  Bacterial polypeptide expressing nucleotide sequence isolated from the Sargasso Sea
atgtcaatttcaaaacctgttggtgctatgagaaaatatctagcaaaaattttatctggtaaagtttactttagttttagagaaacattaaaattaattatatctgctttttcaaaaagatttaaaaatcaagctggaaaagctgaagattttttaagatctgcagtaactggtggaacattatttaattctatgggattttattatattggaccaattgatggacacgatattgattcaatggtctcagtatttaataatgcaaaagatattaattatgatggaccaattttaatccatgttaaaactgaaaaaggaaaaggttattcgtttgctgaaaaatcggaggataaatttcatggtgtttcaaaatttaatgtaaaaacaggagaacaagaaaagtctaaatctaatactccttcttatacaaaagtattcgccaattcattaatcaaacatgcagaaaaagatagtaaggtcattggcataactgccgctatgccatcaggaacagggatggatttatttggaaaaaaatttccagaaagaatgtttgatgttgggatagccgagcaacatgctgttacttttgctgcgggtatggctaccgaagggtataaaccttacgctgcaatatactcaacatttcttcaaagagcttacgatcaggtcgtccacgatgttgccatacaatccttgcctgttagatttgcaatcgacagagcggggttagttggtgctgatggcccaacacatgctggatcttttgatataacatacctttcaacattaccaaattttgtggtaatggctgcaagtgatgaag

SEQ ID NO: 232457 - DNA, 889 bp, Unknown
  Bacterial polypeptide expressing nucleotide sequence isolated from the Sargasso Sea
aaaccagtttttcttcattgtataactaaaaaaggtaaaggctatagtccagctgaaaagtcagaagataaatttcatggtgtagaaaagtttgatattaatacaggaaattcagttaaaaaaacaaatctaaaatcttactcaaatgtctttggagaaaaactaacaaaacttgcaaaaaatgacgaaaaaattgtagcaataacagctgccatgatgtctggaacagggttgaaattattccaacaaaattttgaaaaaagattttttgatgttggtattgctgaacaacatgctgttacaatggcagctggattagctactgaaggtttcaagccatttgttgcaatttattcaacatttttacaaagagcttacgatcaaatagtgcatgatgtagctattcaaaaattacctgttagatttgcaattgatagagcaggattagtaggatctgatggtccaactcatgctggttcatttgatattacttacttagccacattaccaaattttatagttatggcgcctagcaaccaaagagagttatctaatatgatagagttatcttgcgaaattaatgacacaccatctgcttttagatttccaagaggaacaggatcagatgagctatttaataatcagcctacagatatcagcataggtaaaggatatattctaattgaaggcaatgatgtagcaatcttaaatttaggcacaagacttgaaaaatgtattgaagctagtaagtttcttaatcaaaataatatttatcctactattgcagatgcaagatttgcaaaaccattagacacacagttaatagatgacttattaaataatcataagtatattttaactatagaagaaggttctataggtggatttc

SEQ ID NO: 232458 - DNA, 928 bp, Unknown
  Bacterial polypeptide expressing nucleotide sequence isolated from the Sargasso Sea
aaaaaattatcaaaaaaaattcttcataagattgatgaaagccttaaagcgcttttagttccgggagtattatttgatgagcttggttttagatatttcggaccaatagatggtcatgatatcaacgaattagtaaaagcattaaataatattaagaacattaatcaaccagttcttttgcatattattaccaaaaaagggaaagggctggtctctactcgagaagataatggtgaatatcatagagatgctgtgaagtttcatgctgtaaaacctaattcaactaacggtgaactaaaaaaatctaagaagaaaataataccttcatttcaggatgtgtttggatatttgtcttgtgaggttgctagaaatcgtgatgatactatatgtataactgcagctatgagggaaggaactggattagtcccgtatgcaaaagaatttcctaatagatactatgatgtaggaatagctgaaggacatggtgttactttttctgcaggatttgcaactgaaggattaaggcctatagtagctatatattcaacatttcttcaacgtgcatttgatcatattgtgcatgacgtggctattcaacatttacctgtaatattttgcatggatagatctggtattgcaggtgaagatggacctactcaccacggatcattagatatagcatatctacgatgtattcaggatatgattgttactgcccctagaaatggaaatgagtttcgtcatcttctttattcagcgcttaatcagacaaaatcccctttttcaattcgttatccgaaatcaagttcagttgtgtttgatattgatggtcaagcagagcttttacccattggtagttgggaggttttacgttctggttcagatattgcagtattatgtgttggttcactttcttacgatgttgaaa

SEQ ID NO: 232459 - DNA, 1015 bp, Unknown
  Bacterial polypeptide expressing nucleotide sequence isolated from the Sargasso Sea
cctgtcaaaggagttaagagaggaattgatagaggctgtttcatttacaggtggtcatttaggtgcaggtttaggagttgttgagttgacagtagccttacaccatgtttttgatacacctaatgataaaatagtttgggatgtcggccaccaatcgtatcctcataaaattttaacaggtcgtaaaaatagaatcaaaacactgagacaaggaaatggactatctggtttcacaaaaagatctgaaagtgaatatgacccatttggtgcagcacatagttcaacatcaatttctgcagctttaggtattgctactgcaaataaactttcaaaaaaatcagaaaatgttgttgctgttattggcgatggagcgatcagtgctggaatggcttatgaggctatgaacaatgcgggcatatcaaaaactaaaatgattgtaattttaaatgataacgacatgtcaattgcggaacctgtgggtgcaatgagaagttatttagcaaaattattgactgggaaaatatattttagtctaagagagacttttaaattaattatttctgccttttccaaaagattttcaaaaaaagctggaaaagcagaagactttctgaggtcagcagtaacaggtggaacactttttaattcactaggtttttattatgttggaccaatagatggacatgatattgatactcttgtctcagttttaaaaaatgcaaaggatactaactttgacggtccaataatgatacatattaaaactgaaaaaggaaaaggttatcaatttgcagaaaattcaaaagacaaatatcatggtgtttcgaagtttaatataaaaactggtgtacaagaaaaatcaagttctaaaattccatcatatacaagtgtttttgccaatacgttaattaaacacgctgagagagatagtaaaataattggtatcactgccgcgatgccatctggtactggaatggatttatttgcaaaaaaatttccaaatagaatgtttgat

SEQ ID NO: 232460 - DNA, 946 bp, Unknown
  Bacterial polypeptide expressing nucleotide sequence isolated from the Sargasso Sea
gaatattctaaaggacttatcactgggtggaactctatttgaggaattgggtttttattatcttggtcctatagatgggcataatatagatgatatggtttcagttctagaaaatataagagataacaaatttgataaaccagtttttttacattgtataaccaaaaaaggtaaagggtatagtcctgcagaaaaatcagaagataaatttcatggagttgaaaagtttgatattaacactgggaactcagttaaaaaaacaaatttaaaatcctattcaaatgtttttggagaaacattatcaaaacttgccgaaaatgatgaaaaaattgtagcaataacagcggctatgatgtctggaacaggattaaaattatttcaaaaaaattttgaaaaaagattttttgatgttggtattgctgaacaacatgctgttacaatggcagctggattggcgacagagggtttcaaaccttttgttgcaatttattcaacttttttacaaagagcttacgatcaaatcgtacatgacgtggctattcaaaaattacctgttagatttgcaattgatagagcaggtttagtaggatcagatggtcctacccatgctggttcatttgatattacttatttagcaactttaccaaattttatagttatggcacctagcaaccaaagagagttatctagtatgatagagttatcttgtgagattaatgacacaccatctgcttttagatttccaagaggaacaggatcggaagaactgtttaataatcaacctacagatatcagcataggtaagggatatattcttagtgaaggtaatgatgttgcaatcttaaatttaggaacaagacttgaaaaatgtattgaagctattaaatttcttaatcaaataatatttatcctactattgcagatgccagatttgcaaaaccattag

SEQ ID NO: 232461 - DNA, 867 bp, Unknown
  Bacterial polypeptide expressing nucleotide sequence isolated from the Sargasso Sea
tcaaacatatcctcataaaatattaacaggaagaaaagatgcaatggaaagcatgcgtcagaataatggactagcacccttccctgtaagatccgaaagtgaatatgacacttttggagttggccactccagtacttcaattagcgcagcgcttggaatgatcacaggagcggagaagaaaaatgaaaaaagacatgtcacggcagtgattggagatggagcaatgactgccggtatggcttatgaagctttagctcatgctgggtctatagataaaaatctgctagttattctcaatgataatcaaatgtctatttcagaaaatataggtggattaagaaattacctcgctcgtatatgggcaagtaaaacttataatagaatcagggaaggtggaaaaaatgttttaacttatgtgcctcgcgcaaaagaatttgcaaggaaggcagaaatacatgcgaaaggaatggtcgctcctggttcattatttgaagaattaggtttcgaatactttggaccagtagacggacatgataccaacggattaattaatatattagatgatttgaaacatataaatgggccaaaattcctacatgtcattacaactaaaggtaaaggttttgctcctgctgaagatgatcccataggatttcatgcaattaataaaataaagcaggaagaccttgtaaatgataagaatgcacaatccaaaaagccctcttactcaaagatatttggagaatggttatcttataaagcaaacaaagatgaaaagcttgttgcaataactcctgctatgggcgaaggatcaggaatgattgaattctctgctgagtttcctgatagatattatgatgtagccat

SEQ ID NO: 232462 - DNA, 534 bp, Unknown
  Bacterial polypeptide expressing nucleotide sequence isolated from the Sargasso Sea
aatgaaaatatttagtgaaatccctaataagattccttcaactgagctgcttgataaaattaattatcctgaagatcttaaagagctttcgcctcgtgatctaaagattttagctgatgagttgagagagtttttgctctactcagttggtaaaagtggtgggcatcttggagcaggtcttggtgttgttgagttaacaattgttttacattacctttatgattctccatcagacaatattgtctgggatgttggtcaccaagcttatccccataagatattgactggtcgtaagaatcaaattagctcaataagatcaaaagatggcctagctccctttccatcaagaaatgaaagtgattttgatgcttttggtgctgggcattccagtacgtctataagctcagcagttgggatggctattgctaacaaattaaatgaggaagagaaaaaaacagtagctatcattgagagatggtgcaatgactgccggaatggctttcgaagcaatgcaacatgctggaggcataaagc

SEQ ID NO: 232463 - DNA, 955 bp, Unknown
  Bacterial polypeptide expressing nucleotide sequence isolated from the Sargasso Sea
agtaaaaacaaataatgtaatagccgttattggagatggagctatgagcgctgggatggcatatgaggccataaataatgctggtgctcttaacactaatttactagttatattgaatgataacgatatgtctattgcacctgctgtaggtgcattaagtaattatttgtctaacgttgtatcaagtcgtccatttaataatgtacgtgaaattgccaaacagatggttaattttttaccaaaagaaattggagaaacagctaaaagagcagaaaatttagcgcgtaattttcttggtaattcagaagggactatttttagtcatatgggcatgagttatttaggccctatagatggacatgatgttaagtctatggttaaaatattagaaaatttaaaaaatagtactcaaaatgagccagttttgttgcatattgtaactgaaaagggtaaaggtcatcctttttctaaagtttctcatgaaaagtatcatgcagtttcacagtttaacgttgtaactggtgatactgttaaatcaatttctaacgctccaacatataccaatgttttctcagaaacgctatgtaaaattgctaaaaaagataaaaaagttttagctattacagctgccatgccatcaggaactgggttaaataaatttgcagatgagttccgggatagattttatgatgtaggtattgccgaacaacacgctgtaacatttgccgcaggtatggcttcagagggtttgaaaccatttgttgctatttactcaacttttttacaaagggcttatgaccaaattatccatgatgtagtaattcaaaatttaccagttagatttatgctcgacagagcaggttttgttggtgctgacggagccactcattctggatcttttgatttggcatatctttgttgtttgccgaatggtagttgttatggcaccaagtga

SEQ ID NO: 232464 - DNA, 517 bp, Unknown
  Bacterial polypeptide expressing nucleotide sequence isolated from the Sargasso Sea
gatggacgaaaaattattagataaaattaattaccctgctgatttaagattgcttaaaaaaaatcaattggaacaagtagcaaaagagttaagatctgaagttatcaacgttgtatcagaaacaggtggccatttgggagcgggcttaggtgtagtagaattaactattgctctacactacgtttttaatacaccaaaagacaaactagtatgggatgttggacatcaatgctatccgcataaaataatcactgggagaaaagataggataagaactcttagaaaaggaggaggtttatccgggtttactaaaagatctgaaagtgaatacgatcctttcggagctgctcatagttctacctcaatttcttctacgctgggaatggcaacagctaaaagactttctaatgataacaataatgttattgcagtaatcggagatggagcaatgagtgcaggtatggcttatgaagctatgaataacgctggcgcaatgaaatcaaaattgattgttata

SEQ ID NO: 232465 - DNA, 893 bp, Unknown
  Bacterial polypeptide expressing nucleotide sequence isolated from the Sargasso Sea
ggcataaagccagatatgctgataatcctaaatgataatgacatgtcaatctctgagaatgttggaggcctaaataattacttctctagaatatgggcttctaaactatataaaggtattaaaaataatggtaaaaagtttttaaagaatatccctgctgctcatcatctagcccgcactgttgaaactcatatgaaaacaatggtagcgccaggagctatttttgaggagcttgggctaaattatattgggccaattgatggtcatgatatcgatcaacttttgaatgtaattggaaatctaaagaattttgatgggccacagttccttcatataattacaaaaaaaggtgctggatatgatttagctgaagatgacagaattaaatatcatgcaatatctaaaactaatgtctcaaaaaataaaggaaaaacaaaattaaaatatcaagatatatttagcgactgggtagtagacatggctagaaaagacagtgatcttgttacaataacgccagctatgagggaaggatcaggattagttgaatttagtaaggagtttccagagagatactttgatgttgcaatagctgaacagcatgctgttactttatctgctggattagcctgtgaaaaaaagaagccagtcgtagcaatttattctacgttccttcaaagagcctatgatcaactaattcatgatgttgcacttcaaaacttagatgtcacttttgccattgatagagctggactagttggtgaggatgggcctactcattcgggcaactatgatctggtttacttaaggtgcatacctaatatgatcgtgatgactccatcagatgagaatgaaactagaaagcttttgacaactggttttttccataacggccc

SEQ ID NO: 232466 - DNA, 883 bp, Unknown
  Bacterial polypeptide expressing nucleotide sequence isolated from the Sargasso Sea
agtgaaacaaaaatataaatttttacaaaatataaattttccttcagatattaaaaaactttctcaatcagagttaaaaatattagccagagaagtaagagaagaaatgatagatgctgtttctgaaacaggtggccacttaggagctggattaggagttgtagaattaactgttgctctacattatatttttaatacaccaaatgataaattaatttgggatgttggtcaccaatcttatccacacaaaattttaactggaagaaaagataagatgagaaccttaagaaaaggtaatggattatctggatttacaaaaagaacagaaagtgagtatgatccatttggggcagctcatagttctacctcaatatcttcagctttaggtattgctattgcaaataaactatccaataaatctgataatgttgttgctgttattggcgatggagcaattagtgcaggcatgtcctacgaagcaatgaataatgcagggtcaagtaaaactaaaatgatcgtaattttaaacgataacgatatgtcaattgccaaacctgtgggtgcaatgagaacatatctagcaaaaattttatctggcaaaatatactttagttttagagaaacagtaaaactcataatttctgcattctcaaaaagatttagcaataaagcaggtaaggcagaagattttctaagatctgcttttacaggaggaactttatttaattctatgggtttttattatattgggccaatagatggacatgatctagatgctttagtgcctgtgttaaaaaatgcaaaagaaattaatattgagggtccaataatgatacatttaaagactcagaaaggtaagggatatgaatttgctgaaaaatca

SEQ ID NO: 232467 - DNA, 483 bp, Unknown
  Bacterial polypeptide expressing nucleotide sequence isolated from the Sargasso Sea
attgaaaatttttaaagaaatacctattcatgaaccatcaactcctttgctagatgatattaatattcctgccgatattcgttctctttctgtaaatgaacttgaggtacttgcaaatgagttaagagagtttttattatattcagtcggtcaaagtggtggtcatttaggtggcgggcttggtgtaattgaactaacaatagtcttacatcatatctttaatactccatatgataatttagtttgggacgttggtcatcaggcatatccacataaaattattaccggaagaaaaaaagagattcaaacaataagaaaaaaagatgggttagctccatttccatcaaggaaagaaagtaaatatgatgcttttggagttggtcattctagtacatcattaagtgcccttctaggaatggctattgctacaaaagaatctaatccagataaaaaacatgttgcagtaattggtgatggagctat

SEQ ID NO: 232468 - DNA, 946 bp, Unknown
  Bacterial polypeptide expressing nucleotide sequence isolated from the Sargasso Sea
aagggttatccttatgcagaagctgatcaagttggataccatgcacagtctgcatttgatctgactactgggaaatctattccttctaagaaacctaaacctgttagttatagtaaaatatttggtcaaaccttattgaaaatatgtgaacaagatagcaaagtcgttggcattacagctgcaatggctacaggtactggtttagatatattgcaaagaaatattccagatcaatatatagatgttggaatagcagaacaacatgcagttaccctagctgcagggatgtcgtgcgatggtctaaaacctgttgtagctatttatagtacttttcttcaacgtgctttcgatcaattaattcatgatgtagggatacaaaatttacctgtatcattcgtgcttgatagggctgggatagtaggagctgacggtcctactcaccaaggtcagtacgatatcagttatatgagatcaatacctaattttgtattgatggccccaaaagatgagtctgaattacagagaatgttaataacgtcaataaaccataacggtcctacagcactaagaatacccagaggctctgggttaggagtggctgtaatggatgagggttgggaacctttaaatattggcgaagctgaaatacttgaagaaggagaagatattttaattattgcttatggttcaatggtcgcatcagctatcgaaacagcaaggatattaaaaaatatgaacattaatgcatgtcttattaatgcgagatttgtgaaacctctcgataaaaatcttattatgcctttagcaagtaggattcaaaaagttgtaactatggaagaaggaaccttaataggtggatttggttccgcaatagttgaattattaaacgataatgaaataaatattcctgtatacagaataggtatacctgatgttttagttgatc

SEQ ID NO: 232469 - DNA, 598 bp, Unknown
  Bacterial polypeptide expressing nucleotide sequence isolated from the Sargasso Sea
atgaaaatattttctgaaatacctacaaagaaacctgagactcccgttttagataaggtaaatgttccagcagatatgaagaacttaacatctcttgaacttaaagctttagcagatgatgtaagagcacatatgcttttcagcgttggtcaaagcggtgggcatcttggtggtggattgggagtggtcgagctgaccgttgttttacattacctttacaatgctccagatgacaaaatcctatgggatgttggtcatcaagcctaccctcacaaaattttaacgggaagaaaagaaagtttagtcacaatcagacaaaaagatggattagctccatttccttctagagaagagagtccttatgatgcttttggagttggccattcaagcacatcaataagtgccgctcttggaatggcaattgcaaataaggattcagataaaaaagttgttgctgttataggtgatggagcaatgacagcaggcatggcatttgaagctttatctcatacagggcacataaaaccaaatatgttaattattttaaatgataatgacatgtctatttcagaaaatgttggcggattaaataattact

SEQ ID NO: 232470 - DNA, 1072 bp, Unknown
  Bacterial polypeptide expressing nucleotide sequence isolated from the Sargasso Sea
tcatagttctacatcaatatcttcagccttaggtattgccatagctaataaactatctaataaatctgacaatgttattgccgttattggcgatggagcaattagtgcaggcatgtcttacgaagcaatgaataatgcgggaggaagtaaaactaaaatgatagtagttttaaacgacaacgatatgtcaattgccaaacctgtaggagcaatgagaacatatttagcaaaaattttgtctgggaaaatatattttagttttagagagacagtgaaacttattatttctgctttttcaaaaagatttagtaacaaagcaggtaaagcagaagattttttaagatctgcggttacaggaggtactttatttaattcgatgggtttttattatattgggccgatagatggacatgatatagatgccttaatatctgtgttaaaaaatgcaaaagaaattaatattgaaggcccaataatgattcatataaaaacacaaaaaggcaaaggatatgaatttgcagaaaaatcaaaagacaaatatcatggagtttcaaaatttaatattaatactggtattcaagagaaatccaaatcaaatttaccagcttatacaaaagtttttgcaaatactcttgtgaaacatgcagagaaagatagcaaaatagttggaataacagcggctatgccttctggaactggaatggatatatttggggaaaaattcccatcaagaatgtttgatgtgggtatagcagaacagcatgccgttacttttgcagcaggtttagcaaccgaaggttacaagccttatgctgctatttattctacatttttacaaagagcatatgaccaagttgtacatgatgttgcaattcaaagtttgccagttagatttgcaattgatagagccggactagttggcgctgatggaccaacacatgctggttcatttgatacaacatatttatcaactttaccaaattttatttgtatggcagccagtgatgaagcagaattggtaagaatgattaatacatcagttgatataaatgataacccttctgcatttaga

SEQ ID NO: 232471 - DNA, 850 bp, Unknown
  Bacterial polypeptide expressing nucleotide sequence isolated from the Sargasso Sea
aatgaactacaagcatttagataagattaattttccttctgacatgagaaaactatctattgttgagctggaaaaattatcaaatgaacttagggataaaacaattgaaactgtctccaaaactggaggtcatttaggtgctggcttaggtgtagttgagttaacaatagcattgcactatgtttttaacactcctagagatagattgatatgggatgttgggcaccagtcttatcctcataaaattctgactggcagaaagcataagattgaaactttaagacaaaaaaatggactttatggttttgtaaaaagaagtgaaagtgaatatgatccttttggaaccgcacatagttcaacatctatttctgctggaatgggtatgaaagttgctaaggatttaaacaaagatgatgctaaaattatttgtgttataggggatggtgctcttagtgccggtatggcatatgaagcactaaataatgtgggcgctagtaacaaacagataatagtaattttaaatgataacgaaatgtcgattgataggcctgtaggcgcaatgagtaattacttaacaaaattactttcttctaaacaatatacaaatgttagaactttattaaaaaaaatatcatctaaactctcaaattcagtatccaaaactttatacaaggctgaagaattttcaaaaagtttagtaactggaggtactttgtttgaggagttaggtttttattacttaggcccaatcgatggacatgatattaaaacattggtacctgtattggaaaatattaaaaacttatcaattgaaaaacctatatttcttcattgtgtaactaaaaaaggc

SEQ ID NO: 232472 - DNA, 568 bp, Unknown
  Bacterial polypeptide expressing nucleotide sequence isolated from the Sargasso Sea
gatgacacaaaaaagcacatttttaaaagatataaatttcccttcagatttaaaaaaaatttctgaaaaggatttaccaaaagttgcaaatgaagttagaagtgaaatgatagatgctgtatctcaaacaggtggccatctaggtgcaggtttaggtgttgtagaactaactgtggcccttcactatgtatttgacactccaaatgataaattaatttgggatgtaggacatcaatcgtatccacataaaattttaacaggaagaaaaaataaaattagaacattgagacaaggtgatggattatcaggttttacaaaaagaactgaaagtgaatacgatccttttggtgctgctcatagttcaacatcaatctcttctgcgctaggaatagctgaggcaaataaattggaaaataaatcttcaaacgtaatagcagtgataggagacggtgctataagtgctggtatggcttatgaagcaatgaataatgcaggtgtctctaaaaccaaaattattgttattctaaacgacaacgatatgtcaattgcaaaacctgtcggagcaatg

SEQ ID NO: 232473 - DNA, 901 bp, Unknown
  Bacterial polypeptide expressing nucleotide sequence isolated from the Sargasso Sea
gcaggagcaagtaaaactaaaataattgtaattcttaatgacaatgacatgtcaattgcaaaaccagttggagcaatgagaagttatcttgctaaaattttatctggtaaaatatattttagtttaagagaaactataaaattaattatttccgcattctcaaaaagattctcaaaaaaagctggaaaagctgaagatttcttaagatcagctgtcaccggaggaacattatttaactcaatgggtttttattatgtgggacccatagacggacatgacatagacgcattactgcccgtattacaaaatgcaagagatgtaaattatcaaggtccaataatgatacatgttaaaacacaaaaaggtaaaggatatagttttgccgaaaaatcagatgacaaatatcacggtgtatctaaatttaatgtaaataccggacagcaagaaaaatccaagtcgagcaaaccttcatacacaaaagtttttgcaaacactttagtcgaacacgccaaaaaagatagcaaaattattggaattacagcggcaatgccttcaggaactggtatggatatatttggaaaaaactttccaaatagaatgttcgatgtcggcatagctgaacaacatgctgtcactttcgcagctggtttagcaacagaaggttacaaaccttatgctgcaatttactctacttttcttcaaagagcctatgatcaggttgttcacgatgttgcaattcaaagcttacctgttagatttgcaattgatagagctggattagttggtgcagatggaccaacgcatgctggatcatttgacataacttatttatctacgctaccaaattttgttgtaatggctgctagtgatgaagctgagttagtaaaaatgattaatactt

SEQ ID NO: 232474 - DNA, 1096 bp, Unknown
  Bacterial polypeptide expressing nucleotide sequence isolated from the Sargasso Sea
agataatattgagtctccagaagatttaaaaaaacttacaattgacgagcttgaagttttagcagatgaattaagagaatatttgctttattcagttagacaaacaggtggacattttggtgctggacttggagcaatagagattactattgctttgcattatctattagatatgccttctgacaagattgtttgggacactggacatcaagcataccctcataaaatattaactgggagaagagataagatgcatctcataagaaagattgatggccttgcagcttttccatctattaaggagtctgaatttgatgctatgagtgttggacattcaagcacttcaattagtgcagctttaggcatggatgaagcctctaaacatcaaaaaaataataagaacatattttctgtcataggtgatggtgcaatgacagccggaatagcatttgaggctatgatgcatgcaggacacttgaataataatttaaagattattcttaatgataatgatatgtccatatcaaagaataaaggtggtttatcagactatcttgctaaaatatgggcatcaaaatcatataagaaacttaaatctagcggtaaaaaagttcttaagaatctgccttatgggcttcacattacaagaaatcttaaagatgggattaagtctgcagtaatgccaggaaatttatttgaagatctaggacttcattatgttgggccaatagatggtcatgatattccacttttaataaaaacaattaacagaatgatggaaaaaaatgaaccatatttgctacatgttattacaaaaaaaggtgctggttttgaacctgctgaaaatgaaagaattaaatttcatgcaatttcaaaaatagaaaatactccagctcctaaaaaaactaaattccaagatatttttggagattggttatgtcataaggctaaacaagatagcaaattggtaggaataactcctgcaatgaaagaaggttctggaatggttaattttgaaaaggaatttccagatagattctatgatgtggcaattgctgaacagcatgctgttacatttagtgcaggagtctcttag

SEQ ID NO: 232475 - DNA, 781 bp, Unknown
  Bacterial polypeptide expressing nucleotide sequence isolated from the Sargasso Sea
ttttcggagagatacccttctagatgttttgacgttggaatagctgaacaacatgcggtaaccttctctgctgcactggcggctggcggtatgaaacccttttgtgcaatttattcgactttccttcaaagagggtatgatcaggttgtccatgatgtggcaatacagagactaccagttaggtttgcgattgatcgggcaggtctggttggtgcagatggggctactcatgcaggaagttttgatatttcctttctcgcgaacctacctggatttgttgttatggcgccttctgatgaagcagagcttatccatatggtacaaacagctgcggaatatagtgaaggcccaatagcacttcgttatcctagaggagagggtgttggagtagagctgccaaacgctggagatttattagaaattggtaagggtcgggtaattaataatggtaacaaagttgctatattaagttttggtactcgtttaaaagaagtcctaaaggcgtccgaacttttacgaccaatgggtttcgatatcacagttgcagatgctcgatttgctaaaccacttgatcatgatttaatacaacttttatgctctgaacatgaagttataattactgttgaagaaggcgcggttggaggctttgggtctcatgttgcgcaacatatagcagaaaaaggctttttagatcgtgggctcaagtttcgatccatgtttcttccagatgtttttatagaccaagcgagccagtcggatatgtataacgtagccaaaatga

SEQ ID NO: 232476 - DNA, 747 bp, Unknown
  Bacterial polypeptide expressing nucleotide sequence isolated from the Sargasso Sea
aatgattaaaaattatcaatacttagataaagttgattttccttcagacataaaaaatttaaagcaatcagaactaaaaattttagctaaagaagtaagagaggagatgattgatgcggtttcagttacaggaggccatcttggagctggtttaggagttgtagaattaacaatagcattacattatgttttcgatactcctaatgataaaattatttgggatgttgggcaccaaacctatcctcataaaatattaactggtagaaaagataaaataaaaacacttagacaaggtaatggtctttccggttttacaagaagggcagaaagcgaatatgatccatttggtgcagctcatagttcaacttcaatttcagctgctcttggtattgctactgcaaataaattagaaaaaaaatctaatcaagttgtagcagtaataggtgatggtgcgattagtgcaggtatggcttatgaagccatgaataatgccggatcttcaaaaacaaaaatgattgtaatattaaacgataacgatatgtccattgcaaaacctgttggagcaatgagcacatatcttgctaaaattctatcaggaaaaatttactttagtttgagagaaacatttaaactgataatttcagctttttctaaaaggtttagtgataaagctaaaaaagcagaagattttttaagatcagctgtaacaggtggtactttatttaactcactaggatttttattatg

SEQ ID NO: 232477 - DNA, 994 bp, Unknown
  Bacterial polypeptide expressing nucleotide sequence isolated from the Sargasso Sea
ttgaaaatttttaaagaaataccaactgagttaccaaatacgccattattagattcagttgattatccttcagatttaagatcattttccataaatgaacttgagactcttgcaagtgagttgagagaatttttgctgtattctgtgggccaaagtggtggtcatttagggggcggacttggtgttatagagcttacaataatacttcatcatctttataacactccatatgacaatctagtgtgggatgttggacatcaggcttatcctcataaaattcttactggaagaaaagatagaattatgtctattagaaagaaggatggtttagcgccctttccttcaagatcagaaagtgaatatgatacatttggggttggtcattcaagcacatctttaagtgcacttgttggaatggcagaggctacaaaaaattcaaatccagataaaaaacatgttgctgtaataggtgatggagcaatgactgcaggcatggctttcgaagcactgagtcatataggacatttaaaaccgaatttattagtaatattaaatgataatgatatgtctatatctgaaaatgttggcggtttatcaaattacttttcaagaatatgggcatcaaaaacttacaagggtattaaaaaaagtggttctagtttcttgaaacctttacctcaggcatatcatttagctagaaaagtagaaacgcaaatgaaagcaatggttgcaccaggaactatttttgaggaactaggcttaaattatattggtcctatagacggtcataatttaaaagagcttaaagatgtcatttcaaatttaaaagaatttgaaggtcctcaatttcttcacgtaataacaaaaaaaggtgcgggtctagattcagcagaagccgacagaataggttttcatgctataggaaagataaacgcaataaaagataaaaaattaagcaaaaaaaatatcaagatatatttggcgaatggattat

SEQ ID NO: 232478 - DNA, 739 bp, Unknown
  Bacterial polypeptide expressing nucleotide sequence isolated from the Sargasso Sea
atgaatgaaaaactgttagataaaattaattatccttctgatttaagaaagcttaaaaaaaaacaactagatcaggtttcaaaagaattacgatctgagttaattaatgttgtttcagagacgggggggcacctaggagcaggtttaggagtagtagagttaacagttgctttacattatgtttttaatacacctaaagataaattagtctgggatgttggccatcaatgttatcctcataaaattatcactggaagaaaagatagaattagaactttgagaaaaggagggggcttgtcaggtttcactaagagatcagaaagcgagtacgatccatttggagcagcacatagctcaacatcaatatcatctactctgggcatggcaacagctaaaaaactttctaatgacaaaaataatgtcatagcagtaatcggtgatggagcaatgagcgctggtatggcttatgaagcaatgaataacgctggtgcaatgaaatcaaaactaatcgttgttcttaacgataatgatatgtcgatagcacctcctgtaggagcaatgagcaagtatcttgcaagacttttatctggaaaaatatattttagtttaagggagactataaaattaatactttcagctttttcaagaagattttcaaagagtgcagggaaggcagaggatttacttagaagtgcagtgactggcggaactctatttagccaatctaggattttattat

SEQ ID NO: 232479 - DNA, 898 bp, Unknown
  Bacterial polypeptide expressing nucleotide sequence isolated from the Sargasso Sea
aattatgaatttctagataatatcaattttcctgatgatgtaagaaaattatcacaatctgatattaaaattttagcagacgaggttagacaagagttaattgatgttgtttctgaaacaggagggcatttaggtgctggactaggagttgtagaattgactgttgtcttacactatatatttaatactcctcatgataaattaatttgggatgtggggcatcaaacttatccgcataaaatattaactggtagaaaaaaacaaataagaactcttagaaagggtgaaggattatcaggttttacaaaaagatcagaaagtgagtatgatccatttggtgctgctcatagttcaacttctatttcatctgcattaggaatagcagtagctaataagttatcaaataaatcaggtaatgtaattgcagtcataggtgatggagcgataagtgctggtatggcttatgaggctatgaataatgcaggtggaaacaaaacaaagataattgttgtattaaatgataacgatatgtcaatttcaaaacctgttggtgctatgagaaaatatctagcaaaaattttatcaggaaaagtttacttcagttttagggaaacatttaaattaattatatctgctttttcaaaaagatttaaaaatcaagcgggaaaagccgaagattttttgagatctgcagtaactggtggatcattatttaattctatgggattttactatattggaccaatagatggacacgatattgattcaatggtttcagtatttaataatgcaaaggatatcaattatgatggaccaattttaatccatgttaaaactgagaaaggaaaaggttattcttttgctgaaaaatcagaagacaaatttcatggtgtttcaa

SEQ ID NO: 232480 - DNA, 1045 bp, Unknown
  Bacterial polypeptide expressing nucleotide sequence isolated from the Sargasso Sea
ttaaatgataacgacatgtctatgcaaaaaccagtgggtgctatgagaacttatttagctaaattatttacagaaaaaatatattttagtttaagggaaacatttaaattaataacttctgctttttcaaaaagatttagtgctaaagctgtaaaagctgaagattttttacgatctgcagttactggtggaactttattcaattcactaggtttttattatgcaggtccaattgatggacatgatttaacaactcttgttccaattttaaaaaatgcaagagattctaagcatgagggcccaatcatgattcatatcaaaactcaaaagggaaagggttattcatatgcagaaaaagctacagaccattatcatggtgtttccaaatttaatgttgagacaggagaacaagtcaaaagtagtagtaatcttccagcctatacaaaagtttttgcaaacactttagttaagcatgcacaaagagatagtaaaatagttggtataacggctgcaatgccagatggtactgggatgaatatttttggaaaagaatttcctaaacgaatgtttgatgttggtatagctgaacaacatgctgtaactttttctgcaggtttagccacagagggatataaaccttatgcagcaatttattctactttcttacaaagagcatatgatcaagttgttcatgatgtagctattcaaagtttaccggttagattcgcaatagatagggcaggtttagtgggcgcagatggatccacacacgctggttcttttgatattacttatttatcaactttacccaattttattgttatggctgctagtgatgaggcagaattggtaaaaatgataaatacttcagttgatattaacgatagacctagtgcgattagatatccaaggggcacaggcataggaattgaacttccttcaatagatgaaaaaattgaaattggtagaggaagaataattcaagagggaaagcaagcatgcattttaagtttagggacgagacttgaagagtgcaaaatggcag

SEQ ID NO: 232481 - DNA, 853 bp, Unknown
  Bacterial polypeptide expressing nucleotide sequence isolated from the Sargasso Sea
tatttgcaatactttagtacaacatgctaaaaaagatagcaaaatagttgctataactgcagcgatgcctgatggaacaggtttagatattttccgtaaagaatttccagagagaacttttgatgttggaattgctgagcagcatgcagttacatttgcagctggtctagcaactgaaaattataaaccctatgcagcaatttattcgacatttcttcagagagcatatgatcaagtagttcatgatgtagcaattcaaagtttgcccgtgagatttgcgatagatagagcaggattagttggagcagatggaccaacacatgcaggaagttttgatataacttatttatcaacattacctaattttgtcgttatggctgctagcgatgaatcagaattagtaagaatgattaatacatcgactaaaataaatgataggccttgtgcttttagatatccaagaggcactggattaggagcagttttgccatcaattaatgaaaagatagagataggaaaatctaaaattatccaagaaggaaaaaaattagctatcttaaattttggagcaagattaaatgaaaccttaaaagcatctgaaaatttaaaaaaaaagggagttaatataacaatagtggacgcaaggtttgcaaaacctttagatgagaatcttatctggcaactagccattacacatgaagcaattataactattgaggaagggtctataggaggctttggttcacatgtagtcgattttttatcgaaaaaaggtttaatggacactaatttaaaatttagatctatgatacttccagatatttttatagatcaggataccccagaacatatg

SEQ ID NO: 232482 - DNA, 624 bp, Unknown
  Bacterial polypeptide expressing nucleotide sequence isolated from the Sargasso Sea
attgaaaatttttaaagaaattccaactgagttaccaaacacgccattgttggattcagttaattatccttcagatttaagatcattctccataaatgaacttgaaactcttgcaaatgagttaagagaatttttactatattcagtgggacaaagtggcggtcatttagggggcggacttggcgtcgttgagcttacaataatacttcattatctctatgacacaccttatgacaatctagtgtgggatgttgggcatcaagcttatccccacaaaattctaactggcagaaaagataaaattatgtctattagaaagaaggatggtttagcgccctttccttcaagatcagaaagtgaatatgatacatttggggttggtcattcaagcacatctttaagtgcgcttgttggaatggcggaggctacaaaaaattcaaatccagataaaaaacatgttgctgtaatcggtgatggagcaatgactgcaggcatagctttcgaagcactaagtcatataggacatttaaaaccgaatttgttagtaatattaaatgataatgatatgtctatatctgaaaatgttggcggtttatcaaattacttttcaagaatatgggcatc

SEQ ID NO: 232483 - DNA, 726 bp, Unknown
  Bacterial polypeptide expressing nucleotide sequence isolated from the Sargasso Sea
aatgtcaaaatataaattgttaaataacgtaaattttccttcagatataaaaaaattttctaattcagatctaaaaattctttcaaaagagattagggaaaaaatgatagaagcagtatcaaaaacaggaggacatctgggagcaggtcttggagtggttgagcttactgtggctcttcattatatttttgatacaccaaaggacaaaattatttgggatgtaggacatcaatcatatccgcataaaatattaactggcagaaaagataaaattgaaacattaagaacaggtggtggattatctggttttactaaaagagatgaaagtgaatatgatccattcggagcagctcatagctcaacatctatttctgcagcattaggaattgctacagcaaataaactttcaaacaaatctgaagatgtagtagcagtaatcggtgatggtgctctaagtgcaggaatggcctacgaagccatgaataatgctggcacttctaaaactaaaatgattgttgttttaaacgataacgacatgtcaattgctaagcctgttggagctttaagaacttatcttgcaaaaatcttatcaggtaaaatttactttaatttaagagaaacaattaaattgataatttcttcattttcgaaaaggttcatgaaaaaagctggacaagctgaagatttttttagatcagcagttactgggggcactttatttaattc

SEQ ID NO: 232484 - DNA, 801 bp, Unknown
  Bacterial polypeptide expressing nucleotide sequence isolated from the Sargasso Sea
aggagcaggattaggtgttgttgagttaacagtcgcattacattatgtttttgacactccaaaagataaattagtttgggacgtaagtcatcagtgctatcctcacaaaattatcactggtaggcgagatcgaattaaaacattaagaaaaggtggtgggttatcaggttttacaaaaaggactgagagcgaatatgatccatttggtgcagctcatagttcgacttccatctcctcaactttagggatgtcggtagcaaaaaaattaaacaacaataaaaataacgtgatagctgttattggagatggagcaatgagtgctggaatggcatatgaagcaatgaataatgcaggagctctaaaatctaacctaatcgttgttttaaacgataatgatatgtctattgcaagacctgtaggagcaatgagcaaatatttagctaatttgctgtcaggaaaactatattttagtttcagagaaacaataaaaatgattatttctgcattttcaaaaagatttagtcaaaaagctggaaaagccgaggacatgttaagaaatatggttactggaggaacattatttagtgaattaggattttattatatcggtccaatagatggacatgatgtagaaaatttagtccaaatatttgaaaatgtaaaaaattcaacccatcaaggtccagttcttatacacgttagaactcaaaaaggaaaaggatataagcctgcagaagactcaggagataaatatcatggtgtcacaaaaattaatgtttcgaccggagaacagtcaaagtc

SEQ ID NO: 232485 - DNA, 844 bp, Unknown
  Bacterial polypeptide expressing nucleotide sequence isolated from the Sargasso Sea
aagtaaaactaaaataattgtaattttaaatgacaacgatatgttaattgcaaaaccagttggagcaatgaggacttatttagcaaaaattttatccacaaaattatattttagttttagagagactgttaaattaataatatcggctttttcaaaaagatttagtaaaaaagctggcaaggctgaagattttttaagatcagctgttacaggtggtactttatttaattcattaggtttttactatattggaccaatcgatggtcacgatataaatgatttagttgctgttttaaaaaatgctaaagatatcaaccatgatggtcctataatgattcatataaaaactgaaaagggtaaaggttatgaatttgcagaaaaatcagatgataaataccatggagttacaaaatttaatgtaaaaactggagttcaagaaaagtcaaaatcaaatgtgccagcatatacaaaagtttttgcgaatactttggttaaacatgctgaaaaagatagtaaaataataggaataactgcagcaatgccatcaggaacagggatggatatttttggaaaaaaattcccaacgaggatgtttgatgttggtatagcagaacaacacgctatcacttttgcagcaggcctagcaaccgaaggttacaaaccatatgcagcaatttattctacatttttacaaagagcttatgatcaagttgttcatgatgtggcaattcaaagtttaccggtaagatttgctattgacagggcaggcttagtaggtgctgatggaccaactcatgctggttcgtttgacacaacatatttagctaccttaccaaactttata

SEQ ID NO: 232486 - DNA, 709 bp, Unknown
  Bacterial polypeptide expressing nucleotide sequence isolated from the Sargasso Sea
atgaaaatattctctgaaattccatcgaaacctcctaaaacgcctattttagacaaggtaaatttacctgaagacgtaaaaaatttatctcctatagaacttgagacattagctgatgatgttcgagcgtatatgttatacagtgttggtcaaagcggagggcatcttggtgggggtctaggagtagtagagctaacagttgttttgcaatacctatacaactctcctgatgacaaaataatttgggatgtaggccatcaagcctatcctcataaaattctaaccggaaggaaggatgctcttacttcaattcggcataaaaatgggctagctccgtttccaaatcgagcagagagccaatatgatgcttttggggttggtcattccagtacctcaatcagtgcagcgcttggcatggcaattgccaatcaggatacaaataaaaaggttgttgctattattggtgatggggctatgacagccggaatggcatttgagggtttagctcatgcaggtcatattaaaccaaatatgttaatcattcttaatgataatgatatgtctatctcagaaaatgttggaggattaaacaattatttttcaagaatttgggcatcaaaagtctacaaaggaataagaaaaagtggaaaaagttttttagaaaacctccctcaagctcatcacatagcaagaaaagtggaaactaaaa

SEQ ID NO: 232487 - DNA, 607 bp, Unknown
  Bacterial polypeptide expressing nucleotide sequence isolated from the Sargasso Sea
tctgtgttcaaaacgcttccgacagatcgaggggtacggcgccatctccaccaagcccgcgacgcctttgctggacacggtgaacgtccccgcgcacctcaagagcatggacatggaccagctcaagcaagtcgcgaaggagctccgcgcggatctcatctacaacgtctcgcagaccgggggccacctcgggtcgtcgctcggggtcatcgagctcaccgtcgcgctgaactacgtgttcgaccagcccgaggaccgcatcatctgggacgtcgggcaccaggcgtacccgcacaagatgctcaccggccgccgggacaggatgaccaccatgcgccagacggacgggctctcgccgttcaccaaacggagcgagtcggcgtacgactgcttcggcgccgggcactcgtcgacgtccatctccgccgggctcggcatggccgtggcgcgggacatgcagggccgcagcaaccacgtcatctccatcatcggcgacggcgccatcaccggcggcatggcgtacgaggcgatgaacaacgccggctacctggacaacaacatgatcatcgtcctgaacgacaaccagcaggtgtcgctccccacgcag

SEQ ID NO: 232488 - DNA, 308 bp, Unknown
  Bacterial polypeptide expressing nucleotide sequence isolated from the Sargasso Sea
attgaaaatttttaaagaaatacctatcaaaaaacctgcaactccattactagatgctattgattttccatcagatattaggtctttctcaatcaatgaacttgaaattcttgctaatgaattaagagagtttttattatattcggtcggtcaaagcggaggtcatttgggtggtgggcttggagtaatagaacttacaataactttacattacatctttaatactccatatgataatttggtatgggatgttggtcatcaagcatatcctcataaaattcttacaggaagaaaagataaaattcaga

SEQ ID NO: 232489 - DNA, 785 bp, Unknown
  Bacterial polypeptide expressing nucleotide sequence isolated from the Sargasso Sea
gatctaaagatcttagctgatgagttgagagagtttttgctctactcagtaggtaaaagtggtgggcatcttggagcaggccttggcgttgttgagttaacaattgttctacattatctttatgatgctccattagacaatattatctgggacgttggtcaccaagcatatcctcataaaatattgactggaaggaagaatcaaattaattcaataagatcaaaagatggcttagctccctttccatcaagaaacgaaagcgattttgatacttttggtgctgggcattcaagcacctctataagttcagcagttggtatggctattgccaatgaattaaatgagggagagaaaaaaacagttgctgttattggagatggcgcaatgactgctggaatggcttttgaggcaatgcagcatgccggaggcgtaaagccagatatgctgataattctaaatgataatgacatgtcgatatctgagaatgttggaggtctaaataattacttctctagaatatgggcatccaaactttataaaggaataaaaagcaatggtaaaaagtttttaaaaaatattcccgctgctcatcatttagcacgcactgttgagactcatatgaaaacaatggtagcgccaggagctatttttgaggagctagggctaaattatattgggccaattgatggtcatgatattgatcaacttttgaatgtaattggaaatctaaaaaattttgaagggccacagttccttcacataattacgaaaaaaggtgctggata

SEQ ID NO: 232490 - DNA, 736 bp, Unknown
  Bacterial polypeptide expressing nucleotide sequence isolated from the Sargasso Sea
tttcgcggcggggcttgcttgcgagggaatgaagccattttgtgcgctttattctactttcttgcaacgcggttatgatcagcttgtgcatgatgttgctgtgcagaatttgccggttcgctttgccattgaccgggcaggtctggttggggctgatggggcaacccacgctggggtttatgaccttgcctatttgtcgtgcctgccaaatatagtgatcatgtgcccgtctgacgagtcagagctttttcatatggttgccaccgctgcggagtatgatgatggaccaagcgccctaaggtatccgcgcggggagggggttggttgcaccattcccgatgctgctgaagtgttggctattggcaaggggcgcatcgtgcgtaaaggcagtggtcttgctattctttcgcttggaacccggcttaacgcttcgattgaggcggcagatcttttggctggaaatgggatgagcgttactattgccgatgcccgttttgccaaaccgctcgatacggatctgattgatgatctggcggtaacgcatggatcactgttgattgttgaagagggtagcccaggtggattttccgcccacgtaatgacatatcttgccaatcaggggcatctcgatgggctactgaaagtccgcgctctaaccttaccagataaatttattgaccatgatagtcaaacgggccagttggcctctgctggtcttgatactgatggaatttat

SEQ ID NO: 232491 - DNA, 638 bp, Unknown
  Bacterial polypeptide expressing nucleotide sequence isolated from the Sargasso Sea
aatgaaaaattatcaatatttagataaagtaaattttccatcagatataaaaaagttatcaatagatgaattaaaaattctttctaaagaaatcagagaagaaatgattgaggccgtttctgttactgggggacaccttggagctggacttggtgttattgaattgacagtagcattacattatgtttttgatacaccaaatgataaattgatttgggatgttggtcaccaaacatatccacacaagattataactggaagaaaagataaaataagaactcttagacaaggaaatggtttatcaggttttactaaaagatctgaaagtgagtacgatccatttggagcagcacatagctctacctcaatttcctcagcacttggtattgcagttgcaaataaactatcaaataagtcaaataatgttgttgccatcatcggagatggagcaatcagtgcaggaatggcttatgaagctatgaacaatgccggaatatcaaaaacaaaaatgattgtagttttaaatgacaatgacatgtcaatcgcaaaaccagttggagcaatgaggctatatttagcaaaattactttcaggaaaattatattttagtctcagagaaacattaaaacttataattt

SEQ ID NO: 232492 - DNA, 249 bp, Unknown
  Bacterial polypeptide expressing nucleotide sequence isolated from the Sargasso Sea
aatgcttttaagcgagttaagtcaccctaaccagctacatggcttaacggtatcacaattagaagaaattgcttgccaaattagagaacgacatttgcaggttgtttctacaagcggaggtcaccttggtcccggactaggtgttgttgaattaactcttgctttatatcaaacactagatcttgatttcgataaagttgtatgggacgttggtcatcaagcatatccacataaattaattactggtcg

SEQ ID NO: 232493 - DNA, 958 bp, Unknown
  Bacterial polypeptide expressing nucleotide sequence isolated from the Sargasso Sea
gatagtttgttgccagttttgaaaaatattaaaaaaaataatattgataaacccatatttcttcattgtattacaaaaaaaggaaagggttacgcaccagcagaggaatctgaagataaatttcatggtgtaaataaatttgatttaaaaactggtgaatcaattagtatttcaaataaaaagacttattcagaaatttttggagaaactttatctaaatttgctgacaatgatgaaaaagttttagcaatcactgcagcaatgactagtggaactggtttaaatatatttaataaaaatcataaagaaaaactttttgatgttggaatagcagagcaacatgcagttactatgtcagcaggtcttgcaactgagggatttaagccatttgttgccatttattccacatttcttcaaagagcatatgatcaaattgttcatgatgtggctattcaaaaactaccggttcgctttgcaatagatcgtgctggaaaagttggagcagatggacccactcatgcaggttcttttgatattgcattcttgtcaactttaccaaactttatcttgatggcacccagcaatcaaaacgaacttattaggatgatgaatacttctctattaattaatgatagaccatcagcttttagatatcctagaggcacaggaatattttatgaaaataatattaaagataaagaaccattagagattggcaaaggaaagattattaatgaaggtaaagatattgctattctaaatttaggaacaagaatacaatcatgttttgaagcaggtaaaattttaaatcactacgatataaatccaacaattgcagatgcaagatttgcaaaacctatagatactaaattaatagattttttattggataatcacaaatttttattaactattgaagaaggttctagtggaggttttggatcaacctgtgcttaac

SEQ ID NO: 232494 - DNA, 727 bp, Unknown
  Bacterial polypeptide expressing nucleotide sequence isolated from the Sargasso Sea
ttcactatatttacaaaacgcccaaagatctttttgatatgggatgttggacaccaagcgtacccacataaggtattgactggtcggagggaccgtataaaaacgcttcggcagactggaggactctcaggttttacaaagagagaagaaagcgaatacgacccgtttggtgccgcgcacagctcaacttccatatctgcagggctgggtatggctgttgcaagggatctgaaatctgaggaaaaccatgttgttgctgtgataggtgatggggcaatgagtgctggtatggcctacgaagccatgaataacgcgggcgcaagcaattcaagacttctcgttattttgaacgataatgatatgtctatcgctccggctgtcggtgcaatgagtgcatatttatcaaaacttataagctctacttcctatagaagtttaagagacttagcaaagcaaatagcctcccacctgccaaagcaaatagagagaaccgctaagcgagcagaggaatatgcgcgaggactagtaacgggagggacactttttgaagagctaggcttttattatgtgggtccagtcgatggacacaacctggaacatttactgccagtcttgcagaatattagaaatgcgagacaagataagccggtactattacatgtggtaacagaaaaaggacgcgggcacccttttgctgaaaagtcagtagaaaaatatcatgcagtac

SEQ ID NO: 232495 - DNA, 424 bp, Unknown
  Bacterial polypeptide expressing nucleotide sequence isolated from the Sargasso Sea
atgaaaaaaaaatataaattactaaatgaaataaactttccatcagacttaaagaaaataccagaaacaaaacttcaacaggtagctgatgaattgagagaagaaatgattgatgcagtctctgtaactggtggtcatttaggagccagccttggggtagtagaacttactgttgcacttcattatatatttaatacaccaaatgacaaattaatttgggatgttggtcatcaatgttaccctcataaaattttgacaggaagaaaagataaaattagatctcttagacaaggtggaggtctctctggttttacaaaaagacaagagagcgaatatgatccttttggtgcagcacacagttcaacttcaatatcctcagccttaggtatagctgaagctaataggttatctaataaatctaaca

SEQ ID NO: 232496 - DNA, 754 bp, Unknown
  Bacterial polypeptide expressing nucleotide sequence isolated from the Sargasso Sea
tcaccttggtgctggtttgggagtggttgaattgacagttgcacttcattatgtttttgataccccaaatgataaattaatatgggatgttggccatcaatcttacccacataaaattttaactggaagaaaagataaaattagaactttacgacagggcgacggtttatcaggttttacaaaaagatctgaaagtgagtatgatccatttggagcagcacatagttcaacatctatttcatctgcattaggaattgcagaggcaaataaattagaaaataagtcttccaatgtaatagctgtaataggtgatggagcaattagcgcaggtatggcttatgaagccatgaataatgctggagcatctaagacaaaaatgattgttattttaaatgataacgacatgtcaattgcaaagccagttggagcaatgagaacttacttagctaaattatttacaggcaaaatatattttagtcttagagaaactataaaattaattacatctgcattttctaagagatttagtgctaaagcaggaaaagcagaggattttttccgttcagcagttaccggaggtacattgtttagttcgcttggcttttattatgcgggcccaatagatggtcatgatttatccactcttgttccaattttaaagaatgcaaaagactcaaaacatgaaggccctattatgattcatattaaaactcaaaaaggaaaaggttattcttatgcagaaaaagcaaatgac

SEQ ID NO: 232497 - DNA, 562 bp, Unknown
  Bacterial polypeptide expressing nucleotide sequence isolated from the Sargasso Sea
aagagaaactattaaactaatcatttcagctttctcaaaaagatttagtaaaaaagctggtaaagctgaggattttcttcgttcagctgttactggtggaactttatttagttcaatgggattttattatgtaggtccaatcgatggacatgacactggtgctcttatttctgtattaaaaaatgcaaaagaaattaattatgatggacctattatgatacatgtcaaaacagaaaaaggtaaaggttacagttttgcagaaaaatcagaagataaatatcacggtgtaactaaatttaatgttaatacagggattcaagagaaatctaaatctaactcaccttcctataccaaagtatttgcaaatactctagtcaagcatgcggaaaaagacagtaaaataattggaattacagcagcaatgccatcaggaactggtatggatatatttggaagtaaatttccaaaaagaatgtttgatgtgggtattgcagaacaacacgcagttactttcgcggctggactagcaacagaaggttataaaccttacgctgcaatttat

SEQ ID NO: 232498 - DNA, 691 bp, Unknown
  Bacterial polypeptide expressing nucleotide sequence isolated from the Sargasso Sea
atgtcaaaaaccactttcttagataaaattaactatccttcagacttaagaaaattaaaaaaagaagaacttaaacaattgtcaaaggagctcagagaagaattaattaatgttgtttcaacaacaggaggacatcttggagctggtttaggagttgtagaattaactattgctttgcactatgtatttgatacgccaaaagataaattagtttgggatgttggacatcaagcatatcctcataaaataattactggacgaagagataaaattagaactttaagaaaaggtggtggcttatcaggcttcacaaaaagatcagaaagcgaatatgatacttttggagccgcgcatagttctacctccatttcttctacattaggaatagcagttgcaaaaagtctatcaaatagttctaaccactcgattgctgtaattggtgatggagccatgagtgctggtatggcttatgaggcgatgaataatgctggcgcaatgaaatcgaaactaattgtaatacttaacgataacgacatgtctatagcaccacctgttggagccatgagttcatatttagcaagactactatctggaaggacgtattttggttttagagaaacaattaaatcaataacctctgtattctcaaaaagatttaaagataaagctggtaaagctgaagaattataag

SEQ ID NO: 232499 - DNA, 813 bp, Unknown
  Bacterial polypeptide expressing nucleotide sequence isolated from the Sargasso Sea
aagtctaaacttatagttgttcttaatgataatgatatgtcaattgcaaagccagtaggtgctatgagtaagtacttagcaaaacttttatctggtaaattatattttagtctcagagaaacaataaaaatggttatctctgctttttcaaaaagatttagtcaaaaagctggtaaggctgaagatttattgagaggaatagttacaggcggaactttatttagtgaattaggcttttattatattggtcctgtagatggacatgatgttgataatttagttcaaatatttgaaaatgttaaaaattcaaatcatgaaggtccaatattaatccatgttagaactcaaaaaggaaaaggttataaaccagctgaagaatcaggtgataaataccatggagtttctaaatttaatatagctacaggtgagcagagtaagtctcaatctaatgctccttcatacacaaaagttttcgctgaaactttaattaaacatgcagaacaagacactaaaattattggaattactggagctatgccttcaggaacaggattaaatttatttgaaaaaaaattccctgatcgaacctttgatgttggaatagcagaacagcatgctgtaacttttgctgcaggtctggcaacagagggatacaagccttatgctgcaatttattctacttttcttcaaagagcttatgatcaagttgtccatgatgtagctattcaatcattacctgtaagatttgcaatagacagagcaggactcgttggtgcagatggaccaacacatgcaggttcatttgatattact

SEQ ID NO: 232500 - DNA, 924 bp, Unknown
  Bacterial polypeptide expressing nucleotide sequence isolated from the Sargasso Sea
gttcacatctatttcatcagcattaggaattgctgaggctaataaattagaaaataagtcttccaatgtaatagcagtcataggtgatggagcgattagtgcaggtatggcttacgaagccatgaataatgctggagcatctaaaacaaaattgattgttattttaaatgataacgacatgtcaattgcaaaaccagttggagcaatgagaacttacttggcaaaattatttacgggtaaaatatattttagtcttagagaaactttaaaattaattacatctgcattttcaaaaagatttagtgctaaagcgggaaaagcagaggatttttttcgttcagcagtaacaggaggtaccttatttagttcacttggtttttattacgcaggtcctatagatggtcatgatttatcaagcctaattccaattttaaaaaatgcaaaagaatcaagacacgaaggtcctataatgatccatattaaaactcaaaaaggaaaaggttatgcttatgcagaaaaagcaaatgaccattatcatggagtgtcaaaatttaatgttgagacaggagaacaaataaagagcaaatctaatctaccagcttatactaaagtttttgctaatacgttggttaaacatgccaaaaaagatagtaaaatagttggaataacagcagcaatgccaggagggactggtatggatatttttggaaaggagtttccaagtagaatgtttgatgtgggaatagcagaacaacatgctgtaacttttgctgcaggtttagcaaccgagggttataaaccatatgctgcaatttattctacgtttttacagagagcatatgatcaagtggttcatgatgttgccatccaaagtttacctgttagatttgcgatagatagagcaggattagttggtgctgatgg

SEQ ID NO: 232501 - DNA, 742 bp, Unknown
  Bacterial polypeptide expressing nucleotide sequence isolated from the Sargasso Sea
atgaaaaaacaatatcaatatttagatgaaataaattttccatccgatattaaaaaacttaaaatatcagagcttaaaatattagctgaagaagtaagacaagaaatgattgacgctgtatctgttacaggcggccatcttggggctggtttgggtgtagtagaactaacaattgctttacattatgtatttgatgccccaaaagacaaaattatttgggatgttggacatcaaacatatcctcataagatattgactggaagaaaagataaaataagaacacttagacaaggaatgggactttcaggttttacaaaaagatcagagagtgaatatgatccatttggagctgctcacagctcaacatcaatttctgctgcgcttggtattgcaactgcaaacaaactagaaaaaaaatcaaatcaagtagtgtctataattggtgatggagcgataagtgctggtatggcctatgaggcaatgaataatgcaggatcatcaaaaacaaaaatgatagtaatattaaatgataatgatatgtccattgcgaaaccagttggtgctatgagtacatatcttgcaaagctgttgtcagggaaagtttatttcagcttaagagaaacatttaaacttataatttctgcattttcaaaaagatttagtgataaagctggaaaagcagaagattttcttagatcagctgtaactggaggcacgttatttaattctttaggattttatt

SEQ ID NO: 232502 - DNA, 821 bp, Unknown
  Bacterial polypeptide expressing nucleotide sequence isolated from the Sargasso Sea
gttttctcagtgttttccggagcaatattttgatgttgcaattgccgaacagcacgcggtgacctttggcgcaggccttgcgaaagaaggaatgaacgcggttgttgcaatttattcttcatttctgcagcgtgcctatgaccaactcattcacgatgtagctattcaagatctgcccgtattgttcgccattgatagagcgggcattgttggcgccgatggtcctactcaccaaggtgcgtttgatatcgctttccttcgctgtattccaaatatggtggttatggctccttcagatgaaaatgaatgtcgccaaatgctttacacgggccacaagctacaaaagccagctgctgttcgctaccctcgtggtgcaggcatgggtattaccccagacgaagctatgacagagctcgagattggtaaatctcgtacgtgtcgagaatcatcaaaaggcaagtctgaaagtatcgccattctaaactttggctgcttactaccttacgctcttgaagctgcagaggcgattgacgcaactgttatcgacatgcgcttcattaagccgttagacggcgatgcagtattaaaagcagccagtgaacacagcgcgcttatcacgctagaagacggctgtattatgggtggagctggtagtgccgtactagaacacttgcagcaaaatggcgtattaaaagcggtgaagatgttagggctgccagatagtttcatactgcaaggcacacagcaagaaatgtacaaagagcacggtttagatgcagaaggtatcatcgccggagctcgccaattaacgtcaaagtaat

SEQ ID NO: 232503 - DNA, 850 bp, Unknown
  Bacterial polypeptide expressing nucleotide sequence isolated from the Sargasso Sea
tctgaattatattgggcctattgatggacataacataccacttcttgttaaaacccttagacgaatgcttgaaaaaaatgagccttatatactgcatgtgataaccaaaaagggtgcaggttttgagcctgcagaaaatgaacgtattaaatatcatgcaatctcaaaaatcgaaaaaaatcctaaaaaagctaagcctaaattccaagatatttttggagattggctttgttataaggctaaaattgatccgaatctagttggaattacgccagccatgaaagagggttcgggcatggttgagtttgaacaaaaatttcctgacaggttctatgacgttgcaatagcagaacaacactccgtaacctttggttccggtcttttcttagggggactaaaaccagttgtggcaatctattcaagttttctgcagagagcatatgaccaatttatacatgatgtgtgtcttgaaaacttagatgtgacatttgcattagatcgagctggagtagttggtgaagatgggcctacgcattcaggaaattttgatttagcatttatgaggtgcgttcccaatataattatttctactccatcagatgagaatgaattatggaaacttctaaatacctcatatcattacaaaggaccagcagcgataagatatccaagaggctcaggtgttggagctaaagtgtcaggcaaatctgacttattagatgttggtaaagccaataaaatacttgatggatctaaaacatgtatcctaaattttggtgtattgctaagtagagtaattaatcttgctgaagaacaaaactttggcttatatgacatgcgatttgtaaaa

SEQ ID NO: 232504 - DNA, 862 bp, Unknown
  Bacterial polypeptide expressing nucleotide sequence isolated from the Sargasso Sea
cgcatcatctttaggaacagttgaaataacagtcgcattacttaaacattttaattttagccaagatagaattgtgtgggatgtcggacaccaagcatatccttataagattttgactgataggaatgaaaagtttagttctttgggtaaaaagggaggtatcaagaaattcctttctagggatgaaagctcttttgatcattttggagcaggacatgcttctacatcagtttcagcagctctaggtatggctattggccgtgatattttaaataaaaaatttaaagtagttgctgttattggagatggagctatgacaggaggattggcttttgaagcacttaatcacaatggttccttagataagaatatgctcattatctataatgataatggcataagtatagatcctaatgtaggtgcaatttcaaaattactttcacgttttgcttcttccagaatttacaatatttttcgagatgaaactctagaattggcagaaaaagcacctttttctgaacgacttggtctaaaagcaacattacagaaattacatgattccgcaaaaagctttttttctccaccgagtatgctatttgaacagttaggttggagatactttgggactgtagatggtcataatttgaatgaattaatcaaattaattggtcaggttaaaaatttagaagggccaattgtcattcatgctatcacccagaaaggtaagggctatacattcgcagaagaagactcttttaaatatcatggagtaactccatttgagcctgatgatggaaaatttattaaaaaaatttcaaaatctaaaaaagttagtttctctcaagtttttggaaaaaactag

SEQ ID NO: 232505 - DNA, 886 bp, Unknown
  Bacterial polypeptide expressing nucleotide sequence isolated from the Sargasso Sea
attaatactttaagacaaggtaatggcttatcaggttttaccaaaagatctgagagtgaatatgacccatttggtgcagctcatagttctacatctatatcatctgcacttggtatggctgaagcaaataaattagaaaacaaatcttcaaatgtaatagctgttatcggagatggtgcaattagtgctggaatggcatacgaagctatgaataacgctggtgcatctaaaactaaaatgatcgttatattaaatgataatgatatgtctattgcaaaaccagtaggtgcaatgagaacatatttagcaaaattatttactggaaaaatttattttagcctaagagaaactttaaaattaatcacctcagctttttcaaaaagatttagtgctaaagctggtaaggcagaagatttttttcgttcggctgttacaggcggaacactatttagctcactaggtttttattatgcaggaccaatcgatggacatgatatttccacacttatccctattttaagaaatgctagagactcaaagcatgaaggaccaattatgatacatattaaaactcaaaaaggaaaaggatactcatatgctgaaaaagctagcgatcactatcatggagtatcaaaatttaatgttgaaactggagagcaacaaaagagtggctctaacttacccgcttatacaaaagtttttgcaaatacacttgttaaacatgcaaaaaaagacagtaagatcgtaggaataactgcagcgatgccaggtgggactgggatggatatttttggtaaagaatttccaaaaagaatgtttgacgttggtattgccgaacagcatgcagttacttttgcggcaggccttgcgacagaaggatataaac

SEQ ID NO: 232506 - DNA, 358 bp, Unknown
  Bacterial polypeptide expressing nucleotide sequence isolated from the Sargasso Sea
aatgaaaaataaattattagataatattaattatccatcagatttaaggaaacttagtaaaaatcaattagatcaagtttcaaaagaactgagatccgaacttattaatgttgtatcagaaactggaggacatttaggagcaggtttaggtgtggtagagcttactgtggctttgcactatgtttttaatactccaaaagataaattagtttgggatgttggccatcaatgttacccacacaaattaattacaggtagacgagacagaataagaactttaagaaaaggtggtgggctttcaggatttaccaaaagatcagaaagtgaatatgatccatttggtgctgcacatagttct

SEQ ID NO: 232507 - DNA, 876 bp, Unknown
  Bacterial polypeptide expressing nucleotide sequence isolated from the Sargasso Sea
atttgaagaacttggatttacttatatgggtccaattgacggacatgacattggaaatttagttaatacttttaacgctgctcacaaacttaaaaaacctgtacttgttcatgttgttacaacaaaaggaaaaggttatccttatgcagaagctgatcaagttggatatcatgcacagtcagcatttgatctaacaactgggaaatctattccatctaagaaacctaaacctgttagttatagtaagatatttggtcaaaccttattgaaaatatgtgaacaagatagcaaagttgttggtattacagcggcaatggctacaggaacgggtttagatatattacaaaaaaatattccagatcaatatatcgatgtaggaatagcagaacaacatgctgttactctagcggcaggaatgtcgtgcgatggccttaaacctgttgtagctatttatagtacttttcttcaacgagcatttgatcaattaattcatgatgttggcatccaaaatttacctgtatcgttcgtacttgatagggctggcatagttggagctgacggtcctactcaccaaggtcaatacgatatcagttatatgagatctataccaaattttgtattgatggccccaaaagatgaatctgaattacaaagaatgttaataacttcaattaaccataatggtcctactgctctaagaatacctagaggttcaggattaggagtagctgtaatggatgagggttgggaacctttgaatataggcgaagctgaaatacttgaagaaggagaagatattttaattattgcttatggatcaatggttgcatcagctattgaaacagcaaggatcctaaaaaatatgaacattaatgc

SEQ ID NO: 232508 - DNA, 854 bp, Unknown
  Bacterial polypeptide expressing nucleotide sequence isolated from the Sargasso Sea
tatacaactgttttttcagatacattgtgtaaattagcagaaaatgataagaaaattattgctatcaccgcagccatgccttctggaacagggttaagcaatttcaaaaaaaaatttagagatagattctttgatgttggtattgcagagcaacatgcggttacctttgcagcaggaatggcttctgaagggttaaagccctttgttgctatttattcgacttttttacaaagagcttatgatcaagttgttcatgatgttgtaatacaaaatttaccggtaaaatttatgatggatagagcaggcttggttggagctgatggtgcaactcatgcaggttcatttgatttagcctatttattgtgtcttcctaatgttgttgttatggctcctagcgatgaaaatgaacttactaaaatgatttttacagcattaaattatgaattaggaccaatattctgtcgttacccgagaggagaagcagttggagttaaaattgacaaaacattaactaatttagaaataggaaaagggagagttttaaaccaaggagtaaatatagcagttttatctttaggcacgagattagaagatattttagttgtgaaggaaactttaaaaaaagatggttttaatataacaatagctgatgcaagatttgccaaacctattgacgaagaactattaaaaaaattgtttttagatcatcaagttttgtttattgttgaggaaggtgcagcaggtgggttttcttctcattgccttaactatttaagtacacaagatcttcttggaaaagaatctaaactggtaaaatgtctcactctaccggataaatttcaagatcacgcatc

SEQ ID NO: 232509 - DNA, 781 bp, Unknown
  Bacterial polypeptide expressing nucleotide sequence isolated from the Sargasso Sea
ttacactgtattacaaaaaaaggtaagggatatgaaccagcagaaaaatctgacgacaaatttcatggagtagaaaaatttgatatagatacaggtattacgtttaaaaaaacaaatcaaaagtcttactctcaagtatttggagaaactttaacaacacttgcggaaaatgatgaaaaaatagttgcgataaccgctgcaatgatgtcaggaactggactaaaggatttcaatgaaaaatttaataatagattttttgatgttggaattgcagaacaacatgctgtaactatggcagcaggtatggcgacagaaggatttaaaccatacgttgcaatttattcaacatttcttcaaagagcgtatgatcaaattgttcatgatgtggctattcaaaaactaccagtgagatttgcaattgacagagctggtcaagttggttcagatggtccaactcatgcaggttcatttgatttaacatatttatcaacattacctaattttattgtcatggctcctagtagtcaatctgagttaataaagatgataaaaacctctgctttaataaatgattttccatctgcatttcgatatccaagaggagttggtaatttagaagaagcaaatgatctggaaacaattaatgtaggtaaaggacgtattcttattgaaggtgatgaagtcgctattttaaatttaggaacaaggttagaagtttgtaaagaagcatctaaaatcttaaataataataacatttatcctacgttagctgatgcaagat

SEQ ID NO: 232510 - DNA, 864 bp, Unknown
  Bacterial polypeptide expressing nucleotide sequence isolated from the Sargasso Sea
ggacatcttggtcctggattaggtgttgttgagcttacattggccttatatcaaactcttgatcttgattttgataaagtggtttgggatgtaggacatcaaggttatcctcataaattaataacaggacgtttcagtcaatttgattcccttagacaacaaaatggtgtagctggatatcttaaaagaagtgaaagtaaatttgatcattttggagctggacatgcaagtacttctatttctgctgctttaggaatggcaatagcaagagatagaaaaggcgaaaattataaatgtgtggctgttattggagacggagcgttaaccggaggaatggcattggaagctataaatcatgcaggtcacttaccaaatactcctttagttgtagtactaaacgataatgatatgtctatctcacctccagttggagccctttcttcttatttaaataaggtaagagttagtccaccattgcaatttttgtccgatagtgttcaagaaagtgtaaagaatattccattaattggtaaggatattccagaggaactgaaaaatattaaaggaagtgttagacgactagctgtgcctaaagttggtgctgtttttgaagaacttggatttacatatatgggtccaattgacggtcatgatattggaaatttaattaatacttttaacgctgctcataaacttaaaaaacctgtactcgttcatgttgttacaacaaaagggaagggttatccttatgcagaagctgatcaggttggatatcatgcacaatctgcatttgatctgacaactggaaaatctatcccatctaagaaacctaagcctgttagttatagtaaaatatttggtcaa

SEQ ID NO: 232511 - DNA, 805 bp, Unknown
  Bacterial polypeptide expressing nucleotide sequence isolated from the Sargasso Sea
attattccaacaaaattttgaaaaaagattttttgatgttggtattgctgaacaacatgctgttacaatggcagctggattggctacagagggtttcaaaccgtttgttgcaatttattcaacatttttacaaagagcttacgatcaaatagtacatgatgtagccattcaaaaattacctgttagatttgcaattgatagagcaggattagtaggatcagatggtcctactcatgctggttcatttgatattacttatttagccacattgccaaattttatagttatggcacctagcaaccaaaaagagttatctaaaatgatagagttatcttgcgaaattaataatacaccatctgcttttagatttccaagaggagcaggatcagatgaattatttaataatcagcctacagatattaacataggtaagggatatattctaattgaaggtagtgatgttgcaatcttaaatttaggaacaaggcttgaaaaatgtattgaagctagtaagtttcttaatcaaaataatatttatccaactattgcagatgcaagatttgcaaaaccattagacacacaattaatagataacttattaattaatcataagtatattttaaccatagaagaaggttctataggtggattttcatctcatgttttacattatgtccataatataagatcaaaaaaggataacgttgtaataaaaaatttaatttttccagatcgttttgttgaacatatgacacctgatgaacaatatcaagatattaaaatggatacggagtcaataatttaa

SEQ ID NO: 232512 - DNA, 940 bp, Unknown
  Bacterial polypeptide expressing nucleotide sequence isolated from the Sargasso Sea
tgacaacgatatgtccattgcaaaacctgttggagcaatgagaacatatttggcgaaaattttatcaggaaaaatatattttagctttagagaaactgtaaaattaataatttctgctttttcaaaaagatttagtaaaaaagcaggtaaggcagaggattttttgagatccgctgttacgggcggtacgttgtttagttcaatgggtttttattatataggacctatagatggtcatgacatagatgcattagttccagttttaaaaaatgcaaaagatattagttttgatgggcctataatgatacatattaaaactaaaaagggtaaagggtacgagtttgctgaaaaatcaaatgataaatatcatggtgtttcaaagtttaatgtaaataccggtgtacaagaaaagtcaaaatcaaacgttcctgcttataccaaagtatttgcaaatactcttgtagagcacgcagaaaaagacagtaaaattattggtattactgcagcgatgccatctggaacaggcatggatatatttggtaaaaaatttccaactagaatgtttgatgtaggtatagcagaacagcatgcagtaactttcgctgctggacttgcaacagaaggatataaaccttatgcagcaatttactctacatttttgcagagagcttatgatcaagtcgttcacgatgttgcgattcaaagcttaccggttagatttgcgatagatagagcaggtcttgtaggagccgatggacctacacatgcaggttcttttgatattacttatttatctaccttgccaaattttatagtaatggccgcaagcgatgaagcagaattagttagaatgattaatacatccgttgatattaatgacaaaccttcagcttttcgatatccaagaggtaatggagtaggagtaaatttaccaagaatc

SEQ ID NO: 232513 - DNA, 937 bp, Unknown
  Bacterial polypeptide expressing nucleotide sequence isolated from the Sargasso Sea
tcagatttgaaaaaaatttctgaaacaaaattgcaaaaagttgctgatgaattgcgagaggaaatgattgatgcagtatcagtgacaggaggtcatttaggagctagcttaggagttgttgagcttagtgttgctcttcattatatatttaacacgcctaacgataagttaatatgggatgtaggacatcagtgttatcctcataagattttaacaggacgaaaagataaaattagaacactgagacaaggcggtggtttatctggatttactaaaagaatagaaagtgaatatgatacttttggtgcagcacatagttcaacttcaatttcatcagctctgggcatagctgaagctaacaaactttcaaataaatcagataatgttatagcagttataggtgacggagcaataagtgcgggaatggcatatgaagcaatgaataatgctggagcctctaaaacaaaaatgattgttattttaaatgataacgatatgtcaattgcgagacctgttggagcaatggggacttatttggctaaaattttttcaggtaaaatttactttagtttaagagaaacaatcaaacttattacatctgcattttctaaaagattcagcgcaaaagcaggcaaagccgaggatttattaagatctgcagtaacaggtggtactttatttagttcgttagggttctattacataggaccaattgatggacatgatttaaattctttaataccaattttaaaaaatgctagagactcaaaacatgaaggaccaattttgatacacatcaaaacaaaaaaaggcaaaggttattcatttgcagaaaatgcaaaagataactatcatggagtatccaaattcaatgttaaaacgggagaacaggcaaaaaacctaagcaaaataccttcctacaccaaagtattgctaa

SEQ ID NO: 232514 - DNA, 959 bp, Unknown
  Bacterial polypeptide expressing nucleotide sequence isolated from the Sargasso Sea
aatggccggaacaagcaaaaccaaaatgatagttgttttaaatgataatgatatgtcaatcgccaaacctgttggggctatgcgaaaatatttggcaaaaattttatcaggaaaaatatatttcaattttagagaaacaataaaacttataatatctgcgttttcaaaaagatttagtaaaaaagcaggtaaagctgaagattttttaagatcagcagttacaggtggaactttatttaattcaatgggatttcattatataggtcctatagatggacatgatattgatgcattggtatcagtattaaaaaatgcaaaagaaataaattatgaaggacctatattagttcatattaaaactaaaaaaggcaagggatataagtttgcagaaaaatcaaatgataaatatcatggtgtttctaaatttaatgtaaatactggtatccaagaaaaatcaaaatcaaatataccagcatatacaaaagtttttgcaaatacacttgttaaacatgctgaaaaagatagtaaaattattggtgtaactgctgcaatgccatctggaacaggcatggatatatttggtgaaaaattccctaacagaatgtttgatgtaggaattgcggaacagcatgcagttacttttgcagcaggacttgcaaccgaaggattcaaaccttttgccgcaatttattcgacttttttacaaagagcttatgaccaagttgttcacgatgttgcaattcaaaatttaccagtaagatttgcaattgatagagctggactagtaggagctgacgggcctacacatgctggatcatttgatattacttatctttccacattgccaaattttgttgttatggctgctagtgatgaagcagaattagtcagaatgattaacactgcagttgatatcaatgatagaccttcagcatttagatatcctaggggaaatggaa

SEQ ID NO: 232515 - DNA, 901 bp, Unknown
  Bacterial polypeptide expressing nucleotide sequence isolated from the Sargasso Sea
aaaaaaggagctggcttagactcagctgaagctgacagaataggttttcatgcaataggtaaaataaattcaataaaagataaaaaatcaaagcaaaaaaaataccaagatatttttggtgaatggattatcgatatggctgaggctagtgaagatctaattggcattacccctgctatgagagagggatcaggacttgttgagtttagtaaaaaatttccaaatagatattttgatgttgctattgctgagcaacactcagttacatttgcagctggtctatctgttgaaaaaaagaagcctgtagttgcaatttattcaacttttttacaaagaggttacgatcagttaattcatgatgttgcggttcaaaatcttgatgtaacatttgcattagacagatccggtcttgttggtgaagatggccccactcattcaggaaattatgatatagcttatttaagatgtattccaaatatggttatttgtactccttcagatgaaaatgaaacaagaaaattattaacaacagcatacttgcacaacgggccagcctctgtaaggtacccaagaggaactggaccaaatagtaatattaataagaatcttcaaccggttaaaataggtgaagcgaatattattaaagaggaaaattcaaaaattgttatattaaactttgggacccttctagaagaagctaaacaagtttccaaagatcttaaagcaactttggttgacatgcgttttgtaaaaccgctagatgaaaagctgttaaaaaaactttttaaaaaagctgaagtatttatttcaattgaagatggttcaattatgggtggtgctggaagtgccgttcaagaattcgtctctaaagaagatttaaatattaaatcaattctttttg

SEQ ID NO: 232516 - DNA, 382 bp, Unknown
  Bacterial polypeptide expressing nucleotide sequence isolated from the Sargasso Sea
atgtacgttgaaaagattaaaagccctgcagacctgcgagcgcttgatagtgaagagctagacagcctttgcgtagagattagagaatttctcgtagaggcagtgtctcggacagggggtcacctaggctccaatctcggtgcagtagagctaacgcttgcagtgcatcgtgtgtttgagtcgccccgcgatgtgattgtgtgggacacgggccatcagtcatacgtgcacaagatcgtgaccggccgggcggatgagtttgcgaatcttcgtcaacggcatggattatcgggttacccgagcggggaagaatcggaacatgatgtggttgaaaacagccatgcgtccacttctttgagttgggcatcgggcctagctgcgg

SEQ ID NO: 232517 - DNA, 727 bp, Unknown
  Bacterial polypeptide expressing nucleotide sequence isolated from the Sargasso Sea
aggaaaaggttacagtttcgcagaaaagtcagatgataaatatcatggggtatctaagtttaatataaaaacaggcatacagcaaaaaagtgatacaaaagtgccatcttacacaaaagtatatgcaaatacccttgttaagcatgctgaaaatgacagcaaaataattggtataactgccgccatgccttcaggaacagggatggatatttttggaaataaatttcctaatagaatgtttgatgtgggaatagcagaacaacatgcggtaacttttgctgccggtctagcaacagaaggttataagccttatgcatcaatatattctacttttttacaaagagcttacgaccaagtggtacatgatgtggcaattcaaagtttaccagtaagattcgcaatagatagagcaggtctggtgggagcagatggcccaacacatgctggatcttttgatataacatatctagctactctaccaaactttattgttatggcagctagcgatgaagcagaattggtaaaaatgataaacacatctgtagaaattaatgataaaccatgtgcatttagatatcccagaggaaatggcactggagttcagttacctgaaataagtgagaaaatccaaattggaaaagcaaaagttgttagagaaggaaagaaaattgctattttgaattttggagcaagattaaatgaatgtttaattgctgaagaaatttga

SEQ ID NO: 232518 - DNA, 760 bp, Unknown
  Bacterial polypeptide expressing nucleotide sequence isolated from the Sargasso Sea
gcgatgaataatgctggaacttctaaaactaaaatgattgttattttaaatgataatgatatgtctatagcaaaaccagttggagccttaagaacttatttagctaaaatattatctggtaaaatttattttagtttaagagaaacaattaaattagttatttcatcattttcaaaacgatttatgaaaaaagctggaaaagcggaagatttttttagatctgcagttactggcggtactctatttaattctcttggcttctattatgttggaccaatagatggtcatgacatggatgtactaacttctgttttagaaaacgcgaaaaagatgaaatatgatggaccaatattaattcatattaaaactgagaaaggtaaaggatatgaatttgctgaaaaatcctcagataaatatcatggagttgcaaagtttaacgtattaacaggccaacaagaaaaaggtaaaaatttagctccttcttacacaaaagtatttgctaaaacactaatcaaacacgctgaaaaagatagtaaaattgtaggagttacagcagcaatgccaggtggtactggaatggacctctttgctgaaaagtttcctgatagaatgtatgatgttggaatagcagaacagcatgcggtaaccttttctggcggtttagcaacacagggatataaaccttttgcagcgatttattcaacttttttacaaagagcctatgatcaagtagttcacgatattgcaatacaatcactcc

SEQ ID NO: 232519 - DNA, 385 bp, Unknown
  Bacterial polypeptide expressing nucleotide sequence isolated from the Sargasso Sea
aatgagcaataattataaatttctaaataatattaattttcctgatgatgttagaaaattatctcaatccgagattaaaattttggcagacgaggttcgacaagaattaattgatgttgtttctgaaacaggaggacatttaggtgctggtctaggagttgtagagctgacggttgttttacactatatatttaacactccccatgataaattaatttgggatgtaggacatcaaacttacccacataaaatattaactggtagaaaaaatcaaattaggactctaagaaaaggcaagggattatcgggttttacaaaaagatcagaaagtgagtacgatccatttggtgctgctcatagctcaacttctatttcctcagcatta

SEQ ID NO: 232520 - DNA, 457 bp, Unknown
  Bacterial polypeptide expressing nucleotide sequence isolated from the Sargasso Sea
aatgaaaaaaaaatatgaactgttagataagattaattttccatcagatttaaagaaattacctgagtcaaaattacaaaaagttgctgatgaattaagagaagaaatgattgatgctgtctcggtgaccggtggtcatcttggagcaagtctaggagttgtagaattaactgttgctttacattatatttttaacacacccaatgataagttaatctgggatgtgggtcatcagtgttatccacataaaattttaactggcagaaaagatagaattagaactcttaggcaaggaaatggtctttctggttttacaaaaagatcagaaagtgagtatgatcccttcggtgctgcacacagctcaacatcaatttcatcagcactaggtatagcagaagcaaataaattatctaataaatcagataatgtaattgcagtaatgggtgacggggcaatc

SEQ ID NO: 232521 - DNA, 931 bp, Unknown
  Bacterial polypeptide expressing nucleotide sequence isolated from the Sargasso Sea
cgagacagaataagaactttaagaaaaggcggtgggctttcaggatttaccaaaagatcagaaagtgaatatgatccatttggagcagcacatagctctacatcgatatcatcaactcttggtatggctacagctaagaagctctctaatgataaaaataacgttgttgctgtcataggtgatggagcaatgagtgcaggaatggcctatgaagcaatgaataatgctggagcgatgaaatcaaaattgatcgttgttcttaatgacaatgatatgtcaattgcaccaccggttggtgcgatgagcaaatatcttgcaagacttttgtctggaaaaatatactttagtttccgtgaaaccataaaattaatactttcagctttttcaagaagattttcaaaaagcgcgggtaaagcagaggatttacttagaagtgcagtgaccggcggaacactattcagccaacttgggttttattatataggtcccattgatggacatgatgtaaacaatttagttacaattttagagaacgcaaaaaattcaaatcatcaaggcccaatactaatacatgcaattaccaaaaagggtaaaggatacaaacccgctgaagagtcaggagataaatatcatggggtatcaaaatttgatgttttaactggtaaacaggcaaaaggtaaatcagcaggaccctcttatacaaaggtttttgcaaatactttaattaaacatgcacagaacgatacaaaaattgtagcaattactggcgcaatgccatcgggaactggactagatctttttcaaaaaaagtttcctgataggatgtttgatgtgggtatagccgaacaacacggagtaactttcgctgctggattagctaccgaaggatacaaaccctatgctgccatttactcaactttttacaaagagc

SEQ ID NO: 232522 - DNA, 868 bp, Unknown
  Bacterial polypeptide expressing nucleotide sequence isolated from the Sargasso Sea
ttcagcattttcgaaaagatttagtcaaaaagcaggtaaagcagaagatatattgagaggtttagtaactggtggaactttgtttagtgaacttggtttttactatataggcccagtagatggtcacgatgtagatagtttagttcaaatatttgaaaatgttaaaaattcaagtcatcaaggccctatacttattcatctgagaacgcaaaagggcaaaggatacaaaccagccgaagaatctggtgataaataccatggagtatctaaatttaatattgctactggtgaacaatcaaaatctgtatctagcgttccttcatatacaagagtttttgctgaaactttaattaagcatgctgaacaagacactaaaatcattggtattactggcgcaatgccctctggcacaggaataaatttatttgaaaaaaaatttccagaaagaacttttgatgttggtatagcagaacaacacgcggtgacttttgcagcaggcctggcaaccgaagggtacaagccttttgcagcaatttattctacttttcttcaaagagcatatgatcaagtcgtgcatgatgtagcaattcaatcactacctgtgagatttgcaattgatagagcaggtttggttggtgcggatggcccaactcatgccggatcctttgatataacttacttgtcaactttaccaaactttatcgtaatggctgctagcgatgagtctgagttagtaaaaatgataaatacctcagtgcaaataaatgatcggccttcagcttttagatatcctagaggcaatggtatcggtgttgatctgccagcaataaatgaaattttagaaattggaaaaggtagagtaataaag

SEQ ID NO: 232523 - DNA, 889 bp, Unknown
  Bacterial polypeptide expressing nucleotide sequence isolated from the Sargasso Sea
agaaggtataaagggttaagtggttttttaaagcgatctgaaagtgaatatgatgtctttggtgctggtcatgcatcaacagcaatttcagctggcttaggaatggctgtaagtagaaatttagagaatgatgattttaaagtcgtaagtattattggagatggagccttatctggtggccttgcatttgaagctcttaataatgctggaaatataagaaaacaaatgcttgttattgtaaatgataatgacatgtctattagtccgaatgtaggggcatttagaaactatcttgtcaaaatagcgactaacaagcaatataataaattgagaagatggatttatagaactataaagaaacttccaaagagtttgaaatttatagaatctattttaagaaaagctgaatctagtgctaaaaatttctttttaccaacaacggtttttgaagatttaggttttagatatttcggaccagttgatggtcataatatcgaagaaatggtagagattttagaaaatataaaagattatgatagtcctgttgtgttgcatgcaattacaaaaaaaggaaaagggcttgattacgctgaggatgatccaatcaaatatcatggagttaaagagaagaaaaaagatagtgctgttactaaagttgaagctccaatatatcagaatgtatttggagaagtattatgcaatttagcagaagaaaataaaaatatagttgcaataactgctgcaatgagagaaggaacaggtttggttgagtactctacaagatttcctgaaagattttatgatgttggtatcgctgaaggtcatgcagtaacttttagtggtgggttatcaactgaaaataaaattcctgttgttgcaatttattcaa

SEQ ID NO: 232524 - DNA, 802 bp, Unknown
  Bacterial polypeptide expressing nucleotide sequence isolated from the Sargasso Sea
aatgattgtaattttaaatgataatgacatgtctattgctaaaccagttggtgctatgagagcgtatcttgctaaaattctatctggaaaattatattttagttttagagaaacacttaaacttataatatcagctttttcaaaaagatttagtaaaaaagctggaaaagcggaagattttttaagatctgcaatgacaggcggaactctttttaattcaatgggtttctattatataggtcctattgatgggcatgacgttgatgctctcgtttcagtaatgaaaaatgcgaaagaaattaattatgatggtcctattatgattcacataaaaacggaaaaaggaaaaggatatgaatttgctgaaaaatcaaaagacaaatttcatggtgtatccaaatttaatgtaaatactggtatacaagaaaaatccacttcgagcataccttcatatacaaaagtatttgcaaatacattaattaaacatgctgaaaaagatagtaagataattggaataactgctgcaatgccatcaggaacagggatggatttatttggagaaaaatttccttcaagaatgtttgatgttggaattgcagaacaacatgcagtaacttttgcagctggactatctactgagggatataaaccctatgcagcaatatactctacttttttgcaaagagcctatgatcaagttgttcatgatgttgcaattcaaaatttaccagttaggtttgccatagatcgcgcaggactagtaggagcagatgggcctactcatgctggttcttttgacata

SEQ ID NO: 232525 - DNA, 720 bp, Unknown
  Bacterial polypeptide expressing nucleotide sequence isolated from the Sargasso Sea
tatgaacaaagaattctcaaaaaaaaaatatatagacaagattaattctccagaagatttgaaaaagctttctataaatgaactagataatgtctcagatgaattaagatctgagcttatagagattgtttctcagacaggggggcatttaggagctggactaggagttgttgaattgacggtcgctttacattatgtgtttaatgcaccagatgataaaattatatgggatgttggtcatcaagcttatccacacaaaataattactggaagaagagaaaaaatgagaagtttaagaaaaaaagatggtatatcaggttttcttaaaagaactgaatctaaatacgatcaatttggtgcaggtcactcctcaacttcgatctctgcatctcttggaatggccgtggcccgagatcaattaaaaaataaaaataaagttgttgcgattatcggagatggtgcaatgagtgctggtatggcttatgaaggcttgaataatgcaggaatcattaattctgatatgattataattttaaatgataatgatatgtctattgctccagcagttggtgctctaagtaattatttgtctaatgtggtatctagcaggccatttaacacagtacgtgaaattgctaaacaaatgattgatttttttccaaaagaaataagtgaaactgctagaagagccgaaaatttggctagaaatattttaaataa

SEQ ID NO: 232526 - DNA, 664 bp, Unknown
  Bacterial polypeptide expressing nucleotide sequence isolated from the Sargasso Sea
atgaaaaaaaattatcaatttttaaatgatataaactttccatctgatttaagaaaagtttctgaaaataacttacaaaaagttgcagacgaagtgagagaggaaatgatagatgctgtttcagaaactggaggtcacctaggtgctggtttgggagttgttgaattgacagtcgcacttcattatgtttttgatactccaaatgataaattaatatgggacgtgggtcatcaatcttatccacataaaattttaactggcagaaaagataaaattagaactttacgacaaggtgaaggtttatcaggttttactaaaagatctgagagtgaatatgatccatttggagcagctcacagctcaacatctatttcatctgcattaggaattgctgaagcaaataaattagaaaataaatcttctaatgtaatagctgttataggtgatggagcaattagcgcaggaatggcttatgaagccatgaataatgctggagcatctaagacaaaaatgattgttattttaaatgataacgatatgtcaattgcaaagccagttggagcaatgagaacttacttagcaaaattatttactggtaaaatatattttagtcttagagaaaccttaaagttaattacatctgcattttcaaaaagatttagtg

SEQ ID NO: 232527 - DNA, 877 bp, Unknown
  Bacterial polypeptide expressing nucleotide sequence isolated from the Sargasso Sea
tacagttatgaaaaaaaacaatcaaaaattagaaaaaaaaattctcgatttagtaaactctccaagtgaattaaaaaacttaacaattgaagaattagaaaaactatcagatgagcttagaactgaattaattgatgtagtatcgaaaaccggtggacatttaggcgcaggtcttggcgtcatcgaattaacaattgctttacattatgtttttaacacacctgaagataaattgatatgggatgtggggcatcaagcttatccacacaaaattttgactggtagacgtaataagatgcataccttgcggaaaaaaaacggtctttctggatttttaaaaagatcagagtcaaagtttgatcattttggagcaggtcattcatctacttctatttcttcagcattaggaatggctgttgcgagagataagcttagaaaaaaatttaatgttatcgcagttattggtgatggagcaatgagtgctggtatggcctatgaggctatgaataatgctggtaacataaatacaaacatgattgtaattttaaatgataatgatatgtctatagcgccagctgtcggtgctttaagtaattatctctctaatgtagtttcaagtagaccttttaatactgttcgtgaaatagcaaaacaaatgatggaattttttccagaagaactaagcaaaacagcaaaaaaagcagaagatctagctcgaaatttattaaataagcgtgaaagaaccatttttagtcaaatgggaatgttttacttaggtcctgttgacggacatgatgttaaatctatggttaaaattttagaaaacttaaaggatggaccaatagaaggtcctgttttacttcatgttgtacagaaa

SEQ ID NO: 232528 - DNA, 793 bp, Unknown
  Bacterial polypeptide expressing nucleotide sequence isolated from the Sargasso Sea
actgagcttctgcaagatataaattctccaaaagatcttagaaaacttgatcaatctgaaattccaaaattagcagatgagctgagggaatctcttctctacacagtaggaaaaaccggtggtcattttggtgccggacttggtgtaattgaattaacattagctcttcattataaatttgatactccgacagacagaatagtctgggatgtaggacatcaaacatatccccataaaattttgactggtagaaaagatgccatgcaaagcatgagacaaagtaatggacttgctccctttccagtaagatcagagagtgaatatgatacttttggagttgggcactccagcacgtctattagcgctgctcttggaatgatcacagcagctgaaaaaaaacaagaggatagacatgttacagctgtcataggtgacggagccatgactgcaggaatggcctatgaagctcttgcgcatgcaggatcaattgataagaatcttttagttatcttaaatgataatcagatgtctatttctgaaaatattggcggtcttagaaattaccttgctcgaatttgggcaagtaagacttacaacaggattagagatagcgggaaaagcgtacttacttatttgccaggagcaaaagagtttgtaagaaaagcagaaattcatgcaaaaggtatggtggctccagggtcattatttgaagaattaggttttgaatactttggtccagtagacggtcatgatactaataatctaatcaatatcttagaaaatttaaaactta

SEQ ID NO: 232529 - DNA, 918 bp, Unknown
  Bacterial polypeptide expressing nucleotide sequence isolated from the Sargasso Sea
atggtgtcactagatatgaaaaatcgagaatatcacgatgacgctgtgaaattccatgctgtaaaacccaatggaaaatcaaaaaataaaactgaatatcagaaaccaattaagaaagatttaacacctagttttcaagatgtttttggtgagcttgcttgtgaaatggcagaaaataatgataaagttgtttgtataacagcagccatgagagaaggaactggattagttccattttcgaaaaaatatccagacagatattatgatgtcggtatagcggaggggcacgcagttacttttgcttcaggtctagcaacgcaaggtattaggccaattgttgctatatattcaacatttttgcagagagcttatgatcatataattcacgactgtgctatccaacatttgccagttattttctgtttagacagatcaggtatagctggtgaggatggtcccactcatcacggttctcttgacatcgcatatttaagatgtattcaagatatcatagttactgcaccaaaagatggtaatgagtttagacgtctgcttcatactggaatgagtgttacagataaaccattcgcaattcgatatccaaaatcgagctcagtccaattcagtcaagaatcacagattgaactactaccaataggttcatgggaaactattaaagagggtaatgatattgccattttagctgttggttctatggtatttacagctttgaaggcatctgagattgtaaaagaattaggtatctctattcaaattatcaattgcagattcatcaaaccaatggatgtatcttttttaaaaaccattagcacgaaattttcaaaaattattaccattgaggaaggcactataaatggtggttttggtgatggtgtggcctcatggttgttagaaaat

SEQ ID NO: 232530 - DNA, 657 bp, Unknown
  Bacterial polypeptide expressing nucleotide sequence isolated from the Sargasso Sea
tagcgttacaaaatttagatgttctattcgctatagatagagcaggcttagttggattagacggagctacacatcacggcgcttttgatttgtcttatatgagatgtattccaaatatggtaataatggctccttctgatgagtcattagcatggaaaatgtttaacaccggttatgaacactcagggcctgtcgcaattagatatccgagaggaactggtagaggaatagattattttaagaacgaagaaactgtagaaataggaaaaagttctacagtaataaattctgatgagaaagaagttattattctttctttcggcagtctgctcgaatctgccatggaggctggcaaaaggattaacgcaagagtagtggatatgctatttattaaacctttggatgagagtcttttggaagaaatcaataataattataaacttgtagtcaccatcgaagacaatgtaatggctgggggagctggttcagcagtcaacgagcatctcataaaattaaattccagttcaaaaatactcaatttaggccttccagatgaatttgtagagcatggagatcaggaacaacaaaagattcttaatggactagatgcaaatggaatagaaaagtctattagagaaaaattgaaactaatctgaa

SEQ ID NO: 232531 - DNA, 787 bp, Unknown
  Bacterial polypeptide expressing nucleotide sequence isolated from the Sargasso Sea
aggttattcgtttgctgaaaaatcggaggataaatttcatggtgtttcaaaatttaatgtaaaaacaggagaacaagaaaagtctaaatctagtactccttcttatacaaaagtattcgccaattcattaatcaaacatgcagaaaaagatagtaaggtagttggcataactgccgctatgccatcaggaacagggatggatttatttggaaaaaaatttccagaaagaatgtttgatgttgggatagccgagcaacatgctgttacttttgccgcgggtatggctactgaagggtataaaccttacgctgcgatatattcaacatttcttcaaagagcttacgatcaggtcgtccacgatgttgccatacaatctttgcctgttagatttgcaatcgatagagcggggttagttggtgctgatggcccaacacatgctggatcttttgatataacatacctttcaacattaccaaattttgtggtaatggctgcaagtgatgaagctgagcttgtaagaatgataaatacatcaatggaaataaacgatagaccatcagcttttagatatccaaggggcaatggtgtgggagttcaattacctgaaataactgagaaaattgagttgggtaaagcaaaaataattaaagaaggaaaaaaagttgcaattttaaattttggagcaagattacaggagtgtattttggcttctgaaaatttaataaaaaaaggaattgatatctctattattgatgcaagatttgcaaaaccgttagatgaaacctaa

SEQ ID NO: 232532 - DNA, 529 bp, Unknown
  Bacterial polypeptide expressing nucleotide sequence isolated from the Sargasso Sea
atgaaaatatttagtgaaatccctagtgaagctccttcaactaagcttcttgataaaattaattatcctagagatctaaaagagcttttgcctcctgatctaacgattttagctgatgaattgagagaatttttgctctactcagttggtaaaagtggcgggcatcttggagcaggtcttggtgttgttgagttaacaattgttttacattacctttatgattctccatcagacaatattgtctgggatgttggtcaccaagcttatccccataagatattgactggtcgtaagaatcaaataggctcaataagatcaaaagatggcctagctccctttccatcaagaaatgaaagtgattatgatgtttttggtgctggacattccagtacgtctgtaagttcagcagttggtatggctattgctaacaaattaaatgagggagagaaaaaaacagtagctgttatcggagatggagctatgacagccggaaaagcttttgaagcaatgcaacatgctggaggcataa

SEQ ID NO: 232533 - DNA, 853 bp, Unknown
  Bacterial polypeptide expressing nucleotide sequence isolated from the Sargasso Sea
atgaaaatatttagtgaaatccctaatgaagttccttcaactgagctacttgataaaattaattatcctaaagatcttaaagagctttcgcctcctgatctaaagattttagctgatgagttgagagagtttttgctctactctgttggtaaaagtggcgggcatcttggagcaggtcttggtgttgtcgagttaacaattgttttacattatctttataattctccatcagacaatattgtttgggatgttggtcaccaagcttatccccataaaatactgactggtcgtaagaatcaaattggctcaataagatcaaaagatggcctagctccctttccatcaagaaatgaaagtaattatgatgtttttggtgctggacattccagtacgtctataagttcagcagttggtatggctattgctaacaaattaaatgagggagagaaaaaaacagtagctgttattggagatggagctatgacagctggaatggcttttgaagcaatgcagcatgctggaggcatgaagccagatatgttgataattctaaatgataatgacatgtcaatctctgagaatgttggaggattaaataattacttctcaagaatatgggcttccaaactttataaagggattaaaagtaatggtaaaaagtttttaaagaacatccctgctgctcatcatctagtccgcactgttgaaactcatatgaaaacaatggtagcgccaggagctatttttgaggagcttggactaaattatattgggccaattgatgggcatgatattgatcaacttttgaaagtaattggaaatctaaagaattttgaggggccaccagttcctc

SEQ ID NO: 232534 - DNA, 776 bp, Unknown
  Bacterial polypeptide expressing nucleotide sequence isolated from the Sargasso Sea
agcgactgagggttttaaaccttttgcagcaatttattcaacattcctacagagagcttatgatcaagttgttcatgatgtcgctattcaaagtttgccagtgagatttgcaatagatagagcaggattagttggcgcagatggaccgacacacgcgggatcattcgatattacatatttggcaacactgccaaattttattgttatggctgccagtgatgaagcagagcttgttagaatgatcaatacatctgtagatataaacgacaaaccatctgcctttagatatccaagaggaaacggagttggtataagtttaccttctattgatgagaaattagagttaggaaaaggcaggattatcaaagagggaaagaaagttgctttaataaactttggagctagattaaatgaatgtttaattgcaaaagaaaatctttctaaaaaaggaataaaaccaacaattattgatgcaagatttgtaaaacctcttgatcaaaacttaatttggcaaattgcaattgaccatgaagtattaatttcaattgaagagggttcaataggaggctttggctctcatgttggtcaatttttatcagataaaaatttattagataataatctaaaatatagatctatgattttacctgacagattcattgatcatgacaaaccaagcttaatgtataaatatgcaggtttagatgccgaaagtatcgaaaataaaatattagacgctcttaattcaaaagttataataaaaaaaacaaattaac

SEQ ID NO: 232535 - DNA, 751 bp, Unknown
  Bacterial polypeptide expressing nucleotide sequence isolated from the Sargasso Sea
aatgtttgagaaaattccttcagagcgaccgaataccccactgcttgatgaaatcgaagatccgaaggacctcaagagattggaaattgcgcaactttccgagctagctgaccaattacgcctctaccttctctatgcagtgggtcaaacagggggccattttggtgcaggactaggtgtggtcgaactcacaatcgctctgcattatgtgtttaatacgcctaaggaccgattaatttgggacgtcggacaccaagcgtatccccataagatattaacagggcggagagatcagattctgaccattcgccaagaaggcggcttggctgcttttccaaatcgcagcgaaagtgagttcgatcaattcggcgtcggacactcgagcacatcggttagtgccattttgggtatgatggttgctgacaggataagggaacaagaccaccaccatgtagcagttataggagatggagccatgactgcaggaatggcatttgaagcgcttaatcacgctggacatctggatgacaatgtccttgtgatacttaacgataacaacatgtcaatttcgaataatgttggaggcctatcgagttatttcgcaagaatgtgggctagcaagccctacaattttattagaacgggaagtaagcgcgttttttcaaaaataccccccgctttgaaggctatccatcgagcggaagaatatatgaaaggaatggtgtcacccggcactttattgaagagatag

SEQ ID NO: 232536 - DNA, 826 bp, Unknown
  Bacterial polypeptide expressing nucleotide sequence isolated from the Sargasso Sea
gtattaaaaaatgcaaaagagtcaaaacataaaggaccaatattaattcacattaaaacacaaaaagggaaaggttacagtttcgcagaaaagtcagaggataaatatcatggggtatctaagtttaatataaaaacaggcatacagcaaaaaagtgtttcaaaagcgccatcttatacaaaagtatatgcaaatactcttgttaagcatgctgaaaatgacagcaaaataattggtataactgccgcgatgccttcaggtacaggaatggatatttttggaaataaatttcctaatagaatgtttgatgtgggaatagcagaacaacatgcggtaacttttgctgccggtctagcaacagaaggttataagccttatgcatcaatatattctacttttttacagagggcttatgaccaagtggtacatgatgttgcaattcaaagtttaccagtaagatttgcaatagatagagcaggtctcgtgggagcagatggcccaacacatgctggatcttttgatataacatatttggctactctaccaaattttattgttatggcagctagcgatgaggcagaattggtaaaaatgataaacacgtcagtagaaattaatgataaaccatgtgcatttagatatcccagaggaaatggcactggagttcagttacctgatataagtgagaaaatccaaataggaaaagcaaaagttgttagagaaggaaagaaaattgctattttgaattttggagcaagattaaatgaatgtttaattgctgaagaaaatttgagaaaaaaaggagttaatgcaagtatcgtagatg

SEQ ID NO: 232537 - DNA, 924 bp, Unknown
  Bacterial polypeptide expressing nucleotide sequence isolated from the Sargasso Sea
tgctctccataaagtatttaatactcctaaggacaagatcgtctgggatgttggacatcaaggttatgcacataagatattaaccggaagactagataagtttaacacgattcgaaaaatgggtggccttagtggatttttaaaaattagtgagagcgagtatgatgcctttggagctggacacgcctcaacttcaatttcagctgcgactggaattgctgaagctcaaaaaatcaacggtaagaaccatagagtagtctccgtcattggtgacggttcgatgacaggtggattagcttttgaggcaatgaataatgctggacatttaaaaacacctatgttggtaattttaaatgacaatgaaatgtcaataagtccaaatgttggcgccttaaatacctatttgactaaaattgtaacaaatccagtttataatcaaattcgatctgagatatgggatgttgcaggcaagctgacttttggaaagaaaactattcagaaggtattaagaaaagttgaagagagcttgaaatcttttcttgtccctggtatgctatttgaagagttaggttttagatattttggtcccatcgatggccacaatctagatgagcttgtttcgacactagatagaattaaagatttaaaaaccccatgcttacttcatattctaacgaaaaaaggtaaaggcatggtttctactaattcaaataatgataaatattatttagatgctgtaaaatttcatgctgtgaaacccactagtaaggctaatggtaaaattgatcaaaaaactccttctgtggttaaaccacctgtatttcaagatgtatttggatcgcttgtatgtgaaatagcaaggaatagaaaggatacggtatgtatcactgcagcgatgcgtgaggggacaggtttagtccccta

SEQ ID NO: 232538 - DNA, 735 bp, Unknown
  Bacterial polypeptide expressing nucleotide sequence isolated from the Sargasso Sea
atgatcaaatagtacatgatgttgctcttcaaaatctccctgtgcgatttgcgattgaccgagctggacaagttggtgcagatggtccaacacatgcaggatcttttgatatagcttttttatctacattaccgaactttataattatggctcctagcaatcaaaatgaactaattagaatgataaacactactttggttattaatgatagaccctcagcctttagatatccaagaggtaccggtgaattatccaatagcgataaagatactgaaccagttgaaattggaaaaggagttattcttaatgaaggtaatgatgttgcggtgttaaacctaggttcaagattgcaaagttgccgtgaagcaataaaaatacttaatattagaggaattaaccctactttagctgatgctagatttgcaaaacctatagacacagatttattagatctccttttagataatcataaatatttattaactattgaagaaggatcaagtggtggttttagtgcaagtgttttaaattatattcataacaagagaattaaactcacatcaacaaaagtaaataatatcttttttcctgataaatttgttgatcatcaatctcctgatgatcaatattctgaaattggtatggatgctgactctattagtaaaaagatactaaaaatttatgaagataatgtaattaattttcaaagttataataaaaatattaaaaattgat

SEQ ID NO: 232539 - DNA, 901 bp, Unknown
  Bacterial polypeptide expressing nucleotide sequence isolated from the Sargasso Sea
tggttttacaaaaagatcagaaagtgagtatgatccatttggtgccgtttatagttcaacttctatttcttctgcattaggaatagcagtagctaataagttatcaaataaatcaggcaatgtaatagcggtcataggtgatggagcaataagcgctggtatggcttatgaggcgatgaacaacgcaggtgaaaacaaaacaaagatgattgttgttctaaatgacaacgatatgtcaattgccaaacctgtaggtgctatgagaaaatatcttgcaaaaattttatctggtaaaatttactttagttttagagagactttaaaattaattatatctgctttttcaaaaagatttaaaaatcaagcaggaaaagcagaagattttttaagatctgcggtcacaggtggaacattatttaattccatgggattttattatattggaccaatagatggccatgacattgatacaatggtttctgtatttaataatgcaaaagatattaattatgatggaccaatcttaatccatgttaaaactgaaaaaggaaaaggatattcgtttgctgaaaaatcagaggataaatttcatggtgtttcaaaatttaatgtaaaaacaggagaacaggaaaagtctaaatctaatactccttcttatacaaaagtattcgccaattcgttaatcaaacatgcagaaaaagatagcaaggtcattggcataactgctgctatgccatcaggaacaggaatggatttatttggaaaaaaatttccagatagaatgtttgatgttgggatagctgagcaacatgcggttacttttgctgcgggtatggctaccgagggatataaaccttacgctgcaatatactcaacatttcttcaaagagcttacgatcag

SEQ ID NO: 232540 - DNA, 745 bp, Unknown
  Bacterial polypeptide expressing nucleotide sequence isolated from the Sargasso Sea
ttgcgagggtatcaaaccagttgtagctatttatagtaccttcttgcaacgggcatatgatcagttgattcacgatatcggaatacagaatttaccagtaacttttgtattagatagagctggaattgttggtgctgatggtcctactcatcaaggacaatatgacattagttatttaagatgcgttcctaattttactgttatggctccaaaagatgagtctgaattacagcgaatgttagttacttgcatcaatcacaatggtccatcagccttaagaatacctagaggctctggagagggcgcagcgttgatggaggaaggttgggagtccctagaaattggtaaggctgagataatagaagagggagataatttattaataattggttatggctctatggtctctccagcaacaaaaacagcagcaatacttaaagagtctggagtaaatagtactgttattaatgctcgctttataagaccattagatgaggagactattcataagcttgctaaaaagattggtaaagtagtaacaatggaggaaggaactttgttagggggttttggatcagcagtggttgaatcatttaatgataatgatatttttgttcccacattaagaattggaataccagataaattagtagaccacgcaactccgcagcaaagcaaagaatcccttggtttgacgccagaaatgatggctgatcaaattagaaataaatttaattttaattaa

SEQ ID NO: 232541 - DNA, 728 bp, Unknown
  Bacterial polypeptide expressing nucleotide sequence isolated from the Sargasso Sea
catgcatctcggagatctgactcatccgaacgagctgcatggcctcaggctgtccgagcttgaggatgtcgcccgtcagatacgcgatcgtcacctccaggtggtgtccaccagcggtggtcatctcggaccaggtctcggggtcgttgagctcaccctggcgctgtaccagacccttgatctcgaccgggacagggtcatctgggacgtcgggcaccaggcctacccccacaaattgatcaccggtcgtttcaacgacttccacaccctgcgccagcagaacggcgtcgccgggtatctcaagcgctctgagagcaacttcgaccatttcggtgccggccatgccagcacgtcgatttctgcggccctgggcatggcgatggcccgggacaatcgcggagaggacttcaagtgcgttgccgtgattggcgatggtgcccttaccggtggcatggccctggaggcgatcaaccatgccggtcacctgcctgagacccccttgctggtggttctcaacgacaacgacatgtcgatttcacccccggtgggtgccatctccaacgttctgaatcgggcacggctgagtccgccgatgcagttcatctccggcagtgttgaggaaagcgttcgccatctgcccttcatgggaggtggagctccggctgagctgacccgcctggagggcagcatgcgtcgccttgcggttgccaaggtcggggctgtctttt

SEQ ID NO: 232542 - DNA, 503 bp, Unknown
  Bacterial polypeptide expressing nucleotide sequence isolated from the Sargasso Sea
tatggattatgagcttttagataaaattaattttccatctgacttgagagaatttaaaaagaaagatctaaagcaaatctctgaagaattaagagctaaaacaattgagactgtttcaaaaactggtggtcatctaggcgctggattgggtgttgttgaattaactgtagcaatccactatgtcttcaacactccacacgataaattaatctgggatgtggggcatcaagcttaccctcataaaattattactggaagaaaaaaaaatatagatacacttagaaagaaagatggtgtttatggttttgtaagaaggtcagaaagtgaatatgatccctttggtacagctcatagttcaacggcagtatcagcagggttaggaattaaagctgcaaaagatataaataaagacaactcaaaagttatatgcgttgttggagatggtgccttaagtgcaggtttagcgtatgaaggattaaacaacgctggcgcacagaaaaagg

SEQ ID NO: 232543 - DNA, 805 bp, Unknown
  Bacterial polypeptide expressing nucleotide sequence isolated from the Sargasso Sea
accataaaattgattacatcagcattttcaaaaagatttagtgcaaaagcaggtaaagctgaagatttattaagatcagctgtaactggaggtactttgtttagttcattaggtttctattatattggtcctatagatggccatgacctttcttcattaattccaattttgagaaatgcgagggactcgaaacaccaaggcccaatattaatccacattaaaacaaaaaaaggaaaaggttattcttttgctgaagaagcaaaagataattatcatggagtatctaaattcaatgtaaagactggagaacaggaaaaaagttccagtaaaataccatcatatactaaagtttttgctgatactcttatacaacacgcaaaaaaagatagtaaaatagttgcaataactgcggctatgccagatggaactggattaagcaattttcgaaaagaatttccagacagaacttatgatgtcggtattgctgaacaacatgcggttacttttgctgctggtttggcaactgagaattataaaccttatgcagcaatttactcaacatttcttcagagagcatatgatcaagttgttcatgatgttgcaatacagagtttacccgtaagatttgcgatagatagagcaggactagttggagctgatggacctacacatgcaggaagtttcgatacgacctatttagcaacattacctaattttattgtgatggctgctagtgatgaggcggagttagttagaatgataaatactactacagagattaatgatagacccatgtgcatttaga

SEQ ID NO: 232544 - DNA, 385 bp, Unknown
  Bacterial polypeptide expressing nucleotide sequence isolated from the Sargasso Sea
aatgggtagactaattagacaaataaactttcctgctgatttaagaaaatttaaaaaagatgatcttagacaaatttcaaatgagttgagagatgaactgattgatgttgtttcggaaacggggggacatttgggtgcaggtttgggagtagtagaattgacagtggctttacattacgtctttgatacaccaaaagacaaattagtttgggacgttagccaccagtgttacccacacaaaattataactggacgtagagataaaattaaaacacttaggaaaggtggaggcctttcaggatttacaaaaagaactgaaagtgaatacgacccattcggtgcagcacatagttcaacctctatttcttctacacttggaattgcg

SEQ ID NO: 232545 - DNA, 905 bp, Unknown
  Bacterial polypeptide expressing nucleotide sequence isolated from the Sargasso Sea
gagtgctgggatggcgtatgaagccatgaacaacgctggagctttaaaatctaaattgattgtagttttaaatgataatgacatgtcaatagctagaccagttggagctatgagcaaatatttaccaaaattactttcaggaaagatttatttcagcttaagagaaaccataaaattaataatttctgccttttcgaaaagattcagtcagaaggcaggtaaagctgaagatattttgagaggtatagtaactgggggaactttatttagcgaacttggattttattatataggcccagttgacggacatgacgttaataatttggtcacaatttttgaaaatgttaagaactcaaatcatgaaggacctatccttatacacactgtaacaaaaaaaggaaaaggatataaaccagctgaagaatcaggtgacaaatatcatggagttactaaatttaatgttgtcaccggagagcaaagcaaaaaaaaaaccaataaacctgcgtatacaaaagtatttgcggaaactttaataaaacatgctgaaaatgacacaaaaatagtaggaataacaggcgctatgccttcaggaacaggattaaatctatttgaaaaaaaatttccagaaagaatgtttgatgtaggtattgctgaacaacatgctgtcacttttgcagctggattggcaacagagggatacaaaccttttgcagcaatttattccactttccttcagagggcatacgatcaagttgttcatgatgttgctattcaatcacttccagtaagatttgcaatagaccgagcaggattagtaggagcagacggaccaactcatgcaggatcttttgatataacctatctttcaactttacctaattttgtagttatggccgccaagtgat

SEQ ID NO: 232546 - DNA, 512 bp, Unknown
  Bacterial polypeptide expressing nucleotide sequence isolated from the Sargasso Sea
aatgtcttttccgtttgaactgccaattttggacaaagtttctggtccggaagatctgagaaagctgagtgatgctgatttagatcaagttgccaaagaactccgtaacgaagtcattgaagttgtttctcaaacgggtgggcatttgggttcctcgcttggcgttgtagaattaacggttgccttgcacgctatatttaaaaccccactagataagttaatatgggatgttggtcatcagtgttacccccataaaatcattaccggacgaaggaagcgaatgatgggtttgagacagaaggacggcgtcagtggttttaccaaaaggagtgaaagcgaatatgatccttttggagccgcacatagttcaacctctatttcagctgcgttgggctttaccatgggccgagaacttggccagacagtcggtgactgcatagcggtaataggtgacggatcaatttctgccggtatggcctatgaggcgatgaataacgcaggtgcagaaaata

SEQ ID NO: 232547 - DNA, 760 bp, Unknown
  Bacterial polypeptide expressing nucleotide sequence isolated from the Sargasso Sea
gataaaattatctgggatgttggccatcaatcttatccccataaaatattaactggtagaaaagatagaataaaaacattaagacaaggtaatggcctttcaggttttacaaagagatctgaaagtgaatttgatccttttggagcagctcatagctctacctctatttcagccgctttaggtatcgcaacagcaaataaactttcaaataaaaatgatgaagtcgtagcagtaattggcgatggagcaattagtgccggtatggcatatgaagcaatgaataatgctggtgatgcaaaaactaaaatgattgtaatattaaatgataacaacatgtcaattgctaaaccagttggcgcaatgaaatcatatttggcaaaaattttttcgggaaaaatttattttaatttaagagaaactataaaattaataatttcatcattttctaagagatttagtaaaaaggcagcaaaagcagaagattttttaagatcaatggtaactggtggcactttatttagctccttgggattttactatatcggccctatagatggacatgacttagatgtacttctgccaattctaaaaaatgccagagactcaagacacaatggaccaattcttattcatttaaaaactcaaaaaggaaaaggttatgagtatgctgaaaaatctgacgacaaataccatggagtttcaaaatttaatgttaaaacaggtatacaagaaaagtctaaatctaatattccagcttaca

SEQ ID NO: 232548 - DNA, 871 bp, Unknown
  Bacterial polypeptide expressing nucleotide sequence isolated from the Sargasso Sea
ttatttagctccttaggattttactatatcggccctatagatggacatgacttagatgtgcttctaccaattctcaaaaatgcgagagactcgaggcacaatggaccaattcttattcacttaaaaactcaaaaaggaaaaggttatgaatatgctgaaaaatctgatgacaaatatcatggtgtttcaaaatttaatgttcaaacaggtattcaagaaaaatctaaatctaatattccagcctacacaaaagtttttgccaatactttgatcaaacatgctgaaaaagatagcaagattgtaggcattactgctgcgatgccatctgggactggtatggatattttttcaaaaaaatttcctaatcgaatgtttgatgttggaattgcagagcaacatgctgtaacttttgcggcaggattagcaacagagggttttaaaccttatgcagccatatattctacatttttacaaagagcttatgatcaagtagtacatgatgtagctattcaaagtttacctgtaagatttgcaatcgatagagcgggtttagttggcgctgatggaccaactcatgctggttcttttgatataacttatttatcaaccttgccaaattttgtagtgatggctgcaagcgatgaaggagagcttgtcaaaatgattaataccacagttgatataaatgatagaccaagtgcattcagatatccaagaggaattggcgtaggaatggatttgcctgatattaccgaaaaactacagattggaaaaggcagaattattagagaaggaaaaaaaatagctatattaaactttggtgcaaggttaaaagaatgtttgatagcagaagaaaatctaaaaaaaaagg

SEQ ID NO: 232549 - DNA, 488 bp, Unknown
  Bacterial polypeptide expressing nucleotide sequence isolated from the Sargasso Sea
tatgaaatcaatactgtctagtatctcacaaccaaaagatatacaaaacttaaatttagttgagttaacccatctcgcctatgagtgccgtcaaagaattattgaagttactagtaagaaaggaggtcatttagcctcatctttgggtacagttgaaataacagttgctttactgaaacattttgatttcagccaagataggattgtatgggatgtaggacaccaagcgtatccatataagattttgacggataggaatgaaagctttgattctttaggagaaaagggtggtataaaaaaatttctttcccgtgaagaaagtatttttgaccattttggtgcaggacacgcttcaacatcagtttcagctgcactaggaatgtctattggtcgagatctattaaacaaaaaatttaaagtaattgctgtgattggtgatggagctatgactggaggtttagcttttgaagctctgaatcataatggtt

SEQ ID NO: 232550 - DNA, 260 bp, Unknown
  Bacterial polypeptide expressing nucleotide sequence isolated from the Sargasso Sea
aatgaaaaaaaattatcaatttttaaatgatatcaactttccatctgatttaagaaaagtttctgaagataatttacaaaaagtagcagatgagttgagggaagaaatgataaatgctgtttcagaaacaggaggtcaccttggtgctggtttgggagtggttgaattgacagtcgcacttcattatgtttttgacactccaaatgataaattaatatgggatgttggtcatcaatcttacccgcataaaattttaactg

SEQ ID NO: 232551 - DNA, 695 bp, Unknown
  Bacterial polypeptide expressing nucleotide sequence isolated from the Sargasso Sea
aatgataaaacaaataaattttccatctgaattaagaaaatttaaaaaagaaaatttaaaacaaatttcagatgaattaagagatgaattaatcgatgtagtctctgaaactggcggacatttaggagcaggattaggagtagtagaattaacagtcgctttacattatgtatttgatactccaaaggataaacttgtatgggatgtaagccatcaatgctatcctcataaaattatcacaggtaggagagatagaataagaactttaagaaaaggtggaggtctctcaggttttaccaaaagatcagagagtgaatatgatccattcggtgccgctcatagctcaacttctatctcctcaacattaggtatttcagtagcgaaaaaattatcaaataataaaaataatgtaatagctgtcattggagatggcgcaatgagtgcaggaatggcttacgaagcaatgaataatgccggtgcattaaaatcaaatttaattgtagttttaaatgataatgatatgtcaattgctagaccagtgggagctatgagtaagtatttagctaatcttctatctggaaaattatattttagtttaagagaaacaatcaaaatgattatctcagcattttctaaaagatttagccaaaaagctggaaaagcagaagatatgttgcggaatatggttacgggcg

SEQ ID NO: 232552 - DNA, 845 bp, Unknown
  Bacterial polypeptide expressing nucleotide sequence isolated from the Sargasso Sea
agaaagaatgtttgatgttgggattgcagaacaacacggggttacttttgctgctggctttgcaactgaaggatataaaccgtttgctgcaatttactcaacttttttacaaagagcctatgaccaagtagttcacgatgttgcaatacaatctttgccagtaagatttgcaatagacagagcaggtttagtcggcgcagatggtgcaactcacgctggttcatttgatataacttatctatccactctacctaattttgtggtgatggcagctagtgatgaggccgagctagtaaggatgatcaatacatcggtacacataaacgatcgaccgtcagctttcagatatcccagaggtaacggaattggtattgaattaccagatattaaagaagttcttgaaattgggaaagggagaattatttctaccggaaaacacttggcaattttaaattttggagcaagaatgaatgagtgtaaaaaggctgctgaggttcttaagaagaaaggaatctcaataagtatttttgatgcaaggtttgcaaaacctttagatgagaaattaattttggaactagcttctaatcatgaagcagttttaacaatagaggagggttcaataggcggttttggatcccatgtttcaaatcttttatctgatagaggtttttttgatggaggactaaaatttagatctatgattttacctgataaatttttagatcaagacacgcctgacaatatgtataaaactgctggacttgatagtaataatattattcagaaaattgaaagtatattaaattcaaacgtggtaattgcaaaaaacaaaaatttatcttaac

SEQ ID NO: 232553 - DNA, 727 bp, Unknown
  Bacterial polypeptide expressing nucleotide sequence isolated from the Sargasso Sea
tttagtcaattaggattttattatgtaggccccattgatggtcatgatgtaaataatttagtaactattttagagaatgtgaagaaatcaaaacatgaaggcccaatattaattcatgcaattacaaaaaaaggaaagggttataaaccagcagaagaatccggagataaatatcatggagtttcaaaatttaatgttttaactggagaacaatctaaaggaaaatcaaaggcaccttcatatactaaagtttttgcaaacacacttataaagcatgcagagaatgatacaaaaattgtagcaattactggtgctatgccttcgggaacgggattagatttatttgaaaaaaaatttccagaaagaatgtttgatgtaggtattgcagaacagcatggagtaacttttgcagctggcttagctacagaaggatataaaccatttgctgcaatttattctacttttttacaaagagcatacgatcaagtggttcatgatgttgcaatacaatcattacctgttaggtttgctatcgatagggccgggttagtaggggctgacggcccaacacacgccggatcttttgatataacttatttgtcaactttacctaattttgtagttatggcagcaagcgatgaggccgaactagttaggatggtcaatacttcagtaaatataaatgataaaccttcagcgtttagatatccaagaggaaatgggattg

SEQ ID NO: 232554 - DNA, 874 bp, Unknown
  Bacterial polypeptide expressing nucleotide sequence isolated from the Sargasso Sea
ttgtcaaataaatctgacaatgtaattgcggttataggagatggagcaatcagcgcaggtatggcatatgaggcaatgaataatgctggcgccatcaaaacaaaaattattgtaattttaaatgataacgatatgtcgattgcaaaaccagttggagcaatgagaacatatttagcaaaaattttatcaggcaaactctattttagttttagagaaactataaaattaataatttctgctttttcaaaaagatttagtaagaaagccggtaaagctgaagattttttaagatctgtagttactggtggaactttatttagttcattgggtttttattacatgggccccatcgatggtcatgacatgaatgatttagtttcagttttaaaaaatgctaaagaaataaattacgatggtccaattatgatacatataaaaactgaaaaagggaaaggctacaaatttgcagaaaaatcattagataaatatcacggagttacaaaatttaacgtaaacactggagttcaagaaaaatctaaatctaatattccttcctacacaaaagtttttgccaatacacttgtaaaacatgcagaaaaagatagtaaaattattggagttactgcagcaatgccttcaggaactggaatggatatttttggcgaaaaatttccattaagaatgtttgatgttggaattgctgaacagcatgcggttacttttgcagcaggcttagcaacagaaggttataagccatatgctgcaatttattctacatttttacaaagagcatacgaccaagttgtgcatgatgttgcaattcaaagtttacctgttagatttgcaatagatcgagctggattagttggtgcag

SEQ ID NO: 232555 - DNA, 894 bp, Unknown
  Bacterial polypeptide expressing nucleotide sequence isolated from the Sargasso Sea
agaaaaaaaggaggtttggctccttttccgtcaaaaaatgaaagtgaatatgatgtatttggagtcggacactccagcacttctataagtgctgctcttgggatgagtgaggcccttaaagaacaatcaagcaaaatagtttgtgtaataggtgatggtgcaatgacagctggcatggctttcgaggcacttagtcatacaggtcacctaaaacccaatatgcttatcatattaaatgataatgatatgtctatctctgaaaatgttggtgggttatcaaattatttttcacgaatatgggcttcaaaactttacaaaggaataagaaaaggaggtaaaagttttctggaaaatctacctcaagctcatcatattgcgagaaaagttgagacgcaaatgaaaagcatggtggctcctggaacaatttttgaagagctaggcttaaactatattggtccagttgatggacataatattgatgagcttttacaggtcgttggaaatcttaaggattttgatggtccacaatttttacatattattaccaagaaaggtgctggattagatgatgctgaagcagacaggattgggtttcatgctattggaaagattaaacctgttaccaaaacgagtaaaaaaacttcctcgcctaaatatcaagatatattcagtgattggatagttgatatggctgataaagattctgatttagttgctatcacacctgccatgcgtgaaggttcagggcttgtagaatttagtaaaaaatatcctgatagatattatgatgtagcaattgcagagcaacatgcagtaacctttgcagctggcttagcgtgtgaaagtaaaaaacctgtggttgctatttattcgacatttctgcaaagagcctat

SEQ ID NO: 232556 - DNA, 358 bp, Unknown
  Bacterial polypeptide expressing nucleotide sequence isolated from the Sargasso Sea
gcatcaagcctacccgcataagatcttaacgggtcgccgcgaccaaatgcatactattcgccaaaaggatggtctgcacccatttccatttagagatgaaagcgactacgacacattcagtgttggccattctagcacctcaatttctgcagctttgggcatgtcaattgcagcacaaaaagaaggcgcagggcgtaaaacggttgctgttattggtgagggcgctattactgcgggtatggcatttgaggcaatgaaccatttaggcgatgtaaaatcagacatgcttattattctaaatgataacgaaatgtcgatttcagaaaacgttggcgcattaaccaaccactttgcgcgt

SEQ ID NO: 232557 - DNA, 921 bp, Unknown
  Bacterial polypeptide expressing nucleotide sequence isolated from the Sargasso Sea
tgttgctgtcataggtgatggagcaatgagcgcaggaatggcctatgaagcaatgaataacgctggagcaatgaaatcaaaattgattgttgttctaaatgataatgatatgtcaattgcaccaccagttggagcaatgagcaaatatcttgcaagacttttgtctggaaaaatatatttcagtttccgcgaaaccataaaattaattctttcagcattttcaagaagattttcaaaaagcgcgggtaaagcagaggatctacttagaagcgcggtgactggtggaacattattcagccaacttgggttttattatataggccccattgacggacatgatgtgaataatttagttacaattttagaaaatgtaaaaaattcaaatcatcaaggtccaatattaattcatgcaattaccaaaaagggtaaaggatataaacccgctgaagagtcaggtgataaatatcatggggtatcaaaatttgatgttttaactggtaaacaagtaaaaggtaaaacagcaggaccttcttatacaaaggtttttgcgaatactttaattaaacatgctcaaaacgatacgaagattgtagcaattactggtgcaatgccatcgggaaccggactagatctttttcaaaaaaagtttcctgataggatgtttgatgtgggcatagctgaacaacacggagtaacttttgctgctggattagctaccgaaggatacaaaccttatgctgctatttactcaacctttttacaaagagcctatgatcaagttgttcatgatgttgcaatacaatctttaccagttagatttgccatagatagagcaggcttagtcggctcagatggcgcaactcatgctggatcattcgatactacatacctctctactctgccaaattttgttgtaatggc

SEQ ID NO: 232558 - DNA, 739 bp, Unknown
  Bacterial polypeptide expressing nucleotide sequence isolated from the Sargasso Sea
ccctagtgatattaagaaactatctcataatgaattaaaacttcttgctcaagaggtaagagaggaaatgatagatgctgtttctgaaactggtggacatctgggtgcagttttgggtgtggtagaattgactgtagttcttcattatatttttaatactccaaatgataaattaatctgggatgtaggacaccaaacctatccacataaaattctaactggacgtaaagataaaattagaactttgagaaaaggaaatggtttgtctggttttactaaaaggtctgaaagtgaatacgatccatttggcgcagctcatagttcaacatcaatatcatcagcgctaggaatagctatagcaaataaattatcaaataaatctgacaacgttattgctgtaataggcgatggagcaattagtgctggtatggcatatgaggcaatgaataacgcaggatcaagtaagacaaaactaattgtaattttaaatgacaacgacatgtcaattgcaaaacctgttggagcaatgagagcatatttggctaaaattttcactggtaaaatttattttagcttgagagaaactgttaaacttataatttcagctttctcaaaaagatttagtaaaaaagctggtaaagcagaggattttttacgttcagctgtaaccggaggaactttatttagttcaatgggcttttattacgtagggcctatagatggtcatgatatagacgct

SEQ ID NO: 232559 - DNA, 872 bp, Unknown
  Bacterial polypeptide expressing nucleotide sequence isolated from the Sargasso Sea
aacattgaaattaattatatttcctcgttctcaaaaagattcagtaaaaaagctggtaaagcagaggattttttaagatctgcagtaactggaggcacattatttaattcattaggattttattacataggtcctatagatggacacgatatggattctttaatttctgttttaaaaaatgcaaaacaaattaattttgatggtccaattttaatacatattaagacagagaaaggaaaaggatatgaatttgccgagaaatcagatgataaatatcatggtgtagctaaatttaatataaacactggagttcaagaaaaatcacaatctgttaatccatcgtatacaaaagtttttgcaaatactcttattaagcatgctgaaaaggatagcaagattgttggaataactgctgcaatgccttcaggaactggaatggatattttcgcaaaaaaatttccatcaagaatgtttgatgttggtatagcagaacaacacgccgtaacttttgcagccggtttagctaccgaaggctataaaccttatgctgcaatttattctacttttttacaaagagcttatgatcaagtagtacacgatgtagcaattcagagtctgccagtaagatttgcaattgatagagcaggattagttggtgctgatggaccaacacacgcaggatcttttgatataacttatcttgcaactttgcctaattttatagtaatggctgcaagtgatgaagcagaacttgtaagaatgataaatacctcagtagatattaatgataaaccttctgcttttagatacccaagaggaaatggcataggagtagaattgccaaacattagtgagaagttagaaattgggaa

SEQ ID NO: 232560 - DNA, 850 bp, Unknown
  Bacterial polypeptide expressing nucleotide sequence isolated from the Sargasso Sea
tgaatacgatcctttcggtgctgctcatagttcaacatcaatttcttctgcactaggtatagctgaagcaaataaattggaaaacaaatcttcaaacataattgccgtaataggtgacggtgcgatgagtgcaggtatggcttatgaggcaatgaataatgcaggtgcttcaaaaaccaaaatgattgttattttaaacgacaacgatatgtcaattgcaaaaccggttggagcaatgagaacatatcttgcaaaattattgactggaaaaatttattttagttttagagaaacaattaaattaattacttctgcattttcaaaaaggtttagtgcaaaagcaggaaaagcagaggatttcttaagatctgcattcacaggtggtactatgtttaattcattaggtttttattatgtaggaccaattgacggacatgatttatcaactcttataccaattttaaaaaatgcaagggactcaaatcatgagggaccaattatgattcatattaaaactcaaaaaggtaaaggttatagttacgcagaagaagctaaagaccattatcatggagtttcaaaattcaatgttgatactggcgaacagaataaaagtggatctaatttaccttcatatacaaaagtttttgcgaatactcttgtcaaacatgccaaaaaagatagtaaaattgttggaataacagctgccatgcctggtggaacagggatggatatttttagtaaagaatttccaaaaagaatgtttgatgttggtatagctgagcaacatgcagtcacatttgctgctggaatggctacagagggatacaaaccttatgctgcaatatactca

SEQ ID NO: 232561 - DNA, 829 bp, Unknown
  Bacterial polypeptide expressing nucleotide sequence isolated from the Sargasso Sea
ggagttatagagcttacaatagttcttcattatctattcgatagtccaaatgacaatattgtatgggatgttggccatcaagcttatccacataaaattcttacaaacagaaaacatcttattgaaacaattagatcaaaagaggggttgtcaccatttccaaaaagaaaagaaagtaaatatgatgcatttggagtgggccattccagtacttccataagtgcagcattaggaatgtctattggaaataaaattaaagggctgaatgataagacagttgctatcataggtgatggggcaatgacagccggaatgtctttcgaagctctgagtcatgcaggtgctgaaaaatcaaatattttagtaattctcaatgataacgatatgtctatttctgaaaacgttggtggtcttaataactactttgcaagaatctgggcttcaaaactatacacaggtataaagaaaagtgggaaaaaagtcttgaagaacctccctactgctcatcatcttgcaagaactgtggaaacaagtatgaaaaccatggttgcaccagggggtatctttgaagagcttggttggaactatataggtcctattgatggtcataatattcaacaattaattgaagtcattgataacttaaaaaatttagaaggtccacaatttcttcacattattacaaaaaaaggggcaggttttaatttggcagaaaaaaatagaattaaatatcatgccatttcaaaagataaaagttctaaaagtaaaaaaattaaatatcaagatatttttggtaagtggattgttgacatggcatcaataaatgatt

SEQ ID NO: 232562 - DNA, 367 bp, Unknown
  Bacterial polypeptide expressing nucleotide sequence isolated from the Sargasso Sea
actggaggtcatttaggtgctggcttaggtgtggttgagctaacaatagcattgcactatgtttttaacactcctagagatagattgatttgggatgttggacaccagtcctatcctcataaaattttaactggtagaaagcataagattgaaactttaagacaaaaaaatggcttgtatggttttgtaaaaagaagtgaaagtgaatatgacccttttggaactgcgcatagttctacatccatttctgctggaatgggtatgaaagttgctaaggatttaaacaatgatgatgctaaaattatttgtgttattggtgacggagctcttagtgccggtatggcgtatgaagcactcaataatgtgg

SEQ ID NO: 232563 - DNA, 956 bp, Unknown
  Bacterial polypeptide expressing nucleotide sequence isolated from the Sargasso Sea
tactgtagctttacactatatatttaatactcctaatgataaattagtttgggatgttggtcatcaaacgtatccacataaaattctaactggaagaaaagataaaataagaactttaagaaaaggtggtggcttatcaggttttacaaaaagatctgagagtgaatatgatccatttggtgcagcgcatagttcaacctcaatatcttctgctttaggaatagctattgcaaacaaactttctaacaagtccgacaatgttgttgcagttataggtgacggagcaatgagtgcaggcatggcttatgaagcaatgaataatgcgggtgctagtaaaacaaaaatgattgtaattttaaatgataacgatatgtccatagcaaaacctgtcggagcaatgagagcatatttggcaaagattttatcagggaaaatttatttcagtttcagagaaaccataaaacttataatatctgctttttcaaaaagatttagtaagaaagctggtaaagctgaagattttttaagatcggtagttacaggtggtactttatttagttcaatgggtttttattatataggtcctatagatggccatgatatagacgatttaatttctgttttaaaaaatgctaaagaaataaattatgatggtcctattatgattcacataaaaactgaaaaaggaaaaggatatgaatttgctgaaaaatcagatgataaataccatggagttactaaatttaatgtaaatactggagttcaagaaaaatctaaatcaaacattccttcctatacaaaagtttttgctaacactcttataaagcatgctgagaaagatagtaaaattattggagtaactgcagcaatgccatcaggtacaggtatggatatttttggagaaaaatttccatcaagaatgttcgatgttggaattgctgaacagcacgcagtta

SEQ ID NO: 232564 - DNA, 793 bp, Unknown
  Bacterial polypeptide expressing nucleotide sequence isolated from the Sargasso Sea
tatccggagcgttatttcgatgtagctattgccgaacagcatgcggtgactttagcggcaggtatggcaatagaaggtttaaaacctgtagtcgccatctactccagcttcctgcaacggggttatgatcagcttattcacgacattgcaattcaaaatctggatgtactttttgcgatagaccgcgctggtgttgtaggggccgatggtccaactcaccaaggttcgtttgatttaagctttatgcgctgtattcccaacatgctgatcatggtgccttcggatgaaaacgaatgccgtcagatgttgtacaccggctatcagcacaaaggtcctgctgcggtgcgttaccccagagggagcggtaacggtgaagcgccagagtctgtaatgactgaattagctctgggtaagggcgtcattcgccgtcagggtgaaaaagtagccttgctggcctttggccctctgttgcaagcctgtcacacagcagcagaacagctcaacgctacgttggtggatatgcggtttgtcaaacctctggatcaacagttgctcacagagctaagtaaaacgcacagtcattttgtcactattgaagacaatgcgttgatgggcggagccggttctgcagtgaatgagtattgcatcgctgaacagctgcctgtaaagctgctgaatattggcttgccggatatttttatcaagcacggtactcaggaacagatctatgccgaattaggtttagactctgccggtattcaggcgaaagtagaggtttttcttcgccgttaag

SEQ ID NO: 232565 - DNA, 584 bp, Unknown
  Bacterial polypeptide expressing nucleotide sequence isolated from the Sargasso Sea
aatgaaaaaaaaatacgaacttttagatgaaattaattttccatcagatttaaaaaaattacctgagtcaaaattacaaaaagttgctgatgaattaagagaggaaatgattgatgctgtctcggtgacaggtggtcatcttggggcaagtcttggagttgtagaattaactgttgctttacattatatttttaatacacccaatgataagttaatctgggatgtaggtcatcagtgctatccacataaaattttaactggcagaaaagatagaataagaactcttagacaaggaaatggtctctctggttttacgaaaagatcagagagtgaatatgatccctttggtgccgcacacagctcaacatcaatttcatcagctctaggtatagcagaagcaaacaaattgtctaataaatcagacaatgtaattgcagtaattggtgatggtgcaatcagtgcaggaatggcttatgaagctatgaataatgctggtgcctcgaaaactaagatgatcgtaattttaaatgataacgatatgtcaattgctagaccagttggagcgatgagtacttacttagcaa

SEQ ID NO: 232566 - DNA, 763 bp, Unknown
  Bacterial polypeptide expressing nucleotide sequence isolated from the Sargasso Sea
tataaaccttatgcagcaatttactcaacatttctacagagagcatatgaccaagtagtacatgatgttgcaattcaaagtttaccagttagatttgcgatagacagagctggattggttggtgccgatggaccaacacatgctggttcatttgatataacatatttatcaactttaccaaattttattgtaatggccgcaagcgacgaagctgaattagtaagaatgatcaatactactgtcgatataaatgataaaccttcagcttttagatatccgcgaggtaatggcgtcggagtaagcttgcctttaaatgatgaaaaaataattattggaaagggccgagtaattaaagaaggaaagaaaatagttttattaaattttggagcaagattaaaagaatgcctaattgcagaggaaaatttaaagaaaaaaggaataaatttaacaattattgatgcaagattttgcaaacctcttgacgaaaacctaatatggcaagtagcaacagatcatgatgcaataattacaatagaggaaggctcaataggaggttttggctctcatgttggacaacttcttgcagataaaaatttattggataataatttaaaatatagatctatgattttacctgatagatttattgatcacgataaaccagaattaatgtacaaatttgcaggtttagatgctaatagtatcgagtccaaagtattagatacattgaattcaaaagttataataaaaaaaactaattaat

SEQ ID NO: 232567 - DNA, 853 bp, Unknown
  Bacterial polypeptide expressing nucleotide sequence isolated from the Sargasso Sea
atggcgctaagattgatcccttctgcaagaaaatttgctagtaaagcggaagagcatatcaaaggcatgattgcgcctggaactttattcgaagagctaggctttaattatgtcggacccatggatgggcacaacgtcaaagaaataattagaactttaagaaatttaaacgatacctcaggtcctaagcttcttcatctaatcactaaaaaaggaaaaggatttaaacctgcagaggttgatccaattggatttcatgcgatcacaaaaatggaaaatccaaacgcatcaaagatgaaaaatgtaggcatgaaatattcagatgtttttggttcttggctaatttcaaaagcaaatgttgatccttcccttattgcaataactcctgctatgaaagaaggttcaggaatggttgaatttgcggataaattcccatcacgtttctacgatgtagcaatcgccgaacaacatgctatgacttttgctgccggacttgcctgcgaagggaaaaagcctgttctagctatatactctaccttcttacaaagagcatatgatcaattaattcatgatgtagcaattcaaaaccttgatctccttattgccatagatagagctggattagttggcgaggatgggccaacgcattctggcatatttgatttatctttcatgagatgtattcctaacttgattattatgacgccctcctctgaagaagaatgttggaggttattggaaactggttataaatttgaaggtccagctgcagttagatatcccaaaggctttggaataggaacagatctaccaactgaatttaaagaaattgagatggaaaatctaaagaaat

SEQ ID NO: 232568 - DNA, 809 bp, Unknown
  Bacterial polypeptide expressing nucleotide sequence isolated from the Sargasso Sea
attagctaaggaagatgaaaaaatagttgctattactgctgccatggcttcaggaacaggattagataactttagtaaagagtttccctctaggttttttgatgttggcatagctgaacaacacgctgttacgatgtgtgctggtttagcaacagaaggatacaaaccttttgcagcaatttattctacattccttcaaagagcatatgatcaaattattcatgatgtggcgttacaaaaactaccagtgcgatttgccatagatagggctggtcaagtaggagcagatggaccaacccacgctggctcttttgatatagcttatttaaactcaataccaaactttatcattatggctccaagcagtcaaaatgaattaaaaagaattattaatacatcattatatattgatgatcgtccatcagcattcagataccctagaggtttaggtacctttaaagataatgagaatgatagtactccagttgaaataggtaagggcgtagtgataaaagaaggaaatgaagtagctataattaatttaggtacaagattagatacttgtctagatgctatagaaaatttaaaggaacataatatatacccaacccttgttgatgcaagatttgccaaacccctagatacaaatctaattgatttaattttagatagtcataagtatattttaactatagaagaaggatctattggtggctttgcttcttcagttttaaactatactcataatattcgattaaaacctactaactctattattaaaaatcttttttttcctgataaatttattg

SEQ ID NO: 232569 - DNA, 829 bp, Unknown
  Bacterial polypeptide expressing nucleotide sequence isolated from the Sargasso Sea
atgtttgatgttggaatagccgagcaacacgcggttacgtttgccgcaggtatggctaccgaaggatataaaccttatactgcaatatattcaacattctttcaaagagcttatgaccaggtcgttcacgatgttgccatacaatctttacctgttagatttgcaattgatagagcggggttagttggtgctgatggcccaacacatgctggatcatttgacataacattcctctcaacattaccaaattttgtagtaatggctgcaagtgatgaagccgagctcgtaagaatgataaacacatcaatggatataaatgatagaccgtcagcttttagatatccaaggggcaatggtgtgggagttcaattacctgaaatgactgagaaaattgaattgggaaaagcaaaaataattaaagaaggaaaaaaagtagccattttaaattttggagcaagattacaggagtgtattttagcttccgaaaatttaacaaaaaaaagaattgatatctctattattgatgcaagatttgcaaaacctttagatgaaaatctaatttggcaaattgctacagaacatgaggttttgattacaatagaagaaggttcaatcggtggatttggatctcacgtaagccaatttttaagtgaaaaaaatttattagacagcaatcttaaatttagatcaatgatattgcctgatagatttattgatcacgataaaccagagctaatgtataagtttgctagcctagactctatcggtattgaaaataaaattttagatactttaaattcaaaagttttaatgaaaaaatctaattaga

SEQ ID NO: 232570 - DNA, 950 bp, Unknown
  Bacterial polypeptide expressing nucleotide sequence isolated from the Sargasso Sea
taaagcagaagatttactcagatctgcagtaacaggtgggacgttatttagttcacttggtttttattatattggaccgatagatggacatgatctaaattcgttgataccaattttaaaaaacgccagagattctaaacatgaaggaccaatattaattcacgtaaaaacaaagaaaggtaaaggctacacttttgcagagacagcaaaagataattatcatggtgtatcaaaatttaacgttaaaactggcgaacaagttaaaagtactagtaaattaccttcttatactaaagtttttgcaaatactttaattcagcatgcaaaaaaagatagcaaaattgtagctatcacagcggctatgccggatgggaccggtctagacattttccgtaaagaatttccagatagaacttttgatgttggaattgccgagcaacatgcagtgacatttgcagctggactagcgactgaaaactttaaaccatacgctgctatttattcaacatttcttcaacgggcatatgatcaagtagttcatgatgtagctatacaatgtttaccagtaagatttgcgattgatagggcaggattagttggagcagatggaccaacacatgctggaagttttgatacgacttatctttctacactaccaaattttatagtaatggctgcaagtgatgaagctgaattagtaagaatgataaatacctcaacagaaataaatgacagaccttgtgcattcagatatccaagaggcactggtttaggagcaattttaccatctataaatgaaaaaatagaaattggaaaatctaaaattgttaaagagggaaaaaaattagccattttgaattttggtgcgagattacatgaaaccttaaaagctgcagacaatttagctaaaaaaggagttgatattacagttgttgatgccagattcgcaa

SEQ ID NO: 232571 - DNA, 364 bp, Unknown
  Bacterial polypeptide expressing nucleotide sequence isolated from the Sargasso Sea
tatgcgtctgagccagttaagtcatccgaatgagcttcatggcttacccattagtgaattggaagatgttgcttgccaaattagagaaaggcatcttcaagtagtttctactagtggtggccacttaggtccaggtcttggtgttgttgagttaacaattgccctctatcagactttagatttagatgtcgataaagttatttgggatgtcggtcatcaagcctatccacataagttaataactggaagatatgatcgatttgattcccttaggcagcaaaaaggagtagctggttacctaaaaagaactgaaagtaaatttgatcattttggggctggtcatgcgagcacatcaattctgctg

SEQ ID NO: 232572 - DNA, 823 bp, Unknown
  Bacterial polypeptide expressing nucleotide sequence isolated from the Sargasso Sea
agccatcgtaaagatgtcgtttgtattacggctgctatgagagagggaactggattagttccatatgaaaaaagttaccctgatagatattatgacgttggaatcgctgaaggccatggtattacctttgctgcaggtttagctacccaaggtataaagccgatagttgcaatatattctacatttttgcaaagagcttttgatcacattgttcatgatgttgctattcagaacttaccagttattttttgtatggatagagctggtatagctggagaagatggtcctactcatcacggtgctttagatattgcatatttacgatgtattcaaggaatgacgctagctgcaccaaaaaatggtaacgaatttagaaaattattgtatactgcattagatcacaatggtccatttggtattagatatcccaagtgcacatcttttgaattcgataaaaaaggtcaagctgagttaattcctattggttcttgggaagtggaaaaaaaaggagatgatattgtgattcttgctataggcccaatggtttatagtgctcttgatgttgcttcaaaattagaaaaatatggctattcatgtgaggttgtcaattgtcgttttattaagccgatggatattggatatttaaaaggtattataaaaaattttgataaaatagttacgatcgaggaaggtgtacttagtggaggttttggagatggcgtgtcttcttggatacttgaaaatggatttaagggtaaaattaaaagaatcggccttccagataattatgttcagcatggaagtagatccccaaatttttaaa

SEQ ID NO: 232573 - DNA, 331 bp, Unknown
  Bacterial polypeptide expressing nucleotide sequence isolated from the Sargasso Sea
atgaaaatatttagtgaaatccctaatgaagttccttcaactgagctacttgataaaattaattatcctagagatcttaaagagctttcgcctcctgatctaaagattttagctgatgagttgagagagtttttactctactcagttggtaaaagtggtggacatcttggagcaggtcttggtgttattgagttaacagttgttttacattacctttatgattctccatcagacaatattgtctgggatgttggtcaccaagcttatcctcataagatattgactggtcgtaagagtcaaattagctcaataagatcaaaagatggctagc

SEQ ID NO: 232574 - DNA, 871 bp, Unknown
  Bacterial polypeptide expressing nucleotide sequence isolated from the Sargasso Sea
gttttacactatatattcaatactcctcacgacaaattaatttgggatgtaggtcatcaaacgtatccacataaaatattaactggtagaaaaaataaaataagaacccttagaaaaggtgggggattgtcaggttttacaaagagatcagagagtgagtatgatccatttggtgccgctcatagttcaacttctatttcttcagcattaggaatagcagtagccaataaattatcaaataaagcaggtaatgttgttgcagttataggcgatggagcgataagtgctggtatggcttatgaggcaatgaataatgcaagtgaaaataaaacaaagatgattgttgttttaaatgataacgatatgtcaattgctaaacctgttggtgcaatgagaaaatatttagcaaaaattttatctggaaaaatttactttagttttagagaaacattaaaactaattatatcagcattttcaaagagatttaaaaatcatgccggaaaagcagaagattttttgagatctgcagtcaccggtggaacattatttaattctatgggattttactacattggaccaatagatggacatgatattgactcaatgatttcagtatttaataatgcaaaagatattgactataatggacctattttaatccatgttaaaactgaaaaaggaaaaggttattcttttgctgaaaaatcagaggataaatttcatggtgtttcaaaatttaatataaaaactggagaacaagtaaagtctaaatctaatgccccctcttacacaaaagtattcgccaattcattaatcaaacatgcagaaaaagatagcaaggtcgttggtataactgcagctatgccatcag

SEQ ID NO: 232575 - DNA, 465 bp, Unknown
  Bacterial polypeptide expressing nucleotide sequence isolated from the Sargasso Sea
aatgcttttaagtgagttaagtcatccaaatcaacttcatggcttaacagtttcacaattagaggaaattgcctgtcaaattagagaaagacatcttcaagtagtttctactagtggaggacatcttggacctggattaggtgtagttgagcttacattggctttatatcaaactcttgatcttgacttcgataaagttgtttgggatgttggacatcaaggttatcctcataaattaataacaggacgtttcagtcaatttgattctcttagacaacaaaatggagtagcgggatatctcaaaagaagtgaaagtaaatttgatcattttggtgcaggacatgcaagtacttctatttctgctgctttaggaatggcaatagcaagagatagaaaaggtgaaaattataaatgtgttgctgttattggagatggagcattaactggaggaatggcattagaagc

SEQ ID NO: 232576 - DNA, 853 bp, Unknown
  Bacterial polypeptide expressing nucleotide sequence isolated from the Sargasso Sea
aatgaacaagaactacaaattattagacgaaataaattttccatcagatattagaaagctttctgcatcagaattaaaaaatttggctgacgaagtaagagctgaaatgatagatgcagtatcagtcactggtggacatttaggtgcggggttgggggtagtagaattaacagttgctttgcattatgtttttaatacaccaaatgataaacttatttgggatgttggtcaccaaacttatccacataaaatattaactggaagaaaagataaaattagaactttaagaaagggtggcggtctttcaggttttacaaaaagatctgagagcgagtatgatccttttggtgctgcacatagctccacctcaatttcttctgcactaggaatggctgttgcaaataaactttcaaataaatccaatgaagttgttgcggtaattggagatggagcaatgagcgcaggtatggcttatgaagcaatgaacaatgctggaacaagcaaaacaaagatgattgtaattttaaatgacaacgacatgtctattgccaagccagttggtgcacttagatcttacttagcaaaactcttttctggaaaggtttattttagccttagagaaacaataaaactaattatttcttctttctcaaaaagatttagtaaaaaagctggtaaagcagaagattttttaagatcagcagtcactggaggcacgttatttaattcattaggattttattacataggtcctatagatggacatgacatggactcattaatatctgtattgaaaaatgcaaagcagattaattttgaaggtccaattatgatacatatcaaaactgaaaaa

SEQ ID NO: 232577 - DNA, 747 bp, Unknown
  Bacterial polypeptide expressing nucleotide sequence isolated from the Sargasso Sea
gatccttttggagccgctcatagttccacctcaatttcatcagctttagggattgcagaggcaaataaattatcaaaaaaaacggaaaacgttgtagcagtgattggtgatggtgcaataagtgcaggtatggcctatgaagctatgaataacgcgggtgcttcaaagactaagatgattgttatactgaatgataacgatatgtcaattgcgagacctgtcggagcaatgggaacatatttggctaaaattttttctggtaaaatctattttagtttaagagaaacaataaaattgattacatctgcattttcaaaaagatttagtgcaaaagcaggtaaagctgaagatttattaagatcagctgtaactggtggtactttatttagttcattaggtttttattatatcggtcctatagatggtcatgacctttcttcattaattccaattttaagaaatgctagggactcaaaacacaaaggtcctattttaattcatattaaaacaaaaaaaggaaaaggttattcttttgctgaagaggcaaaggatcattatcatggagtatcgaaatttaatgtaaagacaggagaacaggaaaaaagttccagtaaaataccatcatatactaaagtttttgctgatactcttataaaacacgcaaaaaaagatagtaaaatagttgcaataactgccgctatgccggatggaactggattaagcaattttcgaaaagaatttccagac

SEQ ID NO: 232578 - DNA, 775 bp, Unknown
  Bacterial polypeptide expressing nucleotide sequence isolated from the Sargasso Sea
ctgctgcacaacatcaacgatcccgcagacatgcgcggcctctcgcgtgcccagctcaagacgctggccgcagagctgcgcacctatgtgatcgacagcgtctcaaggaccggcgggcacctcagctccaacctggggacggtggagttgaccgtggcgctgcactcggtgttcaacacgccctatgaccgcatcgtctgggacgtgggccaccagacctatccgcacaagatcctgaccggtcgccgcgatcacatggccaccctgcgccagttcggcggcctgtccggctttcctcagcgtgccgagagcgagtacgacacttttggcacggcacattcgtccaccagcatctctgccgcgctgggcatggcactggccgccaagcaaaaaggcgaggatcgccgtgcaatcgccgtgatcggcgacggtgcgatgacggccggcatggctttcgaggcactgaacaacggcggcgtgcatgacgccaatctgctggtcatcctcaacgacaatgatatgagcatcagcccgcccgtgggcgcgctcaatcgctatctggcacagctgatgagcgggcagttctatgccaaggcccgcgatgtgggcaagagcgttctcaagcaggtgccgcccttgctggagctggccaagcgcctggaacagcaggccaagggcatggtcgtgcctgccaccatgttcgagcagttcggcttcaactacatcggtcccatcgacggtcatgacctcgactcgctgatccccacgctggaga

SEQ ID NO: 232579 - DNA, 782 bp, Unknown
  Bacterial polypeptide expressing nucleotide sequence isolated from the Sargasso Sea
aatgaaaaaagattataaatttttaaataatattaattttccaagtgatattaagaaattatctcataatgaattaaaaactcttgctgaagaggtaagagaggaaatgatagatgccgtttccgaaactggtggacatcttggtgcaggtttgggtgtggtagaattgacggtagttcttcattatatttttaatactcctaatgataaattaatttgggatgtaggacaccaaacctatccacataaaattctaactggacgtaaagataaaattagaactttgagaaaaggaaatggtttgtctggttttactaaaaggtctgaaagtgaatacgatccatttggcgcagctcatagttcaacatcaatatcatcggccctaggaatagctatagcaaataaattatcaaataaatctgacaacgtaattgctgtaataggcgatggagcaattagtgcgggtatggcatatgaggcaatgaataacgcaggatcaagtaagaccaaactaattgtaattttaaacgacaacgatatgtcaatttcaaaacctgttggagcaatgagagcgtatttggctaaaattttcactggtaaaatttattttagcttgagagaaactgttaaacttataatttcagctttctcaaaaagatttagtaaaaaagctgggaaagcagaggattttttacgttcagctgtaaccggaggaacattatttagttcaatgggcttttactacgtggggcctatagatggtcatgatatagacgctctag

SEQ ID NO: 232580 - DNA, 400 bp, Unknown
  Bacterial polypeptide expressing nucleotide sequence isolated from the Sargasso Sea
atgaagaaaaattatcaatttttaaatgatataaactttccatctgatttaagaaaaatttctgaaaaaaatttacaaaaagttgcagatgaggtgaggaaggaaatgatagatgctgtttcagaaacaggaggtcaccttggtgctggtttgggagtggttgaattgacagttgcacttcattatgtttttgatactccaaatgataaattaatatgggatgtaggccatcaatcgtatcctcataaaattttaactggcagaaaagataaaatcagaactttacgacagggagatggtttatcaggttttactaaaaggtctgaaagtgagtatgatccatttggagcagcacatagttcaacatctatttcatctgcattaggaattgctgaagcta

SEQ ID NO: 232581 - DNA, 797 bp, Unknown
  Bacterial polypeptide expressing nucleotide sequence isolated from the Sargasso Sea
aatgccgagacttataaataaagttaattttccatctgatttaagaaaatttagaaaagaaaatttaaaacaaatttcagaagagcttagagatgagctaattgatgttgtttccgaaacaggagggcatttaggtgcaggattaggcgtggttgagttgacagttgctttacactacgtattcgatactccaaaggataaactagtttgggacgtaagtcatcagtgttacccacacaaaattataactggtagacgagatcgaataaaaactttgagaaaaggtggaggtttgtcaggttttacaaaaaggtctgagagcgagtatgacccgtttggtgctgctcatagttcaacttctatatcttcaacgttaggaatgtcagttgcaaagaaattgtcaaataataataataatgtaattgcagttatcggggatggagcaatgagtgctggaatggcttatgaagcaatgaacaatgctggagctttgaaatctaatttgatcgtagttttaaatgataacgatatgtcaattgcaagacctgtgggtgcaatgagcaagtatttagccaatcttttatcaggaaaattatattttagttttagagaaactatcaaaatgattatttccgcattttcaaaaagattcagtcaaaaagctggaaaagcagaagacatgctaagaaatattgtgacagggggaacattatttagtgagttaggattttactatgttgggccaatcgatggacatgatgtagaaaatttagttcaaatatttgagaatgtaaaaa

SEQ ID NO: 232582 - DNA, 790 bp, Unknown
  Bacterial polypeptide expressing nucleotide sequence isolated from the Sargasso Sea
ggcaaggctgaggatttacttagatcagctgtgacgggtggaactttgtttagttcccttggtttttattatattggtcccatagatggtcacgatttaaattctttaataccaattctaaaaaatgcgagagacacaaagcatgaaggaccaattttgatacatattaaaacaaaaaaagggaagggttatacttttgcagaagaggcaaaagataattatcatggagtatcaaaatttaatattaagactggagaacaactcaaaagttcaagtaaaataccttcatataccaaggtttttgcaaacactttagttcaacatgcaaaaaaagatagtaaaattgttgccataactgcggctatgcctgatggaactggtctagatatttttcgtaaagaatttccagatagaacatttgatgttggaattgctgaacaacatgcgatcacatttgctgctggtttagctaccgaaaacttcaaaccatatgctgcaatttattcaacatttcttcaaagagcttatgatcaagtagttcatgatgttgcgattcaaaaattacctgtaagattcgcgatagatagagcaggactagttggtgctgatggagctacacatgctggaagttttgacacaacttatttaactactttaccaaattttgttgtcatggctgctagtgacgaagctgaacttgtgagaatgataaatacctcggtagatattaatgatagaccttgttcatttaggtatccaagaggctcaggatttggttcagttttacctt

SEQ ID NO: 232583 - DNA, 738 bp, Unknown
  Bacterial polypeptide expressing nucleotide sequence isolated from the Sargasso Sea
aatgacaagaattttaaaagaaataaattttccatcagatttgaaaaaatttaaaaaagaaaacttaaaacagatttcggaagaattaagagacgaattaattgatgtagtctctgaaacaggggggcatttaggagcaggattaggtgtagttgaattaaccgtagctttacattacgtgtttgacactccaaaggataaattagtctgggatgtaagccaccaatgctacccacataaaattataacaggaagaagagatcgaataaaaaccttgagaaagggaggtggattatcaggttttactaaaagagcggaaagcgagtatgatccatttggagcagctcatagttcaacttctatttcttcaacactaggtatgtcagtagcgaaaaaattgtcgaataataaaaataatgtaattgcagtcataggagatggagcaatgagtgccggaatggcctatgaagcaatgaataatgcaggtgctctaaaatcaaatctaattgtagtcctgaatgataatgacatgtctattgcaagacctgttggagctatgagcaagtatttagcaaatcttttatccggtaagctttactttagctttagagagacaattaaaatgattatttctgctttttcaaaaaggtttagtcaaaaagcaggtaaagcagaagacatgttaagaaatatggttaccggaggcacattattcagtgagttaggattttattatat

SEQ ID NO: 232584 - DNA, 911 bp, Unknown
  Bacterial polypeptide expressing nucleotide sequence isolated from the Sargasso Sea
tttttcaaaagatttagtgttaaggctggtaaagcagaagatttactaagatcagcagtgacaggtggaactttgtttagttcacttggattttattacattggtccaatagatggtcatgatctaaattcattaattccaattttaaaaaatgctagggactctaagcatgaaggaccaattttaattcatattaagtcaaaaaaaggaaaaggttatactttcgctgaggaggcaaaggaccattatcatggagtatctaaatttaatgtcaaaactggtgaacagcttaaaagtgctactaaatcaccatcatatacaaaagtttttgctgatactctaattcaacatgctaaaaaggacagtaaaattgtagcgattacagctgcaatgccggatgggactgggctcggtaattttcgcaaagaatttccagatagaacttttgatgttgggattgcagaacaacatgcggttacttttgctgcaggtttagctaccgaaaattttaaaccatatgctgcaatatattccacttttcttcaaagggcttatgatcaagtagttcatgacgtggcaattcaaagtctacccgttagatttgcaattgatagggcaggacttgttggagctgatggaccaacacatgctggaagttttgatacaacatatttatccactttaccaaattttattgttatggcagcaagtgacgaagctgagcttgtaaaaatgataaatacctcgacggagattaatgataaaccttgtgcattcaggtatccaagaggaacgggattaggttcagttttgccttcaataaacgaaaaaattgagatagggaaatcaaaaattattaaagaaggaaaaaaattagcgattctaaattttggagcaagattaaatgagac

SEQ ID NO: 232585 - DNA, 766 bp, Unknown
  Bacterial polypeptide expressing nucleotide sequence isolated from the Sargasso Sea
atttgttgcaatttattcaacatttttacaaagagcttatgatcaaattgtacacgatgtagctattcaaaaattgcctgttagatttgcaattgatagggcaggactagttggttcagatggtccaactcatgctggttcatttgatattacctatttagctacactaccaaattttattgttatggcgcctagcaatcaaagagagttatcaaaaatgatagagttagcttgtgaaataaatgacacaccatgtgcttttaggtttccaagaggaacagggtcagatgaactatttaataatcaacccacagatatcgatataggtaagggatatattctaattgaaggcaatgatgttgctatcttgaatttaggaacaagacttgaaaaatgtattgaggcaagtaagtttctaaatcaaaataatatttatcctactattgcagatgcaagatttgcaaaaccattagatactaaattaatagataatttactaaacaatcataaatatattttaacaattgaagaaggttctataggtggattttcttcacattttttacattatgcacataatattagaccaaaaaaggataatgttgttataagaaatctaatttttccagatagatttgttgaacatatgactccagatgaacaatatcaagatattaaaatggatatggaatcaataatcagagaaattaataatttttatgaaaataaaattattgatataaagaattttaaactaaatgtttaa

SEQ ID NO: 232586 - DNA, 572 bp, Unknown
  Bacterial polypeptide expressing nucleotide sequence isolated from the Sargasso Sea
aatgcagaattataaatatttaaataatattaattttccttcagatataaaaaaactgaataacgaagaattaaaagttctttcagatgaagtaagaaacgaaatgattgatgcagtttcaaaaacaggaggtcatttaggtgcaggtttaggtgttgtagaattgacagttgcaatccatcatgtttttgatacgccaaacgataaattgatttgggatgttggtcatcaatcctaccctcacaaaattttaacaggaagaaaagataaaattagaactttaagacaaggaagtggattatctggttttacaaaaagatcagaaagtgaatttgatcctttcggcgcagctcatagttctacttctatttcagctggactcggtattgcaacagcaaataaattatcaaataaatcaaatcaggttattgcagttattggtgacggtgcaatgagtgcagggatggcatatgaagctatgaataatgctggagactcaaagactaaaatgatcgtaattttaaatgacaatgatatgtcgattgcaaaaccagttggtgcaatgaaatctt

SEQ ID NO: 232587 - DNA, 745 bp, Unknown
  Bacterial polypeptide expressing nucleotide sequence isolated from the Sargasso Sea
ttcttcacgagcttatgatcaagtagttcacgatgtagctattcaatctttaccagtgagattcgcaattgatagagccggacttgtcggtgcagacggaccaacccatgctggatctttcgatataacatatttgtctacgctacctaattttgtagtcatggcagcaagtgatgagtcagaattagttaaaatgattaacacatcagtgaatattaatgatcgcccttcagcatttagataccctagaggaaatggtctaggagttaaaataccatcaatagatgaggttttaaaaattggtaaaggtagaattataaaagaaggtaaaaaagctgctatattaaattttgggactagattagaagaatgcaaaacagcttcagaaattctctttaaaaaaggtatagacttaacaattattgatgcaagatttgctaagcctttagatgaaaaattaattatggaagttgctaataatcatgaagttttagtttctattgaagaaggttctatagggggtttcggttctcatgtaatgcaatttttatctgatagaggtgtctttgacagaggattaaaatttagatctatgattttaccagacatattcatcgatcaagatacaccagataaaatgtatgaaatggctggattagatagctcttcaatagtaaataaaattgaggagactctaaactcaaatattattttagctaaaaacaaaaataaaatatcttactaa

SEQ ID NO: 232588 - DNA, 691 bp, Unknown
  Bacterial polypeptide expressing nucleotide sequence isolated from the Sargasso Sea
aatgtctgaaaaaaaattattagataaaattaaatatcctgtagatttaagaaaaataaatgttgaggatcttaagcaagtatctacagaacttagagaagaattaattgatgcagtatcaacaacaggtggacacttaggggcaggtttaggagttgtggagctaacaattgctttacattatgtttttaataccccaaatgacaaattagtctgggatgttggccaccaatcttacccacacaaaataattaccgggagaagagattccattagaactttaagaaagggtggaggtctttcaggatttacaaaaagaactgaaagtgagtatgatccttttggcgcagcgcatagttcaacttctatttcatctactcttggaatggctgtagctaagagtttatcaaataattctaatcacgttgtcgctgtaatcggagatggagctatgagtgctggcatggcctatgaagccatgaataatgccggggcgatgaaatcaaaattaattgtaatacttaatgacaacgatatgtccattgctaggcctgtaggcgcaatgagttcatatctagccagattattatctggaaaaacttattttaattttagagaaactgtaaaaatgattacgtctgctttttcgaaagatttaaggataaagcaggaaaagctgaagatttattag

SEQ ID NO: 232589 - DNA, 427 bp, Unknown
  Bacterial polypeptide expressing nucleotide sequence isolated from the Sargasso Sea
aatgaaaaaatataagtttttagataaagtagaattcccatctgatattagaaaattaaaattaagtgaacttagaatactttctaatgaagtaagacaagagctgattgatgctgtttctgttactggaggtcacttaggagctggtttaggtgtggttgaacttagcgttgctttacactatgtttttgatactccgaatgataaattagtttgggatgtgggacatcaatcctacccgcacaaaattctaacaggacgtaaagaaaagattagaactctgagacaaggaaacggtctatctggtttcacaaaaagatcggaaagcgaatacgatccttttggtgcagctcatagttccacatctatttctgcaggacttggtatagcaacagccaacaaactatcaaaaaaaatgataacgtag

SEQ ID NO: 232590 - DNA, 661 bp, Unknown
  Bacterial polypeptide expressing nucleotide sequence isolated from the Sargasso Sea
gatagagcaggtttagttggtgctgatggcccaacgcatgcaggaagttttgacactacttatttgacgacattaccgaattttattgtaatggctgcaagtgatgaggctgaactcgtaagaatgataaatacttctacagaaattaatgataagccttgcgcatttagatacccacgtggaacaggggttggagttattcttccaagcactaatgaaaaaattgaaataggaaaatcaagaattattaaggagggacgaaaattagctatattaaattttggtgcaagattgaatgaaactttaaaggcgactgaaaatcttaaaaagaaaggtgtaaatataacaatagtagatgcaagattcgcaaaacctttggatgaaaatttaatttggcaattagcaactaatcatgaagctattatgacaatcgaagaaggttcaataggtggtttcggttcacatgtagttgattttttatcaaaaaaaggtcttttagactctggtttaaaatttaggtcaattaaattacctgatttttttatcgatcaagatactcctgagaatatgtacaaaaatgctaacttagacgcagtctctattgaggcaaagattttagatcttttaaattcaaatattattttacaaaaacaaaaataaa

SEQ ID NO: 232591 - DNA, 808 bp, Unknown
  Bacterial polypeptide expressing nucleotide sequence isolated from the Sargasso Sea
gataagcgctgtttcagaaacaggaggtcatcttggtgctggtttgggagtggttgaattgacagttgcacttcattatgtttttgatacaccaaatgataaattaatatgggatgttggccatcaatcttatcctcataaaattttaactggaagaaaagataaaattagaactttacgacagggtgatggtttatcaggttttacaaaaagatctgaaagtgagtatgacccatttggagcagctcatagttcaacatcaatttcatctgcattaggaattgccgaagcaaataaattagaaaataaatcttcaaatgtaattgctgtaataggtgatggtgcaattagtgcaggtatggcttatgaagccatgaataatgctggggcatctaaaacaaaaataattgttattttaaatgataacgacatgtcaattgcaaaaccagttggagcaatgagaacttacttggcaaaattatttactggtaaaatatattttagtcttagagaaacctttaagttaattacatctgcattttcaaaaagatttagtgctaaagcaggaaaagcagaggattttttccgttcagcagtcactggaggtacattgtttagttcacttggtttttattatgcaggtcctatagatggtcatgatttatcaagcttagttccaattttaaaaaacgcaaaagaatcaagacacgagggtcctataatgattcatatcaaatctcaaaaaggaaaaggttattcttatgcagaaaaagcaagtgatcattatcatggagtgtcaaaatttaat

SEQ ID NO: 232592 - DNA, 906 bp, Unknown
  Bacterial polypeptide expressing nucleotide sequence isolated from the Sargasso Sea
ttcggttttagaaaatataaaaaattcatcagttgataaaccaatttttcttcattgtgttactaaaaaaggtaaaggctatgagccagcagaaaaatctgatgataaatttcatggagttaataaatttgatgttagaacagggcaatctttaaattcatcaaataaaaaaacatattcctcagtttttggcgaggcattatcaaatgctgctcaaaatgatgaaaaaattgttgcaattactgcagcaatgatgagcggaactggtttagatatttttaattctcagcattctgagaggttatttgatgttggcattgctgaacaacacgcagtaactatggctgcaggacttgctacagaaggctttaaaccatatgttgcaatttattcaacttttttacagcgggcttatgatcaaattattcatgatgttgcattacaaaaacttcctgtaagatttgctattgatcgtgctggactagtgggagcagatggcccaactcatgctggctcttttgatattacgtttctatccacacttccaaattttataattatggctcctagtaatcaaaatgaattaattagaatgattaatacaagcgtcttaattaacgacagaccttcagcattcagatatccaagaggaacaggagagatggatcttaatgattataatattgcaccaatagaaataggaaaaggaattattattgaagaaggtaatgaagtagcgattttaaatttaggatcaaggttgcaaagttgtcaagaagcactcaaaattcttaaaaccaatggaatttatccaactttagcagatgctaggtttgcaaaaccaattgatacaaatttattagaaagattattagataatcataaatatttacttactattgaaga

SEQ ID NO: 232593 - DNA, 792 bp, Unknown
  Bacterial polypeptide expressing nucleotide sequence isolated from the Sargasso Sea
acaattagaggaaattgcttgtcaaattagagaaagacatcttcaggtagtatctactagtggaggacatcttggtcctggattaggtgtagtagagttgacattggctttatatcaaactcttgatcttgattttgacaaagttgtttgggatgtaggacatcaaggttaccctcataaattaattacaggacgtttcagtcaatttgattctctaaggcaacaaaatggagtcgctggatatctaaaaagaagtgaaagtaaatttgatcattttggtgctggacatgcaagtacttctatttctgctgctttaggaatggcaatagcaagagatagaaaaggtgaaaattataaatgtgtcgctgttattggagatggagctttaactggaggaatggcattagaagctataaatcatgcaggtcatttaccaaatactcctttagttgtagttttaaacgataatgatatgtctatttcacctccagttggagctctttcatcttacttaaacaaagtaagagttagtccaccattgcaatttttgtccgatagtgttcaagaaagtgtaaaaaatattccattaattggtaaggatattccagaagaactaaaaaatatcaaaggaagcgttagaagactagcagtgcctaaggttggagctgtttttgaagaacttggatttacatatatggggccaattgacggacatgacattggaaatttagttaatacttttaacgctgctcaaaacttaaaaaactgtacttgttcatgttgtcacaacaa

SEQ ID NO: 232594 - DNA, 814 bp, Unknown
  Bacterial polypeptide expressing nucleotide sequence isolated from the Sargasso Sea
aatggtagaattttccgaacaacatcctgacaaattttttgatgtagcaatagctgaacagcacagtgtaactttggcagcaggaatggctattgaaggattgaaaccaatagttgcaatatatagcaccttcctacaaagagcatatgatcaactaatacatgacgtttctcttcaaaacctgaatgttacttttgctatagaccgagctggtgcagttggttcagatggccccacacaccaaggagcctttgatttagcttttttaagatgcataccaaatatgacaattatgactccatccagtaaagaaaaactttggaaaatgctcaatactggatttaatcacgaaggaccagtggctataagatatccaagaggagaagctaagggagataaatttgaaaaagataagtcttgtatagattttggaaagagcgacctaattaaagaagcaaagtcagaagaagtggtgattttatcttttggttcgtgtttggagcttgctttagaaatttctaatgccatcgaagcaacaattattgatatgaattttgtaaagcctttggatgaaaaaagaatacttcaatgttcttcatacaagataatagttaccttggaagaaaattcacttaaaggtggtgctggttcatctgtaaatgaagttcttacatcaaataacataaaaacagatatactttcttttggctttcctgatcaattcttacctcacggtgatcaagataaccaaaaactaaacgcaggtttagataaagaccaaataattaaaaaaattaaagatagactaaactaa

SEQ ID NO: 232595 - DNA, 388 bp, Unknown
  Bacterial polypeptide expressing nucleotide sequence isolated from the Sargasso Sea
atgcaacctagtctactttcaaaaataaaatctccagcagatataaaagacttttctattgatgaattaattcttttgtcgaatgagattagagcacatacaattaatgtggttagtgaaattggtggtcatttagcccccactctcggagtggttgagcttacagttgcaatacataaagtttttgacactccagatgataagatagtttgggatgttggccatcaaggttatgctcataaactcttaacaggtcgcttcgaatcatttccaagtataagaaaattaggtggacttagtggttttttaaaaagatctgaaagtgaatatgataccttcggggctggccatgcatcaacatcaatttcagctgctacaggaatagctg

SEQ ID NO: 232596 - DNA, 842 bp, Unknown
  Bacterial polypeptide expressing nucleotide sequence isolated from the Sargasso Sea
gatgagtgcaggtatggcttacgaagcaatgaataatgcaggtgcttcaaaaactaaaatgattgttattttaaatgataacgatatgtcaattgcaaaacccgttggagcaatgagaacatatctggcaaaattattgactgggaaaatatattttagttttagggaaacaattaaattaattacttcagcgttttcaaaaaggtttagtgcgaaggcaggaaaagcagaggatttcttacgatctgcgttcactggtggcactatgtttaattcattaggtttttattatgtgggaccaattgatggacatgatttatcaacccttattccaattttaaaaaatgcaaaggactcaaatcacgagggtccaattatgattcatattaaaacacaaaaaggtaaggggtatacttacgcagaagaagctaaagatcattttcatggagtttcaaagtttaatgtagacactggcgaacagaataaaagtggatctaatttaccttcatatacaaaagtattcgctaatacacttgtaaagcacgctaaaaaagatagtaaaattgtaggaataacagcagcaatgcctggtggaacaggaatggacatatttggcaaggagttcccaaaaagaatgtttgatgttggtatagctgaacaacatgcagtaacatttgcagctgggatggcaacagagggatacaagccctatgctgcaatttactcaacatttttacaaagagcatatgatcaagttgttcatgatgtagctatacaaagcttaccggtaagatttgcaattgatagagctggattagttggagctgatggatcaactcatg

SEQ ID NO: 232597 - DNA, 959 bp, Unknown
  Bacterial polypeptide expressing nucleotide sequence isolated from the Sargasso Sea
tgaaaaaaaagatcttaaacaaatatcagaagagttgagatctgaattaatagatgtagtatctgaaacaggtggacatttaggagcaggattgggtgtaatagaattaacagttgcgctgcactatgtttttaatacgccaaaagataaattggtatgggacgtcagccatcaatgctatccacataaaataattactggaagaaaaaatgagataagaactctaagaaaaggtggagggttatcaggttttactaaaagagatgagagcgaatacgatccgtttggcgctgcgcacagctccacctcaatttcctcaactttaggaatttctgtagctaaaaaactatcaaatgataaaaacaatgtaattgcagtgattggagatggagctatgagcgcaggtatggcctatgaggcaatgaataatgcaggagctttaaaatcaaaattaattgtaatattgaacgataatgaaatgtccatagctaaacctgtgggagctatgagcaagtacctcgcaaaattattatctggaaaactatactttagtttgagagaaaccatcaaattaatcatgtcagctttttcaaaaagatttagtcagaaagcaggtaaagctgaagatattttgagagggatagtgactggtggtacattatttagtgaacttggtttttattatattggaccaatagatggtcatgatgtcaattacctagttgaaatacttgaaaatgttaaaaactctaatcataacggacctatattaattcacgcaattacccagaaaggcaaagggtacaagcctgccgaacaatctggtgataagtaccatggagtttcaaaattcaatatttcgacaggtcaacaaagtaaatccagcaataacgctccatcatatacaaaagttttctccgaaacattaataaagcacgcagaaaaagatactaaaattt

SEQ ID NO: 232598 - DNA, 358 bp, Unknown
  Bacterial polypeptide expressing nucleotide sequence isolated from the Sargasso Sea
aaaaattgtagcaattacaggtgcaatgccatcgggaactggactagatatttttcaaaaaaagtttcctgataggatgtttgatgtgggcatagccgaacaacatggagtaacttttgctgctggattagctaccgaaggatacaagccttatgctgctatttactcaacttttttacaaagggcttatgatcaagttgttcatgacgttgcaatacaatctttaccagttagatttgccatagatagagcaggcttagtcggttcacacagagcaactcatgctggatcatttgatactacatacctttctactctgccaaattttgttgtaatggcagcaagcgatgaggctgaa

SEQ ID NO: 232599 - DNA, 887 bp, Unknown
  Bacterial polypeptide expressing nucleotide sequence isolated from the Sargasso Sea
cgctccatcatacacatcaatctttggtcaaacacttgtaaaagaggcaactcttgacgaaaagattgttgctgttacggcagcaatgccttcaggtaccggattaaatatttttcaggatggtttccctggtagaacttttgatgttggaatagcagaacaacatgctgtaactttctgtgctggtatggcagctggaggtttgaaacccttctgcgcaatatattcaacttttcttcaaagaggatatgatcagattgttcatgatgtggctctacaaaaattaccagtaaggtttgcaattgatagagctgggttggttggtgctgatggagctacccatgcaggttcttttgacgtagcttacctttcaaatttgccaggttttgtggtaatggcagcagcagacgagttagagctaatgcatatgatcagaacgtcagcagagtataatgacggccccatatcatttaggtatccaagaggtgaggggataggtgtagaacttcctgaaagaggtgaagttcttgagctagggaaaggaagaatttgtaaagagggcaatagggtcgcaatattaagttttggagcacatctcaaagaagcactagacgcgtcagaggagttggagcaattaggcatttcagtaactgttgcagatgctagatttgctaaaccattagatgtagatttagtaaaagtgctttcagaaaaccatgagttattaattaccctagaagagggatccattggtgggttcggatctcatgtggtagactggttactcaaaaataacatgataaataacaatctaaaggtaagaagtttatttttaccggataaatttatagatcaagcttcaccaaatgtaatgtataaggaagctg

SEQ ID NO: 232600 - DNA, 639 bp, Unknown
  Bacterial polypeptide expressing nucleotide sequence isolated from the Sargasso Sea
tcatctttttcaaaaaggttcagtcagaaagctggtaaagctgaagatttgcttagaaatatcgtaactggaggtacattatttagtgaactcggtttttattatgttggaccgatagatggtcatgatgtagaaaatttggttcaaatttttgagaatgttaaaaactcaaatcatcagggacctattttaattcatgtaagaacacaaaaaggcaaaggttataaaccagctgaaaactcaggtgataaatatcatggagtatcaaaatttaatatttctactggaaagcaaacaaaatctaactcaaatgctccttcttatacaaaggtttttgctgaaacattaataaaacacgctgagcaagatacaaaaattgttggtatcactggcgccatgccgtcaggtacaggtttaaatttatttgagaagaaatttccagaacgaactttcgatgttggaatagccgaacagcatgcagtaacgtttgcagctgggttagctactgaagggtataagccttatgctgcaatttactcaacttttttacaaagagcttatgatcaagtagtccatgacgtcgcattacaatcattaccagtgagatttgctattgatcgtgcaggattagttggtgca

SEQ ID NO: 232601 - DNA, 835 bp, Unknown
  Bacterial polypeptide expressing nucleotide sequence isolated from the Sargasso Sea
ttcaaaaagatttaaaaatcaagctggaaaagctgaagattttttaagatccgcagtaactggtggaacattatttaattctatgggattttactatattggaccaatagatggacacgatattgattcaatggtctcagtatttaataatgcaaaggatattaattatgatggaccaattttaatccatgttaaaactgaaaaaggaaaaggttattcttttgctgaaaaatcagaagataaatttcatggtgtttcaaaatttaatataaaaacaggagagcaagaaaagtctaaatctaataccccttcttatacaaaagtattcgccaattcattaatcaaacatgcagaaaaagatagtaaggtcgttgggataacagcagccatgccttcaggaactggaatggatttatttagaaaaaaatttccagaaagaatgtttgatgttgggatagctgagcagcatgcggttacatttgctgcgggtatggctacagaagggtataaacctttcgctgcgatatactcaacatttcttcaaagagcttacgatcaggtcgttcacgatgttgccatacaatctttgcctgttagatttgcaattgatagagcggggttagttggggctgatggcccaacacatgctggatcttttgatataacatacctttcaacattaccgaattttgtagtaatggctgcaagtgatgaagccgagcttgtaagaatgataaatacatcaatggatataaacgacagaccatcagcttttagatacccaagggggaatggtgtaggagttcaattacctgaaataactgagaaaattgag

SEQ ID NO: 232602 - DNA, 976 bp, Unknown
  Bacterial polypeptide expressing nucleotide sequence isolated from the Sargasso Sea
tgtagaactaacggttgccttacattatgtatttaatactccaaaagataaattagtttgggacgtaagccaccaatgttatccacataaaattatcaccggtagaaaaaaagaaattaaaactttaagaaaaggtggcggattatcaggttttaccaaaagagaagaaagtgagtatgacccatttggtgctgcacacagctcaacttcaatttcttcaaccttaggaatgtctgttgctaaaaagttatctaacgacaataacaacgttatagcagtcataggcgacggtgcaatgagtgcaggaatggcttatgaggcgatgaacaatgcgggagctttaaaatcgaaattaattgtaattttgaatgataataaaatgtcaattgcaaaacctgttggagcgatgagcaaatatttagcaaaattattatcaggtaaaatatattttagtctaagagaaacaattaaattagttacttctgccttctctaaaagatttagtcaaaaagctggaaaagctgaagatattttaagaggcattgtgacgggaggaacattattcagtgagctaggtttttattatattggaccaattgatggacatgatgtggattatttggtccagatattagaaaatgtgaaaaaatcgaaacatgaaggtccaattttaatacatacaataactcaaaagggaaaaggttacaaacctgcagaagaatcgggagataaatatcatggagtttctaaatttaatgtttcaactggtcaacaaagtaaatcaaaatcaaatgtgccttcatacactaaagtattttcagaaactttaataaaacacgctgaaaaggacacaaaaattattggtatcactggggctatgccatctggcactggtcttaacttatttgaaaaaagatttcctgacagaatgtttgatgttggaatagctgaacaacatgctgtaacttcgcagcgg

SEQ ID NO: 232603 - DNA, 829 bp, Unknown
  Bacterial polypeptide expressing nucleotide sequence isolated from the Sargasso Sea
atgaaaaaaaattataaattcttaaataatattaattttccaagcgatataaaaaaactgtctcacaatgaattaaaaattcttgctgaggaggtaagagaagaaatgatagatgctgtttctgaaactggtggacatcttggagcaggattaggtgtggtggaattaacagcggtccttcattatgtttttaatactcctaatgataaaataatatgggacgtaggacaccaatcttacccacataaaattttaactggtcgtaaggacaaaattagaactttgagaaaaggaaatggtttgtctggttttacaaaaaggtctgaaagtgaatatgatccttttggtgcggctcatagttctacatcaatttcatcagctttaggcatagcaattgctaataagctatcaaataaatctggcagtgtaatcgctgtaataggtgacggagcaatcagtgcgggtatggcgtatgaagctatgaataatgcaggatcaagtaaaactaaacttattgttgttttaaatgataatgatatgtcaattgccaaacctgttggagcgatgagagcatatttagctaaaatttttactggtaaaatttattttagtttaagagaaaccgttaagcttatcatttcagctttctcaaaaagatttagtaaaaaagctggaaaggcagaagattttcttcgttcagcagttactggtggaactttgtttaattcaatgggtttttattatgtagggcctatagatggtcatgatatagaagctttaatttcagttttaaaaaatgctaaagaagtaaactatgagggtcctatta

SEQ ID NO: 232604 - DNA, 493 bp, Unknown
  Bacterial polypeptide expressing nucleotide sequence isolated from the Sargasso Sea
gatgaagtataattttttaaacaatataaattttccagatgatcttagaagttataaagatgaagatctaaaagatattgcaaaagaattgaggcataagactattgatgcagtttcaaaaacaggcggtcatttaggggcaggattaggtgttatagaattaactatagcaatacattatatttttgatacccctaaagataaactaatatgggatgttggtcatcaagcttacccccataaaatactcactggtagaaaaaaacaaatagaaactttaaggcaagaagatggattgtatggttttgttaaaaggagtgaaagtgagtatgatacttttggtactgctcatagttctacctctatttcagcaggattgggaataaaaatagctcaagaactaaaaaaagatgattctaaagttatatgtgtaataggtgatggagcgctaagtgcgggtatggcttatgaagcacttaataatgctggtgca

SEQ ID NO: 232605 - DNA, 870 bp, Unknown
  Bacterial polypeptide expressing nucleotide sequence isolated from the Sargasso Sea
ctctgtttactctttaggtttttattacatagggcctattgatgggcatgatttaaattctttagtaccaattttaaaaaatgcaagagattcaaaacatgaggggccaattttaattcatattaaaacaaaaaaaggtaaaggctattcatttgcagaaaaagccaaagataactttcatggagttacaaaatttaatgttgagactggtgagcaatccaaaagctctagtaaacttccatcatatactaaagtatttgctaatactttagttcaacacgctaaaaaagacagtaaaatagttgctattactgctgcaatgccagatggaacaggtcttgatgttttccgtaaagaatttccagatagaacttttgatgttgggattgcagaacaacatgctgttacatttgcagctggcttagcaactgaaaattttaaaccttacgcagcaatttattcaacatttttgcaaagagcctatgatcaagtagttcatgatgtagcgatacagagcttacctgtaagatttgcaatagatagagcaggattagttggtgctgatggaccaacacatgctggtagttttgatacaacatatttatcaacattaccaaattttgttgtaatggctgctagtgatgaagctgaactagtaagaatgattaatacttcgacagaaataaatgatcgaccttgtgcatttagatacccaagaggtactgggttaggatcagttttgccaactataaatgaaaaaattgaaataggtaaatctaaaataattcaagaagggaacaaattggccattttaaattttggtgcaagattaaatgaaacactaaaagcagctgaaaacttaaaaaaaaa

SEQ ID NO: 232606 - DNA, 844 bp, Unknown
  Bacterial polypeptide expressing nucleotide sequence isolated from the Sargasso Sea
aataatgtaattgctgttattggtgatggcgcaatgagtgctggaatggcatatgaggcaatgaataatgctggagctttgaaaactgacttattaattattttaaatgataatgatatgtctatagcgccagctgtgggtgccttaagcaattatttgtccaatgttgtgtcaagtcgtccgttcaataatgtaagagaaattgctaaacaaatggttaatctttttcctaaagaaattggtgaaacagccaaaagagctgaaagtctagcaagaaattttttaggaaatgcggaaggtactatttttagtcagatgggtatgaattatttaggtccaatagacggtcatgatgttaaatccatggttaaaatattacaaaatctaaaaaatggttctcaagataaaccaattctgcttcatgtggtaacagaaaagggaagaggacatcctttttcgaaaggttctcatgaaaaatatcacgctgtatctgaatttaacgtaattactggtgattcagtcaaattatcatctaacgcgcccacttatactaacgtttttgcagaaaccttatgtaaaatcgccgaaaaagataaaaaagttttagccataactgccgctatgccctcaggaactggattaaataagtttgcagaaaaatttcaagatagattctatgatgttggaattgcagaacaacatgctgtaacatttgccgctggaatggcttcagagggtttaaaaccatttgtagctatttattcaacttttttgcaaagagcctatgatcaagtagttcatgacgttgtaatacaaaatttgcctgtaagatttatgcttgata

SEQ ID NO: 232607 - DNA, 708 bp, Unknown
  Bacterial polypeptide expressing nucleotide sequence isolated from the Sargasso Sea
tagctattcaaaaattacctgttagatttgcgattgatagagcagggttagtaggatctgatggtcctactcatgctggttcatttgatatcacttatttagccacattaccaaattttatagttatggcacctagcaatcaaagagaattaactaatatgatagagttatcttgtgaaattaatgacacaccatctgcttttagatttccaagaggcacagggtcagatgaactttttaaaaatcagcctatagatatcaatataggtaagggatatattctaattgaaggcaatgatgttgcaattttaaatttaggtacaagacttgaaaaatgtattgaagctagtaattttcttaatcaaaataatatttatcctactattgcagatgcaagatttgcaaaaccattggacacacaattaatagataatttattaaataatcataagtatatcctaactatagaggagggttcaataggtggattttcatctcatattttacattatgtccataatataagatcaaaaaaggataatgttttgataaaaaatttaatttttccagatcgtttcgttgaacatatgacaccagatgaacaatatcaagacattaaaatggatacggaatcaataatcagagaaattaataatttttatgagaataaaattattgatataaagagttttaaacttaaagtttaat

SEQ ID NO: 232608 - DNA, 827 bp, Unknown
  Bacterial polypeptide expressing nucleotide sequence isolated from the Sargasso Sea
acttcattatatatttaatacacccaatgacaaattgatttgggatgttggtcatcaatgttatccacataaaattttgacaggaagaaaagataaaataagaactcttagacaaggtggaggtatttctggttttacaaaaagacaagagagtgaatatgatccttttggtgcagcacatagttcaacttcaatatcatcagccttagggatagctgaggcaaataggttatctaataaatcagataacgtagtagcggttataggtgatggagcaattagtgcaggtatggcttatgaagcaatgaacaatgctggcgcatctaaaactaaaatgattgtgattttaaatgataacgatatgtcgattgctagacctgtaggtgctatgagcacatatttagcaaaaattttttcaggtaaaatttatttcagtttaagagaaaccgttaaactcatagcatctgcattttcaaaaagatttagtgcaaaagcagggaaagctgaagacttactaaggtcggctgtgactggtggaactttgtttagttctttaggtttttattatattgggcctatagatgggcatgatttaaattctttattgccaattctaaaaaatgcaagagactcaaagcatgatggtccaattttaattcacataaaaacaaaaaaggggaaaggttattcgtttgcagaaaaagctaaagataacttccatggggtttcgaaatttaatgttgagacaggtgaacaatctaaaagtttaagtaaacttccatcatatactaaagtatttgcaaatactttggttcaaccatgctaaa

SEQ ID NO: 232609 - DNA, 617 bp, Unknown
  Bacterial polypeptide expressing nucleotide sequence isolated from the Sargasso Sea
aatgaaaaaaaaatacgaactgttagatgaaattaattttccatcagatttaaaaaaattacctgagtcaaaattacaaaaagttgctgatgaattaagagaggaaatgattgatgctgtctcggtgaccggtggtcatcttggagcaagtcttggagttgtagaattaactgtggctttacattatatttttaatacacccaatgataagttaatctgggatgtgggtcatcagtgctatccacataaaattttaaccggcagaaaagatagaataagaactcttagacaaggaaatggtctttctggttttacaaaaagatcagagagtgagtacgatccctttggtgctgcacacagctcaacatcaatttcatcagctttaggtatagcagaagcaaacaaactgtctaataaatcagacaatgtaattgcagtaattggtgacggggcaatcagtgcaggaatggcttatgaagctatgaataatgctggtgcttcaaaaactaagatgatcgtaattttaaatgataatgatatgtcaatcgctagaccagttggagctatgagcacttatttagcaaaaattttttcaggaaagatttattttagtctta

SEQ ID NO: 232610 - DNA, 833 bp, Unknown
  Bacterial polypeptide expressing nucleotide sequence isolated from the Sargasso Sea
aatgagaaaaaagtacgaattcctagatgaaataaattttccatctgatctaaaaaaaattcctgaaacaaaattgcaaaaagtagcagatgaattaagagaggaaatgattgatgcagtctctgttactggtggtcatttaggcgcaagtcttggagttgttgagctaagtatcgcattacattatattttcaatacacctaatgataaattaatatgggatgtaggccatcaatcttatcctcataaaattttaactggaagaaaagacagaatcagaactttaagacaaggaaaaggtctttctgggtttacaaaaagatcagagagtgaatatgatccttttggagcagcacacagctcaacttcaatttcttcagctttaggtattgctgtagcaaataaactttcaaataaatccgataatgtaattgcagtaataggtgatggtgcaatgagtgctggtatggcttacgaagcgatgaataatgcgggtgcctctaaaactaaaatgatagtcatacttaatgataacgacatgtctattgctagaccagttggtgcaatgagcacttatttagcaaaaattttttcaggaaaaatctactttagtttaagagagactttaaaattaattatgtcagccttctcaaaaagatttagtgcgaaagctggaaaagcagaggacttaattagatcagcagtaacagggggaactctgtttagttcactagggttctattatataggtcctattgacggtcacgatttaaattctctaatttccattttaaaaaatgccagggacacaaaacaccaaggaccaatactta

SEQ ID NO: 232611 - DNA, 316 bp, Unknown
  Bacterial polypeptide expressing nucleotide sequence isolated from the Sargasso Sea
tatgaaattttttaaggaaataccaaattctcgccctagcacacctttgcttgatgaaattaattcacctaaggatttaaaacctctaacccttgagcaactaaagaatttagccgatgaattaagagcatttttactttatcaagttgggcaaacagggggtcatttgggtggcggcttaggtgttgttgagttaaccgttgttttacattacttgtttaacacgcctgatgataatttaatatgggatgtgggtcatcaagcctatccacataaaattctaactggccgaagagataaactaaaaaccattaga

SEQ ID NO: 232612 - DNA, 907 bp, Unknown
  Bacterial polypeptide expressing nucleotide sequence isolated from the Sargasso Sea
atgaaaaaaaattataaatttttaaataatattaattttcctagtgatattaaaaaattgtctcaaaatgaattaaaaactctttctcaagaagttagagatgaaatgatagatgctgtttctgaaactggtggacatcttggtgcaggtttgggtgtggtagaattaacggtagttcttcattacatttttaatactcctaatgataaattaatttgggatgtaggccaccaatcttatccacataaaattctaactggacgaaaagacaaaatcagaactttgagaaaaggaaatggtttatctggttttacaaaaagatctgaaagtgaatacgatccatttggtgcagctcatagttcaacatcaatatcatcggccctaggaatagccatagcaaataaattatcaaataaatctgacaacgtaattgctgtaataggtgatggagcaattagtgcaggtatggcatatgaggcaatgaataacgcaggatcaagtaagactaaattaattgtaattttaaacgacaacgatatgtcaattgcaaaacctgttggagcgatgagagcatatttggctaaaattttcactggaaaaatttattttagcctcagagaaactgttaaacttataatttcagctttctcaaaaaggtttagtaaaaaagctggaaaggcagaagattttttacgttcagctgtgactggaggaactttatttagttcaatgggtttttattatgtagggcccatagatggtcatgatatagacgctctggttccagttttaaaaaatgccaaagatgtaaattatgagggtcctattatgatccatgtaaaaactcaaaagggcaaaggttatagtttcgctgaaaaatcagaagataaatatcacggggtacaaa

SEQ ID NO: 232613 - DNA, 792 bp, Unknown
  Bacterial polypeptide expressing nucleotide sequence isolated from the Sargasso Sea
cattacgtttttaatacccctcaagacaaattggtttgggatgttggtcatcaatgttaccctcataaaataataactggaagaaaagacaagattagaactttgcgtaaagggggaggtctttcaggttttactaaaagagcagaaagcgagtacgatccatttggagcagctcacagctcaacttcaatttcctcaactcttggtatggcaacagccaaaagattatcaaatgataaaaataatgttgtagctgtaataggggatggagctatgagtgcaggtatggcctatgaggcaatgaataatgctggagcaatgaaatctaaattaattgttattttaaatgacaatgatatgtcaattgctagacccgttggagccatgagcaagtacttagcaaggctcttgtcaggaaaaatttattttagtttaagggaaacaattaaattaattctatcatcattttcaaaaagattctcaaaaagcgcaggcaaagccgaagatatgttgagaagttttgttactggaggaacactttttaatcaacttggattctattatattggaccaatagatggtcatgacgttaataatctcgtcactattttagaaaatgtaaaaaactctaaacatgaagggccaattttaatccacgctgtaacaaaaaaaggaaaaggttataaaccagcagaggattctggagataaatatcatggagtgtctaaatttaatgtgttaacaggtgttcagtcaaagggacaatcaaaagctccttcatatacaaaagtt

SEQ ID NO: 232614 - DNA, 613 bp, Unknown
  Bacterial polypeptide expressing nucleotide sequence isolated from the Sargasso Sea
gatgcatatcgaaaagattaaaagtcccgcagatctgcgtgcgttagaccaagaccagctcgaagagctatgtcgtgaaattcgcgagtttttggttgatgccgtttcaagaaccgggggccatctagggtccaatcttggggcggtggaattgactatcgccgtgcaccgcgtgtttgagtcacctagagatgtcattctctgggacaccggacatcaggcttatgttcacaagcttgtgacgggcagagcggatatgttctcctcacttcgtcagcgacatggattatctggttatccaagcaacactgagtctgagcacgacatagttgagaacagccatgcttcgacctcattgagttgggcttcgggactgtcagccggatttgatctcaccggacacaaacatcggcaggtcgtagcggtcatcggtgacggttctatgactgggggaatggcattcgaggcccttaacaatctcggtcactatgggcagagagccgtaatcatcctcaacgacaatggtcgctcctatgcgcctactgtgagcaggttggccacagttatgtcacgtgtgcggcaatcaccgaactacggaaaggccgacaggcag

SEQ ID NO: 232615 - DNA, 892 bp, Unknown
  Bacterial polypeptide expressing nucleotide sequence isolated from the Sargasso Sea
aaggccagcgggccgaagtattccggggtgtttggcgaatggctgtgcgacatggccgccgccgacccgcgtctggtaggggttaccccggcgatgaaggaaggctccgatctggtggcgttcagcgagcgtttcccgctgcgttacttcgacgtggcgattgccgagcaacacgccgttaccttcgcggccggcatggcctgcgaaggcgccaagccagtagtggcgatctactccaccttcctgcaacgcggttatgaccagctggttcacgatgtggcggtgcagaacctcgatgtgctgttcgccatcgatcgcgccggcctggtaggcgaagacggcccgacccatgccggcagtttcgatctctcgtacctgcgctgcatccccggcatgctggtgatgactccgagcgacgagaacgaactgcgcaagatgctcagcaccggccacctgtacaacggcccggccgccgtgcgctacccgcgcggcacaggcccgaatgccgtgatcgagaaagacctggagccgattgaaatcggtaaaggcatcgtgcgtcgccaaggcagcaagactgcattcctggtgtttggcgtacaactggccgaagccttgaaagtcgctgagaagatcgacgccaccgtggtcgacatgcggttcgtcaagccactggatgacgcgttggtgcgcgagatcgccgctggccatgagctgctggtgaccgtcgaagagaacgccatcatgggcggcgccggtgcggcggtcagcgagttcctggcgcgggagaatatcctcaagtcggtgctgcacctaggcttgccggatgtatacgtcgagcacgccaagccggcgcagatgctggctgaatgcgggttgatgaggcgggtatcga

SEQ ID NO: 232616 - DNA, 942 bp, Unknown
  Bacterial polypeptide expressing nucleotide sequence isolated from the Sargasso Sea
aaaaaacaaataagaacgctcagaaaaggtgagggattgtcaggttttacaaaaagatcagaaagtgagtatgatccatttggtgctgcccacagttcaacttctatttcttcagcactaggaatagcagtagctaataagttatcaaataaatcaggtaatgtaatcgcagtcataggtgatggggctataagtgctggtatggcttatgaggctatgaataatgcaggtggaagcaaaacaaagatgattgttgttttaaatgataatgatatgtcaattgctaaacctgttggtgctatgagaaaatatctagcaaaaattttatctggtaaagtttactttagttttagagaaacattaaaattaattatatctgctttttcaaaaagatttaaaaatcaagctggaaaagctgaagattttttaagatctgcagtaactggtggaacattatttaattctatgggattttactatattggaccaattgatggacacgatattgactcaatggtctcagtatttaataacgtaaaggatattaattatgatggaccaattttaattcatgttagaactgaaaaaggaaaaggttattcgtttgctgaaaaatcggaggataaatttcatggtgtttcaaaatttaatgtaaaaacaggagaacaagaaaagtctaaatctagtactccttcttatacaaaagtattcgccaattcattaatcaaacatgcagaaaaagatagtaaggtagttggcataactgccgctatgccatcaggaacagggatggatttatttggaaaaaaatttccagaaagaatgtttgatgttgggatagccgagcaacatgctgttacttttgccgcgggtatggctactgaagggtataaaccttacgctgcgatatattcaacatttcttcaaagagcttacgatcaa

SEQ ID NO: 232617 - DNA, 313 bp, Unknown
  Bacterial polypeptide expressing nucleotide sequence isolated from the Sargasso Sea
aatgagtaaaaattatcaatatttgaaaaatataaattttccttctgatattaaaaagttatcatcgtcagaacttaaaaaattagtagatgaagttagagaagaattaattagcgttgtatctgaaacaggaggacacttaggagcagggcttggtgttgttgagcttacagttgcattacattatgtttttgatacaccaaatgataagttgatttgggatgtagggcatcaaacttatcctcacaaaattttaacaggtagaaaagataaaattagaactttaagacaaggaaatggtttgtctggtttt

SEQ ID NO: 232618 - DNA, 620 bp, Unknown
  Bacterial polypeptide expressing nucleotide sequence isolated from the Sargasso Sea
tatgcccaagacatttacgcaaattccgttgactcgcccggccacgccgctgctggacaccctgaccagccccgccgagctacgacggctacctgccacccggctggagcaggtagtcgacgaactgcgtgaatacctgctttacgctgtgggccagtgtggcggtcacttcggtgccggcctgggcgtggtggaactgaccgtggcgctccactatctgtacaacaccccggatgaccgactggtatgggatgtgggccaccagtgctatccgcacaagatccttaccgggcgccgcgaaggcatcaccagcatccgtcagcaggacggcctgtccggttttcccaagcgcagcgaatccgagtacgacacctttggcgtgggtcactcctccacctccatcagtgccgccctgggcatggcactgggggcagaaatggcaggcagtgatcgccgtgccgtggccattatcggtgacggcgccatgaccgccggccaggctttcgaggccatgagccatgcggcccatacccgctccaacctgctggtgattctcaacgacaacaacatgtcgatttcccacaatgtgggcggcctgtccaactacttcgcgcgcatct

SEQ ID NO: 232619 - DNA, 430 bp, Unknown
  Bacterial polypeptide expressing nucleotide sequence isolated from the Sargasso Sea
tatgagttcattattggataaaataaattacccgcatgacttgagacgtttcaacaaagaagaccttcctctcatcgctgaagagttaagaaaagagcttattgacgccgtatcaacaactggtggacatcttggtgcaggacttggtgttgttgaactcactttagctattcattatatttttgatacaccaaaagatcgtttgatttgggacgttggtcatcaagcctatccccataaaattatcacaggtagaaaagataagattagaactttaagacaaggaaaaggtttgtctggttttacaaaacgatcagaaagtgaatatgatccatttggtgcagcacatagctcaacatcaatatcagcaggattaggaatgtcggttgcaagagatttggatggtaaaacaaataatataatttcagtc

SEQ ID NO: 232620 - DNA, 802 bp, Unknown
  Bacterial polypeptide expressing nucleotide sequence isolated from the Sargasso Sea
gatagagcttttgatgttggcattgccgaacaacatgccgtgacactttcggcaggaatggcaacgcaaggcatggttgttttttgtaacatctattccacttttttacaacgtgcttatgaccaagttattcatgatgtaacattacaaaatcttcctgtaattttctgtttagatagagctggaattgttggcgaagatggcgcaacacatcatggtgtttttgatttggcgtatttaagatgcattccgaatatgattatttatgcaccaaaaaacgaattagatttacaaaatatactttacacagcttcattaggattaaatcatccaatagccattcgttatccacgtggtagaggaaaaaatccgaattttaaaatctcaaaaagatcatttcaaaaaattgaaattggcaaagctcatttgttgaaaaaaggaacaaaagttgctgttttatcaactggttttattggtaataatgtttctaaagcgctagagagtattcaaaacaaaaacgattttgcccattatgattttagttttgtaaaacctttagacgaaatgcttttacatgaaatttttggaaaacacacctcgattattactattgaagatggcgttatcaaaggtggttttggttctgctgtttgtgaatttgcagttacaaataactatacaaattccgtcaaagtacttggaattccagatgcttttattgaacatggaactattgatgaactgcagcaaatttgtaaaattgacgttaaaagtttagaaatacttttttctaaatattgaa

SEQ ID NO: 232621 - DNA, 1025 bp, Unknown
  Bacterial polypeptide expressing nucleotide sequence isolated from the Sargasso Sea
atccccacaaaatttcttactgggaagaaaagaaaaaattatatcaattagaaaaaggggtggtttagctccttttcctttgagatcagaaagtgaatatgatgcatttggggtgggacattcaagcacatctttaagtgcacttgttggaatggcggaggctacaaaaaattcaaatccagataaaaaacacgttgctgtaatcggtgatggggcaatgacagcaggcatggctttcgaagcactaagtcacataggtcatttaaaaccgaatttgttagtaatcttaaatgataatgatatgtccatatctgagaatgttggtggtttatcaaattacttttcaagaatatgggcatcaaaaacttacaagggtattaaaaaaagtggttctagtttcttgaagcctttacctcaggcatatcatttagctagaaaagtagaaacacaaatgaaagcaatggttgcaccgggaactatttttgaggaactaggattaaattatattggtccgatagatggtcataatttaaaagagcttaaagatgttatttcaaatttaaaagaatttgaaggtcctcaatttcttcatgtgataacaaaaaaaggtgcgggtttagattcagcggaggctgacagaattggctttcacgctataggaaagataaatgcaataaaagataaaaaaattaagcaaaaaaaatatcaagacatatttggtgaatggattatagatatggcaaaaataagtgataatcttattggtattacaccagctatgagagagggatcaggacttgttgaattcagtaaaaaatttccagacagatactttgacgttgctatagccgaacagcattctgtaacatttgcagctggtttatcagttgaaagtaagaagcctgtagtcgcaatatactcaacttttttacaaagagcttatgaccagttaattcatgatgttgcagttcaaaatcttgatgttacatttgcattggatagatccgggtcttgttgggtgaaga

SEQ ID NO: 232622 - DNA, 586 bp, Unknown
  Bacterial polypeptide expressing nucleotide sequence isolated from the Sargasso Sea
gctttgcattatgtatttgatactccaaaagataaattagtttgggatgttagtcatcaatgctatcctcacaaactcattactggcagaagagaacgaattaaaactttaagaaaaggtggaggtttatctggttttacaaaaaggacagagagcgagtatgatccttttggagcagctcatagttctacttctatttcttcaaccttgggcatgtcagtagcaaaaaaattatcaaataataataataatgttatagcagttataggcgatggggctatgagtgctggaatggcatatgaagcaatgaataatgctggagctctaaaatctaatttaatagtagtattaaatgataatgatatgtcaatcgctagacccgtaggcgcaatgagcaaatatttagctaatttgttatctggtaaactatattttagttttagagaaactttgaaaatgattatttctgctttttcaaaaagatttagtcaaaaagcaggtaaagctgaagatatgctaagaaatatggttactggtggaacattatttagagaacttggattttattacgtggggccaatagacg

SEQ ID NO: 232623 - DNA, 736 bp, Unknown
  Bacterial polypeptide expressing nucleotide sequence isolated from the Sargasso Sea
tgcagctggtctggcatgtgaaaataagaaaccggtggtagcaatttattcaacatttcttcaaagagcctacgaccaattaattcatgatgttgcagttcaaaatcttgatgtgacgtttgcactagacagatcaggtcttgttggagaggatggacctactcattcaggaaattatgatattgcatatctaaggtgcattcctaatatgataatttgtactccttctgatgagaatgaagcaagacatttattaacaacagcatttcttcataaaggtcctgcctcagtaagatatcccagaggaatcggtccaaacacaaaaattaatgaagatttggatccttttgatataggcaaagctaaattgattattaaaggaagtccaaaaataataatcttaaattttggtgctcttatttcagaagcaaaagaagttgctagtagtcttgaattaacactaattgatatgagatttgtaaagccgttagatgaagaaatcttaaaggaatatttatcaaaagcagactggtttataactattgaagacggttctattatgggcggggctggaagttctgttcaggaattctgttcaagagaagggataaatatcaaatcgatattatttggaatacctgataaatttattgatcatgcttcaagagaagaaatgatagagggtgcaggacttagtgcaaataaaataaaatctaaattaaaaaaactactataa

SEQ ID NO: 232624 - DNA, 725 bp, Unknown
  Bacterial polypeptide expressing nucleotide sequence isolated from the Sargasso Sea
tactgaaggattaaaaccaatagttgcaatctatagcaccttcctacaaagagcatatgatcaactaatacatgatgtttctcttcaaaaccttaatgttacttttgctatagacagagccggtgcagttggttcagatggccccacacatcaaggagccttcgatttagcttttctaagatgtataccaaatatgacaattatgactccgtccagtaaggaaaaactttggaaaatgctcaacactggatttaatcacgacggaccagtggctataagatatccaagaggagaggctaagggagataaatttgaaaaagataattcctgtatagagcttggaaagagtgaccaaattaaagaaacaaggacagaggaagtggcgattttatcttttggttcttgtttggagcttgctttggaaatttctaatgccatcgaagcaacaattatcgatatgaattttgtaaagcctttggatgaaaaaagaatacttcaatgctctgcatacaagataatagttaccttagaagagaattcacttaaaggtggtgctggttcagctgtaaatgaagttcttacatcaaataacattaaaacagatatactttcttttggctttcctgatcaattcttacctcatggtgatcaagataaccaaaaactaaacgcaggtttagataaagaccaaataattaaaaagattaaagatagactaaactaaa

SEQ ID NO: 232625 - DNA, 532 bp, Unknown
  Bacterial polypeptide expressing nucleotide sequence isolated from the Sargasso Sea
aatggtaaataaagataaaaaaaataaaccttcatccacttctatgcttgatgagatagataatccgcatgatttaaagtttttaaaaatcgaagatcttggtaatttgtctcgtgaactacgatctgatatgattgatattgtttctaaaacaggaggtcatttaggtgcaggtttgggcgtggttgaacttgctgttgctattcattatgtttttgatactcccaatgatcgattgatatgggatgttggtcatcaagcttatcctcataaaattttgactgctagaagacataagatgagtactttaagaaaggctaaaggtctttctggatttacaaagagaacagagtctgtctatgatccttttggggcagggcattcctccacgtctatttctgcagccttggggatggctgttgcaagagataagttaggaaaaacaaacaatgttatagctgttataggtgatggtgctatgagtgcaggtatggcttatgaagctataaataatgcaggctctttaaaaaca

SEQ ID NO: 232626 - DNA, 777 bp, Unknown
  Bacterial polypeptide expressing nucleotide sequence isolated from the Sargasso Sea
aagaaaaattattaaaaaaatctctaaaaccttaccatcaaatctatcaaagactctttatagaacagaagaatattctaaaggacttataactggcgggaccttatttgaggaattgggtttttattatcttggtcccatagatgggcataatgtagataatatagtttccgttttagaaaatataagggataataaatttgataaaccagtttttcttcattgtataactaaaaaaggtaaaggatatagtcctgctgaaaaatcagaagataaatttcacggtgtagaaaagtttgatattaacactggtaactcaattaaaaagacaaatttaaaatcctattcaaatgtttttggtgaaacattaacaaaacttgccagaaatgatgaaaaaattgtggcaataacagctgctatgatgtctggcacagggttaaaattatttaaacaaaattttgaaaaaagattttttgatgttggtattgctgaacaacatgcagttacaatggcagctggattagctacagaaggcttcaaaccatttgttgcaatttactcaacatttttgcaaagagcttatgatcaaatagtacatgatgtagctattcaaaaattgcctgttagatttgcaattgatagagcggggttagttggatcagatggccctactcatgctggatcatttgatattacctatttagccacattaccaaattttatagttatggcacctagcaatcaaagagagttgtctaatatgatagagttgtcttg

SEQ ID NO: 232627 - DNA, 856 bp, Unknown
  Bacterial polypeptide expressing nucleotide sequence isolated from the Sargasso Sea
atgtctaaattattagaccaaataaattttcctgcagacttaagaaaatttgaaaaagacaaactaagacagatttctgatgagttaagagatgagttaatagaagttgtctcagaaacaggcggtcatttaggagcgggcttgggagtggttgaactgacaatagccttacattatgtctttaatactcctaaggataagctagtttgggatgtcggacaccaatgctatccacataaaataattactggtagaaaaaataaaattagaacattaagacagggagggggtttatcaggatttaccaaaaggtcagagagtgaatatgatccttttggagcagcacatagttctacatcgatctcatcaactttaggaatggcagttgcaaaaaaattatctaacgatagcaataatgtaatagcagtgataggtgatggcgcgatgagtgctggtatggcatatgaagcaatgaataatgctggtgctttaaaatcaaaattaattgtagttttaaatgacaatgacatgtccatagctagacctgtaggagctatgagcaaatatttaccaaaattactttctggaaagatttattttagcttaagagaaactataaaattaataatttctgcgttttcaaaaagatttagccagaaagcaggaaaagctgaagatattttgagaggaatagtaactggcggaactttatttagtgaattaggattttactatataggccctgttgacggtcatgatgttaataatttagtttcaatttttgaaaatgttcagaattctaatcatcaaggccctattcttatacatactataacaaaaaaggggaaagggtata

SEQ ID NO: 232628 - DNA, 865 bp, Unknown
  Bacterial polypeptide expressing nucleotide sequence isolated from the Sargasso Sea
gatgattgttatattaaatgataatgatatgtcgattgcaagacctgttggagctatgagcacttatcttgcaaaaattttttcaggaaaaatttattttagcttgcgagagacaattaaattaattacatctgccttttctaaaagatttagcgcaaaagcaggtaaggctgaggatttactaagatcagccgtaacaggaggaacattatttagttctctcggattttattatattggtcctatagacggacacgatttgaattcattaattccaatattaaaaaatgcaagagattctaaacatgagggaccaattttaattcatatcaaaactaaaaagggcaaagggtatttattcgctgaggaagcaaaagatcactatcacggagtatcgaaatttaatgttaagaccggagagcaagttaaaagcacgattaaaataccttcatatacaaaagtatttgcaaacactttagtgcaacatgctaaaaaagacagtaaaattgttgctataactgccgctatgccagatggaactgggttggatattttttctaaagaatttccagaaagaacttttgatgttggaattgcagaacaacatgctgtaacgtttgctgctggcctagctacagaaaattacaaaccctacgcagcgatttattctacatttttacaaagagcatatgatcaagttgttcatgatgtagcaatacaaagtttacctgtaagatttgcaatcgatagagcaggattagtaggggcagacggacccactcatgcgggaagttttgatacaacatatttgtcaactttaccaaatttgttgttatggctgcaagtgatgaggctgaacttgtaa

SEQ ID NO: 232629 - DNA, 322 bp, Unknown
  Bacterial polypeptide expressing nucleotide sequence isolated from the Sargasso Sea
aatgcatctcagcgagctgagtcatcccaatgaattgcatggtctgagcagctcagagctcgaagacgttgcgcgacagatccgtgagaagcacctgaaaaccgtgtccaccagtggtggtcacctgggtcctggtctgggggtggtcgagctcaccttggccctctatcaaaccctggatctcgaccacgaccgggtggtttgggatgtgggccaccaggcttatccccacaagctcatcaccgggcgcttcaacgagttccataccctgcgccagaaagatggtgtggctggctacctcaagcgttccgagagcagcttt

SEQ ID NO: 232630 - DNA, 967 bp, Unknown
  Bacterial polypeptide expressing nucleotide sequence isolated from the Sargasso Sea
aataaggtaagacttagtcccccattacaatttttgtcagatagtgtacaagaaggtgtaaaaaatattcctttaattgtaaaggatattccagaagaattaaaaaatattaaaggaagcgtaagacgtttagctgttcccaaggttggagcagtttttgaagaacttggatttacatatatgggtcctatagatggacatgatattggaaatttaattaatacatttaatactgctcatagacttaaaaaacctgtgctagtacatgttgttacaacgaaaggtaagggttacccttatgcagaagctgatcaagttggttatcatgcacagtctgcatttgatcttacgactgggaaatctattccatctaacaaaccaaagcctgttagttacagtaaaatttttggtcaaaccttattaaaaatatgtgaacaagatagcaaagttattggtattactgcagcaatggctactggcaccggattagatattttgcaaaaaaatatcccagatcagtatgtcgacgtaggaatagctgagcagcatgcagttactcttgcagcaggaatgtcctgcgatggtcttaaaccagttgtagctatttacagtactttccttcaacgtgcttttgatcaactaattcatgatgtagggatacaaaatttacctgtatcattcgtacttgatagagctgggatagttggagctgatggtcctactcatcaaggtcagtacgatatcagttatatgagatcaatacctaattttgtcttaatggctccaaaagatgagtccgaattgcagagaatgttaataacatcaattaaccataaaggacctacagctctgagaattccaagaggttctggattaggcgtagctgtaatggatgaggggtgggaaccaattaatataggtgaagctgaaatactagaagagggtaatgatattttaattattgctt

SEQ ID NO: 232631 - DNA, 860 bp, Unknown
  Bacterial polypeptide expressing nucleotide sequence isolated from the Sargasso Sea
gatggtggagttcgaacagcgctttcccgatcgctattacgacgtcggcatcgccgagcagcacgccgtcacctttgccggcggcctggcgtgcgaggggctcaagccggtcgttgcgatttattcgacgttcctgcagcgcggctacgaccagttgatccacgacgtggcgctgcagaacctgccggtggtgtttgcgctggaccgcgcagggctggtcggggcggacggcgccacgcacgccggtgcctacgacattgcctacctgcgctgcatccccaacatgatggtgatgacgccggccgacgagaacgaatgccgccaactccttagcacagccttcgcgcaagatggcccgacagcggtccgctatccgcggggtgccggcacgggcgtggcggtgcagccgacgctggagccgctgcccgtgggcaaggccgaagtgcgccgcgcttccaccgccccggctggccagcgtgtggcgattctggcatttggttcgatggtggccccggcttcggcagcggctgagcgtttggatgcgaccgtcgtcaacatgcgcttcgtcaagcctctcgacgtggcttgcgtgctggaaatggcccgcacgcacgattacgtggtcaccgtagaggaaggctgcgtgatgggcggtgcaggcagcgcctgtctagaagcactggcttgcgcaggtgtcgccacgccagtgctgcaactcggcctgcccgaccgctttgtcgatcacggtgatcacgcggcgctgctggcgcaatgcgggctcgatgccaacggcatcctcgcttgcatccgcgagcgttttgccgtccagccgcgtgctgccgccccgcgcgtcgcctgag

SEQ ID NO: 232632 - DNA, 319 bp, Unknown
  Bacterial polypeptide expressing nucleotide sequence isolated from the Sargasso Sea
atggcaattaaagataaaaaaactaaatctgttaccacgcctttacttgataaggtaaacaatccgcatgatctaaaatttttaaaacttgaagaccttgatcaactttcttcagaattacgttctgatatgattgatattgtctctaaaacaggtggacatttaggcgcaggtttaggtgttgttgagcttgctattgcaattcattatgtttttgacactcctgatgatagattaatttgggatgttggacatcaagcatatcctcacaaaattttaactaatagaagacatgaaatgtctactttaagaaaatcca

SEQ ID NO: 232633 - DNA, 847 bp, Unknown
  Bacterial polypeptide expressing nucleotide sequence isolated from the Sargasso Sea
aaaataaattatccatctgaattaagaaaacataaaaaagaagatcttaaacaaatttcagatgaattgagaaaagaattaatagatgtcgtctctgaaaccggaggacatttgggagccggactaggtgtagttgaattgactgtggcattacattatgtctttgatactccaaaagataaattagtatgggatgtaagccaccagtgttatccgcataaaattattacaggaagaagagatagaattaagacattaagaaaaggtgggggattatcaggatttacaaaaagaactgaaagtcaatacgatccatttggtgcagcacacagttctacttcgatttcttcaacattgggtatagctgttgcaaaaaaattatctaataataagaataatgttatcgcagtaattggagacggagctatgagcgctggtatggcttatgaagcaatgaataatgcgggagctttaaaatctaatttgattgttgtgttaaatgataatgatatgtcaatagcaagacctgtaggagcgatgagtaagtatttagcaaaccttctatctggaaaattatatttcagcttaagagagacaattaagatgatcatttcctcattttcgaagaggtttagtcagaaagctggaaaagctgaagacttattaagaaatatagtaacaggaggcactttattcaatgagcttggtttttattatgtaggacctatagacggacatgatgttgaaaatttggtgcaaatttttgaaaatgttaaaaattcaaatcatcaaggtccagttttgatacacgtaagaactaaaaaaggaaaaggatataaaccagctg

SEQ ID NO: 232634 - DNA, 784 bp, Unknown
  Bacterial polypeptide expressing nucleotide sequence isolated from the Sargasso Sea
ccggaaagatactatgatgttggaattgctgaaggccatgctgttacgttttctgctggtttagcaacgcaaggaattcgtcctatagttgccatatactcaacatttttacaaagggcatttgaccatatagtccacgatgtttctgtccaaaatcttcctgtcatattctgtatggacagatctggaattgctggagaagatggccctactcaccacggtgctttggatataccttatttcaggtgtatccaaggaatgattctaactgcgccaaaaaatgggaatgaattaagaaatttgttatacactgcgttaaaccataatggtccttttggtataagatatccaaagtttagttctgtagaatttgatagaaatggtcaagctgatcttttgccaattggttcttgggaggtggaaaaaaaaggtgaagacttactaatattagctactggtcccatggtttacagcgcactatctgttgcctcagatttagatcaagaaaatatatcttgcgaggtggttaattgtagatttataaagcctatggatacagcatatttaaattcaattataaaaagaagatttgataaaatcattacaattgaagaaggagtcatcaatggtggttttggcgatggtgtatcttcttatttactagaaaatggttatagaggagcaataaaacgattaggcctacctgactcctatgtggaacacggcagtaggaatcagatattaaatagtttatctttggataatgatggtataaaaaaataaa

SEQ ID NO: 232635 - DNA, 903 bp, Unknown
  Bacterial polypeptide expressing nucleotide sequence isolated from the Sargasso Sea
aaatttaatataaatactggagtccaagaaaaatcaaaatctaatacaccttcttacacaaaggtatttgcaaatacacttattaaacatgcggaaaaagatagtaaaattattggaataactgctgcaatgccatctgggacaggaatggatatttttggagaaaaatttccttctagaatgtttgatgtaggaattgcagaacagcatgcagttacctttgcagctggtctggcaaccgaaggatacaaaccttttgcagcaatttattcaactttcttacaaagagcttacgatcaagttgttcatgatgttgcaattcaaagcttaccagtaagatttgcaattgatagggcgggactcgttggtgctgatgggcctactcatgctggttcatttgatataacgtatttatcaacattaccaaattttatagtaatggcggcaagtgatgaagccgaattagtaagaatgataaacacatcagttgatataaatgataggccttcagcatttagatatccgagaggtaacggcgtaggagttgatttgccaacaataaatgaaaaaatcgagattggaaaaggtagaataatttctgagggtaaaaaaattgcattgcttaactttggaacaagattaaacgaatgtttgatcgcaaaagagagtttagcaaaaaaaggaataaatataactttgatagatgccaggtttgtcaaaccccttgatcaaaatttaatatggcaaatatctactgatcatgaggctttaattacaattgaagaaggctcaatcggaggcttcggatctcacgtagcacaatttctttctgaaaaaaatttattggatagtaatttaaaatttagatcaatgattttacctgatagatttatgatcaagaca

SEQ ID NO: 232636 - DNA, 740 bp, Unknown
  Bacterial polypeptide expressing nucleotide sequence isolated from the Sargasso Sea
aatgtcaattttaagtaaaattaacctgcctaaagatttaaagaaattatcatttaatcaattacgaaaacttaatgatgagctaagagattatacaattcatgtagtatcgaaaacaggaggtcatttaggagctagtttgggagtaatagaattaacatcagctttacattatgtctttgatactccaagagataaaattatttgggatgtaggtcatcaaacttacccccataaaatattaactgggagaaaaagcaaaattcatacattaagaaaaaaaaatggtttatcaggttttactaaaagatctgagagcatttatgatccttttggagccgcacatagctctacttctgtttcagccaatttagggattacggctgccagagatatgctcaatcaaaattttgatgttattagtattattggtgatggtgctattagtgcaggattggcttatgaaggtcttaacaatttagggcatttaaatagaaattccctgattattttaaatgataatgaaatgtctatagcagaaccagtaggtgcaatgagcaaatatcttgtaaaactattaagttcaaaatcatatgaaagttttagagatatcataaaaaattttactaaaagattacccaacgaagtaggggattttgcaaaaaaaactgagggttatttaaaaggatatttaactggaaatacattatttgaagaacttggtttgaactatttaggcc

SEQ ID NO: 232637 - DNA, 803 bp, Unknown
  Bacterial polypeptide expressing nucleotide sequence isolated from the Sargasso Sea
tatgaaatttaaagttcttgataaaattgagtatccgtctgatataaagaaattagatgatcgtgagctcattgctttgtccaaagaactcagggaatttctaattgatactgtctctaaaactggtgggcacttagctgctgggctcggcacaattgaactcacaatagcacttcacaaagttttcgatacgccaaaagataaattaatttgggatataggtcatcagtgctaccctcataagattttaactggtcgtaaggataagatgaaaacacttaggatgaaagatggtatctctggttttttaaaaagacaagaaagcgaatatgattcttttggagctggacattcgagcacctccataagcgcagcagttggaattgatcaggcaaatataattaataaagatgatgcggatgttgtagctataattggcgatggagggcttacagctgggatggcatatgaggccctgtgccatgctggtgatttgaaatccaatattttagtaatactaaatgataacgatatgtctatctcgccgaatgttggcgcaatacataactacttaacaaaaatgcttaccagcaagacactaaaaaatattaaagatggtagtaaaaaagttctatccaaaattaaaccaattgaaaacctagctagaagagttgaaggtggagccaaaaatctcataactccaggtttgctttttgaagaacttggtttcaaatactatggaccagttgatggacatgatttattagatacgattaaactacttaaaaatttgaaagcaagaa

SEQ ID NO: 232638 - DNA, 787 bp, Unknown
  Bacterial polypeptide expressing nucleotide sequence isolated from the Sargasso Sea
agccgaacagcatgctgtcacttttgctgcgggtatggctgctgaaggctacaagccttttgctgctatttattcaacatttttacaacgagcctatgatcaagttgttcatgatgttgctattcagaatttgccggtgagatttgcgattgaccgagcaggactggttggagcggatggccaaactcatgcaggctcatttgacgttgcctatcttggttgcttgcctaatttcgttttgatggcctgcgccgacgaagcagagctttgtcatatggtggcgactgccgtagcctatgacgaagggccttgcgcttttcgttttccccgcggggaatccgtcggggtagatatgccggaaattggcgagatattagagatcggcaaaggtcgaatcattcaggaaggtagcaaagtcgcaatcttgtcttatggaggccgtatggttgaggttctgaaagccgcagacgaacttgctgctaaaggactgcccgcaaccattgctgatgcacgctttgcaaaaccgttagatactgatctagtagaacgccttgctaaagaacatgaagtacttattactatcgaagagggttcaataggcgggtttgccgctcgtgtgatggatcacctaatccgtcatgataaaattgttcccggcctaaagattcgaccaatgacgctgcctgataagttccaaaaccaggcaagcccattcgatatgtatgacgaagcggagcttaacgcccgtcatataacggcgactgcacttgaagctcttggtataaac

SEQ ID NO: 232639 - DNA, 608 bp, Unknown
  Bacterial polypeptide expressing nucleotide sequence isolated from the Sargasso Sea
gatgcttgaacggattcagacgcccggggatctccggtccctttcggtggaacaactcgaagaattggccgccgagatcaggacggcgatctgcgaccaggtctcgcggacgggcgggcacctcgcgccgaacctgggcgtggtcgagctgaccatcgcgatgcacaccgtcttcgacttcggacacgaccgcctgctcttcgatgtcgggcaccagtgctatccgcacaaactgctgacgggccggcaatcgctcctgggcaagctccgcacgcgcgagggcatggccggtttcccggaaccccgcgagagcgcctacgacctcttctccgtcgggcacgcgggcacggccgtctcgaccgccgtcggcatggcgcgcggtgactcgctcaacggcgagtcctggagccccgagacgcccatgggccggcgcgtggtctcgatcgtgggcgacgcctcgatcgtcaacggcgtcgcgatggagggcctgaacaacgccggcacgctcaagcggcagttcctcgtcgtgctcaacgacaacgggatgtcgatcagccgcccgcagggtgccgtcgcacagtacttcgaccgcgtgcgaatcaacccga

SEQ ID NO: 232640 - DNA, 650 bp, Unknown
  Bacterial polypeptide expressing nucleotide sequence isolated from the Sargasso Sea
ttttgctgcgggtatggctactgaagggtataaaccttacgctgcaatatactcaacatttcttcaaagagcttacgatcaggtcgtccatgatgttgccatacaatctttgcctgttagatttgcaatcgacagagcggggttagttggtgctgatggtccaacacatgctggatcttttgatataacatatctttcaacactaccaaatttcgtggtaatggctgcaagtgatgaagccgagcttgtaagaatgataaatacatcaatggatataaacgatagaccatcagctttcagatatccaaggggcaatggtgtgggagttcaattacctgaaataactgagaaaattgagttgggtaaagcaaaaataattaaagatggaaaaaaagttgcaattttaaattttggagcaagattacaggagtgtattttggcttccgaaaatttaataaaaaaaggaattgatatctctattattgatgcaagatttgcaaaaccgttagatgaaaacctaatatggcaaatcgctactgaacacgaggttttgattacaatagaagaaggttcaatagggggatttggatctcacgtgagccaatttttaagtgaaaaaaatttattagacagtaatcttaaatttagat

SEQ ID NO: 232641 - DNA, 305 bp, Unknown
  Bacterial polypeptide expressing nucleotide sequence isolated from the Sargasso Sea
aatgaaacaaaattataaatttttagataaaataaattttccatctgacataagaaagctttcagaaaatgatttacaaaatgtttctgatgaagttagaaaagaaatgattagtgctgtttcggaaactggaggacatttaggggcaggtctgggtgtggttgaactaactgttgcccttcattatgtttttgacacaccaaatgataagttaatttgggatgtaggccatcaatcttatcctcataaaattttgactgggcgaaaaaataagattagaacgttaagacaaggaaatggattat

SEQ ID NO: 232642 - DNA, 912 bp, Unknown
  Bacterial polypeptide expressing nucleotide sequence isolated from the Sargasso Sea
gccgcacatacgctctacatctatatcttctactttaggaatgtcagtagcaaaaaaattatctaatgataataataatgtgatcgcagtaatcggtgatggtgcaatgagtgctggtatggcctatgaggctatgaataatgcaggtgctctgaaatcaaaattaattgtaatcctcaatgataatgacatgtctattgctaaacctgtgggagctatgagtaaatacttagctaggctattgtctggaaaaatatattttagttttagagaaacaattaaattaataacttcagctttttcaaaaagatttagtcaaaaagctggtaaagcagaggatattcttagaggaatagtttctggggggactttatttagtgagttaggtttttattatattggtccaatcgatggtcatgacgtagattacctagtaaaaattttagataatgtaaaaaactcaaatcataacggaccaattttaattcatgccgttaccgaaaaaggaaaaggctataaacctgctgaaatatcaggggacaaatatcacggggtttctaaatttaacattacgacaggtcagcaagataaaagtaaatcaactaaaccctcatacacaaaagtttttgcagaggcacttataaaacatgcagaaagagacacaaaaattattggaatcactggtgcaatgccatctggtactggcttaaacttatttgaaaaaaaatttcctgatagaatgttcgatgttggtatcgctgagcaacatgcagtaacttttgcagctggattggcgacagaaggttacaaaccttttgcagccatttattctacttttttacaaagggcatatgatcaagttgtacatgatgtagccttacaatcattacctgtgcgttttgctattgatag

SEQ ID NO: 232643 - DNA, 835 bp, Unknown
  Bacterial polypeptide expressing nucleotide sequence isolated from the Sargasso Sea
atgagttacaaaaatttaaataaaataaattttccatctgatttaagaaacctgactttagttgagttagaagatctttcaaaagaacttagatttaaaacaattgaaactgtatcaaaaactggcggccacttaggagcaggtttaggagtagtggagttaacgatagctcttcattatgtatttaacacaccaagagatagattaatttgggatgtaggtcatcaatcttatcctcataaaattttaacaggaagaaaaaataaaattgaaactctcagacaaaaaaacggcttatatggatttgttaaaagaagcgaaagcgattatgatccttttggtacagctcatagctctacatcaatatctgcaggaatgggtatgaagattgcaaaagatttaaataaagacgatgctaaaattatatgtgttattggggacggtgctttaagtgctggaatggcttacgaagcgcttaataatgttggagctagcaataaacaaatgattgtgattttaaatgataatgaaatgtcaattgatagacctgttggagcaatgagtaactatttaactaaattactttcttcaaaacaatacacaaatgttagaagtttattaaaaaaaatatcatcaaagttaccaaattccgtatcaaaaactttgtataaagctgaagagttttcaaaaggtttagttacaggaggtaccttgttcgaagaattaggtttttattatttaggcccaattgatggtcatgatatcaaaactttagttcccgttttagaaaatatgaaaaaatcaaatgttgataaaccgattctttctacattgt

SEQ ID NO: 232644 - DNA, 859 bp, Unknown
  Bacterial polypeptide expressing nucleotide sequence isolated from the Sargasso Sea
ggcagaagaatatgctagaggtatagtaacaggtggaactctatttgaagaattaggtttttattatattggtcctatcgatggacataatattcaacatttaattcctgttctaaaaaatataagagataaaagagaacaaggacctatactagtacatgttgtaacacaaaaaggatatggttattcgcctgcagaacaaagttctgataaatttcacggtgtttccaaatttaacattaaaacgggaacacaaaataaaacaaaaaaaggacctccgagttatacttccgttttttcaaaggaacttataaacctagctaaaaaagataaaaaaatagttgctattactgctgcaatgccctccggaacaggcttagatgattttgcagaaaaatttcctgaaagattttttgatgtaggtatagctgaacaacatgctgtaacatttgcagctggtttggcagcagaaggtatgaaaccatttgctactatatactctacttttttacaacgagcttacgatcaaataatacatgatgtagcaatccaagagttgccagttagatttgcaatagatagagcaggactcgtaggcgcagatgggcctactcatgctgggtcatttgatatagcctatttagctaatattcctaaaatggttttaatggctgctgcagatgaaaatgaattaaaaagaatggttttaactgcagctaatattaatgatcaaccttctgcatttagatacccaagaggagagagtataggtatattatcaccaaaaaaaactgagccattaactataggaaaaggacgtattattaaaaaaggtaataaagtagctatattatctttt

SEQ ID NO: 232645 - DNA, 638 bp, Unknown
  Bacterial polypeptide expressing nucleotide sequence isolated from the Sargasso Sea
tatgtcagttttaagtagagtcaaattacccaaagatttaaaaaaattatcattcagtgaattacaaaaacttaatgatgaattgagagattatacaattgaaatagtatcaaaaactggtggacatttaggtgctagtcttggtgttgtagaactaacagtcgccttacattatgtatttaatactccatcagataaaataatttgggatgtggggcatcaaacatatcctcataaaattcttacgggtagaaaaaataaaatacattctttgagaaaaaaaaatggcatatctggttttactaaaagatcagagagtatatacgacccttttggagcagcccatagctcaacttcaatctccgctagtcttggaattacagccgcaagggatatattaaataaagattttgatgtaattagtgttataggtgatggtgcaattagcgcaggaatggctttcgaaggattaaataatttaggacacctaaataaaaattctttaataattctgaatgataacgagatgtctatagctgaacctgttggtgctatgagtaaatatcttgtgaatttattgagttcaaaatcatatgagggttttagagatattataaaaaactttactaaaagacttc

SEQ ID NO: 232646 - DNA, 805 bp, Unknown
  Bacterial polypeptide expressing nucleotide sequence isolated from the Sargasso Sea
gaaagacatcttcaggtagtatccactagtggaggacatcttggtcctggattaggtgtagttgagttgacattggctttatatcaaactcttgatcttgattttgacaaagttgtttgggatgttggacatcaaggttaccctcataaattaattacgggacgtttcagccaatttgattctctaaggcaacaaaatggagttgctggatatctaaaaagaagtgaaagtaaatttgatcattttggtgctggacatgcaagtacttctatttctgctgctttaggaatggcaatagcaagagatagaaaaggtgagaattataaatgtgtcgctgttattggagatggagcgctaactggaggaatggcattagaagctataaatcatgcaggtcacttaccaaatacccctttagttgttgtattgaacgataatgacatgtctatttcacctccggttggagcactttcatcttacttaaataaggtaagagtaagtccaccattgcaatttttgtccgatagtgttcaagaaagtgtaaaaaatattcccttaattggtaaggatatcccagaagaactcaaaaatattaaaggaagcgttagacgattatctgtacctaaggttggagctgtttttgaagaacttggatttacgtatatgggtccaattgatggtcatgatcttggtaacttagttaagacctttaacgctgcccataaacttaaaagacctgttcttgttcatgttgtcacaacaaaagggaagggttacccatacgcagaagccgatcaggttggat

SEQ ID NO: 232647 - DNA, 748 bp, Unknown
  Bacterial polypeptide expressing nucleotide sequence isolated from the Sargasso Sea
tttgctgccggacttgcctgcgaaggtaaaaagcctgttctagctatatactctaccttcttacaaagagcatatgatcaattaattcatgatgtagcaattcaaaaccttgatctcctgattgccatagatagagctggattagttggtgaggatggggcaacgcattctggcatatttgatttatctttcatgaggtgtattccaaacttggttattatgacgccctcctctgaagaagaatgttggaggttattggaaactggttataaatttgaaggcccagctgcagttagatatcccaaaggctttggattaggaacagatctaccaactgaatttgaagaaattgagattggaaaatctaaagaaattaaattttctgagacaaataaaatttctatcttaagtttcggttctatgttttctctatcagatgaaataagtaaagatttagacgcaaatttgattgatatgagattcgttaaaccattagatacttcttgcataataaagtgtgcaaatcattctgagctgatcgtgactcttgaagataatgttgttgctgggggcgccggttcagccatcaatgaatttattgcagaagaaaatattaaagttaaaacaattaattttggaatttctgatcatttcccatcaatcggagggatatctgaacagagaaaagactatcaattagacaaggataaaatagtaaagaaaattaaggagagattaagtaagtaat

SEQ ID NO: 232648 - DNA, 784 bp, Unknown
  Bacterial polypeptide expressing nucleotide sequence isolated from the Sargasso Sea
ttctctaaaagggcaggaagagcagaagatatgttcagaagtattgtaactggcgggacgctttttaatgaattaggattttattacataggtcctatagatggtcatgacgtaaataatttagtgactatccttgaaaatgcaaagaactcaaaacatgagggtccaattttaattcatgcaatcacaaaaaaaggaaagggttataaaccagcagaagaatctggagacaaatatcacggagtttcaaaatttaatgtttcaactggaaaacaatccaaaggaaagtcaaaagttcctgcatatacaaaagtttttgcaaatacacttattaagcatgctgaaaatgatacaaaaattgttgcaattacaggtgctatgccctcaggaactggcttggatttgtttgaaaaaaaatttcctgaaagaatgtttgatgttggtattgcagagcaacatggggtaacctttgcagctggtttagcaacagaaggatacaaaccatttgctgcaatttattcgacttttttacaaagagcatatgaccaagtagtccatgatgttgccatacaatccttgccggtaagatttgctattgatagagcaggtttggttggagcagatggacctacacatgccggatcctttgatataacttatttatcaactctacccaattttgttgttatggctgcaagtgatgaggctgaattagttagaatgataaacacttcagtaagtataaatgatagaccgtcagcctttagatacccaagaggaagtg

SEQ ID NO: 232649 - DNA, 812 bp, Unknown
  Bacterial polypeptide expressing nucleotide sequence isolated from the Sargasso Sea
agttgcaagagatatattagataaaaaaaataacgttgtagtggttattggtgatggggctatgagtgcaggaatggcttgggaggctctgaataatctaggcgctcaaaaaagaaacatgattgtaattttaaatgataatgatatgtctatttctccagctgttggagcagttagttcgtatctttcaaaattaatttcttcccaacctttaacctctataagagagttagctaagcagatagcaagtcatttgccaactgagttagaaaaagcagcaaaacgtgcagatgaaattgctaggacaatgatggcaggaggcaccatttttagtaatttaggtatgtattatgttggaccagttgatggccataatatccatgatttagttcatgtattgaaaaatcttaaagaaggaaatgatttaggcccagttttattacatgtaattactgagaaaggtagagggcatccatttgccaaagatgcccttgaaaaatatcatgctgttccaaaatttgatatcattactggccagcataaaaaaagtgcttcaaaaataaaaacctatactcaagtcttctcttcatctttgattaatcaagcagaaaaagatgataaaatagtagctgttactgctgcaatgccatcaggtacaggtcttgatagattttcagaggtttatcctaatagattttttgatgtaggtattgctgaacaacatgctgtaacattttgtgcaggtatggctgcagaggggttgaaaccattttgtgcaatttattctacttttttacaaagagccgtatgat

SEQ ID NO: 232650 - DNA, 689 bp, Unknown
  Bacterial polypeptide expressing nucleotide sequence isolated from the Sargasso Sea
atttgcaattgatcgtgctggacaagttggtgcagatggtccaacacatgcaggatcttttgatattgcttttttatctacattaccaaactttataattatggcccctagtaaccaaaatgaactaatcagaatgataaatactactttatttattaatgacaggccctcagcctttagatatccaagaggtaccggtgaattatccaatagcgataaagatactgaaccagttgaaattggaaaaggagttattcttaatgaaggtaatgatgttgcggtgttaaacctaggttcaagattgcaaagttgcaatgaagcaataaaaatacttaatatcagaggaattaaccctactttagctgatgctaggtttgcaaaacctatagacacagatttattagatctacttttagataatcataaatatttattaactattgaagaaggatcaagtggtggttttagtgcaagcgttttaaattatattcataacaagagaattaaactcacatcaacaaaagtaaataatatcttttttcctgataaatttgttgatcatcaatctcctgatgatcaatattctgaaattggtatggatgctgactctattagtaaaaagatactaaaaatttatgaagataatgtaattaattttcaaaattataataaaaatattaaaaattgat

SEQ ID NO: 232651 - DNA, 799 bp, Unknown
  Bacterial polypeptide expressing nucleotide sequence isolated from the Sargasso Sea
aatggatgggcacaacgtcaaggaaataattagaactttaagaaatttaaacgatacctcaggccctaaacttcttcatctaattactaaaaaaggaaaaggatttaaacctgcagaggttgatccaattggattccatgcgatcacaaaaatggaaaatccaaacgcatcaaagaagaaaaatgtaggcatgaaatattcagatgtttttggttcttggctaacttcaaaagcaaatgttgatccctcccttattgcaatcactcctgctatgaaagaaggttcagggatggttgaatttgcggataaattcccatcgcgtttctacgatgtagcaatcgccgaacaacatgctatgacttttgcagccggacttgcctgcgaagggaaaaagcctgttctagctatatactctaccttcttacaaagagcatatgatcaattaattcatgatgtagcaattcaaagccttgatctccttattgctatagatagagctggattagttggcgaggatggggcaacgcattctggcatatttgatttatctttcatgaggtgtattcctaacttaattattatgacgccctcctctgaagaagaatgttggaggttattggaaactggttataaatttgaaggcccagctgcagttagatatcccaaaggctttggattaggaacagatctaccaactgaatttgaagaaattgagattggaaaatctaaagaaattaaattttctgagacaaataaaatttctatcttaagtttcggttctatgttgtctctatcagat

SEQ ID NO: 232652 - DNA, 835 bp, Unknown
  Bacterial polypeptide expressing nucleotide sequence isolated from the Sargasso Sea
aaacaaatttgaccttaaaactgggcaatctttaaatttatcaaataaaaaaacatactcttcagtctttggagaaacattatcaaatgccgcccaaagtgatgaaaaaatagtagcgatcaccgcagctatgatgagtggaaccggtttagatatttttaattctcagcatcctaatagactatttgatgttggtatagccgaacaacatgcagtaacaatggctgcaggtctagctaccgaaggttttaaaccatatgtagcaatttattcaacttttctgcaaagggcatatgatcaaattgttcatgatgtagcactacaaaagcttcctgtaagatttgcaattgaccgtgctgggctagtgggagcagatggaccaacacatgctggttcatttgatattacttttctatcaacgcttccaaattttataattatggcaccaagtaatccaattgatttaattagaatgattaatacaagtgttttaatcaatgataggccttcagcatttaggtatccaagagcaactagtgaaatagaaattgctgataataatattggtccgattgaaataggaaaaggaattattcttgaagaaggtaataatttagcaatattaaatttaggctcaagattgaaaagttgccaagaagcaattaaacttcttaagacttataatatatatccaactttggcagatgctagatttgcaaaaccaattgacacaaatttattggatcaattactagataatcataaatacttaatcactattgaagaaggttcaagcggtggatttgggtccagtattttaaactatattcataat

SEQ ID NO: 232653 - DNA, 736 bp, Unknown
  Bacterial polypeptide expressing nucleotide sequence isolated from the Sargasso Sea
atgtttaaagaaaagctattagataaaataaaatatcctgcagatttaagaaagatgaagttacaagatcttaaattgttatctaaagaacttagagaagaattaattgatgtagtatcaacaacaggcggccatcttggtgcagggttaggtgtggtagagttgactatagctttacattatgtttttaacacacccaaagataagttagtttgggatgtgggtcaccaatcttatccgcacaaaataataaccgggagaagagattctataagaactttgagaaaaggtggaggtctttcaggttttacgaaaagatcagaaagtgagtatgacccttttggagccgctcatagttcgacctctatatcttcaacacttggaatggctgtggctaacagcttatcaaataattctaaccatgttatcgcagtaatcggcgatggagccatgagtgccggtatggcgtacgaggcaatgaataatgcaggagcaatgaaatcaaagttaattgtaatccttaatgataacgatatgtctattgctcgccccgttggagctatgagttcatatttagcaagattactttcaggaaaaacgtattttggttttagagaaactgtaaaatctattacttcgatattttcaaaaaaaattaaggataaagctggtaaagctgaagaatttataagaaacatggtttccggaggaacactttttaatgaattaggttttt

SEQ ID NO: 232654 - DNA, 746 bp, Unknown
  Bacterial polypeptide expressing nucleotide sequence isolated from the Sargasso Sea
ggcaattacagcagctatgcctgatggaactggtctttttatttttcgcaaagaatttccagataggacttttgacgttgggattgcagaacaacatgcagttacatttgctgcaggtttggctactgaaaattttaaaccctatgcagctatttattccacttttcttcaaagagcttatgatcaagtagttcatgatgtagcaattcaaagtttacctgttaggtttgcaatagacagagcaggacttgttggggctgatggaccaactcatgctggaagttttgatacaacatatttaactactttaccaaattttattgttatggcagcaagtgatgaagctgagcttgtaagaatgataaatacatcaacagagattaatgacagaccttgcgcatttaggtatccaagaggaacaggattaggttcaattctgccctcaataagtgaaaaaattgagatagggaaatcaaaaattatcaaagaaggaaaaaaattagcaatcctaaattttggagcaagattaaaggagactttgaaagctgtggaaaatttatcaaaaaaaggtgtgccaataacagtagttgatgcaagatttgcaaaacctttagatgaaaatctcatttggcagttagctacaacacatgaagcgatcatgaccattgaagagggttcaattggtggttttggatctcatgtagtggattttttgacaaaaaaaggattaatggatactaatttga

SEQ ID NO: 232655 - DNA, 907 bp, Unknown
  Bacterial polypeptide expressing nucleotide sequence isolated from the Sargasso Sea
ctaacagttgctttacattatatttttgatactccaaatgataaattaatatgggatgtgggtcatcaaacctatccacataaaattttaactggcaggaaagataagattagaacaattaggcaaggtaatggtttatctgggtttacaaaaaggaacgaaagtgagtatgatccttttggagcagcacacagttcaacttctatatcttcagctcttggaattgctatagcaaataaattatcaaataaatcaaataacgtagttgctgttataggagatggagctattagtgcaggtatggcttatgaagcaatgaataacgctggatattcaaatacaaaaatgattgtaattttaaatgacaatgacatgtcaattgcaaaaccagttggtgctatgcgattttatttagctaaattactttcgggcaaactgtatttcagtttaagagaaactataaaacttattatttcagcattttcaaaaagatttagtgataaagctggaaaagcggaagattttttgagatccgcagttactggaggtacattatttagttctctaggtttttattatgttggtcctatcgatggacatgatttaacagctctggtgcatgtattaaaaaatgctaaagaaacaaagcacgaaggtccaataatgattcatattaaaactgaaaaaggcaaaggctatacttttgctgaaaaagcatctgataaatatcatggtgtatcaaaattcaatgtacaaactggaattcaagaaaaatcaaaagtcaaagctccagcttatacaaaagtttttgctaatactttaattaaacatgctgaaagagatagtaaaattataggtattacagcagcaatgccttcaggaacaggaatggatatttttggagaaa

SEQ ID NO: 232656 - DNA, 771 bp, Unknown
  Bacterial polypeptide expressing nucleotide sequence isolated from the Sargasso Sea
aatgtcaaagttacttgatcaaataaattttccagcagaccttaggaaatttgaaaagagcaaattaaagcaaatttctggtgaacttagagatgaattgataaacgctgtttcagaaacaggaggtcatttaggagcagggcttggagtcgtggagcttactgtagcacttcattacgtttttaatactccaaaagataaactagtttgggatgttggtcatcagtgctatcctcacaaaataatcactggaagaaaagataaaataaaaactttaagacaaggaggaggtttgtcggggtttacaaaaaggtcagaaagtgaatatgatcctttcggagctgcacatagctcaacttcaatttcttcaactcttggaatggcagtggcgaaaaaattatctaatgataataataatgttatagccgttataggtgatggtgctatgagtgctggcatggcatacgaagcaatgaacaatgccggagcattaaaatcaaaattaatagtagttctaaatgacaatgatatgtcaattgccagaccagttggagctatgagcaaatatctgcctaaacttctttcaggcaagatttattttagtttaagagaaactataaaattaataatctcagctttttcaaaaagattcagtcaaaaagctggtaaagcagaagatattttaagaggcatagtaaccggaggaactttgtttagcgaattaggtttttattatgtaggccctgttgatgggcatgatgttaataattt

SEQ ID NO: 232657 - DNA, 682 bp, Unknown
  Bacterial polypeptide expressing nucleotide sequence isolated from the Sargasso Sea
tctgccagtcagatttgccatagatagagctggtttagtaggcgcagatggtcccccgcatgcagggtcttttgatattacttatctctcaacacttccaaattttattgtaatgggtgctagtgatgaggctgaattagttaaaatgattaatacgtctatagatattaatgataaaccttgtgcttttaggtatccacgaggtaatggatttggcgttgatttacctaaaatagatgagagattaattattggaaaaggtaaaattgtaaaagagggtaaacaagtcgctattttaaattttggtgcaagattaaataaagccttgttagccagagaaaatttaaaaaaaagaggaattaatttaacaattgtagatgctagatttgcaaaaccattagatgaacaacttatctggcaaatcgctaacgatcatgagttgttagttacaatagaggaaggttcgattggtggttttggatcccatgtatctcaatttttggctgaaaaaaattttttagatagcaaagttaaatttagatctatgattttcccagataaatttattgaccatgataaaccagagcaaatgtataaaattgctggtttagacagcgatagtatagttgaaaagatattaaatgctttaaactctaaaataataataaaaaaaactaattaa

SEQ ID NO: 232658 - DNA, 874 bp, Unknown
  Bacterial polypeptide expressing nucleotide sequence isolated from the Sargasso Sea
gataaaattagaaccttaaggaaaggtggtggtctatcaggttttacaaaaagatcagagagcgagtacgacccttttggtgccgcacatagttcaacctcaatttcttctgccctaggaatggctgttgcaaataaactttcaaataaatctaatgaagttgtagctgtaattggagatggagcaatgagtgcaggtatggcttatgaagcaatgaacaatgctggaacaagtaaaacaaagatgattgtaattttaaatgacaacgatatgtctattgctaaaccagttggtgcacttagatcttatttagcaaaactcttttcaggaaaggtttattttagcttcagagaaacaataaaattaattatttcttctttctcaaagagatttagtaaaaaagctggtaaagcagaagattttttaagatcggctgtcactggtggtacgttatttaattcattaggattttattatataggccctatagatggacatgacatggactctttaatatctgtcttaaaaaatgcaaaacagattaattttgaaggtccaattatgattcatataaagactgaaaaaggtaaaggttatgaatttgctgaaagatcagatgataaatatcatggtgtaactaaatttaatgtaaacactggagttcaagaaaaatcacaatctgctaatccctcatacacaaaagtttttgcaaatacccttattaaacatgccgaaaaggatagtaagattgttggaataactgccgcaatgccatcaggaactggaatggatatttttgcaaaaaaatttccatcaagaatgtttgacgttggtatagcagaacaacatggtgtaacctttgcagctgtttagc

SEQ ID NO: 232659 - DNA, 781 bp, Unknown
  Bacterial polypeptide expressing nucleotide sequence isolated from the Sargasso Sea
ttatgaagcgatgaataatgctggcacaatgaaatctaaactaattgtaatattaaatgacaatgatatgtctattgcaccacccgttggtgcaatgagtaaatatcttgctagacttttgtcaggtaaaatttattttagtctaagagaaactatcaaactaatactttcagctttttctcggagattttctaaaaaggcagctaaagcggaggattttcttagaagcgcagtaactggcggaacactctttagtcaattaggtttttattatattggaccaattgatggacacgatgtaaataatttagtcactattttagaaaatgttaaaaattcaaagcatgatggtccaattttaattcatgctataacaaaaaaaggaaaaggctataaacccgctgaggagtcaggtgataagtaccatggagtaacaaaatttgatgtttcaacaggcaaacaatctaagagtaaatctgtgggcccttcctttacaaaggtttttgcaaatacattaataaaacatgctgaaaatgacacaaaaatagttgctatcactggtgcaatgccatctggaaccggattagatttatttcaaaaaaaatttcctgaaagaatgtttgatgttggaattgccgaacaacatggagtaacatttgctgcaggtctagctaccgagggatacaaaccttttgcggcgatttactctacttttttacaaagagcatatgaccaagtagttcacgatgtagctatacagtctttaccagtaagatttgca

SEQ ID NO: 232660 - DNA, 435 bp, Unknown
  Bacterial polypeptide expressing nucleotide sequence isolated from the Sargasso Sea
aatgaaagtttttaaagattttccaactgaaaggcctgtcactagtttcttagataatattgagtctccagaagatttaaaaaaacttacaattgacgagcttgaagttttagcagatgaattaagagaatatttgctttattcagttagacaaacaggtggacattttggtgctggacttggagcaatagagattactattgctttgcattatctattagatatgccttctgacaagattgtttgggacactgggcatcaagcataccctcacaaaatattaactggcagaagagataagatgcatctcatgagaaagattgatggtcttgcagcatttccatctattaaggagtctgaatatgatgctatgagtgttggacattcaagtacttcaattagtgcagctttaggcatgaatgaagcctctaaaca

SEQ ID NO: 232661 - DNA, 916 bp, Unknown
  Bacterial polypeptide expressing nucleotide sequence isolated from the Sargasso Sea
ctaaaactgggggggcatttaggtgctggcttttgtgtggttgagttaacaatagcattacactatgtttttaatacccctagagatagattgatttgggatgtgggacatcaatcttatccccacaaaattttaaccggtagaaaacataaaatcgaaactttaagacaaaaaaatggattgtatggttttgtaaaaagaagtgaaagtgaatatgatccttttggtactgcacatagttcgacatcaatttctgctggaatgggaatgaaaattgctaaggatttaaacaaagatgatgctaaaattatttgtgttattggggatggggctcttagtgctggtatggcatatgaagcactaaataatgtgggcgctagcaataaacgaatgatagtaattttaaacgataacgaaatgtcgattgataggcctgtaggggcaatgagtaattatttaactaaattgctatcttctaaacaatatacaaatgttagaagtttattaaaaaaaatttcttctagactttcaaatggagtatcaaaaactttgtataaagctgaagagttttcaaaaagtttggttacaggaggaactttatttgaggagttaggtttttattacttaggtccaattgatggtcatgatattaaaacactggtaccagtattagaaaatattaaaaatttatcagtagataaaccaatatttcttcattgtataactaacaaaggtaaaggttatgagccagcagaaaaatctgaagataaatttcatggtgtaaataaatttgatttaaaaacaggtcaatctataggttcatctaataaaaaatcctactcttctgtttttggagagacattatcaaatgccgctttaaagatgaaaaaattgttgcaattactgcagccatgat

SEQ ID NO: 232662 - DNA, 877 bp, Unknown
  Bacterial polypeptide expressing nucleotide sequence isolated from the Sargasso Sea
ttaaatttatttgaaaaaaaatttcctgagagaacttttgatgttgggatagcagaacaacatgcagtaacctttgcagcaggcttagctacggaaggttataaaccttttgccgcaatttactcaacttttttacaaagagcttatgatcaagtagtacacgatgtagctttacaatcattaccagtaagatttgctatagatagagcaggtttagttggtgcagatggaccaactcatgctggatctttcgatataacctatctttcaactttaccaaattttgttgttatggctgcaagcgatgagtctgaattagttaaaatgataaatacttcagtaattataaatgatcgtccttctgccttcagatatccgagaggaaatggtgttgggattgaattgccatcaatcaatgaaactctggaaattggaaaaggaagggtgataaaaaatggaaaaaaagttgcattacttaattttggaacaagattggaagaatgtaaaaaagcttctgataaacttttattaaagggaatagactgtacaattattgatgctaggtttgcaaaaccattagatgagaaattgattatggaagtagcctctaatcatgaagtgttaatttctattgaagagggttctataggtggttttggatcacatgtaatgcaatttttatcagatagaggtatattcgatagaggtttaaaatttaggtctatgatattacctgatttttttattgatcaagactcacctgaaaaaatgtatgaagttgcaggtttagatcacatatctatttctaataaagttgaggagactttaaattcaaatataattttagctaaaaataaaaacaagatttcaaattaac

SEQ ID NO: 232663 - DNA, 883 bp, Unknown
  Bacterial polypeptide expressing nucleotide sequence isolated from the Sargasso Sea
cggaggaactttatttaattcaatgggtttttactatattggtccaatagacggacacgatttagatgccttaacatctgtactaaaaaatgcaaaagaaattaatattgaaggaccaataatgattcatataaagactcaaaaaggcaaagggtatgaattcgctgaaaaatcagaagataaatatcatggagtttcaaaatttaatatcagcacaggtgttcaagaaaaatctaaatcaaacattccagcttatacaaaagtttttgccaatactcttataaaacatgcagagaaagatagtaaaatagttggaataacggcggcgatgccttcaggaaccggaatggatatatttggagaaaaatttccatcaagaatgtttgatgttggtatagcggaacagcatgcagttacttttgcagcaggcttagcaaccgaaggatataagcctttcgccgcaatttactcgacattcttgcaaagagcatatgatcaagttgtgcatgatgtggcaattcaaagtttaccagttaggtttgcaattgatagagccggattagttggcgccgatggcccaacacacgcaggttcatttgatattacatatttatcaactttaccaaattttattgtaatggcggcaagcgatgaagccgaactagtaaggatgattaatacatcagttgacattaatgataaaccttcagcatttagatatccacgaggaaatggcgttggagtaaatttgccttcaaatgatgaaaaaataattattggaaaaggtcgcgttgttaaagaaggaaaaaagatagccttattaaattttggagcaagattaaaagaatgtctcatagctgaagaaaatttaaaaaagaaagga

SEQ ID NO: 232664 - DNA, 736 bp, Unknown
  Bacterial polypeptide expressing nucleotide sequence isolated from the Sargasso Sea
atgaaaaaaaattacgagtttttagataagatcaatttcccctcagacttaaaaaaagtacctgagtcaaaattagataaagtcgctagtgagttaagagaagaaatgatagacgcagtatcaatcactggtggacatctaggagcaagccttggtgttgtagaattaagtgttgctcttcattatatttttaatacacctaatgataaactaatttgggatgtagggcatcaatgttatccacataaaattcttactggaagaaaagataaaattaggacattaagacaaggtggaggactttcaggttttacaaaaagaaatgaaagtgaatatgatccttttggggcagcacatagttcaacctctatttcctcagctttaggcattgctgaagcaaataaactttccaacaaatcagataacgttgtggcagttataggtgatggagctatcagcgctggcatggcttatgaagccatgaataatgctggagcatcaaaaacaaaaatgattgtaattttaaatgataatgatatgtcaattgcccgacctgtaggagcaatgagcacctatttagcaaaaattttctctggaaagatttattttagtttaagagaaacaattaaattaataacttctgcattctcaaaaagatttagtgctaaagctggcaaggctgaggatttattaagatctgcagtaactggaggaactttgtttagttcacttggat

SEQ ID NO: 232665 - DNA, 818 bp, Unknown
  Bacterial polypeptide expressing nucleotide sequence isolated from the Sargasso Sea
tatgatccatataaaaactaaaaagggtaaaggttatagttttgctgaaaaatctgaagataaataccatggggttactaagtttaatgttaacacaggagttcaagagaaatctaaatctaatgcaccttcttatactaaggtctttgcaaatacattagttaagcatgcagaaaaagatagtaaaattattggaataacagctgcaatgccatccgggactgggatggacatctttggtaagaaatttccatctagaatgtttgatgtaggtattgcagagcagcatgcaatcacatttgcagctggattagcaacagaaggatataagccctttgctgcaatttattctacatttcttcaaagagcgtatgatcaagttgttcatgatgtagcaattcagagtttaccagttagatttgcaattgatcgtgctggacttgttggtgcagatggaccaacacatgctggatcatttgatattacttatttatcgacacttcccaattttgttgtaatggctgcaagtgatgagtccgaattagtaaaaatgattaatacttcaattgatatcaatgataggccatcagcttttagatacccaagaggaaatggaattggtatagaacttccaaatttaaatgagaaacttgaaataggaaaaggaagaattattaaagaaggtaaaaatgtagctttaattaattttggtgcaagattaaatgaatgtttaattgctagagaaaatttaataaaaaaaggtataaatttaacattagtcgatgcaagatttgtaaaacctttagatgaaaatttaa

SEQ ID NO: 232666 - DNA, 913 bp, Unknown
  Bacterial polypeptide expressing nucleotide sequence isolated from the Sargasso Sea
tggcttacgaagcctgaataatgctggagcatctaagacaaaaatgattgttattttaaatgataacgacatgtcaattgcaaaaccagttggagcaatgagaacttacttggcaaaattatttacgggtaaaatatattttagtcttagggaaaccttaaaattaattacatctgcattttcaaaaagatttagtgccaaagcaggaaaagcagaggattttttccgttcagcagttactggaggtacattatttagttcacttggtttttattatgcaggtcctatagatggtcatgatttatcaagcctagttccaattttaaaaaacgcaaaagaatcaagacatgagggtcctataatgattcatatcaaaactcaaaaaggaaaaggttattcttatgcagaaaaagcaaatgatcattatcatggggtgtcaaaatttaatgttgagactggcgaacaagtaaagagtaaatcaaaccttccagcttatacaaaagtatttgcaaacacgttagttaaacatgccaaaaaagatagcaaaatagtaggtataacagcagcgatgccaggaggaactggcatggatatttttgggaaggagtttccaaatagaatgtttgatgtaggaatagcagaacaacatgctgtaacttttgcagccggtctagcaactgaaggatacaaaccatatgctgcaatttattctacatttttacagagagcatacgatcaagttgtccacgatgttgccatccaaagtttaccagttagatttgcgatagatagagcaggattagttggtgctgatggatcaacacatgctggttcatttgatataacttacttatcaactttgcctaactttgtagtaatggcagcaagtgacgaagctgaactagttaaaatg

SEQ ID NO: 232667 - DNA, 657 bp, Unknown
  Bacterial polypeptide expressing nucleotide sequence isolated from the Sargasso Sea
aatgacaaaagaaaaatataaatatttagatgatataaactttccatctgatttaagaaaaattcctgaaagcgaattaaaattattggccaaagagttaagagaagagactataagtgctgtttcaacaacaggaggacatcttggtgcagggttaggagttattgagcttacagtcgctcttcatcatgtttttgacacaccaaatgataaattaatatgggatgtaggacatcaagcatatccacataaaattttaactggaagaaaagacaagataagaactttaagacaaggcaaaggtttatcaggctttacaaaaagatctgaaagtgaatatgatccatttggtgccgctcatagttctacgtcaatttctgcagctctaggaatagccacagcaaacaaactatcaaataaatcatgcaatgtgatagcagttatcggagatggagcaatgagcgctggaatggcttatgaagcaatgaataatgctggtgcatctaagactaaattaattgttattcttaatgataatgatatgtcaattgcaaaaccagttggagcgcttaagtcttatctagcaaagctgttatcaggaaaagtttattttagtttaaaagatacaataaagttaattttatcatcattttcaaa

SEQ ID NO: 232668 - DNA, 868 bp, Unknown
  Bacterial polypeptide expressing nucleotide sequence isolated from the Sargasso Sea
aatgattgacgctgtttcagttacaggaggtcacttaggtgcaagtcttggcgttgttgaactaactgttgcacttcactatatttttaatactcctaatgataaattaatctgggatgtaggtcatcaatgttatcctcataaaattttaactgggagaagggacaaaattagaactttaagacaaggaggaggtctttcaggttttacaaaaagattagaaagtgagtatgatccttttggggcagcacatagttcaacttcattatcctctgctttaggaattgctgaagctaacaaactttcaaataaatctgataatgtagtagcagttataggagacggagctataagtgcaggtatggcatatgaggccatgaataatgctggagcctcaaaaactaaaatgattgttattttaaatgataatgacatgtctattgctcgaccagttggagcaatgagcacttatttagctaaaattttttctggtaagatttattttagtctcagagaaaccataaaacttattatttctgcattttcaaaaagatttagtgcaaaagcaggtaaagccgaagatttacttcgatcggctgtgacaggtggaactttatttagttcacttgggttttattatattgggcctatagatggtcatgatttaaattctttgattccaattttaaaaaatgcaagagactcaaaacatgatggaccgattttaatacatatcaaaacaaaaaaaggaaaaggttacacctttgctgaggaagcaaaggataactatcatggtgtatcaaaatttaatgtaaagacaggagaacaagtaaaaagtgacagtaaaataccgtcatatacaaaagta

SEQ ID NO: 232669 - DNA, 331 bp, Unknown
  Bacterial polypeptide expressing nucleotide sequence isolated from the Sargasso Sea
atgaaaaataaattattagataatattaattatccctcagatttaaggaaacttagtaaaaatcaattagatcaagtttctaaagaactgagatccgagctcattaatgttgtatcagaaaccggaggtcatttaggagcaggtctaggagttgtagagcttactgttgctttgcactatgtctttaatactccaaaagataaattagtttgggatgttggtcatcaatgctatccacataagataattactggaagacgagatagaataagaacactaagaaaaggtggtgggctctcgggatttactaaaagatcagaaagcgaatatg

SEQ ID NO: 232670 - DNA, 852 bp, Unknown
  Bacterial polypeptide expressing nucleotide sequence isolated from the Sargasso Sea
ggaacaagatacaaaaattgttggaattactggtgctatgccctctggtacgggcttgaatttatttgaaaaaaaatttccagatagaacattcgatgttggtatagcagaacaacatgctgtcacttttgctgcaggattagcaacagaggggtataagccttatgctgctatttattcaacgtttttacaaagagcatacgaccaagttgttcacgacgtagctttacaatctctacctgtaagatttgcaattgatagagcaggtctagttggggcagacggtccaactcacgcaggctcttttgatattacatatctttctacattaccaaactttattgtaatggctgctagtgatgaagcagaacttattaaaatgattaatacctcagttcaaattaatgacagaccttcagcttttaggtatccgagagggaatggtgtaggagcaaaattaccttcaattaaggaagttttagaaattggaaaagcaagaattattaaagaaggaaaaaaagtagcattgctaaattttggtacaagacttgaggaatgtaaaaaagcttcagataaactgttctcaaaaggaattgaatgtacattagttgatgcaagatttgcaaaacctctagatgaaaaattaattatggaaatagcttcaaaccatgaggttttgataacaattgaagaaggttcagtgggaggttttggttctcacgttatgcaactgttatcagaaagaggtgttttcgatactggcttgaaatttagatcaatgattttacccgatattttcattgaccaagatacaccagaaaaaatgtatcaaacagctggattagataattt

SEQ ID NO: 232671 - DNA, 660 bp, Unknown
  Bacterial polypeptide expressing nucleotide sequence isolated from the Sargasso Sea
tgagttgagggatgagctaattgatgtagtttctgaaacaggagggcatttgggtgcgggattaggtgtggttgaattaacagtcgctttacactacgtattcgatactcctaaagataaattagtttgggatgtaagtcaccaatgctacccgcataaaatcataaccggtaggagagataaaataaaaactttaaggaaaggcggtgggctgtctggttttactaaaagaactgaaagtgagtatgatccattcggagctgctcatagctcaacttctatttcctcaacactaggaatgtcaatagcaaaaaaattatcaaataataacaatcatgtaatttcagttattggagacggggccatgagcgctggaatggcttatgaagcaatgaataatgcaggagcattaaaatctaatttgattgtggtattaaacgacaatgatatgtcaattgctagacctgtaggagctatgagcaaatatctagctaatctcttatctggaaaattatacttcagcttaagagagacttttaaaatgattatttctgcattttcaaaaagatttagtcaaaaagctggtaaagcagaggatatgttaagaaacatggtaactggcggtacactatttagcgagttaggattttactatattgg

SEQ ID NO: 232672 - DNA, 925 bp, Unknown
  Bacterial polypeptide expressing nucleotide sequence isolated from the Sargasso Sea
ctggataaaaaagatcttgatgatgtatgtaacgatcttagaaattacataattggttcaatttcagaaaatggcggtcattttggagcaagcttaggagttgttgagttgacagtggcgcttcattatgtgtataatacacctgaggataaaattgtttgggatgtaggtcatcaagcttatggacataagatattaacagggagaaaacataactttcatactaaccgaatttatggaggactttctggatttccaaaaatatcagaaagtgaatacgatacttttggagtaggacactcatcgacatcaatatctgcagctttaggaatggctatagcagctaaactaagtaatgatttaaaaagacaacatatagcagtaataggagatggaggaatgacaggtggaatttcttttgaaggaatgaatcatgcaggggatactgatgctaatttaactatcatattaaatgataattgtatgtcaattgatccaaatgtaggtgctctaaaaaaatatttgactgatatttcaacatctcaagcatttaatagtattagaaatgatatctggaaggttttagggaaactagagaaagtgggagaaagcgcaagaggtgttgctaaaactgtagaaaagagtttaaagtcctttgttttagataattctaatttgtttgaagcgttaaacttaagatattttggtcctattgatggtcatgatgttaatcacctagtaaaaactcttaatgatttaaaaaaaataccagggccaaagctactacattgtataacaaaaaaagggaaaggttattctttagctgaaaaagaccaaacaaaatggcatgcaactggaaagtttgatgtggagtcaggaaaaagtcttgtcattaaaagtactgaaaagtctccacctaaatacc

SEQ ID NO: 232673 - DNA, 775 bp, Unknown
  Bacterial polypeptide expressing nucleotide sequence isolated from the Sargasso Sea
aatggcagctggattggcaacagaaggtttcaaaccatttgttgcaatttattcaacatttttgcaaagagcttatgatcaaatagtgcatgatgtagctattcaaaaattacctgttagatttgcaattgatagagcagggttagtaggatcagatggtcctactcatgctggttcttttgatattacttatttagctacattaccaaattttatagttatggcgcctagtaaccaaagagagttgtcaaaaatgatagagttgtcttgtgagattaatgacacaccatctgcttttagatttccaagaggaacaggatcagatgaactttttaataatcagcctgctgaaataaatataggcaagggttacattctaattgaaggtaacgatgttgctatcttaaatttaggcacgagacttgaaaaatgtattgaagctagtaagtttcttaatcaaaataatatttatcctactattgcggatgctagatttgcaaaaccattagatactcaattaatagataatttactaaataatcataagtatattttaacaattgaagaaggttctataggtggattttcgtcacatatcttacattatgtacataatattagatcaaaaaagaataatacagttataaaaaatttaatctttccagatagatttgtagaacatatgactccagatgaacaatatcaagatattaaaatggatacgaaatcaataataaaagaaattaacaatttttatgaaaataaaattgttgat

SEQ ID NO: 232674 - DNA, 409 bp, Unknown
  Bacterial polypeptide expressing nucleotide sequence isolated from the Sargasso Sea
atgcgtctgagccagttaagtcatccgaatgagcttcatggcttagccattagtgaattggaagatgttgcttgccaaattagagaaaggcatcttcaagtagtttctactagtggtgggcatttaggtccaggtcttggtgttgttgagttaacaattgctctctatcagactttagatctagatgtagataaagttatttgggatgttggacatcaagcttatcctcacaagttacttacgggaagatataaccgatttgattctctcagacagcaaaaaggcgtagctggttatctaaaaagaacagaaagtaaatttgatcattttggagctggacatgcgagcacatcaatttctgccgctcttggtatggctattgccagagaccgaaaaggggaagattata

SEQ ID NO: 232675 - DNA, 388 bp, Unknown
  Bacterial polypeptide expressing nucleotide sequence isolated from the Sargasso Sea
gagcaaattaaaagcattaacaagacaccatcatatactaaagtatttgcagatactttgactcaacatgcaaaaaaagatagtaaaatagttgctattaccgctgcgatgcctgatgggactggtttaaatagtttccgtaaagaatttccagaaagaacttttgacgttggaatcgcagaacaacatgcagttacgtttgctgctggtttagcaactgaaaattttaaaccttacgctgcaatatattcaacgtttcttcaaagggcttatgatcaagttgttcatgatgttgccattcaaagtttaccagtacgatttgcaatagatagagcaggtttagtaggtgcagatggaccaacacatgcaggaagttttgatacaactt

SEQ ID NO: 232676 - DNA, 782 bp, Unknown
  Bacterial polypeptide expressing nucleotide sequence isolated from the Sargasso Sea
aatgaataaaaattataagtatttaggtaatattaactttccatctgatataaaaaaactctctcaatcagagcttaaaatattagttaaagaattgagagaagaacttattgatgcagtttctgaaactgggggacatttaggagcaggattaggtgttgtcgaactaacagtagttcttcattatatttttaacacacctcacgataaattaatatgggatgttggacatcaaacttacccccataaaattttaaccggaagaaaagataggattagaacattaagaaaaggaggcggactatctggttttacaaaaagatcagaaagtgagtatgatccttttggagctgctcatagttctacctcaatatcatctgctctaggtatagctgttgcaaacaaattatcaaataaaactgataatgtcattgctgtcattggtgatggagcaataagtgcaggaatgtcttatgaagctatgaataacgctggctctagcaaaactaaaatgattgtaattttaaatgataatgacatgtcgattgctaaaccagttggtgctatgagagcataccttgctaaaatcttatctggaaaattatattttagttttagagaaacacttaaacttataatatctgcattttcaaaaagatttagtaaaaaagccggtaaggctgaagattttttaagatcagcaatgacaggtggaactctttttaattcaatgggattctattacataggacctatagatgggcatgatgtagatgctcttg

SEQ ID NO: 232677 - DNA, 550 bp, Unknown
  Bacterial polypeptide expressing nucleotide sequence isolated from the Sargasso Sea
tatgaataataagtataaaacactggaaaatattaatcttcctagtgatataaaaaatctatcaaaagatgagatattatcgctttctaaagacttaaggggttttctagttgagtctatatcaaagactggtggacatcttgctgccgggttaggtgcagttgatattactatcgctcttcattatgtgtatgatactccaaaagatataattgtttgggatattggtcatcaatgctatccacataaaatattaactggtagaaaaaatcaaatgtctactctaagaaaaaaaaatggtatttcaggttttctcaagatcaatgaaagtgagtatgatgcgttcggagctgggcactcaagtacttcaatcagtgcagcaataggttatgaaatagcatcaaggttaaaaaatgaaaacaagaaagttatagctgtaattggtgacggaggactgacggctggaatggcttttgaagctctaagccatgcagggggaattaaatctaatttactcgttgttcttaatgataatgaaatgtcaatatca

SEQ ID NO: 232678 - DNA, 682 bp, Unknown
  Bacterial polypeptide expressing nucleotide sequence isolated from the Sargasso Sea
gcaatagatcgtgcaggtttagtaggagctgatggacctactcatgccggagcttttgatgtgacttatctaactactttaccaaattttattgttatggccgcaagcgatgaatctgagttagtaaaaatgattaatacctcagtaaatataaatgatcgaccttctgcattcaggtatccgagaggaaacggtattggagtagaacttccaagcataaaagaagttttagaaataggaaaagggagagttgttaaagaaggaaaaaaagtagccatattaaattttggaggaagattacaagaatgtttaaaagcagctaaaggtttagatataaaaggaatttcaactacagtcgctgatgcaagatttgctaaacctttagatgaaaaattaataatggatttaagtttaaatcatgaagttttaataacaattgaagagggatcaataggaggttttggttcccatgtaatgcaattacttgctgaaaaaggaatctttgataaaggtttaaaaattagatctatgattttgccagataaatttctcgaccaagatataccagaagagatgtataaaaaagctggtttagattgtgatagtattatagaaaaagtagaaaatactttgaagtcaaatgtaattgttgcaaaaagtacaattaaaaaatcttcttaac

SEQ ID NO: 232679 - DNA, 850 bp, Unknown
  Bacterial polypeptide expressing nucleotide sequence isolated from the Sargasso Sea
atgcttttaagtgagttaagtcatccaaatcaacttcatggcttaacagtttcacaattagaggaaattgcatgtcaaattagagaaagacatcttcaggtagtatctactagtggaggacatcttggtcctggattaggtgtagttgagttgacattggctttatatcaaactcttgatcttgattttgacaaagttgtttgggatgtaggacatcaaggttacccccataaattgattacaggacgtttcagtcaatttgattctctaagacaacaaaatggagtcgctggatatctaaaaagaagtgaaagtaaatttgatcattttggtgctggacatgcaagtacttctatttctgctgctttaggaatggcaatagcaagagatagaaaaggtgaaagttacaaatgtgtcgctgttattggagatggagcactaactggaggaatggcattagaagctataaatcatgcaggtcacttaccaaatacccctttagttgtagtattgaatgataatgacatgtctatttcacctccggttggagccctttcatcttacttaaataaggtaagagtaagtccaccactgcaatttttgtccgatagtgtccaggaaagtgttaaaaatattcccttaattggtaaggatatcccagaagaactcaaaaatattaaaggaagtgttagacgactatctgtgcctaaggttggagctgtttttgaagaacttggatttacatatatgggtccaatagatggtcatgatattgataacttggttaagacctttaacgctgcccataaacttaaaagacctgtacttgttcatgttgtcacaacaaaag

SEQ ID NO: 232680 - DNA, 347 bp, Unknown
  Bacterial polypeptide expressing nucleotide sequence isolated from the Sargasso Sea
gatgcccaagacttttcacgagatccctcgggttcgccccgcgacgcccgttcttgaccgagcggcgacccccgaacagctgcgccgactgggcgaggcggaactcgaagagcttgccaacgaattacgccaggagctgttgtacagcgccggccacactggcgggcacttcggcgccggcctcggcgtgatcgaactgaccatcgccctgcattacgtctacgacacgccggacgaccgcctggtctgggacgtcggccaccaggcctatccacacaagatcctcaccgggcgccgcgagcgcatggctacgctgcgtcagaaggacggcctggccgccttcccgc

SEQ ID NO: 232681 - DNA, 904 bp, Unknown
  Bacterial polypeptide expressing nucleotide sequence isolated from the Sargasso Sea
gaccccgtggcctaccacggccccggcaagttcgaccccagcgtgggcctgaccaagccagccacgccccccaagcagacgttcacccaggtgttcggccagtggttgtgcgacatggcggcgcaagacccgcgcctggtgggcatcaccccggccatgcgcgagggctcgggcatggtcgagtttgaaaagcgctttcccgaccgctactacgacgtgggtatcgccgagcagcatgccgtcacatttgccgcaggcatggcctgcgaaggcgtgaagcctgtggtggccatctactccacctttttgcaacggggttacgaccagttgattcacgacgtggccctgcagaacctgcccgtggtgtttgccctggaccgtgcgggcctggtgggggctgacggtgccacgcacgcaggcgcctacgacatcccgttcgtgcgctgcattccgaacatgagcatggcctgtcccgccgacgagcgcgagtgccgacagttgctgagtagtgcgtttgagcaggaccatcccgtggccgtgcgctacccgcgcggcagcggcgcaggtgtggcgccgcttgcagcgctcgacggtctgccgttcggcaagggcgagatccgccgtgagcgcaagggcgaggccgacggcaaggcgccccgcattgccatcctggcatttggcaccttgctgtaccccgcgctcgaagtgggcgaggcgttggatgccaccgtggtcaacatgcgctgggccaagcccatcgacgaagccttgctgcgcgaggtggcggagcgccacgatgcgcttgtgacggtggaagaaggcgccatcatgggtggtgcgggcagtgcagtgaccgaggcgctcaacgccatgggcatcgtgcgcccccgtgctgcagctgggg

SEQ ID NO: 232682 - DNA, 913 bp, Unknown
  Bacterial polypeptide expressing nucleotide sequence isolated from the Sargasso Sea
ttatcaagtctagttccaattttaaaaaacgcaaaagaatcaagacacgagggtcctataatgattcatatcaaaactcaaaaaggaaaaggttattcttatgcagaaaaagcaaatgatcattatcatggagtgtcaaaatttaatgttgagactggtgaacaattaaagagcaaatcaaaccttccagcttatacaaaagtatttgcaaacacgttagttaaacatgcaaaaaaagatagcaaaatagtaggaataacagcagcgatgccaggagggactggtatggatatttttggaaaggagtttccaaatagaatgtttgatgtaggaatagcagaacaacatgctgtaacttttgcagccggtctagcaaccgagggatacaaaccatatgctgcaatttattctacatttttacagagagcatatgatcaagtggttcatgatgttgcaatccaaagtttaccagttagatttgcgatagatagagcaggattagttggtgctgatggatcaacacatgccggttcattcgatattacttacttatcaaccttacctaactttgtagtaatggcagcaagtgatgaagctgaactagttaaaatgattaatacttcagtagatataaatgatagaccttctgcaattagatatccaagaggaactggagtaggtgttgatctcccatcaatagatgaaaaaattgaaattggtaaagggagagttcttcaacaagggacacaagtttgtattttaaacctcggtactcgacttgaggagtgcaagtcagctgtagaggaattaaaggcaaaaggaatttcaacaacgttgatagacgccagatttgctaagcctttagatgaagaaattatactaaagtctgctaaggaacatgagcttatgataa

SEQ ID NO: 232683 - DNA, 838 bp, Unknown
  Bacterial polypeptide expressing nucleotide sequence isolated from the Sargasso Sea
tccatcaagaatgtttgatgtgggtatagcagaacaacatgctgttacttttgcagctggattagcaaccgaaggttataagccttatgcggcaatttattcaacgtttttacaaagagcatatgatcaagtggtgcatgatgttgctattcaaagtttacctgttaggtttgcaattgacagggctggattagtaggagctgatgggccaacacatgcgggctcatttgacataacttatttatcaactttaccaaattttattgtaatggcagcgagcgatgaatcagaattagtaaaaatgatcaatacaactgttgatataaatgataagccttcagcatttagatatcctaggggaaatggcacaggagtaaacttaccttcaaatgatgaaaaaataattattggaaaaggtcgcgttattaaagaaggaaaaaaaatcgctttattaaattttggagcaagattaagagagtgcttaatagctgaagaaaatttaaaaaaaaaaggaataaatttaactattattgacgcaagattttcaaaacctcttgatgaaaaccttatatggcaaatagccgttgagcatgaatcaataataacaattgaagagggatcaataggagggttcggatcacatgttggacaatttctctcagataaaagtttgctagacagcaatttaaaatatagatctatgattttacctgatagatttatagaacatgataaaccagagttaatgtataaatttgcgggtttagatgctaagagtattgagacgaaagtattagatactttaaattcaaaagttataattaagaaaacaaattaa

SEQ ID NO: 232684 - DNA, 860 bp, Unknown
  Bacterial polypeptide expressing nucleotide sequence isolated from the Sargasso Sea
tgagtcaaaattacaaaaggtagcagatgagttgagggaagaaatgattgatgcagtttcagtcacaggtggacatttaggagctagccttggtgtggtcgagttaagtgttgctttgcattatatctttaatacacctaatgataaattgatatgggatgttggccatcaatgctatcctcataaaattttaacaggtagaaaagataagataagaactttaagacaaggtggaggtctctctggatttacaaaaaggtctgaaagtgaatatgatacatttggtgcagctcatagctctacctcaatttcctcagcattaggtattgctgaagcaaataaactttcaaataaaaatgataatgttgtagccgttattggtgatggagctatcagcgcgggtatggcttatgaggccatgaataatgctggcgcctcaaaaactaaaatgattgttatattaaatgacaatgatatgtcaattgctcgaccagtaggagcaatgagcacttacttagcaaaaattttttcaggaaaaatttattttagtctaagagaaactatcaaacttattacttcagcattttcaaaaagatttagtgctaaagcaggaaaagctgaggacttacttagatcggcagttactggtggcactttatttagctctcttggtttctactatattggtccaatagatggacatgacttaaactcattagtaccaattttaaagaatgctagggactctaaacaccaaggtccaattttgatacatatcaaaacaaaaaaaggaaagggttatacgtttgctgagaaagcaaaagataattaccatggtgtgtcaaaatttaatgtcgaga

SEQ ID NO: 232685 - DNA, 936 bp, Unknown
  Bacterial polypeptide expressing nucleotide sequence isolated from the Sargasso Sea
aaaattttagctaaagaagttagagaacagatgatcgatgctgtttcagttacaggaggccatctcggagcaggtttaggagttgtagaattaacaatagcattacattatgtattcgacaccccaaatgataaaattatttgggatgttggacaccaaacctatcctcataaaatattaactggcagaaaagacaaaataacaactcttagacaaggtaatggtctttcaggttttaccaagagatcagaaagcgaatatgatccgtttggtgcagctcatagctcaacatcaatttcagctgcacttggtattgcaactgcaaataaattagaaaaaaaatctaatcaagttgtagcaatcataggtgacggtgcgataagtgctggaatggcatatgaagcaatgaataatgcaggatcttcaaaaactaaaatgattgtaatattaaatgataatgacatgtccattgcaaaacctgttggagcaatgagtacataccttgccaaaattctgtcaggaaaaatttattttagtttgagagaaacaattaaactaataatttcagctttttcaaaaagatttagcgacaaggcgaaaaaagcagaagattttttgagatcagcagtaacgggaggaactttattcaattcattaggcttttattatgttggtccaattgatggttatgatttagacaatttaatatcagttatggaaaatgccaaaaaactaaaccatgaaggtccaatcatgattcatattaaaactgaaaaagggaaaggatatgaattcgcagaaaaatctcatgataaatatcatggtgttacaaaatttaatgttaaaactggaattcaagaaaaaagtaaatccaactcaccatcttacacaaaggtttttgcgaaaactttgattaagcatgctgaaaaggatagt

SEQ ID NO: 232686 - DNA, 953 bp, Unknown
  Bacterial polypeptide expressing nucleotide sequence isolated from the Sargasso Sea
gctttacctgaatcagcgttgcctgatgttgccgacgaggtgcgacgattcctgttagagactgtgagtcgcagtggcgggcacttcgcgtcaagcctaggtgctgttgagctcaccatcgcactccattatttatacaataccccggaagacagaattgtttgggatgtgggacatcaagcatatcctcacaaaattttaactggtcgaaaagataagctgcaaacgattcgtaaatggaagggtttagcaccttttccgaaacgagaggaaagtgaatacgacgtattcggtgtgggacattctagtacctctatttctgcagcactagggatggcggtcgcggcgaaaatcatcggaaccgagcgacgagctgtcgcggtgattggggatggcgcaatgactgcgggtgtcgcctttgaaggattaaatcatgcaggagatataggcgccgatgttttggtcatattgaacgacaacgatatgtccatatcacctaatgtgggggcgttgtcgaatcgttttgcacaaatattatcgggaaagttttacacaactgtgcgcgaaggaagtaagaaggttctttctcaaatgccctctgtttgggaattggcacgacgcgctgaagagcatgtgaaaggtttgatcgtgccagggactttgtttgaggaattcggtttcaattatattggtcctattgatggccacgatcttggggctgtgctaaatacagtgaagaacgttaagcagctgaagggacctcaattgttgcatgtaatcacgcgcaagggcaaaggttacgcgccagcagaggaagatccggtcaagtatcacggagttacccctttcgatccgagcaaaggaatagtttccaccggatctaaaagaaatctaaattacagcgaggtttttggtaattgggtatgtgacatggccgcgcgtgacaatcgctt

SEQ ID NO: 232687 - DNA, 700 bp, Unknown
  Bacterial polypeptide expressing nucleotide sequence isolated from the Sargasso Sea
aatggtatcgctgattgaaagtatctcacaaccacaagagatacaaaactttaatttaaaagaacttacgcagttagcgcaggaatgccgccagcgcataattgatgtaacaagtaagtgcggaggtcatctagcttcgtctcttggtgccgtcgaaattacggtcgcccttctaaaacattttgatttcagtattgaccgactggtttgggatgtgggtcatcagggatacgcttataagattttaacaggtcggaataaaaattttcatactcttggtaaattagacggtataaaaaaatttctttcgagggaagaaagtagttatgatcattttggagcaggacatgcttcaacttctatttcagcagcattaggcatggccattggacgtgatctgcagaatcaaaaacataaggttgtttcagttattggagatggggctctgactggtgggctagcatttgaagccttaaatcacaatggttcactcgataagaatatgctagttatctataatgacaacggtatcagtatagatccaaatgttggcgcagtttcaaaactgcttacacgctttgcatcttcaaaattctacaatcgtttcagagatgaaactcttgatcttgccgagaaagcgccgttttctgaaaggcttggacttaaaaccactttacagaaaatgcatgattctgcaaag

SEQ ID NO: 232688 - DNA, 943 bp, Unknown
  Bacterial polypeptide expressing nucleotide sequence isolated from the Sargasso Sea
aatgactgaaaaattactagataaaataaattatccagcagatcttagaaagcttgaaaaaaatcaattagaaaaagtatctcaagaattaagatcagagttgatcgatgttgtctcagaaacaggaggtcacttgggagcaggacttggtgtagtcgagctaacagtagctttacattacgtttttaatacaccaaaggataaattagtgtgggacgttggtcatcaatgttatcctcataaaataattacaggaagaaaagatagaattagaactcttagaaaaggtggcggcctttcaggttttacaaaaagggctgaaagcgaatacgatcctttcggagctgcacatagttccacttcaatttcatcaacgctagggatggcaactgccaaaagattatctaatgataacaacaacgtagtagctgtgattggtgatggggcaatgagtgctggaatggcttatgaagcaatgaataatgctggcgctatgaaatcaaaactaatagtgattttgaatgacaatgacatgtcaatagctcctcctgttggagcgatgagcaaatatttagcaagacttttgtcaggaaaaatttattttagtttaagagagacaatcaaattaatactttctgctttttctaaaaggttttctaaaagcgctggtaaagcagaggatatgtttagaagtatggtaaccggcggaactctttttaatcagttaggattttattatataggccctatagatggtcatgatgtaaataatttagtaactattttagaaaatgtaaaaaactcaagacacgaaggtccaattttaattcatgcgataacgaaaaaaggtaaaggctacaagcctgcagaagaatcaggagacaagtaccacggagtatcaaaaattaatgtttttactggagaaacatcaaaaggaaaatca

SEQ ID NO: 232689 - DNA, 760 bp, Unknown
  Bacterial polypeptide expressing nucleotide sequence isolated from the Sargasso Sea
aaaaataaaattgaaactttaagaaaaaaaaatggtttatatggttttgtaagaagatctgaaagtgaatatgatccttttggtactgcgcatagttccacctcaatttcggctggattaggtattaagattgctaaggatattaacaaagataatgcaaacgttgtgtgcgtaattggagatggggcattaagtgcgggtcttgcttatgaagcattaaataatgctggcgcaatgaataaaagactaattgtgattttaaatgataacaaaatgtcaatcgaccaaccagtaggcgctatgagtagctatctaactaaattgctatcatcaagatcttattctagtattagaggcattattaaaaatttgtcaaaaaatcttcatcaagggttatctaacactttgtcaaaggctgaagaatattccaaaggttttattactggaggaactatgtttgaagaattggggttttattatctgggaccaattgatggtcataattttgatcatttgataccagttttagaaaacataagagacaatgaaattgataaaccaatatttttgcattgtattacaaaaaagggaaaaggatataaaccagcagaagaatctatagataaatttcatggtgttaacaaatttaatgttttaactggacagtctatatctaaaacaaatcaaaaaagttattctcaaatatttggagaaacactctcaaaattagctaaggaagatgaaaaaatagttgctatta

SEQ ID NO: 232690 - DNA, 883 bp, Unknown
  Bacterial polypeptide expressing nucleotide sequence isolated from the Sargasso Sea
tttgagaaaaggaaatggtttgtctggttttactaaaagggctgaaagtgaatacgatccatttggtgcagctcatagttcaacatccatatcatccgctttaggcatagctatggcaaataaattatcaaataaatctgacaatgtaattgctgtaataggcgatggagcaatcagcgctggtatggcttatgaggcaatgaataatgcaggatcaagtaagactaaactaattgtaattttaaacgataacgatatgtcaattgcaaaacctgttggagcaatgagagcatatttggctaaaatttttactggtaaaatttattttagctttagagaaactgttaaacttataatttcagctttctcaaaaagatttagtaaaaaagctggaaaggcagaggattttttacgttcagctgtaaccggaggaactttatttagttcaatgggtttttattacgtagggcctatagatggtcatgacatagacgctcttgtttcagttttaaaaaatgcgagagaaataaattatgagggtcctattatgatccatataaaaactaaaaagggtaaaggttatagttttgcagaaaaatcagaagataaataccacggtgttacaaagtttaatgttaacacaggtgttcaagaaaaatctaaatctaatgcactttcttacactaaagtcttcgcaaatacattagttaagcacgcagaaaaagatagtaaaataattggaattactgctgcaatgccatcagggactgggatggatatttttggtaagaaatttccatcaagaatgtttgatgttggtattgcagagcaacacgcagttacatttgctgctggtttagcaacagagggatttaagccctat

SEQ ID NO: 232691 - DNA, 820 bp, Unknown
  Bacterial polypeptide expressing nucleotide sequence isolated from the Sargasso Sea
ttatttgcaaaaaaatttccaaatagaatgtttgatgttggtattgcggaacaacatgcagtgacattttctgctggtttagctacagaaggattcaagccttatgcagcaatttactctacctttttacaaagagcctatgatcaggttgtccacgatgttgcaattcaaagtttacctgtcagattcgctatagaccgtgcaggtcttgttggtgcggacggtcccacacatgccggatcttttgatataacctacttatcaaccttacctaattttgtagttatggctccaagcgatgagtcggaattagttaaaatgattaatacctcggtagacattaatgataaaccgtcagcttttagatatcctcgtggaactggtattgggatcaaacttcctgaaattaatgaaaaaattgaaattggaaaaggaagagttattaaagagggtaaagaaattgctttaattaattttggtgctcgtttgcaagagtgtcaaaaagctttaaacaatcttgaaaagaaaggtttaaatcttaccttaattgacgcaagattttgtaaaccattagatgaaaatttaatgtggaatacagcaaagaatcatgaagttgttatttcaattgaagaaggttcaattggaggttttggatctcatttaagtaaatttttatcagaaaaaggcttattagaaaaaattaaatttaggtcgatgacttttcctgacaagtttattgatcaagataaaccagatttaatgtatcagattgctggcttggatagcaaagctatcgaagaaaaagtttatgaggttttag

SEQ ID NO: 232692 - DNA, 846 bp, Unknown
  Bacterial polypeptide expressing nucleotide sequence isolated from the Sargasso Sea
gcaaatcaagacgaagatttagtagccatcacccctgctatgggagaaggatcaggcatgaatgaattctctaaggcttttcctgaaagatattatgatgtagccattgcagaacaacatagtgtaagttttgctgcaggtctcgcgtgtgaaggattaaagccggtagttgccatttatagtactttccttcaaagagcttatgatcaattaatacatgatgttgcccttcaaaatttggatgttctttttgctatagatagagctgggttagtaggattagatggagctactcaccaaggcgcttttgatctctcgtatctgcgctgtataccaaatattacgataatggcgccctcagacgaagacttagcgtggaagatgttaaatacaggttatgagatctctggccctgctgccgtaaggtaccctagaggtattggaagaggtattgagtatcatgaatcagatgagattattgaaatagggaaaagtaaaacgattctagaatccgaaacatcagaggtagttattttgtcttttggcagtctcttagattctgcaattaatgcaggaaaagaaataaaagctagggttgtagatatgagatttattaaacctattgatatcactctaattaatgaggtatctgataaatttaagttgatagtgactcttgaagataatgtaattgctggtggagccggttctgcagtaaacgaaaaactcttcgagttgaattcttcttctaaagttctaaatctaggtttaccagatggttttatcgagcacggtgatcaagaacaacaaaaaattatgaataatcttgatggtactggtgtaagg

SEQ ID NO: 232693 - DNA, 865 bp, Unknown
  Bacterial polypeptide expressing nucleotide sequence isolated from the Sargasso Sea
gttgtgactaaaaagggaaagggatatttgccagcagaatctgatccagtaaaatatcatgctgtaccaaaatttaataaagacgagggagtacttaaaggcaacaacaagaaatatatatactcagatgtttttgacgcttggctgtgtaaaattgctaagaacgacaaaagagtttttgctattacgccggcaatgagagaagggtcttctctagtgaacttttcaaaaagttttccagagaggtatattgatgttggaattgcagaacaacatgcagttactcttgcagcaggtcttgcatgcgaaaaccaaaaacctatagtttgtatttactctacatttcttcaaagggcttacgatcaattaatacatgatatagcattacaagatcttgatgtattatttgcagtggatagatcagggttttctggaaatgatggtgagactcatacaggcgtttttgacttaagcttttcccgatgtattccaaatttaattattatggccccaagctgcccagagatttgccaagatatgctacatacaggttatttgtaccctgggccagcgattgttagatatcctaaagaaagcgtcaaagagttaccaaataagactgaatttcaaaagattgaaataggaaaagcaaaagaaattattaaaggaaaaaacatagtgtttctatgctttggcacattacttgaaaaggcaaagagaattgctaaaaaatataattgcagttgtattgatatgaggtttgtaaagcctttagacacgcaattaattaaaaaatatgccagagataattctctgataatatctttagaggataacatgttagcaggtggtgcaggaagtgccg

SEQ ID NO: 232694 - DNA, 355 bp, Unknown
  Bacterial polypeptide expressing nucleotide sequence isolated from the Sargasso Sea
aatgaaacaaaagttacttgataaaattaattatccatcagatttgaggttattaaagaaaaatcaattagagcaagtatctaatgagttaagatcagaggttattgatgtcgtttccgaaacaggcggacatttaggagctggtcttggagtagtagaattaacagttgctttacattacgtttttaataccccaaaagataaattagtgtgggatgtaggtcatcagtgttatccacataaaataattaccggaagaaaagaaaaaattagaactcttcgtaaaggagatggtttatcgggtttcactaaaagatcagagagtgaatatgatccttttggagcagcacacagc

SEQ ID NO: 232695 - DNA, 877 bp, Unknown
  Bacterial polypeptide expressing nucleotide sequence isolated from the Sargasso Sea
catgcgcacacctttgcttgatcagattacgcatattgacgacttgcggcgcttttccgaaagtgacttaactcagcttgctgatgaattgcggattgcaactatttcggctgtatcaaaaactggagggcacttgggggctggtcttggggttgtggaattgactgtggccctccaccatgtattcgctacgccggaagaccggctgatttgggatgttggacatcaggcctacccgcataagatactgaccggtcggcgtgatcgtatttccagccttcggcaaaaagatggcttatctggctttaccaaacgcagcgagtcggaatttgatccttttggagcagggcattcatcaacctctatctcagcggctcttggcatggcggtggcaagtgaaatgcaaggcattttccgcaatgtgattgccgtgattggtgatggggcaatgagcgcgggcatggcctatgaggcgatgaacaatgcaggtgcaacgaatagccgtctgattgtaattctaaacgacaatgatatgtcgatttctcagccggttggcgcgatgagtgcctatctgtcgaggctgattacatcgcggccctatcactcaatccgtgatttaatgcgggaggttgctagccatttcccagttggcattgaacggactgcccgacgtgccaaagatgcagctcgtgatctgatgggcggaaattcagtttttagtcagcttggatttactcatatagggccaattgatggacacgatatggatcatttactaccggtgcttaaaaatctgcgcgactctagctcacatggtccggtgctagttcatgtggtaactgaaaaaggtcatggccatccattcgccagcccatca

SEQ ID NO: 232696 - DNA, 863 bp, Unknown
  Bacterial polypeptide expressing nucleotide sequence isolated from the Sargasso Sea
aatgaattataagcatttagataagattaattttccttccgatatgagaaaactatccatagttgatctggaaaacttatcaactgaacttagggataaaacaattgaaactgtctctaaaactggaggtcatttaggtgctggcttaggtgtggttgagctaacaatagcattgcactatgtttttaacactcctagagatagattgatttgggatgttggacaccagtcctatcctcataaaattttaactggtagaaagcataagattgaaactttaagacaaaaaaatggcttgtatggttttgtaaaaagaagtgaaagtgaatatgatccttttggaactgcgcatagttctacatccatttctgctggaatgggtatgaaagttgctaaggatttaaacaatgatgatgctaaaattatttgtgttattggtgacggagctcttagtgccggtatggcgtatgaagcactcaataatgtgggtgctagcaacaaacagataatagtaattttgaatgataacgaaatgtctattgacaggcccgtaggtgcaatgagtaattacttaacaaaattactttcttctaaacaatatacaaatgttagaactttgttaaaaaaaatatcgtctaaattatcaaattcagtatccaaaactttatacaaagctgaagaattttcaaaaagtttagttactggaggtacgttgtttgaggagctaggtttttattacttaggcccaattgatggacatgatattaaaacattggtacctgtattagaaaatattaaaaatttatcaattgaaaaacctatattccttcattgtgtaactaaaaaaggaaagggttatgagc

SEQ ID NO: 232697 - DNA, 812 bp, Unknown
  Bacterial polypeptide expressing nucleotide sequence isolated from the Sargasso Sea
aatgtctgaatacaaaatattaaataaagtaaattttccagctgatattaaaaatttatctaatcaagatttaaaaattttgtctaaagaactaagacaagaaatgatagaggcagtttctcaaactggtggtcatttaggggctggcttaggagtagtagaattaacagttgctcttcatcatatttttaatactcctaatgataaaattatttgggatgttggtcatcaatcttatccccataaaatattaactggcagaaaagatagaataaaaacattaagacaaggaaatggcctttcaggtttcacaaagagatctgaaagtgaatttgatccttttggtgcagctcatagctctacttcaatttcagctgctttaggaattgcaacagcaaataaactttcaaataaaaatgatgaagtcgtagcaattattggggatggagcaattagtgccggtatggcgtatgaagcaatgaataatgcaggtgatgcaaaaaccaaaatgattgtaatattaaatgataacaatatgtcaattgctaaaccagttggcgcaatgaaatcatatttggcaaaaattttttcaggaaaaatttattttaatttaagagaaactataaaattaataatctcatcattttctaagagatttagtaaaaaagcaggaaaagcagaagattttttaagatcaatggtaacaggtggcaccttatttagctccctgggattttactatatcggccctatagatggacatgacttagaagtgcttctgccaattctcaaaaatgccagagactcaaggc

SEQ ID NO: 232698 - DNA, 862 bp, Unknown
  Bacterial polypeptide expressing nucleotide sequence isolated from the Sargasso Sea
tatggcatatgaagcaatgaataatgcgggagcttcaaaaactaaaatgattgtcatattaaatgataacgatatgtctattgcaaaaccagtgggtgcaatgggaaaatatctagcaaaattattatctacaaaattatattttagttttagagaaactataaaacttattatctcagcattttcaaaaagatttagtgataaagccggaaaagcagaagattttttaagatctgctgtaactggtggaacattatttaattctatgggattttattatgttggtccaattgatggccatgatattgacgatcttatacctgttttgcaaaatgcaaaaaatttaaatcatgatggtcctatcatgattcacataaaaacaaaaaaaggaaagggttatgaatttgcagaaaggtctaatgataagtttcatggagtttctaaatttgatgtaaaaactggaatacaaaagaagtctaaatcgaaagcaccatcatatacaaaggtatttgctaatactttaattaaacatgcagaaaaagatagtaaaattgtaggaattacagctgctatgccatctggaacgggtatggatttatttggagatagatttccctcaagaatgtttgatgtagggatagcagaacagcatgcagttacttttgcagctggccttgcaactgagggatataaaccatatgcagcaatttattcaacttttttacaaagagcttatgatcaagttgtacatgatgtggcaattcaaagtttaccagtgaggtttgcgattgatagagctggtttagtaggagcagatggtccaacacatgctggatcattcgatataacttatttatctaca

SEQ ID NO: 232699 - DNA, 751 bp, Unknown
  Bacterial polypeptide expressing nucleotide sequence isolated from the Sargasso Sea
gaggaatcaggagataaatatcatggggtatcaaaatttgacgttttaactggtaaacaagcaaaaggtaaatcagcaggaccttcttatacaaaggtttttgcaaatactttaattaaacatgctcagaacgatacgaaaattgtagcaattaccggtgcaatgccatcgggaactggactagatctttttcaaaaaaagtttcctgacagaatgtttgatgtaggcatagccgaacaacacggagtaactttcgctgcaggattagctaccgaaggatacaaaccttatgctgctatttactcaacttttttacaaagggcttatgatcaggttgttcatgacgttgcaatacaatctttaccagttagatttgccatagatagagcaggtttagtcggctcagacggagcaactcatgctggatcatttgataccacatacctctctactctaccaaattttgttgtaatggcagcaagcgatgaggctgaattagtaaggatgataaatacatcagtaaacataaatgataggccatcagccttcagatatcctaggggaagtggttttggtgtggtattgcccgatatcaatgaaactattgaaattggtaaaggtagaattatttcatctggaaaacatttggcaattcttaattttggagcaaggatgaatgaatgcaaaaaagctgccgcaactttaaataagaaaggaatttttgtgacaatttttgacgcgagatttgcaa

SEQ ID NO: 232700 - DNA, 810 bp, Unknown
  Bacterial polypeptide expressing nucleotide sequence isolated from the Sargasso Sea
agggcttaccctcataaaattctgacaggtcgtcgcgaacaaatgcacagcatccgccagaaagatggcttacaccctttcccatggcgggaagaaagtgaatacgataccttaagtgtcggtcattccagtacctccatcagcgcagctttaggtatggcgattgccgctcgtgctgagcagaaaaaccgtaaggtggttgcagtcattggtgacggtgctattactgcaggcatggcctttgaagcgctgaaccatgccggtgaagtcaaacccgatatgctggtgatcttaaacgacaacgaaatgtcgatttctgagaatgttggcgctttaaatcgttatttcgcccgcattttatccggtaacttttacaccagcctgcgtgaaggcggtaaaaagattttaagtggtgtgccacctttacatcagctagccagccgcgctgaagaacattttaaaggtatggtcacccctggtactttttttgaagaactgggctttaactacataggccccattgatggccatgatgtcaaaagcctggttgacaccattcgtaatatgcgcaacctcaaaggcccgcaattactgcatgtagtgacgaaaaaaggcaaaggctatttaccggcagagcaagaccctattggttatcatgcagtcagtaaatttgacccaacagcacaatgccagcccgctaaaaaagcaggtaaagccaccttctccaatatttttggtcagtggatatgcgatatggctgcagtggatcctaagctgcaaggtattacaccagccatgcgcgaaggctca

SEQ ID NO: 232701 - DNA, 973 bp, Unknown
  Bacterial polypeptide expressing nucleotide sequence isolated from the Sargasso Sea
aacaatgcaggtacatcgaaaactaagatgatagtaattttaaatgataatgatatgtcaattgcagaacctgtaggagcaatgagaagttatttagcaaaattattaactggaaaaatatattttagtttaagagaaacatttaaattaatcatttctgctttttcaaaaaggttttcaaaaaaggcgggaaaagcagaggattttttgaggtcagcagtaactggtggaacactttttaattcattaggtttttactatgttggaccaatagatggacatgacatagatacacttgtatcagttttaaaaaatgcaaaagatactaattttgaaggtccaataatgatacatattaagaccgaaaaagggaaaggttatcaatttgcagaaaactcaaaagataaataccacggtgtttcaaaatttaatatacaaactggagtacaagagaaatcaagttctaaaatcccgtcatatactagtgtttttgcaaacacattaattaaacatgctgaaagagatagcaaaataattggtatcactgctgcaatgccatctggcactggaatggatttatttgcaaaaaaatttccaaacagaatgtttgatgttggtattgcagagcaacacgcagtgacattttctgctggtttagctacagaaggatataagccttacgcagcaatttactctacctttttacaaagagcttatgatcaagtagtacatgatgttgcaattcaaagtttacctgtcagatttgctatagatcgtgcaggtcttgttggtgcagatggtcctacacatgctggatcttttgatataacttacctatcaactttacctaattttgttgtcatggcaccaagcgacgagtcggaattagtgaaaatgatcaacacctcagttgacataaatgacaaaccttcagcttttagataccctcgtggaagtggtattggtattaaac

SEQ ID NO: 232702 - DNA, 722 bp, Unknown
  Bacterial polypeptide expressing nucleotide sequence isolated from the Sargasso Sea
tggcggtcatttaggtggcggacttggcgtcgttgaacttacaataattctgcatcatgtttataacactccttatgacaatctagtttgggatgtaggacatcaggcatacccccacaaaattctaactggaagaaaagaaaaaattatgtctattagaaagaaggatggtttagcgccctttccttcaagatcagaaagtgaatatgatacatttggggttggtcattcaagcacatctttaagtgcacttgttggaatggcggaggctacaaaaaattcaaatccagataaaaaacatgttgctgtaatcggtgatggagcaatgactgcaggcatggctttcgaagcactaagtcatataggacatttaaaaccgaatttgttagtaatattaaatgataatgatatgtctatatctgaaaatgttggcggtttatcaaattacttttcaagaatatgggcatcaaaaacttacaagggtattaaaaaaagtggttctagtttcttgaaacctttacctcaggcatatcatttagctagaaaagtagaaacgcaaatgaaagcaatggttgcgccaggaactatttttgaggaactaggtttaaattatattggtcctatagacggtcataatttaaaagagcttaaagatgtcatttcaaatttaaaagaatttgaaggtcctcaatttcttcacgtaataacaaaaaaaggtgcgg

SEQ ID NO: 232703 - DNA, 877 bp, Unknown
  Bacterial polypeptide expressing nucleotide sequence isolated from the Sargasso Sea
tattaaaacaaaaaaaggtaaaggatattcatttgcagaaaaagcagaagatcattatcatggagtatccaagtttgatgtgaaaacaggtaaacaagttaagaaccaaagcaaaattccctcttatactaaagttttttcggacactttgataaagcatgcaaaaaaagacagcaaaattgttgctgtaaccgcagcaatgcctgatggaactggtttagataattttcggaaagagttcccagatcgaacttttgatgtgggaattgctgaacaacatgcggtcacatttgcagcaggtttagcgaccgaaaattataaaccttatgcagcaatctattcaacatttcttcaaagagcttatgatcaggtagtccacgatgtagcaattcaaagtttgcctgtaagatttgcaatagatagagctggacttgtaggtgccgatggctctacacatgctggaagttttgatgtaacatatttatcaactcttccaaattttattgtgatggcaccgagtgatgaagctgaactagttaaaatgattaacacatctatcgacataaacgacaaaccctgtgcttttaggtatccaagaggaacaggattaggttcaattctaccctctataaacgaaaaaattgagatagggaaatcaaaaattatcaaagagggaaaaaaattagttatcctaaactttggagcaagactaaatgaaactttgaaagctgaagaatatttatcaaaaaaaggtataccaataacagttgttgacgctagatttgcaaaacctttagatgaaaaccttatttggcaattagctacaactcatgaggcgatcatgaccattgaggagggttcaattggtggttttgga

SEQ ID NO: 232704 - DNA, 928 bp, Unknown
  Bacterial polypeptide expressing nucleotide sequence isolated from the Sargasso Sea
tatgagcaaatatttggctaatcttttatctggaaagttatattttagtttaagagaaacaattaaaatgattatttccgcattttcaaaaagatttagtcaaaaagctggtaaagctgaggacatgttaagaaatatagtgacaggaggcacgttgtttagtgagcttggattttattatgttggtccaatcgatggccatgatgttgaaaatttggtacaaatatttgaaaacgttaagaaatcaaatcatcaaggaccagttctgatacatgtcagaactcaaaaaggaaaaggttataaacctgccgaggattcgggcgacaaatatcatggagtttcaaaatttaatatttctactggagaacaatccaaatctaaatcaaatactccttcatatacaaaggtttttgcagagactttaattaaacacgctgaacaagatactaaaatagttggaataactggagcaatgccatcaggcacaggattaaacttatttgaaaaaaaatttccagatagaacatttgatgttggaatagcagaacaacatgcagtaacttttgccgctggattagcgactgagggttataagccttatgcagcaatttactcaactttcttgcaaagagcttatgatcaagtagtacatgatgttgctttacaatcattaccagtaaggtttgctatagatagagcaggcctagttggcgctgacggaccaactcacgctgggtcgtttgatatcacttacttatctactttaccgaattttattgtgatggctgcaagtgacgaagccgaacttgtaaaaatgataaacacctcagttgatattaatgatagaccttcagcctttaggtatccgagaggaaatggtgtaggagtcgaattgccatccataaaagaaaaactagtaattggaaaa

SEQ ID NO: 232705 - DNA, 832 bp, Unknown
  Bacterial polypeptide expressing nucleotide sequence isolated from the Sargasso Sea
aatgtttgatgtgggcatagcagaacagcatgcagtaacttttgccgctggtttagctaccgaaggttataaaccctatgcagcaatttattctacttttttacaaagagcttatgatcaagttgttcatgatgttgctattcaaagtttgccagttagatttgcaattgatagagctggcttagttggggcggatggatcaacgcatgctggctcatttgatataacttatttatcaactttgcctaattttattgttatggccgcgagtgatgaagctgagttagtgaaaatgataaatacatcaattgatataaacaataaaccttgtgctataagatacccaagaggaacaggcattggacttgaacttccttcaattgatgaaaaaattgaaataggaaagggaagaattattcaagaaggaaaacaagtttgtattttgagtttaggaacaaggcttgaagaatgtaagttagcagctgaagaattaaagaataaaggaattttaactacaattattgatgcaagatttgctaaacctttagataaagagcttatattaaagtgtgccagagaacacgaagttatgattacaattgaagagggatctattggtggtttcggctctcatgtcaaaaatttattagctgaaaaaggtatatttgataaaggtctaaagtttagatcaatgacattgccagatacttttattgaacaggataatccaaaaaaaatgtatgatctggcaggcttaaattcatctcaaattacaaaaaaaattttagatgttttgtttacaaaagaatcgataaaaataattaaaaattaa

SEQ ID NO: 232706 - DNA, 738 bp, Unknown
  Bacterial polypeptide expressing nucleotide sequence isolated from the Sargasso Sea
tcctcacaaaattcttaccggaagaaaagaaaaaattatgtccataagaaagaaaggtggtttagcgccctttccttcaagatcagaaagtgaatatgacacatttggggttggacattcaagcacatctttaagtgcacttgttggcatggcggaggctacaaaaaattcaagtccagataaaaaacatgttgctgtaattggtgatggagcaatgactgcgggcatggctttcgaagcactgagtcacataggacatttaaaaccaaatttgttagtgatattgaatgataatgatatgtccatatctgagaacattggtggtttatcaaattacttttcgagaatatgggcatcaaaaacttacaaaggtattaaaaaaagtggttctagtttcttgaaacctttacctcaggcatatcatttagctagaaaagtagaaacgcaaatgaaagcaatggttgcaccaggaactatttttgaggaactaggattaaattatattggtccaatagacggtcataatttaaaagagcttaaagatgtcatttcaaatttaaaagaatttgaaggtcctcaatttcttcacgtaataacaaaaaaaggtgcgggtctagattcagcagaagctgacagaattggctttcatgcaatcggaaaaataaacgcaataaaagataaaaaaattacgcaaaaaaaatatcaagatatatttggcgaatggattatagatatggc

SEQ ID NO: 232707 - DNA, 851 bp, Unknown
  Bacterial polypeptide expressing nucleotide sequence isolated from the Sargasso Sea
tttaaaaaaccagcaacaccactggcttgataccgttgattttttttcagatattcggtctttctcaatcaatgaacttgaagttcttgctaatgaattacgagaatttttattatattcagttggtcaaagtggaggccatttaggtggtgggcttggagtaatagaacttacaatagttttgcatcacatctttaacactccatatgataatttagtatgggacgttggtcatcaagcataccctcataaaattctgacaggaagaaagaataaaattcagactataagaaaaaaagatgggctagctccttttccttctagaaaagaaagtgaatatgatacttttggagttgggcattcaagtacatcattaagtgccatgttggggatggccatagcatcaaaagaatctaaccctgataaaaaacatgtggcgataattggtgatggtgcaatgactgcgggcatggcatttgaagcgttaagccatactggccatttaaagccaaatgttctaataatcttaaatgataatgacatgtctatttctgagaatattggaggactctctaattatttttcaagaatatgggcatcaaaaatatataaaggaattaaaaaaagtggtgcgagctttttaaaacctttaccccaagcatttcatctcgcaagaaaagtagaaactcaaatgaaggctatggttgcacctggaacaatctttgaagaactaggcttaaactatattgggccgattgatgggcataatataaaagaattaataaatgttatatctaatttgaaagaatttgatggtcctcaatttttacatgttattacaaaaaaaggtg

SEQ ID NO: 232708 - DNA, 861 bp, Unknown
  Bacterial polypeptide expressing nucleotide sequence isolated from the Sargasso Sea
ttgaaaaaagatttccagacagaatgtttgacgttggtattgctgaacaacacgcagttacatttgctgccggattaactacagaaggttataagccttatgcagcaatatactcaacatttttacaaagagcttatgatcaagtagtacacgatgtatctttgcaatcgctaccggtaagatttgcaattgatagagcggggctcgttggagctgacggcccaacacacgcagggtcatttgatattacatatttaagcactttaccaaattttatagtaatggcagctagcgatgagtctgaacttgtaaaaatgattaatacctctgtatcaatcaatgataaaccttcagcttttagatatccaaggggaaacggaacaggagtaaaacttccaactttggaagaaaaattggaaattggaaaaggaagaattttatttgagggaaaaaaaattgcaattttgaactttggatcaagattagaagaatgtaaaatagctagagaaattttattaaaaaagggaataaatttaacaattgcagacgcaagattcgcaaaacctttagatgaaaaacttgtaattgatctggcaactaacaatgagttaatagtaacaatagaagagggctctatcggaggatttggatcacacgtaatgcatcttctatctgaaagaggaatttttgacaaaggattaaaatttagatcaatgatactaccagacatatttattgatcaggatacacctgagttaatgtataaagtagctggcttggatgcaaaaagcattgttgagaaaattgaaaacgcacttaaatcaaatgtagttatagcaaaaaataattttaaatcttaac

SEQ ID NO: 232709 - DNA, 562 bp, Unknown
  Bacterial polypeptide expressing nucleotide sequence isolated from the Sargasso Sea
atgagttataatcttttagataaaattaactttccttctgatttaagaaatttgtcattaatagaattggaaaatttatcaaatgagcttagaaataaaacaattgaaactgtttcaaaaactggtggacatctaggtgcaggtttaggtgttgtggaattaacaatagctatacactttgtatttaatacaccaagagatagattgatttgggatgttggtcatcaatcttatcctcataaaattttaactggtagaaaaaataaaattgaaactctaagacaaaaaaatggtttgtatggatttgtaaaaagaagtgaaagtgagtacgatccttttggtacagctcatagctccacatctatttctgcaggaatgggtatgaaaattgctaaggatttaaataaggatgatgctaaaattatatgtgttattggtgatggttcacttagtgcaggcatggcatacgaagcattgaataatgtgggtgctagcaacaaacaaataatagtaattttaaatgataatgaaatgtcaattgacagacctgtggcgcaatgag

SEQ ID NO: 232710 - DNA, 652 bp, Unknown
  Bacterial polypeptide expressing nucleotide sequence isolated from the Sargasso Sea
tatgactaagccacccgaaactccgcttcttgatcaggtgcctatgcctgacgagctccgccagctaaagcccgaacaactgcgacaactatccgacgaattgcgcgccgaaatgattgacgcggtgagcgtttcgggtggacatttgggctcgggtctgggcgtggtcgaactgacggtggcgatccattacgtcttcaacacgcccgatgatcgcctgatctgggatgtgggccaccagtgctatccgcacaagatcctgaccggccgtcgtgatcggattcgcaccctgcgccaggggggaggcctttctggcttcaccaagcgcagcgagagcgaatacgatccgtttggcgcggcgcactcgtcgacctcgatctcggccgcgcttggctttgcagtggcgaacaagcttaacaacaagccgggccgtggcattgcggtgatcggcgacggcgcgatgagcgctggcatggcctacgaggcgatgaacaacgccgcacaagccggcaatcgcctggtcgtgatcctcaacgataacgacatgtcgatcgcgccgccggtgggtggcctctcggcgtaccttgcgcgcatggtctccagctccgaatatctcggaattcgcagcctcgcttcgcgtgcggtcaagaaa

SEQ ID NO: 232711 - DNA, 421 bp, Unknown
  Bacterial polypeptide expressing nucleotide sequence isolated from the Sargasso Sea
atgaaaaaaaattatcaatttttaaataacatcaactttccatctgatttaaggaaagtttctgaaaaaaatttacaaaaagtagcagatgaggtgagggaggaaatgataagtgctgtttcagaaacaggaggtcatcttggcgctggtttgggagtagttgaattgacagtcgcacttcattacgtttttgacaccccaaatgataaattaatatgggatgttggccatcaatcttacccacataaaattttaactggtagaaaagacaaaattagaactttacgacagggtgatggtttatcaggttttacaaaaagatctgaaagtgagtatgacccatttggagcagcccatagttcaacatctatttcatctgcattaggaattgcagaggcaaataaattagaaaataagtctc

SEQ ID NO: 232712 - DNA, 733 bp, Unknown
  Bacterial polypeptide expressing nucleotide sequence isolated from the Sargasso Sea
aatgccttctggaactggattaaatttttttggaaaaaagtttcctgatcgaacctttgatgttggtatagctgaacaacatgctgtaacatttgctgcaggattagcaaccgagggatataagccttatgcagctatttactccacttttcttcaaagggcctatgatcaagttgtacatgatgttgcgttgcaatcactacctgtgagatttgcaattgatagagcgggattagttggagcagacgggccaactcacgcagggtcttttgatataacttatttatcaactttaccaaatttcgttgttatggctgcaagtgatgaagcagaacttgtaaaaatgattaatacttcagtagaaataaatgataggccatctgcttttagatatcctagaggaaatggtgtaggtgttcaattaccgtcaattaaagaagttttggaaattggaaaagcaaaaataataaaggaaggaaaaaaagtagctttattaaattttggaacaaggttagaggaatgtaaaaaagcctcagaaaaactctcatcaaaaggtatcaattgtacaattatagatgctagatttgcaaaacccttagatgaaaaattaattatggaggtagcaactaatcacgaagtgttgataacaattgaggaaggctctataggaggcttcgggtctcatgtgatgcaactattgtcagatagaggtatttttgacaccggactaaag

SEQ ID NO: 232713 - DNA, 490 bp, Unknown
  Bacterial polypeptide expressing nucleotide sequence isolated from the Sargasso Sea
atgtttttgacacacctaagggacaaattgatatgggatgttggtcatcaatcataccctcataaaattttaacaggaagaaaagataaaatacgaactttacgacaaggaagtggattatctggttttacaaagcgatcggaaagtgaatttgatccttttggtgcagctcatagttccacttctatttctgctggacttggtattgcgacagcaaataaattatcaaataaatcagatcaggttatagcagttattggtgacggtgccatgagcgcaggaatggcatatgaagctatgaataatgctggagactcaaaaacaaaaatgatcgtaattttgaatgacaatgatatgtcaattgcaaaaccagttggcgcaatgaaatcttatcttgctaaaattttttcaggtaagatttattttagtttcagagaaacagttaaaatgattatttcatcattttcaaaaagatttagcaaaaagagct

SEQ ID NO: 232714 - DNA, 871 bp, Unknown
  Bacterial polypeptide expressing nucleotide sequence isolated from the Sargasso Sea
gcagaagaatttataagggatatagtttcaggaggaacactttttaatgaacttggattctattatgttggtccaatagatggacataatttagatagcttaataccagtattaaataatgttaaaaacagtaagtatgaaggaccaattttaattcatgctgtaacgaaaaaaggtaagggttataaaccggcagaggattctcgagataaatatcatggggtaagtaaatttaatgttgtaactggagaacaatcaaagccaaaatctactacagaatcttatacaaaagtgtttgccaatactttaattaaacatgcagaaaaagatacaaagattataggtataactggagctatgccatctggtactggaatggatatttttggaaaaaaatttcctgacagaatgtttgatgttggaatagcagaacaacatgctgttacatttgcagctggtttagcaatcgagggttataaaccttttgctgctatttattctacctttcttcaaagagcttatgatcaggttgttcatgatgttgctgtacaaaatattcctgttcgatttgcaatagatagagccggcttagtaggagctgatggacccactcatgcaggatcttttgatattacttacttatcaactttaccaaattttgtagtaatggctgcaagtgatgaagctgaacttgttagaatggtgaatactgcagttaaaattaacgatagaccttctgcctttagataccctagaggaaatggtttaggaataaagcttcctgatattaatgaaattttagaattaggaagaggtaaaattgttaaagaaggaaacaaagttgccatattaagcttcggcgcaagacttc

SEQ ID NO: 232715 - DNA, 773 bp, Unknown
  Bacterial polypeptide expressing nucleotide sequence isolated from the Sargasso Sea
ttcaacttttttacaaagagcttatgatcaagttgttcatgatgtagcaattcaaaacctacctgttagatttgcaatagatagagctggacttgtgggagcagatggaccaactcacgcgggatcatttgatattacttatttatctacactaccaaattttgttgttatggcagcgagcgatgaagctgagcttgtaagaatgattaatacctctgttgatataaatagtaacccatctgctttaagatatcctagaggaaatggtgtaggagttgaactgccaggtattgatgaaaaaattgaaataggaaagggaagaataatcttggagggaaaaaaagttgcaataattaattttggtgcaagattaaatgaatgtttgctggccaatgaaatattaaataaaaaaggtattagaattactttggtcgatgcaagatttgcaaaaccactagatgaaaatttaatttgggaaatatcaactaatcatgaaacattaattacaattgaagaaggttcattgggtggatttggttcacatgttggtcaatttttatcagaaaaaaaattattagataataatttaaagtttagatcaatgattcttccagataagtttatagatcacaataagccagaaattatgtacaaagaagctggccttgatgctgaggcaatagtttcaaaagttaaagatactttgaactcaaaaattattgtgcaaaaaaaaaaaaagaatttatttaccacactgagctttaatcattaaa

SEQ ID NO: 232716 - DNA, 803 bp, Unknown
  Bacterial polypeptide expressing nucleotide sequence isolated from the Sargasso Sea
aatgaaaaaaaattatcaatatttggataaagtaaattttccctctgatataaaaaatttaaaacgttcagaattaaaaatattaacagaagaagtccgtcaggaattaatagatacagtttctgaaacaggaggacacctgggagcaggactgggagttatagaattaacaattgcattgcattatgtttttgatactccaaacgataaacttatttgggatgtgggacatcaatcctatcctcataaaatattaactggaagaaaagaaaaaattaaaactttgaggcaaggtggtggattatcaggttttacaaaaagatcagagagtgaatatgatccttttggtgcagcgcacagctctacatcgatatcatcagcgttaggtatttctgttgcaaataaactttcaaaaaaatctgatcaagttgtagcagtaataggagatggtgcaataagtgcaggtatggcatatgaagcaatgaataatgcaggtgtatcaaaaactaaattaatagttattttaaatgataacgacatgtcgattgcaaaacctgttggagcaatgagtacttacctggctaaattattgtctacaaaattatattttagtttaagagaaactgtaaaattagtaatatctgcattttcaaaaagatttagttataaagctggcaaagcagaagattttttaagatctgcagtaacaggaggaactttatttaattctctaggtttttattatgtgggaccaatagatggtcatgatattgacgatttaattccagttttacaaaatgcta

SEQ ID NO: 232717 - DNA, 880 bp, Unknown
  Bacterial polypeptide expressing nucleotide sequence isolated from the Sargasso Sea
aggcgcagaaaaatcaaaattaatagtaatattgaatgataatgacatgtctattgcgcctcctgctggagctatgagcgcttatttagcaaaattaatttctggtggaacatatctaggattaagaaattttgctaagcaggttatagaaaaacttcctaaatcattagaaaagggtgcaaaaaaagctgaagaaataacgagattgattgcaggtaatggaactctatttgaagcattgggtttttattatgttggtcctcttgatgggcacaattttgatcacttactccctgttattcgtaatgttaaaaatgctaataatggtccagtaattattcatgtagttactcaaaaaggaaaaggctataaacctgcggaagattcagatgaaaaatttcatggtgttactaaattcaatatagcaactggagagcaagaaaaaccaaagaaaaaaaatatttcatttactaaggtctattccaattctttaattgaatttgccaaaaacgataaagatattgtagctatcacagcagcaatgccatcagggacaggacttgataaatttaaagagatttatcctaagaggttttttgatgtaggaatagctgaacaacatgcagtgacattttctgcaggtctcgcaattgaaggactcaaaccttttactacaatttattcaacatttctccaacgggcatatgaccaaataatacatgatatagccattcagaatctacctgtaaaatttgcaatagatagagcaggtttagttggtgcagatggaccaactcatgctggaagttttgatttggcatatttatcaattttgccaaattttgtagttatggctgcttccaatgaaatagaattagca

SEQ ID NO: 232718 - DNA, 781 bp, Unknown
  Bacterial polypeptide expressing nucleotide sequence isolated from the Sargasso Sea
aatgaaaaaaaaattgttagacgaaataaactatccttcagatttaaaaaaatttaaaaaaacagatcttaaacaaattgcagtagaattaagagaggaattaatagatgcagtctccgtaacaggcggacatcttggagctggcttaggtgttgttgagttaacaattgcgctacattatgtatttgacactcccaaagatagattggtatgggatgttggtcatcaagcttatccacataaaattatcacaggcagaaaacaaaaaattagaactttaagaaagggaggaggactttcgggttttacaaaaagatctgaaagtgaatatgatccttttggagcagcacacagctcaacttcaatttctgctactttaggcatggctgttgcaaaaagtttatcaaaaaattctaacaaagtagtagctgttattggtgacggagctatgagtgctggtatggcttatgaagcaatgaataatgcaggtgcaatgaaatcaaatttaattgttattttaaatgataatgacatgtcaattgcaaggccagtaggcgctatgagttcatatttggctagattactttcaggtaaaacttattttagctttagagaaacagtaaaattaattacttcagcattttctaaaagatttaaagataaagcaggaaaggctgaggagtttataagagatatagtatctggaggtacactttttaatgaattaggttttcactatattggaccaatcgatggtcatgattttgatgttttggttcca

SEQ ID NO: 232719 - DNA, 812 bp, Unknown
  Bacterial polypeptide expressing nucleotide sequence isolated from the Sargasso Sea
tccaccagtaggcgcaatgagcaaatacttagctagacttttatcaggtaaaatttattttagtttaagagaaacaataaaattaatactttcagctttttcaagaagattttctaggaccgcaggcaaagcagaagatatgttacgaagcatagtgactggaggaacacttttcagtcaactaggattttattatataggaccaatcgatggtcacgatgtaaataatttagtaactatcttagaaaatgcaaaaaactcaaagcatgaaggtccaatcttgatacatgcaattacacaaaaaggaaaaggttataaacccgcagagcaatctggagataaatatcatggcgtttcaaaatttaatgttttgaccggagaacaatctaaaggaaaatcaaaaacgccttcatatactaaggtttttgcaaatactcttgtaaaacatgcggaaaacgatacaaaaattgttggaattactggggcaatgccttcaggaactggactagatttatttcaaaaaaaatttccagaaagaatgtttgatgttggcattgcagagcagcatggtgtaacttttgcagctggtttagcaactgaaggatacaaaccattcgctgcaatttactccacttttttgcaaagagcatacgatcaagttgttcatgatgttgcgatacagtctttacccgttaggtttgctattgatagagcagggctagttggagcagatggcccaacccatgctggatcttttgatataacttatttgtcaacattaccaaattttgtagttatggcagcgaagtgat

SEQ ID NO: 232720 - DNA, 749 bp, Unknown
  Bacterial polypeptide expressing nucleotide sequence isolated from the Sargasso Sea
gcagttacttttgcagctggtttagcaactgaaggatataaaccatacgctgcaatttattcaactttcttacaaagagcttatgatcaggttgtacacgatgttgctattcaatctttaccagtaagatttgctatagatagagctggtttagttggtgcagatggaccaacacatgctggttcatttgatataacttatttagcaacattaccaaattttgtagtcatggctgctagcgatgagtcggaattagttaagatgatcaatacttctgttcatattaacgatcgtccttcagcgtttagatatccgagaggaaacggaacaggagttactttgccatcaattaatgaacttttagagatcggaaaaggaagagtggttctggagggaaaaaaagctgcgattttaaattttggaactagattagaggagtgtagaaaagcttcagacatattaattaaaaaaggaataaatattacaattattgacgctaggtttgctaaaccacttgatgaaaaattaatcatggaagcagcaaataaccatgaagcacttattacgattgaagaaggttcagttggtggatttggttctcacgtaatgcagtttttatcagacagaggagtatttgataaagggttaaaatttagatctatgattttacctgatatttttattgatcaagatactccagagaaaatgtatgaaaaagcaggattggacagcctgtcaattgctagtaa

SEQ ID NO: 232721 - DNA, 970 bp, Unknown
  Bacterial polypeptide expressing nucleotide sequence isolated from the Sargasso Sea
gcattaggtattgttacagcaaataaactttcaaataaatctgacgatgtagtggcagtaattggagatggagcattaagtgcgggaatggcatatgaagctatgaataatgcaggttcctctaaaactaaaatgatagttgttttaaatgataatgatatgtcgatagcaaaacccgttggagctttaagaacttatcttgcaaaaatattatctggtaaaatttattttagtttaagagaaacgataaaattaataatttcttcattctcaaaaagatttatgaaaaaagcaggaaaagctgaagattttttaagatcagcagttacaggaggcactttatttaattctctaggtttttattatgtaggcccaatagacggccatgatattgatgtattaacttcagttttagaaaatgcaaaaaaaatgaattatgatcgacctatacttattcatgttaaaactgaaaaagggaaaggatacaaatttgctgagaaatctttagataaatatcatggagtttcaaaatttaatgttctgactggacaacaagaaaagaccaataatatagctccttcctatacaaaagtttttgctaattcattaattaaacacgctcaaaatgatagtaaaatagttggaatcaccgcagcaatgccaagcgggactggaatggatctttttgcagaaaagtttccagataggatgtatgacgttggaatcgcagaacaacatgctgtaacattttctggcggtttagccacccagggttttaaaccttttgcggcgatttattcaacttttttacaaagagcttatgaccaagtagttcatgatattgcaatacagtcgcttccagtaaggtttgcaattgatagagccggtttagttggagcagatggaccaacacatgcgggttcatttgacataacttacttatcaactctgccaaactttgttgttatgg

SEQ ID NO: 232722 - DNA, 613 bp, Unknown
  Bacterial polypeptide expressing nucleotide sequence isolated from the Sargasso Sea
atgaaaatctttgaatctataccaactgaagaacctctttctaaatttctgggtggtattaattctcctgaagatttaagaaagctagataagacggaaatacctttaattgcagatgaattaagggaattcttactatacacagtaggaaagacaggtggtcactttggtgcaggtctcggcgttatagagttaacattagccctccattatgcatttgaaactccacatgaccgattagtctgggacgttgggcatcaaacttatccacataaaatcctaacaggaaggaagaatgacatggaaagcatgaggcagactaatggtcttgcccctttcccagtgagaactgaaagcgaatacgatacttttggtgtcggtcattcaagcacatcaatcagcgctgctttagggatgatcactggagcagattcaaaaaacattaatagacatgtaactgctgtgattggagacggagctatgacagcaggaatggcttatgaggctttagctcatgcaggctctttagataaaaacctcctagtaatcttaaatgataatcaaatgtctatttctgagaatataggaggattaagaaactatcttgcaaggg

SEQ ID NO: 232723 - DNA, 622 bp, Unknown
  Bacterial polypeptide expressing nucleotide sequence isolated from the Sargasso Sea
gatgttgccatacaaagtcttccagtaagatttgctattgatagagcgggactggtaggtgccgatggatctacgcacgcaggttcttttgatataacctatttatctacacttccaaattttattgttatggcagcaagcaatgaagaagagcttgttaaaatgataaatacatcaatagatataaatgatagaccaagtgcatttaggtatccaagaggaaatggactcggtatgaaattgcctgatataactgagaaaattgaaattggaaaaggaaaaattattcaggaaggtaagaaggttgcaattttaaattttggaacaaggctaaaagagtgtttgattgcaaatgaaaatttaaagaaaaaaggaataaatatctcaatagttgatgcaagattttccaaaccccttgatgaaaatttaatttggcaacttgcaacaaatcatgaggtattaattacaatcgaggaaggatctattggaggttttggatctcatgtaaatcattttttaaatgaaaaaaatcttttagaaggaaaagtaaaattaagatcaatgattttacctgataaatttattgatcaaaataaacctgaggaaatgtacaaagaagcag

SEQ ID NO: 232724 - DNA, 682 bp, Unknown
  Bacterial polypeptide expressing nucleotide sequence isolated from the Sargasso Sea
ataacaggcagaagagataagattaaaactcttagaaagggtggcggattgtctgggttcacaaaaagatctgaaagcgaatatgatccatttggagcagcgcatagttctacttcaatttcatcaactttgggtatggcggtagcaaaaaatttatcaaataacaataataatgtaatcgcagttattggtgatggagcaatgagcgctggtatggcttacgaagcaatgaataatgctggagccttaaaatcaaaattaattgtagttttaaatgataacgacatgtccatagccaaaccagtgggtgcaatgagcaaatatcttgcaaaacttttgtccggaaaattatattttagtttcagagaaacagtaaaaatggtgatttctgctttttctaaaagatttagtcaaaaagctggaaaagcagaagacatattgagaggattagtaactggtggtactttattttctgaactaggcttttattatatcggtccagttgacggacatgacgttgataatttagtccaaatttttgagaacgtaaaaaattctactcaccaaggaccaatattaatacacataagaacacaaaaagggaaaggatataaaccagctgaagaatctggagataaataccatggagtttcaaaatttaatattgctacaggtgaacaaa

SEQ ID NO: 232725 - DNA, 869 bp, Unknown
  Bacterial polypeptide expressing nucleotide sequence isolated from the Sargasso Sea
cggtcatttaggtgcaagtcttggagttgttgagctcactgtggcgctccattatatttttaatacacctaatgataaattgatatgggatgtaggtcaccaatgctatcctcataaaattataactggtcggaaagataagatcagaacacttagacaaggtggtggtctttcaggttttacaaaaagacttgagagtgaatacgatccatttggtgctgcacatagctcaacttcaatttcttctgctttgggaattgctgaagccaataaactttcaaataaattagataatgtaatagctgttataggagatggtgctatcagcgcaggtatggcttatgaagctatgaataatgcaggtgcttcaaaaactaaaatgattgttattttaaatgataacgatatgtcaattgctagacctgttggagcaatggggacatatcttgctaaaattttttcaggcaaaatttattttagcttaagagaaactattaaacttataacttcagcattttcaaaaagatttagtgcaaaagccggtaaagcagaggatttattaaggtctgctgtgacaggtggaactttgtttaattctctaggattttattatattggtccaatagatggacatgatttgacctctttaattccaattttaaaaaatgcaagagactcaaaacatgaaggaccaattttaattcatatcaagactaaaaaaggcaaaggttattcatttgcagaaaaagcaaaagatcattaccatggagtatcaaaatttaatgttaagactggtgaacaatccaaaagttcaagtaaatttccatcatatactaaggtatttgctaacactttagttgagcatgcca

SEQ ID NO: 232726 - DNA, 442 bp, Unknown
  Bacterial polypeptide expressing nucleotide sequence isolated from the Sargasso Sea
aatgaagatttttaaaaaaatccctaataaaaaaccttcaacacctctcttggataagattgagtttccaaaagatataaaagaattctcaaattctgaattagagatgcttgcgaatgagctcagagagtttttgttatattctgttggtcaaagcggaggccatcttggagcaggcctaggtgtaatagagttgacagttgttcttcattatctttttgatactcctaatgataatcttgtctgggacgtaggacatcaagcgtaccctcataaaattctcactggcagaaaaaataaaattcaaacaatcagaaagaaaaatggactagctccttttccaaacattaatgaaagtgcgtttgatgcatttggagttggtcattctagcacttcaataagtgctgcacttggggatgtctattgcaaatcaagcggataa

SEQ ID NO: 232727 - DNA, 864 bp, Unknown
  Bacterial polypeptide expressing nucleotide sequence isolated from the Sargasso Sea
acattatgtatttaatactccaagagatagattgatatgggatgttggccatcaatcttatcctcataaaattttaacaggaagaaaaaataaaattgaaacattaagacaaaaagatggattatatggatttgttaaaagaagtgaaagtgaatatgatccatttggaactgcccatagttcaacttcaatatctgcaggtatgggaatgaaaatagctaaagatttaaataaagataatgctaatataatatgtgtaattggtgacggtgctttaagtgctggaatggcttatgaagctcttaacaacgttggtgctaccaataaacagatgatagttattttaaatgataacaagatgtcaattgatagaccagttggtgcaatgagcaattatctaaccaagcttctgtcttcaaaacaatacactagcgttagaagtttattaaaaaaaatatcagcaaaattaccaaaaacagtttctcaaactctttataaagctgaagagtactctaaaggtttagttacaggaggtactttatttgaagaactaggtttttattatttaggtcccattgatggtcatgatattaacactttggttccaatattagaaaatataaaaaatttatcagttggtaaaccaatttttcttcattgtattactaaaaaagggaaaggatataagcctgctgaaaaagctaatgataagtttcatggtgttaacaaatttgatgttaaaacaggtcaatctttaaaatcatcaaataaaaaaacatactctactgtgtttggtgaaactttatcaaaagctgctgaaaatgatgaaaaaataatagggattactgccgcaatgatgagtgg

SEQ ID NO: 232728 - DNA, 1006 bp, Unknown
  Bacterial polypeptide expressing nucleotide sequence isolated from the Sargasso Sea
aaccttaagaaagggaaatggtctatcagggttcacaaaaagaagtgaaagtgaatacgatccttttggagcagctcatagttctacttctatttcttcagctttaggaatagccgtggcaaataaactttcaaataaagctgacaatgtaattgcagtaattggagatggagcaatgagtgcaggtatggcttatgaagctatgaataacgctggcgcaagtaaaacaaaattaatagtaattctaaacgacaacgatatgtcaattgcgaaacctgtgggagcaatgagatcttatcttgcaaagatattttcaggcaaaatatattttagcttaagagatactgtaaaattaattatatctgcattttcaaaaagatttagtaaaaaagctgggcaagcagaagattttttaagatccgcggttactggaggtacactttttaattcactaggtttttactatgttggccccattgatggccataatttggatgatctgcttccagttttaaaatatgcacgggattctaattatgatggtccaataatgatacatataaaaacaaaaaaaggaaaaggatacgaatttgcagagaaatcaaatgataaatttcatggagtttcaaaatttaatattaagactggagaacaagaaaaatcaaaaactaaaattccttcttatactaaagtgtttgcgaacacgttaattaaacatgctgaaaaagatagtaagataattggaattacagctgcgatgccgtcaggaactggcatggatatatttggacaaaagtttcctaaaagaatgttcgatgtaggtatagcggaacaacatgctgttacattcgccgctggaatggctacagaaggatttaagccgtatgctgccatatattcaactttttttacaagggcctatgatccagtcgttcatgatgtttgcgatacaagtttaccctgtagatttgctattgatagagcaggtctagtgggtgcagatggt

SEQ ID NO: 232729 - DNA, 562 bp, Unknown
  Bacterial polypeptide expressing nucleotide sequence isolated from the Sargasso Sea
atgaaaatatttagtgaaatacctagtgaagttccttcaactaagctacttgataaaattaattatcctagagatctaaaagagctttcgcctcctgatctaaagattttagctgatgaattgagagaatttttgctctactcagttggtaaaagtggcgggcatcttggagcaggtcttggtgttgttgagttaacaattgttttacattacctttatgattctccatcagacaacattgtctgggatgttggtcaccaagcttatccccataagatattaactggtcgtaagaatcaaataggctcaataagatcaaaagatggcctagctccctttccatcaagaaatgaaagtgattatgatgtttttggtgctggacattccagtacgtctgtaagttcagcagttggtatggctattgctaacaaattaaatgagggagagaaaaaaacagtagctgttattggagacggtgcaatgactgcaggaatggctttcgaagcaatgcaacatgctggaggcataaagccagatatgctgataattctaaatgataatg

SEQ ID NO: 232730 - DNA, 889 bp, Unknown
  Bacterial polypeptide expressing nucleotide sequence isolated from the Sargasso Sea
ttcgggacgggtttaaatttgtttgaaaaaaaattccctgataggacttttgatgttggaatagctgaacaacacgcagttacttttgctgctggcctagcaacagagggatacaagccatatgcagcaatttattcaacttttcttcaaagagcttatgatcaagttgttcatgatgttgcaattcagtcattacctgtgagatttgcgatagatagagcaggtctagtaggtgcagacggaccaacgcacgctggttcatttgacattacatatttatctactttacctaattttgttgttatggctgctagtgacgagtctgaattagtaaaaatgattaatacttcagtaaacataaacgatcgtccatcagcgtttaggtatccaagaggtaacggtgtcggggttacgatgccttcaattaatgaatttttggaaattgggaaaggtagaattatcaaagaaggaaagaaagttgctattttaaattttggaacaagactagaagaatgtaagaaagcctcagagatattgtctaaaaagggagaagacattacaataatagacgcaagatttgtcaaaccattagataaaaaattaattatggaagttgcaaataatcatgaagttttaattacaatagaagaaggctcaataggaggctttggctctcatgtaatgcaatttctttccgagaggggtgcgtttgataatgggttgaaatttagatcaatgatcctaccggatgtatttattgatcaagacactccagaaaaaatgtatgagaaagcaggactagacagtttatcaatcgcaaataagatacaagaaacattaaattctaatattttattagctaagaataaaaataagatatcaaattaac

SEQ ID NO: 232731 - DNA, 827 bp, Unknown
  Bacterial polypeptide expressing nucleotide sequence isolated from the Sargasso Sea
aatagctaaagatattaataaagataatgcaaatgtaatttgtgttgtaggtgatggagccttaagtgcgggcttggcatatgagggattaaataacgctggagcattaaaaaaaagattaattgtaattttgaatgataataagatgtctattgataaacccgttggagctatgagcacttatttaactagacttttatcttcaaagtcttattcaagtataagaaatcttgtcaaaaaatttactaaaaatttaccattaaatctgtcaaccactctttaccgaactgaagagtattcaaaaggaatgatttcagggggtactctttttgaggaattgggattttactacctgggcccaatagatgggcacagtataaatgatctagtgaaagttttagaaaatgttagagataataaatttaataaaccagttttcctgcactgcataacaaaaaaaggtaaaggttattggcctgctgaaaaatctgatgataaatttcatggtgttgaaaaatttaatattaatactggaatttctctaaaaaaaacaaatcaaagatcgtattcacaagtctttggtgagactttatctgaactagctgaaaatgatgagaaaattatagcaattacagcagcaatgatgtcaggaactggattaaaaatttttaagaataaatatgaaaatagattctttgatgttggtatagccgaacagcatgccgtaacaatggcagcaggtatggcaactgaaggctttaaaccttatgtagccatatattcaacttttctccaaagagcatatgaccaaatgttcatgatgtagc

SEQ ID NO: 232732 - DNA, 817 bp, Unknown
  Bacterial polypeptide expressing nucleotide sequence isolated from the Sargasso Sea
actcctaatgataaattaatttgggatgtaggtcatcaatgttatcctcataaaattttaactggtcgaaaagataaaattagaaccttaagacaaggtggcggtctttctggttttacaaaaagattagaaagtgaatatgatccatttggtgcagctcatagttctacctcaatatcttctgccctaggcattgctgaagcaaacaagctatcaaataaatcagataatgtagtagcagtaataggtgatggagctatcagcgcaggtatggcttatgaagcaatgaataatgctggtgcatctaaaactaaaatgattgttatattaaatgataacgatatgtctatcgcaagacctgttggagcaatggggacttatttggctaaaattttttctggtaagatttattttagtttgagagaaacaattaaactaattacatccgcattttcaaaaagatttagtgcaaaagctggtaaagctgaagatttatttagatcagctgtaacaggaggaacattgttcagttctcttggattttattatgttggtccaatagatggacatgatttaaattctttaattccaattttaaagaatgcaagagattcaattcatcaaggtccaattttaattcatattaaaacaaaaaaaggcaaaggatactcatttgctgaagaggcaaaagataattaccatggagtatcgaagtttaatgtaaagactggcgaacagttaaaaagtacaagcaatataccttcctacacaaaggtatttgctaacactttaattcaacacgctaaaaaagatagca

SEQ ID NO: 232733 - DNA, 826 bp, Unknown
  Bacterial polypeptide expressing nucleotide sequence isolated from the Sargasso Sea
aatgataatgatatgtcaatagcccctcccgttggagcaatgagcaaatatttagcaagacttttatcaggaaaaatttattttagtttaagagaaacaatcaaattaatactttctgctttttctaaaaggttttcaaaaagtgctggcaaagcagaagatatgtttagaagcatggtaacaggcggaactctttttaatcagttgggattttattacataggcccaatagatggtcatgatgtaaataatttagttactattttagaaaatgcaaaaaactcaagacacgaaggtccaatcttaatccatgcaattacaaaaaaaggaaaaggatataaaccggcagaagagtcaggagacaagtaccacggagtatcaaaatttaatgttttaacaggagaacaatctaaaggaaaatcaaaagcgccttcatatactaaagtttttgcaaatacacttattaaacatgctgaaaatgatacgaaaattgtagctattactggagctatgccttcaggaacaggattggatttatttcagaaaaaatttccagaaagaatgtttgatgtaggtatagcagaacaacatggtgtaacttttgcagctggtttagctactgaaggatacaaaccatttgctgcaatttattctacttttttacagagagcatatgatcaagtagtccacgacgttgcgatacagtcactacctgtaaggtttgctattgatagagctggactggtaggtgctgatggcccaactcatgccggatcttttgatgttacttatctatcaactttacccaatttcatagtcatggcag

SEQ ID NO: 232734 - DNA, 740 bp, Unknown
  Bacterial polypeptide expressing nucleotide sequence isolated from the Sargasso Sea
agaaaaagtgaagccttttgtggcaatatactctacctttttgcaaagggcttacgatcaaataatacatgatattgccattcagtctttacccgttagatttttaatagatagatcaggttttgttggcgctgatggtgctactcatgcaggatctttcgatttgagttatttatgttgcttaccaaatttcatagttatggctccctcaagtggggaagagttaaaaaatatgattaaattatctttaacaattaatggcaaaccctctgcgattagatatccaagaaatttagctaatgattacgatgaaaaagcaaagtttagtaaaattaaattgggtgaagcaaaactagtaaaaaaaggaaaaagaattgcactgcttagtttaggtactcggcttcaaaaaatcttggaggtttctcaattaataaaaaaaaatcataaatttcagtgtagtgtgttggatatgagatttgctaaaccaatagataggaaatccatcaattctctcataaaaaatcacgaaatttttgtaactatagaggagaatgcaataggtggattttcaagtcaagtaaacaactatctgttaaatgagttatctaaaacaccaaaaattttaaatttttttatgaaagataaatttattgatcaatctgatattgaagatcaatacactttatcaggtatttcttcaaaaaaaatatatgaaaaacttaataagtttttaaagtgat

SEQ ID NO: 232735 - DNA, 679 bp, Unknown
  Bacterial polypeptide expressing nucleotide sequence isolated from the Sargasso Sea
accgctcttcattatgtttttaatacccctgtggataaaattgtttgggatgtaggtcaccaagcttatccccacaaattaattacaggaagaaaggaagccatggataccattaggcaaactaatggcttagcaccctttccttcaagattagaaagcgaatacgacacttacggagtaggacattcaagcacttcaattagcgcagcgttaggcatggcctcagcagcaaaattaaaaggagaagacaaagaaattatcgctgtaataggtgatggagccatgactgcaggtatggcttatgaagcactatctcatgccggttctattgatgagaacattcttgttgtactaaatgataatcagatgtctatctctgagaatattggaggacttaaaaattatttagcaaaaatctgggcaagtcctctttacaaccaaataagagaaggaggtaaaactgttctaagatttattccagctgcaagcaggatagctagaaaagcagagatccaagctaaaggactgcttgccccaggaaccttatttgaagaacttggactttcttacattggaccagttaatggtcacgatactgtgggaatggtaaaaatattaaatgatctaaagagcatggaaggcccaagacttcttcatgtcatcacacaaaaagggaaag

SEQ ID NO: 232736 - DNA, 787 bp, Unknown
  Bacterial polypeptide expressing nucleotide sequence isolated from the Sargasso Sea
tcagaattaaagtctttagctggcgaagtaagagaagagatgattgatgcagtttccgaaaccggaggtcacttaggtgctggcctaggagtggtagagttatcagtggctcttcattatatatttaatactccaaacgataaattaatatgggatgttggacatcaaacttatcctcataaaatattaacaggaagaaaagatagaattagaacattgagaaaaggcaaaggtttgtcaggttttacaaaaagaagtgaaagtgaatatgatccttttggtgcagctcacagctctacatctatttcttcagctttaggaattgcagtagcaaacagattatctaataaatcagataatgtggtagcagtaataggtgatggagcaatgagtgcgggtatggcatatgaagctatgaataacgcaggtactagcaaaacaaaaatgattgtaattttaaatgacaacgatatgtcgattgcgaaaccagtaggcgctatgagatcttatttagcaaaaatattatcaggcaagatgtattttagtttaagagaaacatttaaattgattatttctgcattttcaaaaagatttagtaaaaaagcaggagaggcggaagattttttaagatcagctgttactggtggaaccttatttaattcgttaggtttttattatgttggtccgatagatggacacgatatggactctttaatatctgtattaaaaaatgttaaagaagttaactataatgggccagttctagttcatttaaaaactgaaaaag

SEQ ID NO: 232737 - DNA, 925 bp, Unknown
  Bacterial polypeptide expressing nucleotide sequence isolated from the Sargasso Sea
gcccaaaaaaaaggtttaatagtcattttaaatgataataaaatgtcaatagataaaccagttggtgctatgagtacttatctgactagattgctttcatctaaatcttattcaagcttaagaaatataattaaaaaaatttctaaaaacctaccatcaaatctgtcaaatactctttatagaactgaagagtactctaaagggctgctttctggcggcactttatttgaagaactgggtttttattacctcggtcctatagacggacataatgttgatgaagttgtgtcagttttagaaaacataagagataacaaatttgataaaccagtttttcttcattgcgtaactaaaaagggtaaaggatatagtccagcagaaaaatcagaagataagtttcatggtgtagaaaagtttgatattaatacaggaaactcattaaagaaaacaaatttaaaatcctactcaaatgtgtttggagaaaaactaactaaacttgctaaaaatgacgaaaagattgtagcaataacagctgctatgatgtcaggtacaggattaaaatttttccaacaaaattttgaaaaaagattttttgatgtgggtattgccgaacaacatgctgtaacaatggcagcaggattggcaacggaaggcttcaaaccatttgtcgcaatttattcaacatttttacaaagagcttatgatcaaatagttcatgatgtagctattcaaaaattacctgttagattcgcaattgatagagctgggctagtaggttcagatggtcctactcatgctggttcttttgatattacttatttagctacgcttccaaattttatagttatggcacctagtaatcaaagagacttatcaaatatgatagagttatcttgtgagataaatgacacaccatctgctttta

SEQ ID NO: 232738 - DNA, 894 bp, Unknown
  Bacterial polypeptide expressing nucleotide sequence isolated from the Sargasso Sea
agcaaattattaactggaaaaatatattttagtttaagagaaacatttaaactaattatttcagctttctcaaaaaggttttcaaaaaaagcgggaaaagcagaggatttcttgaggtcagcagtaacaggtggaacactttttaattcattaggtttttattatgttggaccgatagatggacatgatatagatacgcttatatcagttttaaaaaatgcaaaagatactaattttgaaggtccaataatgatacatattaagactgaaaaaggaaaaggttatcaatttgcagaaaactcaaaagataaataccacggtgtttcaaaatttaatataaaaactggagtacaagagaaatcaagttctaaaatcccatcatatactagtgtttttgcaaacacattaattaaacatgctgaaagagatagcaaaataattggtattactgctgcaatgccatctggcactggaatggatttatttgcaaaaaagtttccaaatagaatgtttgatgttggtattgcagagcaacacgcagtgacattttctgctggtttagctacagaaggatataagccttacgcagcaatttattctacctttttacaaagagcttatgatcaagtagtacatgatgttgcaattcaaagtttgcctgtcagatttgccatagatcgcgcaggtcttgttggtgcagatggtcctacacatgctggatcctttgatataacttacctatcaactttacctaattttgttgtcatggctccaagcgacgagtcggaattagtgaaaatgatcaacacctcagttgacataaatgacaaaccttcagcttttagatatcctcgtggaagtggtattggtattaaacttcctgaaattaatgaa

SEQ ID NO: 232739 - DNA, 838 bp, Unknown
  Bacterial polypeptide expressing nucleotide sequence isolated from the Sargasso Sea
agatgaaattaattttccatcagatttaaggaaaatacctgagtcaaaattacaaaaagttgcagatgaattaagagaagaaatgattgatgctgtgtcagtgaccggtggtcatctaggggcaagtcttggtgtcgtagaattaactgttgctttacattatatttttaatacaccaaatgataagttaatctgggatgtaggccatcagtgttatccacataaaattttaactggtagaaaagacagaataagaactcttagacaaggaaatggtctttcaggcttcacaaaaaggtcagaaagtgaatatgatacttttggtgctgcacacagctcaacatctatttcatcagcactaggtatagctgaggcaaacaaattatctaataagtcagataatgtaattgcagtaattggtgacggtgcaattagtgcagggatggcatatgaagccatgaataatgctggtgcctcaaaaactaagatgatcgtaattttaaatgataatgatatgtcaattgctcgaccagtaggagcaatgagtacttatttagcaaaaattttttcgggtaggatttattttagtttaagagaaactctaaaattaattatgtcagctttttcaaaaagatttagtgtgaaggcaggcaaagcagaagatcttcttaggtcagctgttacaggtggaactttatttagttcacttggattttattacattggccctatagacggtcatgatttaaattcactaattcctattttaaaaaatgctaaggattctaagcacaagggaccaattttaatacatatcaaaacaaaaaaaggtaaaggt

SEQ ID NO: 232740 - DNA, 956 bp, Unknown
  Bacterial polypeptide expressing nucleotide sequence isolated from the Sargasso Sea
aatggtttatcttggatttactaaaagatcagagagtgaatatgatccatttggtgctgctcatagttcgacttcaatctcttcagcactaggcattgcagaagcgaataaattagaaagtaaatcctcaaatgtgatagctgttattggtgatggagcaattagtgctggaatggcttatgaggcaatgaataatgctggcgcttcaagaacaaaaatgattgttattttaaatgataacgacatgtctattgcgaaaccagtaggtgcaatgagaacttatttagcaaaattatttacaggaaaaatatattttagtctcagagaaacacttaaattgataacatcagcattttcaaagagatttagtgctaaagcgggtaaagcagaagactttttacgatctgtggtaactggtggtactttgttcaattctctaggtttttactatgcaggacctataaatggtcacgatttatcaacccttgttccaattttaaaaaatgcaagagactcaagacataacggaccaatattgattcatattaagacacaaaaaggtaaaggttattcatatgctgaaaaagcaaatgataattatcacggagtatcaaaatttaatgttgaaactggtgaacagattaaaagtggaactgatttaccagcctatacaaaagtcttcgcaaatacattagttaagcatgcaaaaaaagacagtaaaattgtaggtattacagcagcaatgccaagtggaacaggaatggatatttttggaaaagagtttcctaacagaatgtttgatgtaggaatagccgaacaacatgctgttacttttgctgcaggattagcgacagaaggttataagccatatgctgcaatatattcaacatttttacaaagagcctatgatcaagtagttcatgatgttgctatacagagcttgcctgtcaggtttg

SEQ ID NO: 232741 - DNA, 818 bp, Unknown
  Bacterial polypeptide expressing nucleotide sequence isolated from the Sargasso Sea
atgtttgatgtaggtattgcagagcaacatggcgttacttttgctgctggactagcaactgaaggatacaagccttttgctgcaatatattctacttttcttcaaagagcttatgatcaagtagtccatgatgttgcaatacaatccctaccagttcgatttgcaattgatagagcaggtttagttggtgctgatggaccaactcacgcaggatcatttgatattacttacttgtcaacattaccaaattttgtggttatggcagccagcgatgaagctgaactagtaagaatgataaatacatctgtacacataaacaacagaccttctgcttttagatatccaagaggaaatggaataggagttgaattacctgacataaaagaaattctaaaagttggagaaggaaaaattatcacgcaaggtaagcatatcgcaattcttaattttggtgcaagattaaaccaatgtaaaaaagcttctgagattttagaaaaaaaaggtatcacttcaactatctttgatgcaagatttgctaaaccacttgatgagaaagccataatagaattagcatctagccatgaagttattttgactatcgaggaaggttcaataggaggttttggatcacatgtttcaaaattattatctgaaagaggattttttgataaaggtttaaaatttagatcaatgtttttaccagataaatttttagatcaagacacacctgaaaaaatgtacaagtctgctggacttgattttgagagcattgctcagaaaattgaaagcactttaaattctaatattgttattgcaaa

SEQ ID NO: 232742 - DNA, 856 bp, Unknown
  Bacterial polypeptide expressing nucleotide sequence isolated from the Sargasso Sea
tttgaagaattaggttttttttacttaggaccaatagatgggcataattttaatcatttaattcctataatgacaaatataaaaaataataaaattcgtaagcctatttttttacatgtaatcacaaaaaaaggcaaaggttataagcctgctgaagactcgagtgataagtttcacggagtaaataaatttaatattaaaactggtcattctttatctagcagtaataagcaaacattttctgaaatatttggtaaaactcttgaaaacgaagcgctacaagatgaaaaaattataggcattactgctgccatggctagtggtacaggactcaattcatttagtaaaaaatttcccaaaagattttttgatgttggtattgcagaacaacacgcagttactatggcggctggattagcaactgaaggctttaaaccttttgtagcaatatattcaacatttcttcaacgcgcatacgatcaagtagtacatgatgtagctattcaaaaactaccagttagatttgccattgatagagctggtcaagttggtgctgatggacctactcacgcaggttcttttgatatttcttttttaaattctttgccaaattttattataatggcagcatcagatgaaaatgaattgataagaatgataaaaacttcattgttaattaatgatagaccctcttcttttaggtttccaagaggttctggatcaggagttagcgaagaaattaatttaaatcctctagaaattggtaaaggcaagatagtcaatgagggcaataaaatagcaataataaattttggtgctagactcgaagcttgtaaagaagcaatagatatataaa

SEQ ID NO: 232743 - DNA, 750 bp, Unknown
  Bacterial polypeptide expressing nucleotide sequence isolated from the Sargasso Sea
tatggcgcgtgacctgatcagcggcaactccgttttcagtcagcttggctttctgcatatcggcccgatcgacggtcacgaaatggggcatcttctgccggttctgaaaaatctgcgtgatggtgatgtaaccgggcctgtactggtgcatgttgttaccgaaaagggcaaggggcatcccttttccggcccatcggcggagaaataccatgcggtgccgaaatttgacgtcatcaccggcacccagcagaaagcggcagccaatgtcccaagctatacctcggtttttgccaaggcgctgattgacgcggcgcagcaggatgatcgcatcgttgccatcaccgccgcaatgccgtctgggaccggtttggataaggtgaaggaacggtttccaacgcgtgtttttgacgttggtatcgctgaacagcatgctgtgacctttgctgccggtcttgccagtgagggtatgaaacccttttgtgcgctctattcgaccttcctgcagcgcggttatgatcagcttgtccatgatgtggcgatccagagacttcctgtgcgattcgccatcgaccgggccgggctcgtgggtgcagacggggccacgcatgctggcatttttgatattgcctacatgtcctgtctgcccggcatggtgatcatgtgtccttcggatgaggcggaactgactcacatggtggcaaccgccgccagccatgatgaggggccatcggccgttcgttatccgcgtgg

SEQ ID NO: 232744 - DNA, 829 bp, Unknown
  Bacterial polypeptide expressing nucleotide sequence isolated from the Sargasso Sea
aataattgtaattttaaatgataacgatatgtctattgcaaaaccagttggtgcaatgcgagcatatctggcaaaaattttatcaggaaaattatattttaactttagagaaacaattaaattaataatatcagctttttcaaaaagatttagtaataaagcgggtaaagctgaggattttttaagaagtgctgttagtggtggtactttatttagttcaatgggtttttattatatgggcccaattgatggacatgacataaatgatttagtttctttattaagaaatgctaaggacataaatcacgatggtcctattatgattcacataaaaacagaaaaaggcaaaggttacaaatttgcagaaaaatcagaagataagttccatggagtagcaaaatttaatgtaaacactggagttcaagaaaaaaccaaatcaaatgtacctgcctataccaaagtttttgcaaatactttattaaaacatgctgaaaaagacagtaaaattattggaataactgctgcaatgccttcaggaacaggaatggatatttttggaaaaaaatttccatcaagaatgttcgatgttggaatagctgaacagcatgcagtaacatttgctgctggtctggcaactgaaggttataaaccatatgcagcaatatattctacttttttacaaagagcatatgatcaagtagtgcatgatgtagcgattcaaagcttaccagtaagatttgcaattgacagagcaggattagttggtgctgacggaccaacacacgcaggttcttttgatataacttacctaacgaccttgccaaatttt

SEQ ID NO: 232745 - DNA, 730 bp, Unknown
  Bacterial polypeptide expressing nucleotide sequence isolated from the Sargasso Sea
gggtatgatcagatagttcacgatgtggctcttcaaaatttaccagttcgatttgcaattgatagagcagggttagttggagcagatggggccacccatgcaggatcattcgatttagtgtatcttgcaagcttgccaaattttaccgttatggctgctgccgatgagttagagttgatgcatatggtggccactgctgctgagcatgatttagggccaatatcttttagatatcctagaggtgaaggggtggggattgatcttccagaaaagggtaccccccttgaaattggaaaggggagagttttaagagagggtaaaaaggtggccttggccagtttaggaacgagattagaagaagccctaaaagcagctgaaatcttggacagtaaaggcatttcaacgactgtagcagatatgcgttttgcaaaaccgttggatgaaaagctattaatggagcttgcagataatcatgaagttttggtaacgatcgaagagggcgctaggggtggttttggtgcccatgttctacattatttttcagacataggggctttggagaagggtattaaggtaagaactatgacgttacctgatctatttattgatcaggcaaatccctctgatatgtataagcaggctttacttcaagccgaaaatattgtcgaaaaagttttaggatcattgggtgtttctgtaggacgtttttcagctgattcttctgcctgaa

SEQ ID NO: 232746 - DNA, 850 bp, Unknown
  Bacterial polypeptide expressing nucleotide sequence isolated from the Sargasso Sea
ggaatgctgttcgaacagttgggatggcgctatatgggaccggtcaacggccacagcctcaaggatttgatcgaactgatcggccaggtcagagacctggaaggacccatcgtgattcatgccctgacccaaaaagggaaaggctattcctttgccgaagaggatgccttcaaataccatggggtctccccttttgttcctgaagacggttcctttctgaaaaaatcaaaaagaagcgacaactcagtcagttattccaaggtcttttcagaaaagctgggagagttgatgggaaaggattcgaaggttgttggagtcagtgctgcgatgctgagtggtaccggtttgatcggtctacagaaaaaatatcctgaacgtattttcgacgtcggcattgccgaaggtcacgcggtcacctgctctgcaggcatggctacggaaggcttaaagccctatgttgccatctattccacttttctccagcgcgcgttggatcatatcatccatgatgtcgcgatccagaaacttcctgtccgcttcatgattgaccgagcaggtctggttggagcagatgggcccacccaccagggtgtttatgatctgacctatctgaggatgattcctggaatgactatcttggttccgagagacggtgcagaattgagaatgatgatcgatttttcttatcattacgaatcaggaccgattgcagtaaggtatccccggggaaataccgttttaacggaggaaaatgaaattcctccgatagaattgggccgagcccacctcttgcaggatggagcagatatcgtgttactggcagtcggagtgatggtgaaaatgccatcaa

SEQ ID NO: 232747 - DNA, 900 bp, Unknown
  Bacterial polypeptide expressing nucleotide sequence isolated from the Sargasso Sea
acaagttaaaagtaaaaataatttaccctcttatacgaatgtattcgcaaatactttaataaaacatgctaaaaaagatagtaaaattgttgcaattacagcggctatgcctgatggaacaggactagatatttttcgtaaagaatttcctgaaagaacatttgatgtaggtattgctgagcaacatgcagtaacgtttgcagctggtctggctactgaaaattataaaccatatgctgctatttattcaacatttttacagagagcatatgatcaggtagtacacgatgtagctatacaaagtcttccagttagatttgcaatagatagagcagggttagttggtgctgatgggccaacacatgcaggaagttttgacataacttacttatcaacattaccaaattttgtagtaatggctgctagtgatgaggcagaattagtaagaatgattaatacctctactgaaattaatgatagaccttgtgcctttagatatccaaggggcaccgggcttggatcagttttaccctcaattgatgaaaaaattgaaattgggaaatcaagaattattcaagaaggaaaaaaattagcaattttaaattttggtgctaggctgaatgaaactattaaagcggctgaaaatttaaaaaaaaaaggaattaatattactatagtagactcaaggttcgcaaagcctttagatgaaaatctaatatggcaattagctactacacacgaatgcataatgactatagaagaaggttctattggtggatttggttctcatgtcatagattttttaacaaaaaaaggtcttatggataataatttaaaatttagatcaatgattttaccagatttttttattgatcaggataccccggaaaatatgtataa

SEQ ID NO: 232748 - DNA, 769 bp, Unknown
  Bacterial polypeptide expressing nucleotide sequence isolated from the Sargasso Sea
gcaatagctgaacagcacagtgtaactttggcagcaggaatggctattgagggattgaaaccaatagttgcaatatatagcaccttcctacaaagagcatatgatcaactaatacatgatgtttctcttcaaaacctgaatgttacttttgctatagaccgagctggtgcagttggttcagatggccccacacatcaaggagcctttgatttagcttttttaagatgcattccaaatatgacaattatgactccatccagtaaagaaaaactttggaaaatgctcaatactggatttaatcacgatggaccagtggctataagatatccaagaggagaagctaagggagataaatttgaaaaagataagtcttgtatagattttggaaagagcgacctaattaaagaagcacagtcagaagaagtggtgattttatcttttggttcctgtttggagcttgctttggaaatttctaatgacatcgaagcaacaattattgatatgaattttgtaaagcctttggatgaaaaaagaatacttcaatgttcttcatacaagataatagttaccttggaagaaaattcacttaaaggtggtgctggttcatctgtaaatgaagttcttacatcaaataacattaaaacagatatactttcttttggctttcctgatcaattcatacctcacggtgatcaagataaccaaaaactaaacgcaggtttagataaagaccaaataattaaaaaaattaaagatagactaaactaaa

SEQ ID NO: 232749 - DNA, 667 bp, Unknown
  Bacterial polypeptide expressing nucleotide sequence isolated from the Sargasso Sea
atgtcgcttaaatatttaccaaaaattacctgtccagatgacatcaaagattttacgcgagaagaactagtagaattatgttcagaactaagacattttacaattaacacgattacggaagtgggtggtcatttagctccaacccttggggtgatagagctaactgttgcattgcattatgtatataatactcctaaagataaacttgtatgggatgtgggacatcaaggatatgcacacaaattacttacgggaagatataaggagttttcaactataaggcaatataatggattaagtggttttttaaaaagatcagaaagtgaatatgatgtcataggtgctggacatgcttcgacttcaatatctgctgcattaggtcttgcagaagcaagaatgcaaaaaaaccaggattacagagtagcagcaattattggtgatggttcaatgactggtggactagcatttgagggaataaataatgcaggacatcttggcagacaattattagttattcttaatgataatgaaatgtcaattagccctaatgttggggcgatatcttcctattttacccgtttaatatccaatcctttatataacagagttagaaacgagttttgggatcttactggaaaattgccaatagctaaaagtaagacaagaa

SEQ ID NO: 232750 - DNA, 291 bp, Unknown
  Bacterial polypeptide expressing nucleotide sequence isolated from the Sargasso Sea
tctgaactaattaatgttgtatcagaaactggaggtcatctaggagcaggtctaggtgtggtagagcttactgtagctttacattacgtttttaatactccaaaagataaattagtttgggatgttggccatcaatgctacccgcacaaattaattacaggaagacgagacagaataagaactttaagaaaaggcggtgggctttcaggatttaccaaaagatcagaaagtgaatatgatccatttggagcagcacatagctgtacatcgatatcatcaactcttggtatg

SEQ ID NO: 232751 - DNA, 288 bp, Unknown
  Bacterial polypeptide expressing nucleotide sequence isolated from the Sargasso Sea
tatgaaacaaaatacttcaaaacaaactatattagatcaaataaattcaccagatgatttaaaaaaattaaatatagatcaacttgagtcgttagcaaatgaacttagattagatctaataaatgtggtttctaagacaggaggtcatctaggtgccggtctaggtgttatagaattgacgatcgctttacactatgtcttcaatgctcctaaagacagacttatttgggatgttggtcatcaagcatatccccataaaattcttactggaagaagaaaaaaaatggg

SEQ ID NO: 232752 - DNA, 876 bp, Unknown
  Bacterial polypeptide expressing nucleotide sequence isolated from the Sargasso Sea
tggcatacgaagctatgaacaatgcaggagcttcaaaaaccaaaatgattgttattttgaatgataatgacatgtctattgcaaaaccagttggtgcaatgagaagttatttagcaaaattactctctggaaaaatttattttagtttaagagaaactataaaacttatagtttcagccttttcaaaacgatttagtgttaaagcaggaaaagctgaagattttttacgatctgcagttacaggaggtactctctttaattcgttaggtttttattatattggaccaattgatggtcatgatatggatgttcttttgccaatattaaaaaatgctagggattctaagcatgatggaccaataatgattcatataaaaactcagaaaggcaaaggatattcctacgccgaaaaagcaaatgataaatatcatggtgtttcaaagtttaatatagagactggtgaacaacaaaaatccaaatctaatttgccagcttattcgaaagtttttgctaacactttgataaaacacgcagaacgagatagtaaaatagtaggaataactgcagcaatgccagatggtactggtttagacatttttggtaaagaatttccaaaaagggtatttgatgtaggaatagccgaacaacatgcagtaacttttgctgcaggactagcaacagaaggatataaaccatatgcagctatatattcaacatttttacaaagagcatatgatcaaattgttcatgatgtagctattcaaagtcttccagttagatttgcgattgatagagctggtcttgtgggagctgatggtccaactcatgcaggatcatttgatattacatatttgtcaactttacctaatttgtagt

SEQ ID NO: 232753 - DNA, 883 bp, Unknown
  Bacterial polypeptide expressing nucleotide sequence isolated from the Sargasso Sea
tatccacacaaattaattactggtagacgagatagaataagaacattaagaaaaggtggtgggctttcaggatttaccaaaagatctgaaagtgagtatgatccatttggagcagcacacagttctacatcgatatcatcaactcttggtatggctacagccaagaaactttctaatgataaaaataacgttgtagctgttataggcgatggagcaatgagtgcaggaatggcctatgaagccatgaataatgctggagcgatgaaatcaaaattgatcgttatccttaatgataacgatatgtctattgcaccaccagttggtgcaatgagcaaatatcttgcaaggcttttgtctggaaaaatatatttcagttttcgcgaaactataaaattaatactctcagcattttcaagaagattttcaaaaaaagcgggtaaagcagaggatttacttagaagcgcagtaactggtggaacattattcagccaacttggtttttattatataggtcccattgatggacatgatgtaaataatttagttacaattttagagaatgcaaaaaattcaaatcatcaaggtccaatactaatacatgcaattaccaaaaagggtaaaggatacaaacccgctgaagagtcaggagataaatatcatggggtatctaaatttgatgttttaactggtaaacaagtaaaaggtaaatcagaaggaccttcttatacaaaggtttttgcaaatactttaattaaacatgctcagaacgatacgaaaattgtagcaattactggtgcaatgccatcgggaactggactagatctttttcaaaaaaagtttcctgataggatgtttgatgtgggcatagctgaacaacacggag

SEQ ID NO: 232754 - DNA, 895 bp, Unknown
  Bacterial polypeptide expressing nucleotide sequence isolated from the Sargasso Sea
cctatattggttcatgtcaagactgaaaagggtaaaggatataaatttgcagaaaaatcagaggataaatatcatggcgtttcaaaatttaatataaatactggcattcaagagaaatcaaaatcaaatataccatcatatacaaaagtttttgcaaatactcttgttaagcatgcagaaaaagatagtaaaataattggtgtgactgcagcaatgccatcaggaacgggaatggatgtttttggtgataaatttccttcaagaatgtttgatgtaggaattgcagagcagcatgcggtcactttttccgcagggttagcaactgaaggattcaaaccatttgctgcaatttactcaacttttttacaaagagcctatgatcaagttgttcacgatgttgcaattcagagtttacctgtaagatttgcaatagatagagctggactagttggagctgatggaccaacacatgctggatcatttgacattacatatcttgctactttacctaattttgttgttatggctgcaagtgatgaagcagaattggtaagaatgattaacacggcagttgatattaatgatagaccttcagcatttagataccctagaggtaatggagtaggagttgatttaccaaacataaacgaaaaaattgaaattggaaaagctaggtttatttctgaaggtaaaaaagtagctctacttaattttggtacaagattaaacgaatgtataattgcgagagaaagcttagcaaaaaagggaattaatataaccttggtagatgcaaggtttgttaaacctctagatgaaaatctaatatggcaaatatctaccgaccatgaagctttaattacaattgaggaaggttcggtcggaggttttggttcga

SEQ ID NO: 232755 - DNA, 745 bp, Unknown
  Bacterial polypeptide expressing nucleotide sequence isolated from the Sargasso Sea
tctgctggattagcctgtgaaaaaaagaagccagtcgtagcaatttattctacgttcctcaaaagagcctatgatcaactcattcatgatgttgcactccaaaacttagatgtcacttttgccattgatagagctggactagttggtgaggatgggcctactcattcgggaaactatgatctggtttacttaaggtgcatacctaatatgatcgtgatgactccatcagatgaaaatgaaactagaaagcttttaacaactggttttttccataacggccctgcatcaataagatatccaagaggatctggtcctaatgttgttgttgagaatgatctttcacctgttgaaataggcaaaggaaggttgattcgagaggggtcaaaaaatttaattgtcatcaattttggagctttgctcgatcaagcaaaagaagttgcaagcactttaggtcttactctaattgatatgcgttttgtgaaacctctcgatgaagatattctcagaaaatatttgtctgaggcacaagcattcatttcaattgaggatggatcaattgctggtggcgccggaagtgcagtccaagaattttgttctgataataatataaatattaagtctaaactttttggaatacctgatatatttattgaacatcaatccagagaagaaatgatcgtagaatctggtttaaaagcctctagaataatagaaaagatagaggaattaggattagtaaagtaat

SEQ ID NO: 232756 - DNA, 676 bp, Unknown
  Bacterial polypeptide expressing nucleotide sequence isolated from the Sargasso Sea
aatattaattttccagatgatgtgagaaaactctctcaatctgatattaaaattttagcagatgaagttcgacaagaattaattgaagttgtttctgaaactggaggacatttaggtgctggtctaggagttgtagaattaaccgttgtcttacactacatatttaatactccacatgataaattaatttgggatgttggacatcagacttatccacataaaatattgactggaagaaagaatagaataagaactcttagaaaaggcgagggattgtctggttttacaaaaagatcagaaagcgagtatgatccatttggtgctgctcatagctcaacttctatttcatctgcattaggaatagcagtagctaataagttatcaaataaatcaggaaatgttattgcagtcataggtgatggagcgataagtgctggtatggcttatgaggcgatgaataatgcaggtgaaaacaaaacaaagatgattgttgttttaaatgataacgacatgtcaattgccaaacctgtcggtgctatgagaagatatcttgcaaaaattttatctggtaaaatttattttagtttcagagagacattaaaattaattatatctgctttttcaaaaagatttaaaaatcaagcgggaaaggcagaagcttttttaagatctgcag

SEQ ID NO: 232757 - DNA, 763 bp, Unknown
  Bacterial polypeptide expressing nucleotide sequence isolated from the Sargasso Sea
ggtatacaggaaaagtctaaatcaaacattcctgcttatacaaaagtttttgcaaatactcttataaaacatgctgaaaaagatagtaaaattataggaattactgcagctatgccatcaggaacaggaatggatatttttggaaaaaaatttccttcaagaatgttcgatgttggtattgcagaacaacatgcagttacctttgctgctggcctagcaaccgagggctacaagccttatgctgcaatttactctacatttttacagagagcatatgatcaagtagtacatgatgttgcaattcaaagtttaccagttagatttgcaattgatcgagcaggtttagtaggtgcagatgggccaacacacgcaggatcatttgatataacatatctttccactctacccaactttgtagtaatggcagctagcgatgagtctgaactagtcagaatgataaatacttcagtaaatattaatgatagaccctctgcctttagatatcccagaggtaatggagtcggagtaaatttgccaaatatagatgaaaaaatacaaattggaaaagggagaataattaaagaaggtaaaaaagttgctatacttaatttcggagctagattaaatgaatgtttaattgccagagaaaatcttattaaaaaaggaattaatattacaatagtggatgcgagatttgtaaaaccattagatgaaaatcttatttggcaactagctgcagatcatgaaacaataattacaatag

SEQ ID NO: 232758 - DNA, 874 bp, Unknown
  Bacterial polypeptide expressing nucleotide sequence isolated from the Sargasso Sea
actggtttagatatttttaatttaaaacatccatcaagattatttgatgtaggaatagctgagcaacatgctgtaacaatggctgcaggtttagctactgaaggatttaaaccttatgtagcaatttattcaacttttcttcaacgagcttatgaccaaattgttcatgatgtagccttacaaaatcttccagtacgttttgcaattgaccgtgctggtcaagtcggagctgatggaccaactcatgctggatcatttgatataacttatttatctacattacctaattttattattatggcaccaagtgatcaaaatgaattaataaggatgataaatacatctgttttgattaacgatagaccatcagcttttagatatccgagaggaacgggtataatggatgagaatatatctgatcaagatccaattgatattgggaaaggaattatcctgcttgaaggtaatgaagtagcaataattaatttaggcacaagaatgcaaagttgcaaagatgcaataaaaatccttaatgatcataatatttatccaacattagccgatgccagatttgctaaaccaatagataatgaattaatagaaaaacttttggacaaccataaatatttattaacaatagaagagggttcaagtggcggatttagtgcatctattttaaattatattcacaataatagacctaaacaaaccttaactaaaataaataatatttttttccccgataaatttataaatcatcaaacacctgagcaacaatatttagagataggaatggatgcaaaatctatagcagaaaaagttattaaattttatcaagataatgttataaattttcaatcatataatcttaata

SEQ ID NO: 232759 - DNA, 889 bp, Unknown
  Bacterial polypeptide expressing nucleotide sequence isolated from the Sargasso Sea
gatgtctggaacaggattaaaattattccaaaaaaattttgaaaaaagattttttgatgttggtattgctgaacaacatgctgttacaatggcagctggattggcgacagagggtttcaaaccttttgttgcaatttactcaacattcttacaaagagcttatgatcaaatagtccacgatgtagctattcaaaaattacctgttagatttgcgattgatagagcggggttagtaggatctgatggtcctactcatgcaggttcatttgatattacttatttagctacattaccaaattttataattatggcacctagcaatcaaagagaattatctaatatgatagagttatcttgtgagattaatgacacaccatctgcttttagatttccaagagggacaggatcagatgaattttttaataatcagcctatagatatcgatataggtaagggatatattttaattgaaggtaatgatgttgcaatcttaaatttaggaaccagacttgaaaaatgtattgaagctagtaatttccttaataaaaataatatctatcctactattgcagatgcaagatttgcaaaacccttggacacacaattaatagataacttattaaataatcataagtatatcctaactatagaagaagggtctataggtggattttcatctcatgttttacattatgtccataatataagatcaaaaaaggataatgttttgataaaaaatttaatttttccagatcgttttgttgaacatatgacaccagatgaacaatatcaggatattaaaatggatacggaatcaataatcagagaaattaacaatttttatgagaataaaattattgatataaagaattttaaatttaaagtttaa

SEQ ID NO: 232760 - DNA, 905 bp, Unknown
  Bacterial polypeptide expressing nucleotide sequence isolated from the Sargasso Sea
tatgaaggtatgaataatgtaggtatattagatagcgatatgattatcattttaaatgacaataggatgtcaatagctcctgcagttggtgctttaagcaattatttgtctaaaatagtgtctagtgaaccctttaattctgtaagagaaatcgcaaaaaaaatggttgaaattttccctcaacagattagtcaaacagcaaaaaaagctgaggacatagctaggaatattttaacacaagacaatacattctttagccaaatggggatgttttatttaggccctatagatggtcacgatgttgagactttagttaaggttctaaaaaatttaaatgatgggtctagacacggacctattttacttcacgttgttactgaaaaaggaaaaggtcatccgttttcaaaagtttcagatgaaaaatatcatgctgtttcaaaatttaatgttgtaactggaaactctattaaatcatcttcaaatgttccaacttatactgaagtttttgcagatacattatgtaatattgcagaagacaatgaaaaaataacagcaattacagctgctatgccatcaggcacaggtcttaacaaatttaaggaaaaatttgaaaatagattttttgatgttggtatagctgaacaacatgctgtcacatttgccgctggacttgcgtctcaaggcatgcaaccttttgttgcaatatattctacttttcttcaaagagcttatgatcaagttattcatgatgtagttatacaaaaattacctgtaaaatttatgttagatagagcaggcttagttggtgcagatgggtctactcatgctggagcttttgacctagcttatttactttgtttaccaaatgttgttgttatggctccgagcgatgaaaacgaattaaa

SEQ ID NO: 232761 - DNA, 444 bp, Unknown
  Bacterial polypeptide expressing nucleotide sequence isolated from the Sargasso Sea
aatgatcgattccgcacgctatccccgcctcgcgcgcatccagtcaccggatgatctgcgcaggttcgaagaatccgaactgcccgccattgccgacgagttgcgcgcgtacctgatcgaatcggtcggcaagagcggcggccacttcggcgcaggcctgggcgtgatcgaactgactgtcgcgcttcactatctgtaccagacgccggtcgaccagctggtgtgggacgtggggcaccagacctacccgcacaagatcctgaccggccgccgcgaccagatccacaccgtcaagcagaaggacggcgtggcgccgttccccaagcgcgaagaaagcgaattcgacaccttcggcgtcggtcattcctcgacctcgatctcggccgcgctcggcatggccatcgcccgccagcgcgaaggcgacgaccgcaaggtagtggcggt

SEQ ID NO: 232762 - DNA, 733 bp, Unknown
  Bacterial polypeptide expressing nucleotide sequence isolated from the Sargasso Sea
gatgacaactattctagaccaacttcaacaacccgaacaaatacagcatctgactcaggatgagctcttacaactcgctcaagaatgtagagaacgtgtcattcaggttacgagtcaaacaggaggacatttagcatcatcacttggaacagttgaaatcacaattgcacttttcaatgttttcaacttcaaatatgaccgaatcatttgggatgttggtcatcaagcttacatacataaactcttaacaaatcgaaacgaaaaattccttagtcttggcaaaaaagatggaataaaaaaattcttatcacgaagtgaaagcgaatatgatcactttggtgcaggccacgcgtcaacttcaatttcagctggagttggaatgagcattgcgcgtgatttgaaacaagaagaccatcgacatgtcatttctattataggagatggagcgctcaccggcggacttgcgtttgaagctctcaatcataatggctatctgaacaaaaacatgatcgtgattctaaacgataatgggatgagtattgaccctaatgtaggggcattatcaaaaataatcactcgtgttatttcgtcaaaatcctataattcattacgcgagcaaacatggaagctttcaggtaagtttccttttgcagagacctcgagaatggcgcttcataaaatcaacgcatcattaaagtcttttttgacacctaggcatgctttcgaacaacta

SEQ ID NO: 232763 - DNA, 958 bp, Unknown
  Bacterial polypeptide expressing nucleotide sequence isolated from the Sargasso Sea
tcagtcttaaaaaatgcaaaagaaattaatcatgatggacctattatgatacatttcaaaactgaaaaaggtaaaggatatagatttgctgaacagtcagaggataaatatcatggtgtaacaaagtttaatgtgaatactggagtccaggagaaatctaaatcgaatataccttcgtatactaaagtttttgcaaatactcttgtaaaacacgcggagaaagatagtaaaattattgggattacagcagcaatgccatcaggtacaggaatggatatatttgcaaacaaatttgcctcaagaatgtttgatgtaggcattgcagaacaacatgcagttacatttgcagctggtttggcaaccgaaggatacaagccctatgcagcaatatattctacatttcttcaaagagcatacgatcaagtagttcatgatgtggcaattcaaagtttaccggtaagatttgcgattgatagagccggattagttggtgctgatggatcaacccacgcaggttcatttgatataacttatttatcaactttgccaaattttgtagtgatggctgcaagtgatgagtcagaattagttaaaatgattaatacatctgtggatattaatgatagaccatctgcttttagatatccaagaggaaatgggatgggtgttgagctccccaatataggagaaaaaattgaaataggtaaagggagagttataaaggaaggaaaaaaaattgcattaataaactttggtgcaagattaaaagaatgcttaattgtagaagaaagtctaaaaaaaaaaggaataaatatatcgctaatagatgcaagattttgtaaacccttagatgaaaatcttatgtggcaaatagccaatgaccatgaaatagtaatatcaattgaaagaggatccataggtgggttttggttcacacttaggacagtttttaaatgaa

SEQ ID NO: 232764 - DNA, 688 bp, Unknown
  Bacterial polypeptide expressing nucleotide sequence isolated from the Sargasso Sea
aatgacaaaatataaatttttagataatgtaaattttccatcagatattaaaaatcttaagtcctctgaattgattaccctgtcaaaggagttaagagaagaattgatagaggctgtttcatttacaggtggtcatttaggtgcaggattaggtgttgttgagttgactgtagccttgcattatgttttcgatacacctaatgataaaatagtctgggatgtaggtcatcaatcgtatccacacaaaattttaacaggacgtaaaaatagaattaaaacattaagacaaggaaatggattatctggtttcacaaaaagatctgaaagtgaatacgatccattcggtgcagcacatagctcaacatcaatttctgcagctttgggtattgctactgcaaataaactttcaaaaaaatcagaaaatgttgttgctgtaattggtgatggagcgatcagtgctggaatggcctatgaggcaatgaacaatgcaggtacatcgaaaactaagatgatagtaattttaaatgataacgatatgtcaattgcagaacctgtaggagcaatgagaagttatttagcaaaattattaactggaaaaatatattttagtttaagagaaacatttaaattaattatttcagctttctcaaaaaggttttcaaaaaaagcgggaaaagcagaggatttc

SEQ ID NO: 232765 - DNA, 421 bp, Unknown
  Bacterial polypeptide expressing nucleotide sequence isolated from the Sargasso Sea
gttggaatggcggaggctacaaaaaattcaaatccagataaaaaacattgttgctgtaataggtgatggagcaatgactgcaggcatggctttcgaagcactgagtcatataggacatttaaaaccgaatttattagtaatattaaatgataatgatatgtctatatctgaaaatgttggcggtttatcaaattacttttcaagaatatgggcatcaaaaacttacaagggtattaaaaaaagtggttctagtttcttgaaacctttacctcaggcatatcatttagctagaaaagtagaaacgcaaatgaaagcaatggttgcaccaggaactatttttgaggaactaggcttaaattatattggtcctatagacggtcataatttaaaagaacttaaagatgtcattttcaaattttaa

SEQ ID NO: 232766 - DNA, 841 bp, Unknown
  Bacterial polypeptide expressing nucleotide sequence isolated from the Sargasso Sea
ttcgacactgggaatggcaaccgccaaaagattgtctaatgataataataatgttgtagctgtaataggtgatggagctatgagtgctggcatggcctatgaggcaatgaacaatgctggagcaatgaaatctaaattgattgtagtattgaacgataacgatatgtcaatagcaagacccgtaggtgccatgagcaagtatcttgctaggcttttgtcaggaaaaatttattttagcttgagagagacgattaagttaatactttcggctttttcaaaaagattttccaaaagcgccggtaaagctgaagacatgttgcggagttttgtaacaggagggactctatttaacgaacttggattttattatataggccctatagacggtcatgatgtaaataatctagtaacaattctagaaaatgtaaaaaattcaaaatatgaaggtccaattctaattcatgctattacaaaaaaagggaaaggttataagcccgcagaagaatctggagataaataccacggagtttctaaatttaatatagcaactggagaacaatttaagggaaaatcaaaagcatcttcatatacaaaagtttttgcaaatacattaatcaaacatgctgaaaatgatacaaaaattgtagctatcacaggagctatgccatcaggaacaggtttagacttgtttgaaaaaaagtttccagaaagaatgtttgatgtagggatcgcagaacagcatggagtaacatttgcagcaggtttagcgacagaaggatacaaaccttttgctgccatttattcaacttttttacaaagagcatatgaccaagtcgtccac

SEQ ID NO: 232767 - DNA, 835 bp, Unknown
  Bacterial polypeptide expressing nucleotide sequence isolated from the Sargasso Sea
tatggcttacgaggcaatgaataatgctgggtcttcaaaaactaaaatgattgttgtgttaaacgataatgatatgtcaattgccaaaccagttggagcaatgagatcttacctagcaaaaatattatctgggaaaatatattttagttttagagaaactctaaaattaattatttctgcattttctaagagatttactaaaaaagcaggtaaggcggaggattttttaagatccgcagttactggtgggaccttattcagttcaatgggtttttactatataggaccaattgatggacatgacatagatacattagtttctgtttttaataatacaaataaaattgactttaatggaccaataatgattcatgttaagactcaaaagggaaaaggttataagtttgcagaaaattcaattgataagtttcatggtgtctcaaaatttaatattactactggagaacaaataaaaaccaaatctaatttaccttcctatacaaaagtttttgcaaacacacttgtaaaacatgcagaaaaagatagtaaaattattggtattactgccgccatgccatcgggaacaggcatggatatatttgcaaaaaattttccagatagaatgtttgatgttggaatagcagaacaacatgcagtgacatttgcagctggtcttgctacagaaggatataaaccatttgcagcaatctactcaacttttcttcaaagagcttacgatcaggttgtgcatgatgtggcaattcaaagtttaccagttagatttgctattgatagagccggcttagtaggcgcagacggacctactcacgcaggt

SEQ ID NO: 232768 - DNA, 846 bp, Unknown
  Bacterial polypeptide expressing nucleotide sequence isolated from the Sargasso Sea
tgataaatttaaagagatttatcctaagaggttttttgatgtaggaatagctgaacaacatgcagtgacattttctgcaggtctcgcaattgaaggactcaaaccttttactacaatttattcaacatttctccaacgggcatatgaccaaataatacacgacatagccattcagaatctacctgtaaaatttgcaatagatagagcaggtttagttggcgcagatggaccaactcatgctggaagttttgatttggcatatttatcaattttgccaaattttgtagttatggctgcttccaatgaaatagaattagcaagaatggtaaaaactgcagctgaatataattcaggaccaatatcctttagatatcctaggggtaatgtgtttggattagatatgccagagaggattgaggcattaaaaatcggaaaaggaaagattataaaaaatggtgaaaagattgctcttttgaaccttggaactcgaattgaggaggtaaaaaaggcgtcagatattcttgattcaatgggtctctcttgtacaattgcagacgcaaggtttgctaagccattagacacagagttaataaaggatctatcaaaaaatcatgaattaatgattactattgaagaaggttcgtctggtggttttggtgcccatgttttaatgcatcttgccgagcaaggaattcttgatgatggatttaaaataaggaatttatatttaccagacacttttattcaacaaggtgatgcaagtgatatgtatgctcaagcaggtctaaattctgaaaatattgttaaaacagcattgaaagtatttggaataaataaaagtgaaat

SEQ ID NO: 232769 - DNA, 811 bp, Unknown
  Bacterial polypeptide expressing nucleotide sequence isolated from the Sargasso Sea
tcgtccaggaggacatcttggagctggcctgtgtgtaattgaactgacagttgccctacattatatttttgatacacccaatgataaattagtttgggacgttggtcatcaaacttacccacacaaattattaacaggtagaaaagataagataagaactatcagacaaggaaatggcttatctggatttactaaaagaactgaaagtgaatatgatccatttggtgcagcgcatagttctacgtcaatttcttcagcccttggaatagcaacagctaacaagttgtcaaaaaaatcaaatgatgttgtagcagttattggcgatggagcaataagtggaggaatggcatatgaagcaatgaataatgctggagcatcaaaaactaaattaatagttattttaaatgataatgatatgtcaattgcaaaacccgtaggagcaatgcgatcatatttagcaaaattactttcaggaaaactgtattttagtttaagggaaactataaagttaattatttcatctttttccaaaagatttagtgctaaagctggaaaagcagaagattttctaagaacagctgtaactggtggaacattatttagttctttaggattttattacataggaccaatagatggacatgatctagaagcactcataccagtattaaaaaatgctaaagagtcaaagcacgaaggacctataatgattcatatcaaaaccaaaaaaggaaaaggctattcttttgctgaagaagcatcagataaattccacggagtttctaaattcaatatacagacaggggttcaa

SEQ ID NO: 232770 - DNA, 796 bp, Unknown
  Bacterial polypeptide expressing nucleotide sequence isolated from the Sargasso Sea
actgaccggacgatttgaagaatttcctagtataaggcagtatggtgggctaagtggttttttaaagcgtagtgagagcgagtatgacgtttttggggctgggcatgcctctactgcaatatctgctgcacttggggttgctgaggcacgttatcaaaagaaagagaaacaccgggctgtggctattattggagatggtgctatgactggaggtttggcatttgaggctattaataatgctggacatctgggtagacagattacggttattttaaatgataatgagatgtctattagtccaaatgttggtgcaataagtaagtattttactaggttgatttctaatcccacttataacagactcaagacagaagcatgggaaataacaaaaaagcttcctctcgcaaggggtacaatccaagcgttcctgagtcgattggataaaagtataaaaaatattatagttcctggaatgctatttgaagaaatggggttccgctattttggtcccatagatggtcatgatttagatgagttaattaaaacattggatacaatcaaagatatcgaaaaacctgttctattacatgttattacgaaaaaaggtaagggtatgtctgtagctgaggatgaccctgtgaaatatcatggtgtaaaggctaatggaaaaagtaacggtagtgcaaaaaaaatcattaaacaatcagaggtcccgtcttttcaagatgcttttggctatttatcatgtgaaattgcagaaaatagaaaagatacagtgtgcattacagcggccatg

SEQ ID NO: 232771 - DNA, 832 bp, Unknown
  Bacterial polypeptide expressing nucleotide sequence isolated from the Sargasso Sea
catgcgcgaaggctccggcctagtgaagttcagccagcagtatccggatcgctacttcgacgtggccatcgccgagcagcatgcggtcaccttcgccgccggtctcgccatcgccgaccagaagccggtggtcgccatctactcgagcttcctgcagcgtgcctatgaccagctgatccacgatgtggcgctgcaagagctgccggtgctgttcgccatcgaccgggccggtctggtgggggccgacggcccgacccatcagggggcgttcgacatcagcttcctgcgcaccgtgcccaacatggtgatcatgaccccgtccgacgagaacgaatgccgccagatgctctacaccggctaccagtgcaacgggccggcggcggtacgctacccccgcggcagcggtaccggcatccaggttgagagcgagatgcaggcgctggcgctcggcaaggggcgcatcgtgcgtcagggcaagggcaccgccatcctggcgttcggcacattgctgcaacaggccaaagcggcagccgaggcgctcgatgccaccctggtggatatgcgcttcgtcaaaccgatggacgaggccctggtgctctccctggccgcgacccacgatcagttcgtcaccctagaggacaacgccatcatgggcggcgcgggttctgcggtgaacgagctgctgatgcgcagcaaacagtgcaagccggtgctcaacctcggcctgccggatcgcttcgtcgaacagggtacccaggaggagatttacgctctgctggggctcgatggcgccggcatccagcgcagcatcgagcagtggctgctggcttga

SEQ ID NO: 232772 - DNA, 766 bp, Unknown
  Bacterial polypeptide expressing nucleotide sequence isolated from the Sargasso Sea
ccagaccctggtcaagctctgtgagcaggatccccgaatcgttggcatcaccgccgccatggccaccggcacgggtctagacctgcttcaaaaagctcttcccgagcagtacatcgatgtcggtatcgccgagcagcacgccgtcaccctcgccgccggcatggcctgcgatgggctgcgcccggtggtggcgatctacagcaccttcttgcaacgggctttcgatcagctgatccacgacgtcggcatccagaagcttccggtcaccttcgtgctggatcgtgcaggcatcgttggggctgacggccccacccaccagggccagtacgacatctcctacctgcgttgcgtgcccaatttcacggtgatggcacccaaggatgaggcggagttgcagcgcatgctggtgacaagccttcagcatgatggccccattgccatgcggatccctcgtggctccggtgagggggttcccctgcttgaggagggctgggagcccctggagatcggtcgcggagaactgctcgccgacggcgatgatctgatgatcgttgcctatggctcgatggtggcgccggcgatggcgacggccggactgctccaggagcacggcatccgcgccagtgtcgtcaacgcccgtttcctgcggccgctcgatgagagcctcctggtgcccatggctcgccgcatcggcagggtcgtcaccatggaggaagggtgccttgccggcggtttcggcaccgcggtgctggaggcgttgcaggaa

SEQ ID NO: 232773 - DNA, 523 bp, Unknown
  Bacterial polypeptide expressing nucleotide sequence isolated from the Sargasso Sea
ggatatctttggcaaagagttcccgaaaagaatgtttgatgttggtattgctgagcaacatgcagtaacatttgccgctgggatggcaacagagggatacaagccctatgctgcaatttactcaacatttttacaaagagcgtacgatcaagttgttcatgatgtagctatacaaagcttgcctgtgagattcgcaatagatagagctggattagttggcgctgatggatcaacacatgctggttcatttgatattacttatttatcaactttaccaaattttattgtaatggctgcaagtgatgaatctgaattagttaaaatgataaatacttcagtagatattgataacagaccaagcgcaattagatatccaagaggagtaggtgttggagttgaacttccatcaatagaagaaaaaattgaaatcggaaaaggaagaataattcaaagtggtagtcaagtatgccttttaagcctgggtacaagacttgaagaatgtaaactagcggccgaagattta

SEQ ID NO: 232774 - DNA, 679 bp, Unknown
  Bacterial polypeptide expressing nucleotide sequence isolated from the Sargasso Sea
tacgtatttaatacacctaaagatagacttgtatgggatgttggtcatcaagcttatccgcacaaaattttaactggcagaagagatagaataagaactcttagacaaaaaaatggcctttatggatttactaaaagaactgaaagcgaatatgatccgtttggagcagcgcatgcatcaactgctatgtcttcaggacttggtatggctatagctagggatttaatgaaaaaaaaaaataatgtaatttgtgttgttggtgatggagcaatgagcggaggtatggcttatgaagcaatgaataatgcaggttcacaaaaatctaggttagttgttattttaaatgataacgatatgtctattgctcctccagtaggagcgcttagcaattatctttcaaaactaatttcatcaggcacttatcaatctgtaaaagatttaggaggaaaaattgtttcaaaaacatttccagatagaattggcaaagctgcaaaaaaagcagaagaatttgcaagaggtattgtaaccggaggaacacttttcgaggaattaggttttttttatgtaggacctgtagatggacataatttgaatacattaattccagttttagaaaatgcaaaaaaatataagaaaggaccaattttaattcattgtgtacaaaaaaaggtaaaggata

SEQ ID NO: 232775 - DNA, 798 bp, Unknown
  Bacterial polypeptide expressing nucleotide sequence isolated from the Sargasso Sea
agtgttgacatttcaagtacttcaattagtgcagctttaggcatggatgaagcctctaaacatcaaaaaaataataagaacatattttctgtcataggtgatggtgcaatgacagccggaatagcatttgaggctatgatgcatgcaggacacttgaataataatctaaagattattcttaatgataatgatatgtccatatcaaagaataaaggtggtctatcagactatcttgctaaaatatgggcatcaaaatcatacaaaaaacttaaatctagcggtaaaaaagttcttaaaaatctgccttatgggcttcatattacaagaaatcttaaagatgggattaagtctgcagtgatgccaggaaatttatttgaagatctagggcttcattatgtggggccaatagatggtcatgatattccacttttaataaaaacaattaatagaatgatggaaaaaaatgagccatatttgctacatgttattacaaaaaaaggtgctggttttgaacctgctgaaaatgaaagaattaaatttcatgcaatctcaaaaatagaaaatactccagctcctaaaaaaactaaattccaagatatttttggagattggttatgttataaagctaaacaagatagcaaattggtaggaataactcctgcaatgaaagaaggttctggaatggttaattttgaaagggaatttccagagagattttatgatgtagcaattgctgaacagcatgctgttacatttagtgcaggaatgtctttagaaggcatgaagcctgtagttgct

SEQ ID NO: 232776 - DNA, 596 bp, Unknown
  Bacterial polypeptide expressing nucleotide sequence isolated from the Sargasso Sea
aatgagtttagatctccaacattacccaacgcttgcgcttgcgcaaacaccggacaaattacgacagttgccacaagataagctacgagaactggctgatgaactgcgtgaatacctgcttaactgtgtaagccagaccagtggacactttgcttccggcctcggcacggtagagttaacggtggctttgcactatgtttataacacgccatttgaccgtttattatgggacgtaggtcatcaggcctatccccataaaattttaacaggtcgtgctgagcgcatgagtaccattcgtcaaaagaatggactacaccctttcccgtggccgccggaaagcgactacgacacattcgctgttggtcattcttcaacctctattagcgcagcattaggcatggctgttgcctctgaaaaagaaggcaaagatagaaaagtagttgcggtaattggtgatggagccatgactgcgggtatggcatttgaagcgttaaaccatgctggtgatattaagaaagacatggtggttgttcttaacgacaacgaaatgtctatttctgagaatgtaggcgcactcaatagtcatttagcgcgct

SEQ ID NO: 232777 - DNA, 820 bp, Unknown
  Bacterial polypeptide expressing nucleotide sequence isolated from the Sargasso Sea
tgtgggtattgctgaacaacatgcggtgacatttgctgcaggacttgcaacagaggggtataagccatatgcagcaatatattcaacttttttacaaagagcttatgatcaggtagttcatgatgtggcaattcaaagtttaccagtaagatttgcaattgatagagctggtctagttggtgcagatggaccaactcacgcaggttcatttgatgtaacttatttatcaacattaccaaattttatagtaatggccccaagtgatgaaggagaacttataaaaatgattaatacatcaattgatataaataataatccatcagcaattagatatccaagaggtaatggttttggtgtagaaattccttcaattgatgaaaaaataaaaataggtaaaggtagagtaatatttgaaggaaaaaacattgcaattttaaattttggtgcaagattgcaagaatgtattttggcaaaggaaaatttaaataaaaagggaattaatccgacgataatagatgcaagatttgctaaaccactagatgaaaatttaatttggcagatagctgcagatcatcagtatttaattactattgaagagggatcaatcggtggctttggttctcatgtaaccaattttttaacagaaaaaaacttactagactccaatctaaagataagaactatgattttaccagaccaatttttagatcatgatactcctctagaaatgtacaaacaggcaggcttagattcaaattcaattgaacaaaaagtattagatttattaaattcaaaaattattgttcaaaaacaaaactaa

SEQ ID NO: 232778 - DNA, 868 bp, Unknown
  Bacterial polypeptide expressing nucleotide sequence isolated from the Sargasso Sea
gattgtcatattaaatgataatgacatgtctatagctagacctgttggggcaatggggacttatttagctaaaattttttcaggtaaaatttactttagtctaagagagactataaaattaattacatctgctttttcaaaacgatttagcgcaaaagcaggcaaagctgaagacttatttagatccgctgttactggtgggacgttatttagttcactaggattttattatattggcccaattgatggacatgatttaagctctttaattccaatcttaagaaatgctaaagattcaaagcatgagggacctattttaattcatatcaaaacaaaaaaaggaaaaggatattcattcgctgagcaagcaaaagataactatcatggagtttcaaagtttaatgtagaaacaggagaacaaatcaaaagcattaataatacaccgtcttatactaaagtatttgcagatactttgattcaacatgcaaaaaaagatagtaaaatagttgcaattacagctgcgatgcctgatgggactggtttaaatagtttccgtaaagaatttccagaaagaacttttgacgttggaattgcagaacaacatgcagttacgtttgctgctggtttagcaactgaaaattttaaaccttacgctgcaatatattcaacgtttcttcaaagggcttatgatcaagttgttcatgatgtagccattcaaagtttaccagtacgatttgcaatagatagagcaggtttagtaggtgcagatggaccaacccatgcaggaagttttgatacaacttacttatcgacattgcccaattttgtagttatggcagctagtgatgaggctgaattagtaagaatg

SEQ ID NO: 232779 - DNA, 838 bp, Unknown
  Bacterial polypeptide expressing nucleotide sequence isolated from the Sargasso Sea
aggtcctgttgacggtcataatttaaagttattggttcaattgtttaaaaaatataaaaaaaaggagcttcatggaccagtattcttacacttgataactcagaaagggaggggctataaacctgccgaacaatctaaagataaatttcatggagtttcatcattcgacgttaagacaggtattcaaaataagtctaaagtcgttacatatacaaatgtagtaagtgacactcttttaaaattagcaaaaaaggataaaaaaattgttgcaataacagcagcaatgccctcaggaacaggcttaaataaatttcaagaaaaatatcctttaagattttatgatgtaggtatagctgaacaacatgctgttacttttgcaggagggatgactactgagtctataaagccttttgttgcaatatattctacgtttcttcaaagagcatatgatcaagttgttcatgatattgcgatacagtctttacctgttagatttttgattgataggtcaggttttgttggagctgacggagctacacatgctggatcttttgatcttagttacctatgttgtcttcctaattttattgttatggctccatctaatggagaagagttaaaaaatatgattaaattagctcagtcaattaataataaaccctctgcaataagatacccaagagactttgcatatgaatataataataacaataattttcaaaaaatatttataggaaaaggtaagatactaaaaaaaggtaaaagaattgcttttcttaatttaggcacaaggttaaaaaaagttttagagattaatgaaatgataaaaaatcatcat

SEQ ID NO: 232780 - DNA, 874 bp, Unknown
  Bacterial polypeptide expressing nucleotide sequence isolated from the Sargasso Sea
ttgatcgaactgatcgggcaggtcagagacctggagggacccatcgtgattcacgccctgacccaaaagggaaaaggctattcctttgccgaagaagatgccttcaaataccatggggtctccccttttgttccagaagacggttcctttctgaaaaaatcaaaaagcagcgacaacacaataagttattccaaggtcttttcagaaaagcttggagagttgatgaaaaaggattcgaaggttgttggagtcagtgctgcgatgctgagtggtaccggtttaattggtctacagaaaaaataccctgaccgtatttttgatgtcggtattgctgaaggtcatgcggtcacctgctctgcaggcatggctacggaaggtttaaagccctatgttgccatctactccacttttctgcagcgtgcgttggatcatatcatccatgatgtagcgattcagaaacttccagtccgcttcatgcttgaccgagcgggtctggtgggagcagatgggcccacccaccagggtgtttatgacctgacctatctgaggatgattcctggaatgaccatcatggttccgagagacggtgcagagttgagaaaaatgatcgatttttcttatcactacgaatcaggaccgattgcagtgaggtaccccagggggaatacctttttaacggacgaaaatgaaatccccccaatagaaatgggccgagcccacctcttgcaggatggagcagacatcatgttactggcagtcggaatcatggttgaaaaagccattcaaactgcaaatattctggaacaagaagggttttccgttgcagtcgtcaacgcacgtttcgttaaaccactcgatcaggaaatgattctga

SEQ ID NO: 232781 - DNA, 894 bp, Unknown
  Bacterial polypeptide expressing nucleotide sequence isolated from the Sargasso Sea
aaaaaatgctagagactctaagcatgaaggaccaattttaattcacattaaatcgcaaaaaggaaaaggttatacttttgctgaggaggcaaaagacaattatcatggagtatcaaaatttaatgtcgaaactggtcaacaacttaagagcacaagtaaattaccgtcatacacaaaggttttcgcaaataccctaattcaacatgctaaaaaggacagcaaaattgtagctattacagctgcaatgcctgatggcactggtcttgatatatttcgtaaagaatttccagataggacttttgacgttggaattgcggagcaacatgcagttacatttgccgcaggtttagctaccgaaaactttaaaccgtatgcagctatttattctactttccttcaaagagcttatgatcaagtagttcatgacgtagctattcaaagtttaccagttagattcgcgattgatagagcgggacttgtaggggctgatggaccaacacatgctggaagctttgatacaacatatttaaccactttaccaaattttattgtaatggcagcaagtgatgaagctgagcttgtaagaataataaacacctcaactgagattaacgatagaccttgtgcatttaggtatccaagaggaacaggattaggttcagctctaccctcaataaacgaaaaaattgagatagggaaatcaaaaattattaaagagggaaaaaaattagcaatcctaaattttggagcaagattgagcgagactttgaaggctgcagaaaatttattaaaaaaaggtgtgcaaataacagttgttgatgccagatttgcgaaaccattagatgaaaatctcatttggcaattagctacaactcatgaagcaatcatgacaat

SEQ ID NO: 232782 - DNA, 667 bp, Unknown
  Bacterial polypeptide expressing nucleotide sequence isolated from the Sargasso Sea
tgcaatcgatagagctggactagttggtgctgatgggcctacccatgctggaagttttgatacaacttatttatcaacattaccaaattttgttgtgatggcagcaagtgatgaagctgagcttgtaagaatgataaatacctcaactgaaatcaatgatagaccatgtgcttttagatatccaagaggcaccggattgggatctgagctaccttctatcaatgaaaaaattgaaataggaaaatccaaaattattcaagagggaaaaaaattagcaattttaaattttggagctagactaaatgaaactttaaaggcttcaacgaatttaaaaaaaaaaggagtttctgttacagtagtagatgcaagatttgcaaagcctctagatgagaatctaatttggcaattagcaactactcatgaagcaattatgactatcgaggaagggtctattggtggctttggttctcatgtagttgattttttaaccaaaaaaggtctaatggattctagccttaaatttagatcaatgatattaccagatgtttttattgatcaagatacacctgaaaatatgtataagattgccaacctagactctagctcaatagaagaaaaaattttagatttactgaattcgaatattattttacaaaaacaaaaataa

SEQ ID NO: 232783 - DNA, 664 bp, Unknown
  Bacterial polypeptide expressing nucleotide sequence isolated from the Sargasso Sea
attcatgatgtagcacttcaaaacttagatgtaacttttgcaattgatagagctggattagttggtgaggatgggcctactcactcgggaaactatgacctagtttacctaaggtgcatacctaatatgatcgtgatgaccccatctgatgaaaatgaaaccagaaaacttttaacaactggtttttttcataatggccctgcctcaataagatatccaagaggatctggccctaatgttgatgttgaaaatgatcttacaccagttgaaattggcaaaggaagattgattaaagaaagatcaaaagatttaattgtcatcaattttggagctttgattgatcaagcaaaagaagttgcaaatactttaggtcttactctaattgatatgcgttttgttaaacctcttgatgaagatattctcaagaaatatctgtctaaggcacaagcatttgtttcaattgaagatggatcggttgctggcggtgctggaagtgctgttcaagaattttgttcagataataatataaacattaaatctaagctttttggaatacctgatgtgtttattgaacatcaatccagagaggaaatgattgaagaatctggcttaaaagcttctaaaataataaaagagatagaggaattaagattagtaaagtaat

SEQ ID NO: 232784 - DNA, 847 bp, Unknown
  Bacterial polypeptide expressing nucleotide sequence isolated from the Sargasso Sea
atagaagaattaaaaattctttcagaagaaattagaaaagaaatgatagaagctgtttcagttaccggaggtcatctaggtgctggattaggtgttgttgaactaactgtggcgttgcattatatttttgatactcctaatgataaactaatatgggatgttggtcaccagagctatccacataagattataacaggaagaaaagataaaatacgaacgttgagacaaggaaaaggtttatctggatttacaaaaagatctgaaagcgagtatgatccatttggagccgcacatagctcaacttcaatttcctcagcacttggtattgcagtagcaaataaattatcaaataaatcaaatgatgtagttgcagttattggtgatggagcaattagtgctggaatggcttatgaagctatgaataatgcgggaatttccaaaacaaaaatgattgtagtcttaaatgataatgacatgtcaattgcaaaaccagttggagcaatgagactatatttagcaaaattactttctggaaaattatactttagtgttagagaaatattaaaacttataatttcagctttttctaaaagatttagtgcaaaagcaggtaaagcggaagattttttaagatcagcatttacaggaggaacattattcaattctttaggtttttactatgtaggaccaattgatggatacgacttagattctttaatacaagtactaaaaaatgcaaaagaatctaatcatgaaggtccaataatgattcatattaaaacggaaaaaggaaaaggctattcttttgctgaaaatgcgttagacaaatatcatggagtatcaaaat

SEQ ID NO: 232785 - DNA, 900 bp, Unknown
  Bacterial polypeptide expressing nucleotide sequence isolated from the Sargasso Sea
gctcgaccagtaggagcaatgagtacttatttagcaaaaattttttcgggtaagatttactttagtttaagagagacaataaaattaattatgtcagctttttcaaaaagatttagtgcaaaagcaggtaaagcagaggatttacttagatcagctgttacaggtggaactttgtttagttcactcggattttattacattggccccatagatggtcatgatttaaattcactaattcctattttaaagaatgctaaagactctaagtacgagggaccaattttaatacatattaaaacaaaaaaaggaaaaggttacacttttgctgaagaagcaaaggatcattatcatggagtatcaaaatttaatgtcaaaactggtgaacaacacaaaagcacaagtaaattaccatcatatacaaaggtttttgcaaatactttaattcaacatgctaaaaaagacagtaaaattgtagctattacagctgcaatgcctgatggtaccggtcttgatatttttcgtaaagagttcccagataggactttcgatgttggaattgcagagcaacatgcagttacatttgctgcaggtttagctaccgaaaactttaaaccctatgcagctatttattctacttttcttcagagagcttatgatcaagtagttcatgatgtagcaattcaaagtttacctgttaggtttgcaatagatagagcgggacttgttggggctgatggaccaacacatgctggaagttttgatacaacatatttaactactttaccaaattttattgttatggcagcaagtgatgaggcagagctcgtaagaatgataaatacatctactgagattaatgatagaccttgtgcatttaggtatccaagaggaacaggatta

SEQ ID NO: 232786 - DNA, 799 bp, Unknown
  Bacterial polypeptide expressing nucleotide sequence isolated from the Sargasso Sea
atccatataaaaacagaaaaaggaaaaggatatgaatttgctgaaaaatcaaaagacaaatttcatggtgtatccaaatttaatgtaaataccggcatacaagaaaaatctacctcgagctcacctgcatatactaaagtatttgccaatacactaattaaacatgctgaaaaagatagtaagataattggaataactgctgcaatgccatctggaacagggatggatttatttggggaaaaatttccttcaagaatgtttgatgttggaattgccgaacaacatgcagtaacttttgcagctggactttctactgagggatacaagccctatgcagcaatatactctacctttttgcaaagagcctatgatcaagttgttcatgatgttgcaattcaaaatttaccagttaggttcgctatagatcgtgcaggactagtaggtgcagatggacctactcatgccggcgcttttgacataacttatctttctactttaccaaattttgtagtgatggccgcaagcgatgaggctgaacttgtaagaatggtaaacacttcaatagatataaatgataggccatcagcattcagatatccaagaggaaatggcgtaggagtcgatttaccttctattgatgaaaaaatagaaattggtaaaggacgagtaattaaagaaggaaagaaaattgcaataattaattttggagcaagattaagtgaatgtttgatggcctcagaaaatctctcaaaaaaaggggttaatcctacaattgtagatgctagatttgccaaacctt

SEQ ID NO: 232787 - DNA, 760 bp, Unknown
  Bacterial polypeptide expressing nucleotide sequence isolated from the Sargasso Sea
aatcatctggcggatgagttgaggtcggatttaatttcttttgtttcaaaaacaggaggacatttgggagcaggtttaggtgtagttgaattgacaatagctctccactacgtttttgatgctccgaaagataaaataatttgggatgtgggtcatcaagcctatccacataaaatgcttactggtagaagggatttaatgcaatcgctcaggaaagaaaaagggttgtcaggattcacaaatagggcagaatctaaatacgacgtttttggtgcaggtcattcatcaacatcgatttcagctggactgggaatggctgttgcaagagacttaaaaggagaaaacaatacaattatatctgtaattggagatggtgctatgagtgctggtatggcttgggaagctttaaataatttaggatcgcaaaataaaaaaatgatagtaattttaaacgataacgacatgtcgatagctccagctgtaggtgctgttagttcttacctttcaaaactaatttcttctaagccattaacttcaatgagagagttagcaaagcaggtagcaagtcatctgcctgtagaaattgaaaaggctgctaagagagccgacgaactcgctcgaactatgatgggaggagggactatttttaacaatttaggtatgtattatattgggccagtagatggccataatgtgatagatttagtccacttgctaaaaaatttaaataataactctagtgatggccccgttttattgc

SEQ ID NO: 232788 - DNA, 958 bp, Unknown
  Bacterial polypeptide expressing nucleotide sequence isolated from the Sargasso Sea
agatttaaatcaattatctaacgaactaagaaaagaattaatcgatgctgtttctgaaacaggaggtcatttgggggcaggtttaggagtagttgaattgactgtagctcttcactacatttttgatacaccaaaagataagattgtttgggacgtaggtcaccaagcttatccgcataaaattatcacagggagaagaaataaaattagaactctaagaaagggtggaggtttatctggttttactaaaagatcggagagtgaatacgatccttttggagctgcacacagttctacatccatatcttctacattaggtatggcagttgcaaaaagattatcaaaaaattctaaccatgttgtagctgtaatcggagatggcgcaatgagcgcgggaatggcatatgaagcaatgaataatgctggagctatgaaatcaaaattaattgtaatattaaatgataacgatatgtccatagctcgaccagttggagcaatgagttcttatctagccagactattatcaggaaaaacatattttagtttaagagaaacgttaaaattgattacttctgctttttctaaaagatttaaagatagagcaggtaaagccgaagaatttattagagacatagtttctggaggaactctttttaatgaattaggtttttattatgtaggacctatagatggacatgatttaaatgtattattaccagttttaaaaaatgtaaaaaattcaaaatataatggacctattttaatacacgcagttaccaaaaaaggaaaaggatataaaccagctgaaaattctagagataaatttcatggagttagtaaatttaacgtgataacaggcgaacaatctaaatctaaaactaatttacccacatacaccaaagtatttgctgatacctttagtaaacatgcggagaacgatactaaaatcgtaggaatt

SEQ ID NO: 232789 - DNA, 875 bp, Unknown
  Bacterial polypeptide expressing nucleotide sequence isolated from the Sargasso Sea
aatggccggatcctcaaaaacaaaaatgattgtaatattaaatgacaacgatatgtcaattgcaaagcctgtcggcgcaatgagcacatatcttgcaaaattattatctggaaagatgtactttagtttaagagaaactattaaattaataatttcagcattttcaaaaagatttagtgataaagctggaaaagcagaagattttttaagatctgcagtaacaggaggtacattattcaattctcttggattttattatgttggcccaatagatggttatgatttagatggtttaattttagttttaaaaaatgccaaaaaattaaatcatgaaggtccaataatgattcatataaaaactcaaaagggaaaagggtatgagtttgcagaaaagtcccatgacaagtatcatggagttacaaaatttaatgttaaaactggtattcaagaaaaaagtaaatctaaaattccatcttacacaaaggtatttgctaatactttggtaaaacacgctgaaaatgatagcaaaataattggaattacagctgcaatgccatctggaacaggtatggatatattttctaaaaaatttccaaatagaatgtttgatgttggtattgcagaacaacatgcagtgacctttgctgctggcctagcaacagaaggttacaagccttatgcagcaatatactcaacttttttacaaagagcttatgatcaagtggttcatgacgtagcaatacaaagtcttcctgttaggtttgcaatagatagagcagggcttgtaggagcagatggtccaacacatgcgggatcgttcgatattacctacttatctacactaccaaattttattgttatggcagcaagcggcg

SEQ ID NO: 232790 - DNA, 838 bp, Unknown
  Bacterial polypeptide expressing nucleotide sequence isolated from the Sargasso Sea
aaaatttccagatagatactatgatgtcggaattgctgaaggtcatgctgttacattttctgctggtttagcaacgcaaggaattcggcctatagtcgccatatattcaacatttttacaaagagcatttgatcatatagttcatgatgtttctgttcaaaatttacctgttattttctgtatggatagatcaggaattgcgggagaggatggtcccactcatcatggtgcattggatataccttatttcaggtgtatccaaggaatgattctagctgcgccaaaaaatggaaatgaattgagaaatttactttacactgcgttaaaccagaaaggtccttttggtataagatatccaaaatttagttctgttgagtttgatagaaatggtcaagctgaccttttgccaattggctcttgggaggtggaaaaaaagggtgatgatttaatgatattggcagttggtccgatggtttacaatgcattatctgttgcctcagaattagataaagaaaatatatcttgtgaggtagttaattgcaggtttattaaaccaatggatacggcttatttaaactctataattaaaagaggatttgataaaatcattacaattgaagagggagttataaacggtggtttcggtgatgctgtatgttcttacttattagaaaatggttatcgtggagcaattaaacggttaggtcttccggactcctatgtagagcatggtagcaggaatcaaatattaaacagtctgtctttgggtaatgatggtattaaaaataaaattatcgagttgtatgctagcgctaaagaagaagtcctagaaaagtag

SEQ ID NO: 232791 - DNA, 859 bp, Unknown
  Bacterial polypeptide expressing nucleotide sequence isolated from the Sargasso Sea
atgacaaaagaatatgaatatttaaatcaaataaattttccttcagatttaaagaagatacctgagtcaaagttgcaaaaagtagctgatgaattaagagaggaaatgatcgatgcagtatcagttactggaggccatttaggagcaagccttggggttgttgagctatgtgttgcacttcattttatttttaatacacctaatgacaaattaatttgggatgtgggacatcagtgttacccacataaaattttgactggaagaaaagataaaataagaactttgaggcaaggaggtggcctatcaggctttacaaaaagattagaaagtgaatatgatccttttggtgcagcacatagttcaacttcaatctcctcagctttaggtatagctgaagctaatagactttcaaataagtctgataatgttattgcagttataggtgatggagccatcagtgcaggtatggcttatgaagccatgaacaatgctggtgcatctaaaactaaaatgattgtcatattaaatgataatgacatgtctatagctagacctgttggagcgatgggcacttatctagctaaaattttttcaggtaaaatttattttagtctgagagagacaataaaattaattacatctgctttttcaaaacgatttagtgcaaaagcaggcaaagctgaagacttgcttagatctgctgtaacaggtgggacgttatttagttcactaggattttattatattggcccaattgatgggcatgatttaagctctttagttccaatcttaagaaatgctaaggactcaaagcatgagggacccattttaattcatatcaaaacaaaaaaaggaaaag

SEQ ID NO: 232792 - DNA, 921 bp, Unknown
  Bacterial polypeptide expressing nucleotide sequence isolated from the Sargasso Sea
tgtttcaaaacaggaggacatcttggtgctggtttgggggttgttgagctaactgtagctttgcactatgttttcaatacaccaagagataaattaatatgggatgttggacatcaagcttatcctcataaaataattacaggtagaaaaaaaagaatcgaaagccttagaaaaaaaaatggattatatggttttgtaaaaagaaaagagagtgagtatgatccatttggaacagctcatagttctaccgctgtttcagctggattaggaattaaaatagctaaagacattaataaagataatgcaaatgttatttgcgtagtaggagatggtgcattaagtgctggtctagcatatgagggtttaaataatgcaggagcattaaagaaaagattaattgtgattttaaatgataataaaatgtcaattgataaacccgttggtgcaatgagcacatatttgacaagattattatcatcaaaatcttattctagtttgaggaatctaataacaaaatttagtagaacactgccaaataaattatcaaaaacactctatcgcactgaagagttttctaaaggtatgttatcgggtgggacactttttgaagaacttggtttctattatttaggacctattgatgggcataatgtaaatgaattagtttcagttcttgaaaacattagagataataaattcaataaaccaatttttttacactgtattacaaaaaaaggaaaaggttataaacctgcagaaaaatcagatgataaatttcatggtgttgaaaaatttgatatagatactggtgcttctataaaaaaatctaaccaaaaatcttattcccaagtatttggagaaacattatcaaaacttgcagaaaatgatgaaaagatagttgctattacggctgcaatgatg

SEQ ID NO: 232793 - DNA, 925 bp, Unknown
  Bacterial polypeptide expressing nucleotide sequence isolated from the Sargasso Sea
gtcttccaatgtaatagctgtcataggtgatggagcaattagtgcaggcatggcttacgaagctatgaataatgctggagcatctaagacaaaaatgattgttattttaaatgataacgacatgtcaattgcaaaaccagttggagcaatgagaacttacttagcaaaattatttactggtaaaatatatttcagtcttagagaaactttaaaattaattacatctgcattttcaaaaagatttagtgctaaagcaggaaaggcagaggattttttccgttcagcagttactggaggtacattgtttagttcacttggtttttattacgcaggtcctatagatggtcatgatttatcaagcctagttccaattttaaaaaatgcaaaagaatcaagacatgaaggtcctataatgatccatattaaaactcaaaaaggaaaaggatactcttatgcagaaaaagcaaatgaccactatcatggagtatcaaaatttaatgttgagactggagaacaggtaaagagtaaatctaatcttccagcttatactaaagtttttgctaacacgttaattaagcatgctaaaaaagatagcaaaataataggaataacagcagcgatgcccggaggtactggtatggatatttttggaaaggagtttccaagcagaatgtttgatgtaggaatagcagaacaacatgcggtaacttttgctgccggtttagcaacagagggttataaaccatatgctgcaatttactctacctttttacaaagagcatatgatcaagtagttcatgatgttgccatccaaagtttacctgtaagatttgcgatagatagggcaggattagttggtgctgatggatcaactcatgctggttcatttgatataacttacttatcaactttgcctaattttatt

SEQ ID NO: 232794 - DNA, 605 bp, Unknown
  Bacterial polypeptide expressing nucleotide sequence isolated from the Sargasso Sea
aatgactaaattgataaaacagataaattttccttctgatttgagaaaattaaaaaaagaaaatctcaaacaagtttcagatgaactaagaaatgaacttatagatgttgtttctgagactggcggacatcttggtgcaggtcttggagtagtagaattaaccgttgcgttacattatgtgtttgacacaccaaaagataaattagtttgggacgtgagccatcaatgttacccacataaaataataactggcagaagagatagaataaaaactttgagaaaaggtggaggcttatctggttttacaaaacgaactgaaagtgaatatgatccctttggtgcagcacatagttcaacttctatttctgcaacattaggcatgtcagttgcaaaaaaattatctaacaacaataataatgtaattgcagtgattggagatggagctatgagcgctggaatggcttatgaagcgatgaataatgctggagcattaaaatctaatttaatagtggtattaaatgataatgatatgtcaatagccagaccagtaggagcaatgagcaaatatttagctaatcttttatctggtaaattgtattttagtt

SEQ ID NO: 232795 - DNA, 742 bp, Unknown
  Bacterial polypeptide expressing nucleotide sequence isolated from the Sargasso Sea
gccgcgcttggttttgccgtgtcgcgcgacctgggcggtgcgtgtgatacggggcatggcgatgcgatcgccgtgatcggcgatggggcgatgtcggcgggcatggcctttgaagccctgaacaacgcgggtcatctgaaaaagcgcctgatcgtcattctgaacgataatgaaatgtccatcgctcccccggtgggggctttgtcatcctacctctcgcgcctctacgcgggtgagccgtttcaggagttcaaggccgccgccaagggggcggtctctctcctgccgccgcctttccaggaaggtgccaagcgcgcgaaggaaatgctcaaggggatgaccgtggggggcaccctatttgaggaattgggtttcagttatgtggggcccatcgacggccatgacatggatcagcttctgccggtgatgcgcaccgtacggcagcgggcgaatggtccgatcctcatccatgtctgtaccaggaaaggtaaggggtatgcccctgccgaaacccgcagcgacggcggccatgccacggcgaagttcgatgtggcgaccggtgagcaaaagaaggccgcgtcaaacgcgcccagctacaccaaggtctttgccgaggcgctgttgcaagaagccgcgcaagacgacaagatctgcgccattaccgcggccatgcccgatggcacggggctggatcttttcgaaaaacgctatcccagtcgctgtttcgacgttggcatcgccg

SEQ ID NO: 232796 - DNA, 907 bp, Unknown
  Bacterial polypeptide expressing nucleotide sequence isolated from the Sargasso Sea
gagtcaaattaactttccatcagatttaaataaaatacctgaatcaaaattacaaaatgtagctgatgagttaagagaagaactgattgatgtagtatctgttactggtggacacttaggagcaagtcttggtgttgtagaactgagtgttgctcttcattttatttttaatacacctaatgataaactcatttgggatgttggacatcaatgttaccctcataagatcttgactggacgaaaggatagaattcgaactttgagacaaggtggaggtatatctggttttacaaaaagatctgaaagtgaatatgatacttttggtgcagcacatagttccacatcaatatcttcagccttaggtatagcggaagcaaataaactttcaaataaatctgataacgtcgtagcagtcattggtgatggagctataagtgctggtatggcatatgaggctatgaataacgcaggtgcatctaaaactaagatgatcgttatattaaatgataatgacatgtctatagctagaccagtaggagctatgagtacttacttagctaaaattttttcaggtaaaatctattttagtcttagggaaactattaaacttataatgtcagcattttccaaaagatttagtgctaaagctggaaaagcagaagatttactgagatcagcagtaactggaggaacattgtttagttctttaggattttattatattgggccaatagatggtcatgacttaaattcattaattccgattcttaaaaatgcaagagactccaaacatgaagggccaatactaattcatataaaaaccaaaaaaggtaaaggttatacatttgcagaagatgctaaagacaattttcatggtgtctctaaatttaatataaaaactggaaaa

SEQ ID NO: 232797 - DNA, 994 bp, Unknown
  Bacterial polypeptide expressing nucleotide sequence isolated from the Sargasso Sea
atcttttacactccatatgataatttagtatgggacgttggtcatcaagcgtaccttcataaaatccttacaggaagaaaaaataaaattcagactataagaaaaaaagaaggtctagctccttttccttcacgaaaagaaagtgagtatgatacttttggggttgggcattcaagtacttcattgagtgcaatgctaggaatggctatagcatcaaaagaatccaaccccgataaaaaacatgtggcaataattggtgatggtgcaatgactgcaggcattgcatttgaagcgttaagccatactggccatttaaaacctaatgttctaataattttaaatgataatgatatgtccatttctgagaatattggaggactctctaattatttctcaagaatatgggcatcaaaaatatacaaaggaattaaaaaaagtggcgcaagctttttaaaacctttaccgcaagcatatcatctcgcaagaaaagtagagactcaaatgaaagctatggtagcaccaggaacaatctttgaagaactaggattaaattatattggaccaattgatgggcataatttaaaagaattaataaatgttatatctaatctaaaagaatttgatggtcctcagtttttacatgttattacaaaaaaaggtgcgggtttagaccctgcagaagcagatagaattggatttcatgccattggaaaaattaattctattaaagatgaaaaaacaaaacaaaaaaaatatcaagatatttttggggaatggattgttgatatggcgtcacaagacaatgatttaattggaataaccccagcgatgaaagaaggatctggtcttgttatgtttagtaaaaaatatcctgaaagatattttgatgttgcaattgctgagcaacattctgtaacttttgcagctggacttgctgttgaaaataaaaaaccccgtggttgctatatattcaacatttttacaaagagcttat

SEQ ID NO: 232798 - DNA, 834 bp, Unknown
  Bacterial polypeptide expressing nucleotide sequence isolated from the Sargasso Sea
aagcatgaaggtccaattatgattcatattaaaactcaaaaaggaaaaggttattcatatgcagaaaaagcaacagatcattatcacggtgtttcaaagttcaatgttgagacaggtgagcaattaaaaagtggaagtaatgttccagcttatacaaaagtttttgctaatacactagttaagcatgctcaaaaagatagtaaaattgtaggtataacagcagctatgccaggtgggacaggaatggatatttttggaaaagaatttccaaaaagaatgtttgatgtaggtatagcagaacaacatgcagtaacttttgctgcaggtttggctacagaaggttataagccctacgcagcaatttattctacatttttacaaagagcttatgatcaagttgttcacgatgttgctattcaaagtttgccagttagatttgcaattgatagagctggcttagttggggctgatggatctacacacgctggctcatttgatataacttatttatcaactttacctaattttattgttatggccgctagtgatgaagctgaattagtgaaaatgataaatacctcaattgatataaataataaaccttgtgccataagatatccaagaggaacaggtattggagttgagcttccttcaatagatgaaaaaattgaaataggaaaaggaagaattattcaagaaggaaaacaagtttgtattttgagcttaggaacaagacttgaagaatgtaagttagcagcagaagaattaaagaacaaaggtattttaactacaattattgatgcaagatttgccaaacctttagatgaagagctt

SEQ ID NO: 232799 - DNA, 832 bp, Unknown
  Bacterial polypeptide expressing nucleotide sequence isolated from the Sargasso Sea
aacattgcgtaaaggaggaggtctatcaggatttacaaaaagggcagaaagcgaatacgatccttttggagcagcacacagttcaacctcaatttcttcaactttgggaatggctactgctaaaaaattatctaatgacaataacaatgttgtagctgtaattggtgatggagcgatgagtgccgggatggcatacgaagcaatgaataatgccggagcgatgaagtcaaaattaattgtagtattaaacgacaatgatatgtcaattgcaagacctgttggagcaatgagtaaatatttggcgagacttttatctggtaaaatttactttagttttagagaaactattaaactaatactttcagctttctcaaaaagattttcaaaaactgctggaaaagcagaagatgtgttaagaggcattgtaacaggaggtacacttttcaatcaactaggtttttattatattggaccaatagatggtcatgacgtaaataatttagtcacaatattagaaaatgtaaaaaattcaaaacatcaaggaccaatattgatacatgcaattacaaaaaaaggaaaaggctataaacccgcggaagaatccggagataagtatcatggagtttccaaatttaatattttaactggagagcaatccaaaggaaaatcaaaaaccccctcatatacaaaagtctttgcaaatactttaattaaacatgcagagaatgatacaaaaatagtagctataactggcgctatgccgtcggggacaggattagatttattcgaaaaaaaatttcctgacagaatgtttaatgttggtattgcagaa

SEQ ID NO: 232800 - DNA, 596 bp, Unknown
  Bacterial polypeptide expressing nucleotide sequence isolated from the Sargasso Sea
attgagaattttcaaacaaattcctactgagaaaccaaatacacctttactagacggtataaattctccatctgatcttaagacattttcaataaaagagcttgaaactttatctgacgaattgagagaatttctcctatattctgttggtaaaagtggtggtcaccttggtggcggtctaggtgtaatagagcttacaataattattcatcatttatttgatactccatacgacaatctaatttgggatgtaggtcatcaagcatatcctcataaaattttgacaggaagaaaaaatcatattgaaacaattagaaaaaaagatggattagctccatttccttctagggatgagagtgaatatgatgcatttggtgtaggacattcaagcacatcgattagcgcccttcttggtatggctattggttctaaagaatctaatccaaataaaaaacatatcgcagttataggagatggagcaatgaccgctggaatggcttttgaagccttaagcaatgcaggccatctaaaagcaaacattctaattattttaaatgataatgatatgtctatttctgaaaatatcggaggtctat

SEQ ID NO: 232801 - DNA, 679 bp, Unknown
  Bacterial polypeptide expressing nucleotide sequence isolated from the Sargasso Sea
tatgcgtctgagccagttaagtcatccgaatgagcttcatggcttggccattagtgaattggaagatgttgcttgccaaattagagaaaggcatcttcaagtagtttctactagtggtgggcacttaggtccaggtcttggtgttgttgagttaacaattgctctctatcagactttagacttagatctggataaagttatttgggatgttgggcatcaagcttacccacacaaactattaacgggaagatataaccaatttgattcacttagacagcaaaaaggcgtagctggctacctaaaaagaacagaaagtaaatttgatcattttggggctggtcatgcgagtacatctatttctgctgctcttggtatggcgattgctagagatcgaaaaggggaggattataaatgtgtagcagttattggagatggtgcattaactggtggaatggctttagaggctattaatcatgccggacatcttccaaaaactcctcttttggttgttctaaatgacaatgatatgtctatttctcctcctgttggagcattgtcgacttatttaaatcgaatgcgtcatagcccacctgttcaatttatatctgatagtgttcaagaaagtgtcaaaaatcttccattcatgggagatgctatccaagaggaatttaaatccctt

SEQ ID NO: 232802 - DNA, 866 bp, Unknown
  Bacterial polypeptide expressing nucleotide sequence isolated from the Sargasso Sea
ggtttttgcaaaaactttaatcaagcacgctgaaaaagatagtaaaataattggaataactgcagcaatgccgtctggcactggaatggatttattttcagaaaagtttccaaatagaatgtttgatgttggaattgcagaacagcatgcagttacttttgccgcaggattagcaacagagggttacaaaccttatgcagcaatatattcaacttttttacaaagagcttatgaccaagttgttcatgatgtagcaattcaaaacttgcctgttagatttgcaatagatagagcaggacttgtgggagcagacggaccaacgcacgcagggtcatttgatattacttatttaactacactaccaaattttgtagttatggcaccaagcgatgaagctgaacttataagaatgattaatacctctgttgatataaataacaggccatctgctttaagatatcccagaggcaatggtgttggagttgaattacctaatattgatgaaaaaatcgaaataggaaaagggagaataattttggaaggaaaaaaagttgcaataattaattttggtgcaagattgaacgagtgtttactagcgaatgaaatattaaataaaaaaggtattggaattagtatagttgatgcaagatttgcaaaacctctagacgaaaatttaatttgggaaatatcaactaatcatgatgtgctaattacaattgaagagggttcgctaggcgggtttggttctcatgttagtcaatttttggcagaaaaaaacttattagataataatttaaagtttagatcaatgattcttccagacaaatttatagatcataataagccagaaataatgtacaaagaag

SEQ ID NO: 232803 - DNA, 880 bp, Unknown
  Bacterial polypeptide expressing nucleotide sequence isolated from the Sargasso Sea
attgcactatgtttttaacactcctagagatagattgatttgggatgttggacaccagtcctatcctcataaaattttgactggtagaaagcataagattgaaactttaagacaaaaaaatggcttgtatggttttgtaaaaagaagtgaaagtgaatatgacccttttggaactgcgcatagttctacatctatttctgctggaatgggtatgaaagttgctaaggatttaaacaatgatgatgctaaaattatttgtgttattggtgacggagctcttagtgccggtatggcgtatgaagcactgaataatgtgggtgctagtaacaaacagataatagtaattttgaatgataacgaaatgtcgattgacaggcccgtaggggcaatgagtaattacttaacaaaattgctttcttctaaacaatatacaaatgttagaactttgttaaaaaaaatatcatctaaattatcaaattcagtatccaaaactttatacaaggctgaagaattttcaaaaagtttagttacaggaggcactttatttgaggagctaggtttttattacttaggccctattgatggacatgatattaaaacattggtacctgtattggaaaatattaaaaatttatcaattgaaaaacctatattccttcattgtgtaactaaaaaaggaaagggttatgagccagcagaaaaatctgatgataagtttcatggtgtaaataagtttgatctaaaaacaggtcaatctctgagtttatctaataaaaaatcatattcatctgtttttggagagacattgtcaaatgcagctttaaaagatgaaaagattgtcgctattactgcagctatgatgagtggaacgggacttgat

SEQ ID NO: 232804 - DNA, 268 bp, Unknown
  Bacterial polypeptide expressing nucleotide sequence isolated from the Sargasso Sea
tatgtctaataaatttttagataaaataaatttcccatcagatttaaaagaactttctttaggtaaccttgaagatttagctaaagaacttagaaataaaacaatagatacagtatcaaaaacaggaggtcatttaggagcaggtctaggtgtagtggaattaactattgccttacattatgtttttaatactccaagagatagattaatttgggatgttggacatcaatcatatcctcataaaattttaacaggtagaaaaaataaa

SEQ ID NO: 232805 - DNA, 945 bp, Unknown
  Bacterial polypeptide expressing nucleotide sequence isolated from the Sargasso Sea
agataaaatcaaaaaatctgacctctcctcttctaccacctccaaacctaaaagtccttcctactctaaaatctttggtgattggcttatacataaagctaataaagataaaaatatagtggccattacccccgcaatgggagaaggatcaggaatgaatgaattctctaaagcttttccagaaaggtattacgatgtagctatagcagaacaacacagtgtaagttttgctgcaggtcttgcgtgcgaaggattaaagccagtagttgctatttatagtactttccttcaaagagcttacgatcaattaatacatgacgttgctcttcaaaatttggatgttctttttgctatagacagagctggattagttgggctagatggagctactcaccaaggtgcctttgacctctcctatctgaggtgtatacccaatattacgataatggcaccctcagatgaagacttggcttggaagatgttaaatacaggttacgaactctctggtccagctgctgttagatatcctagaggtagcggaagaggtattgcatatcagaaatctgaagaaactattgaaatcggaaaaagtaaaaccattcttgaatcagaaagtgctgaagtagttattttatcttttggcagtcttttggattctgcgattgaagctggaaaagaaatgaaagctagagttgttgatatgagatttgtgaaacctattgataataatttaataaatgaaatttcagataaatttaagttggtagtaacacttgaagataatgtaattgctggtggagctggatcggcagtaaacgaaaaactcttagaattgaactcttcttctaaagttcttaatctaggtttaccagatgggtttattgaacacggagaccaagagcaacaaaaaattatgaataatcttgatggtaccggtgtaaggaa

SEQ ID NO: 232806 - DNA, 937 bp, Unknown
  Bacterial polypeptide expressing nucleotide sequence isolated from the Sargasso Sea
tatgtttttgataccccctaatgataaattaatatgggatgttggccatcaatcttacccacataaaattttaactggaagaaaagataaaattagaactttacgacagggcgatggtttatcaggttttacaaaaagatctgaaagtgagtatgacccatttggagcagcacatagttcaacatctatttcatctgcattaggaattgcagaggcaaataaattagaaaataagtcttccaatgtaatagctgtaattggtgatggagctattagtgcaggtatggcttatgaagccatgaataatgctggggcatctaaaacaaaaataattgttattttaaatgataacgacatgtcaattgcaaaaccagttggagcaatgagaacttatttggcaaaattatttactggtaaaatatattttagtcttagagaaaccttaaagttaattacatctgcattttcaaaaagatttagtgctaaagcaggaaaagcagaggattttttccgttcagcagtcactggaggtacattgtttagttcgcttggtttttattatgcaggtcctatagatggtcatgatttatcaagcttagttccaattttaaaaaacgcaaaagaatcaagacatgaaggtcctataatgattcatatcaaaactcaaaaaggaaaaggttattcttatgcagaaaaagcaaatgatcattatcatggagtgtcaaaatttaatgttgatactggagaacaattaaagagcaaatcaaaccttccagcttatacaaaagtatttgcaaacacgttggttaaacatgctaaaaaagatagcaaaatagtagggataacagcagcgatgcccggggggactggtatggatatttttggaaatgagtttccaaatagaatgtttgatgtaggaatagcagaacaacatgct

SEQ ID NO: 232807 - DNA, 921 bp, Unknown
  Bacterial polypeptide expressing nucleotide sequence isolated from the Sargasso Sea
cgaatacgatccttttggagcagctcatagttcaacatcaatctcttccacattaggaatggcagttgcaaaaaagttatcaaagaattctaatcatgtagtagcagtaattggtgatggagcaatgagcgcaggaatggcctacgaagccatgaataatgctggcgccatgaaatcaaaattaattgtaatattaaatgataacgatatgtcaattgctagaccggtcggagcaatgagctcttatttggcaagattattatcaggcaaaacatattttagttttagagaaacattaaaattaattacttctgcattttctaaaagattcaaagataaagcgggcaaagcagaagagtttattagagatattgtttcaggaggcactctatttaatgagctaggtttttattatgtgggacctatagatggtcacgatttaaatatattattaccagttttaaaaaatgttaaaaattcaaaatataatggccctattttaattcatgctgttacgaagaaaggtaaaggatataaaccagcagaagattccagagacaaatatcatggagtaagtaaatttaatgttgtcacaggcgaacagtctaagtcgaaaactaatttacctacctataccaaagtttttgcagataccttggtaaaacatgcggaaaacgatactaaaattgttggaataactggagctatgccatcgggtaccggaatggacatttttggaaaaaaattccctgacagaatgtttgatgttggaatagctgaacaacatgcagttacttttgcagctggcttagctaccgagggttataagccttttgctgccatttattctacttttcttcaaagagcttacgatcaagttgttcacgatgttgctattcaaaatttacctgtacgatttgc

SEQ ID NO: 232808 - DNA, 850 bp, Unknown
  Bacterial polypeptide expressing nucleotide sequence isolated from the Sargasso Sea
tcatcttggtcctggactaggggtagttgaattaacacttgctttatatcaaacattagatcttgatattgataaagttgtatgggatgttggccatcaggcttatccacataagttaattactggacgtttcaatgaatttgattccttacgtcaacaaaaaggtatagctggttatcttaaacgtactgaaagtatatttgatcattttggagcaggccacgcaagtacatcaatatcagctgcgttgggaatggcaattgcaagggatagaaaaggggaagatcataaatgcgttgcagttataggtgatggagcattaacaggtggaatggctttagaagcgataaatcatgcgggacatttaccaaatactcccttagttgttgttctgaatgataatgatatgtcaatatcgccacctgttggagctctttcaacatatttgaataaagttagactaagtccaccattacaatttttgtcagatagtgttcaggaaagtgttaaaaatattcctcttataggtaaagatatacctgaagaattaaaaaatataaaaggaagtgttagacgtttagcggtaccaaaagttggagcagtttttgaagaacttggttttacgtatatgggcccaattgatggacatgatatttctaatcttataaatacttttaatgctgctcatagacttaaaaaaccagtaatggttcatgttgttacaactaaagggaaaggatatccatatgcagaagcagatcaagtagggtaccatgctcaatcatcattcgatcttacgacgggtaaatcaattccatcaagcaagcctaaaccagtaagctatagtaaa

SEQ ID NO: 232809 - DNA, 928 bp, Unknown
  Bacterial polypeptide expressing nucleotide sequence isolated from the Sargasso Sea
ccgaatgttggagcaatgagtaaatatttaacacgaattacaaccaatccattatataataaaattcgtaatgagatatggaatataacggattcacttccatggggaaaaaaattatccaaaaaaattctacaaaaaattgatgaaagcctgaaagcgcttttggttccaggtgtattatttgatgagctcggttttcgatattttgggccaattgatggtcatgacgttaatgaattagtaaaaacattaaataatattaagaatattaatcagcctgtcttattgcatatcataactaagaaaggtaaaggactagtctctacttctgaaaagaatggtgagtatcatagagatgctgtcaagtatcatgcagtgaaacctagtcaaaataatggtaaattgaaaaaatctagtgagacaaaaataccttcttttcaagatgtgtttggatatttatcctgcgaagttgctcgaaatcgtaaggatactatatgtataaccgcagccatgcgagaaggaaccgggttggttccttatgcaaaagaatttcctaatagatattatgatgttggaattgctgagggccatggggtaacattttctgcaggatttgcaacagaaggactaagaccaatagtggctatttattctacttttttgcagagagcatttgatcatattgtccatgatgttgctatacaacatttacctgtcatattttgtatggatagatctggtattgcaggtgaagacggaccaacgcatcatggttcattggatattccttatttaagatgtatacaggatatgattgtttctgcaccaaggaatggaaatgaatttcgccacttactttactctgcgctcaatcaaaaagaatctcctttttctattcgatatcctaaatcaagtgccgttgaatttg

SEQ ID NO: 232810 - DNA, 610 bp, Unknown
  Bacterial polypeptide expressing nucleotide sequence isolated from the Sargasso Sea
aatgcagcttaaaatactaccaaagattaaatctcctgctgatattagagagcttagcgatagtgagctccttcagctttcagacgaagttagaagttttacaattgaaacaataactgaaataggtggccaccttgcgcctacccttggggttatagagcttaccgtagcattgcacaaagtctttgacaccccaaaagataaaattatctgggacgttggacatcaaggttacgctcataagatcttaactggtaggttgaacaaatttaataccattcgacgaatgggaggtttaagcggattcttaaaaagaagtgaaagtgagtatgatgtttttggtgctggacacgcgtcaacttcaatatccgctgctgtcggagtggcagaggctcaaaagcataatggtgataattttcgtgtcgtatcagtaattggtgacggatctatgactggcgggcttgcttttgaggcaatgaacaatgcgggtcatcttaaatcaccaatgatcgttattttaaacgataatgaaatgtccatcagtccaaatgttggagctttgaatacctaccttactaagatagtaacaaatccaatttataatcaaatt

SEQ ID NO: 232811 - DNA, 862 bp, Unknown
  Bacterial polypeptide expressing nucleotide sequence isolated from the Sargasso Sea
gatgacaaaaaattataaatttttagacgatataaattttccatctgatttaagaaaaatttcagaaaaagatttacaacaagtttctgatgaagttagaaaagaaatgatcagtgcagtttctgaaactggaggacaccttggggctggtttaggtgttgttgagctaacagttgctcttcattatgtttttgatactccaaatgataaattaatatgggatgttggtcaccaatcttatccacataaaattataacaggtagaaaaaaaaaaattagaacattaagacaaggtgatggattatcaggttttacaaaaagatcagaaagtgagtatgacccatttggcgcagcacatagctcaacctctatatcttctgcattaggaattgcagaagcaaataaattagcaaataaaacttctaatgtaatagctgtaattggggatggtgcaattagtgcgggtatggcgtatgaggctatgaataatgcgggagcatctaaaactaaaatgattgttattttaaatgataacgatatgtctatagctaaaccagtgggtgctatgaggacatatttagcaaaattatttacaggaaaaatttattttagtcttcgagaaacattaaaacttattacatctgcattctcaaagagatttagtgcaaaagctggtaaagctgaagattttttaagatcggcagttactggcggtaccttatttagttcattaggtttttattacgctggtcctatcgatggtcatgacttaaatgatctaattccaattttaaaaaatgcaagagactcaaatcacgaaggcccaataatgatacatatcaaaacacaaaagggtaaaggg

SEQ ID NO: 232812 - DNA, 841 bp, Unknown
  Bacterial polypeptide expressing nucleotide sequence isolated from the Sargasso Sea
aaaattcttcaaaatctaaaagacggaccaaatcatggtccagtattgctgcatgttgttactgaaaaagggaagggacaccctttctcaaaagtttctgaagaaaaataccatgcagtttcgaaatttagtatagttacaggagatactttaaaatccgccactaatactcaaacttatacctcagtattttctaaaaccctatgtgaccttgccgaaatggacaagaaaattgttgctattactgcggcaatgccgtctggaacaggattaagtaattttaaagataagtttgcaaataggttctttgatgttggaattgcagaacaacatgctgtaacttttgctgctggtatggctacagaaggtttgaaaccatttgtagcaatatattcaacttttcttcaaagagcttatgaccaagtgattcatgacgtggtaatacagaaattaccggtaaagtttatgatggatcgtgcaggactagttggagcagatggtgctactcactctggttcatttgatttagcttatttgctttgcttacctaatattgtagtaatggctccaagtaatgaaaatgagttagctttgatggtatatacagcatctaaatataacgaaggtccaatattttgtagatatccaagaggggaagctgcaggtgttcaaattcaagataaattagtatctttagaaattggtaaaggaaaaattataaaaaaaggaaaaaaaatagcaattttgtctttagggtcaagattaactgatgtaattgaagtacacgattctttaaaaaaagatggttatgacataactatagctgatgctagatttgcta

SEQ ID NO: 232813 - DNA, 916 bp, Unknown
  Bacterial polypeptide expressing nucleotide sequence isolated from the Sargasso Sea
attaataacaggacgtttcagtcaattcgattcactaagacaacaaaatggagtagctggatatctaaaaagaagtgaaagtaaatttgatcattttggtgctggacatgcaagcacttctatttctgctgctttaggaatggcaatagcaagagacagaaaaggtgagaattataaatgtgttgctgttattggagatggagcattaactggaggaatggcattagaagctataaatcatgcaggacacttaccaaatactcctttagttgttgtattaaacgataatgatatgtctatttcacctccagttggagccctttcatcttacttaaataaggtaagagttagtcctccattgcaatttttatccgatagtgttcaagaaagtgtaaaaaatattcccttaattgggaaggatctaccagaagaattgaaaaatattaaaggaagcgttagacgattggctgtgcctaaggttggtgctgtttttgaagaacttggatttacatatatgggaccaattgacggtcatgatattggaaatttagttaatacttttaacgctgctcataaacttaaaaaacctgtacttgttcatgttgtcacaacaaaagggaagggttatccttatgcagaagctgaccaggtaggatatcatgcacagtctgcatttgatctgactactgggaaatctattccatcaaagaaacctaagcctgttagttacagtaaaatatttggtcaaacgttattgaaaatatgtgaacaagatagcaaagtcgttggcattacagctgcaatggctacaggaactggtttagatatattgcaaagaaatattcctgaccaatatatcgatgtaggaatagcagaacaacatgcagttactcttgcggcaggaatgtcctgcgat

SEQ ID NO: 232814 - DNA, 871 bp, Unknown
  Bacterial polypeptide expressing nucleotide sequence isolated from the Sargasso Sea
aggaactggaatggatattttggagaaaaatttccttctagaatgtttgatgtaggaatagcagagcaacatgcggttacttttgctgcaggactagcaacagaaggttataagccttatgcagcaatatattcgacatttttacaaagagcatatgatcaagttgttcatgatgtagcaatacaaagtctacctgttagatttgcaattgatagagcagggttagttggggcagatggccctactcatgctggatcgtttgacataacatatttagcaaccttgccaaattttgtagtaatggcagctagcgatgaagctgaattagtacgaatgattaatacttcagttgatattaatgatagaccttgtgctttcagatatccaagaggaaatgggattggtataaatttaccttctaccgatgaaaagatagaaattgggaaaggaagaataataaatgaaggtaaaaaaatagtattactaaattttggcgcaagattaaaagaatgtttgattgctagagaaaatttaataaaaaaaggcttaaacataaccttagtagacgcaagatttgttaaaccactggacgaaaatcttatttggcaattagccacagatcatgaagcgatgattacaatagaagaaggatcaattggaggtttcggttctcatgtaagtcaatttctgtctgataaaaatttactggacagtaattttaaatttagatcgatgattttgcctgatagatttattgatcaagacaatctagatttaatgtataaatatgcaggattggatgctgatagtatagaaaataaaattttagacattttaaattcaaaaattataattaaaaaaacaaattaac

SEQ ID NO: 232815 - DNA, 796 bp, Unknown
  Bacterial polypeptide expressing nucleotide sequence isolated from the Sargasso Sea
gcacttcattatatttttaatacaccaaatgataaattaatttgggatgtaggtcatcaatgctaccctcataaaattttaactggtagaaaagacagaatcagaacattgagacaaggaggtggtctgtctggttttacaaagagactggagagtgaatatgatccttttggagctgcgcacagttcaacttctatttcatcagctttaggtattgcagaagctaacaaactttcaaataaatcagataacgtaattgctgtaataggtgatggagctattagtgcaggtatggcttatgaagccatgaataatgctggtgcttcaaaaaccaaaatgattgtaattttaaacgataacgatatgtcaattgcccgaccagttggagctatgagcacttatttagccaaaattttttcaggtaagatttattttagtttcagagaaacaattaaattaattacatcggcattttcgaaaagatttagtgcaaaagctggaaaagctgaggatttacttagatctgcagtaactggtgggactttgtttagttcacttggtttttattacattggtccaattgatggacatgatctaaactctttaattccaattttaaaaaatgctagagactcaaaatatgaaggaccaattttaatacatattaaaacaaaaaaaggaaaaggttatactttcgctgaggaagcaaaagacaattatcacggagtatctaaatttaatattaaaactggtgaacaattaaaaagtgcaagtaagtcaccttcatacactaagg

SEQ ID NO: 232816 - DNA, 928 bp, Unknown
  Bacterial polypeptide expressing nucleotide sequence isolated from the Sargasso Sea
tgttatcttaaatgataacgatatgtcaatagcgaagccggttggagctttaagaacttatttagcaaaaattttatctggtaaaatttactttagtttaagagaaactattaaactgataatttcttcgttttcaaaaagattttcgaaaaaagcaggtaaagctgaagatttttttagatcagcagttacaggaggtactttattcaattcactaggtttttactacgtaggtccaatagatggacatgatattgatgtactaacttcagttttagagaatgcaaaaaaaatgaagtatgatggacccatacttattcatattaaaactgagaaaggcaaaggatacaaatttgctgaaaaatctttagataaatatcatggagtttcaaaatttaatattttaacaggaaaacaagaaaaggctaagagtattgccccttcttatacaaaagtttttgccaacacgctaattaaacatgcccaaaatgatagtaagattattggtatcacagcagcaatgccaagtgggacaggcatggatctttttgcagaaaagtttcccgatcgaatgtatgatgttggaattgcagaacagcacgctgtaactttttcaggtggattagctactcaaggatataaaccgtttgctgcaatttattcaacatttttgcaaagggcatatgatcaagtagttcacgatattgcaatacaatcattaccagtaagatttgcaattgatagggcaggactggttggagcagatggacctacacatgctggatcatttgacataacttatctatcaacattaccaaattttgttgttatggcagctagcgatgaatctgaacttgttaagatgattaatacatcggttcaaataaatgatagaccctctgcttttagatacccaagaggaaatgga

SEQ ID NO: 232817 - DNA, 835 bp, Unknown
  Bacterial polypeptide expressing nucleotide sequence isolated from the Sargasso Sea
aatggctacaggtactggtttagatatattgcaaaaaaatattcctgatcaatatatcgatgtaggaatagcagaacaacatgcagttactcttgcggcaggaatgtcttgcgatggtcttaaacctgttgtagctatttatagtacttttcttcaacgtgctttcgaccaattaattcatgatgtagggatacaaaatttacctgtatcattcgtacttgatagagctgggatagttggagctgacggtcctactcaccaaggtcagtacgatataagttatatgagatcgatacctaattttgtattgatggctcccaaggatgagtctgaattacagagaatgttaataacttcaataaaccataatggtccaacagctctaagaatacccagaggctctggattaggagtggctgtaatggatgagggttgggaacctttgaatataggcgaagctgaaatacttgaagaaggtgaagatattttaattattgcttatggttcaatggtcgcatcagcaatcgaaacagcaaagatcttaaaaaatatgagcattaatgtatgcattgttaatgcaaggtttgttaaacctctcgataaaaatcttattatgccattagcaaagaaaattcaaaaagttgtaaccatggaagaaggaaccttaataggaggatttggttccgcaatagttgaattatttaacgataatgaaataaaaattcctgtatacagaataggtatacctgatgtattagttgatcatgcttcacctgatcagagtaaagaaaaactaggacttttgcctgatcagatggcagataaaatttgttga

SEQ ID NO: 232818 - DNA, 751 bp, Unknown
  Bacterial polypeptide expressing nucleotide sequence isolated from the Sargasso Sea
atggcaagacttataaagaaaattaattttccttcagatttgagaaaattcaaaaaagatgacctaaagcaaatttcagaagaattgcgtgaagaattaatagatgttgtttctgaaactggtggtcacttaggtgcgggtttaggtgttgtcgaattaacaattgcactacactatgtatttgatactccaaaagataaactagtgtgggatgtaagccatcaatgttatcctcacaaaattataacaggcagaagagacaggataaaaaccttaagaaaaggtggtggtctatcaggatttactaagagaactgaaagtgaatatgatccatttggagctgctcacagttcaacttctatttcatcaacattaggtatggctgtagcaaaaaaactgtcaaacaataaaaacaatgtgatcgctgtaataggtgacggtgcaatgagtgccggaatggcttatgaagccatgaacaatgcaggtgcactaaaatcaaatttaatagtggtgcttaacgacaatgatatgtcgatagcaagaccggttggtgctatgagcaaatacttagcaaatattttatctggtaaactttattttaactttagagaaacaataaaaatgataatttcagctttttcaaaaagatttactcaaaaagctggtaaagcggaagatttgctgagaaatattgttacgggaggaacattatttagcgaattaggtttttactatgttggacccaattgat

SEQ ID NO: 232819 - DNA, 563 bp, Unknown
  Bacterial polypeptide expressing nucleotide sequence isolated from the Sargasso Sea
catgacgtacgaacttctgaacaccatcgacgatccggccgacctgcgccgcctggaccgccgtcaactcgggccgctggcagatgagttgcgcgccttcgtgctcgattccgtctctcaaacgggcggccacctgtcgtcgaacctgggcacggtcgagctgaccatcgcactgcactacgtcttcaacacgccggaagaccgcatcgtgtgggacgtcggccaccagagctatccgcacaagatcctgacgggccgccgcgaccagatgggctctttgcgtcagctggacggcatctccggcttcccgcgccgcagcgagagcccgtacgacacgttcggtaccgcgcactcctccacgtcgatttcggccgcgctcggtatggccctgggcgccaagaccaacggtgaagaccgcgtcgccattgccgtgatcggcgacggtgcgatgagcgccggcatggccttcgaggcgatgaacaacgcgggcgtctataaagacctgccgctggtggtggtgctgaacgacaacgacatgtcgatctcgccgccggtgggggcgc

SEQ ID NO: 232820 - DNA, 841 bp, Unknown
  Bacterial polypeptide expressing nucleotide sequence isolated from the Sargasso Sea
actggtaaaatatattttagtcttagagaaaccttaaaattaattacatctgcattttcaaaaagatttagtgctaaagcaggaaaagcagaggattttttccgttcagcagttaccggaggtacattgtttagttcacttggtttttattatgcaggtcctatagatggtcatgatttatcaagcctagttccaattttaaaaaatgcaaaagaatcaagacatgagggtcctataatgattcatatcaaaactcaaaaaggaaaaggttattcttatgctgaaaaagcaaatgatcattatcatggagtgtcaaaatttaatgttgataccggcgaacaagtaaagagcaaatcaaatcttccagcttatacaaaagtatttgcaaacacgttagttaaacatgctaaaaaagatagcaaaatagtaggaataacagcagcgatgccaggagggactggtatggatatttttggcaaggagtttccaaatagaatgtttgatgttggaatagcggaacaacatgctgtaacttttgcagccggcatagcaaccgaaggatacaaaccatatgctgcaatttattctacatttttacagagagcatatgaccaagttgtccacgatgttgccatccaaagtttaccagtcagattcgcgatagatagagcaggattagttggtgctgatggctcaacacatgctggttcatttgatataacttacttatcaactttgcctaactttatagtaatggcagcaagtgatgaagctgaactagttaaaatgattaatacttcagtagatataaatgatagaccttctgcaattagatatccaa

SEQ ID NO: 232821 - DNA, 850 bp, Unknown
  Bacterial polypeptide expressing nucleotide sequence isolated from the Sargasso Sea
actaggtttttattatgttggaccaatagacggacatgatattgatactcttgtctcagttttaaaaaacgcaaaagatactaattttgacggtccaataatgatacatattaaaactgaaaaaggaaaaggttatcaatttgcagaaaattcaaaagacaaataccatggtgtttcgaagtttaatataaaaactggggtacaagaaaaatcaagctctaaaattccatcatatacaagtgtttttgcaaatacgttaattaaacacgctgagagagatagtaaaataattggtatcactgctgcgatgccatctggtactggaatggatttatttgcaaaaaaatttccaaatagaatgtttgatgttggtattgcagaacaacatgcagtgacattttctgctggtttagctacagaaggattcaagccttatgcagcaatttactctacctttttacaaagagcctatgaccaggtcgttcacgatgttgcaattcaaagtttacctgtcagattcgcaatagaccgtgcaggtcttgttggtgcggacggtcctacacatgccggatcttttgatataacctacttatcaaccttacctaattttgtagttatggccccaagcgatgagtcggaattagttaaaatgattaatacttcagttgacattaatgataaaccttcagcctttaggtaccctcgtggaactggtattggaattaaacttcctgaaattcatgaaaaaattgaaattggaaaaggcagggttatcaaagaaggtaaagaaattgctttgattaactttggtgcccgtttgcaagaatgccaaaaaactttaaacaatctt

SEQ ID NO: 232822 - DNA, 799 bp, Unknown
  Bacterial polypeptide expressing nucleotide sequence isolated from the Sargasso Sea
agcatcgatcccaatgtgggtgctctttccaagcttttgacacgcatcgcttcttccagactttataatatctttcgggaagaatctctggaaattgctgaacgtgcacctttttccgaaaccctcggtttgaaacgcaccctgcagatgatgcacgattcgatgaaggcctttttcaagccgccgggaatgctgttcgaacagttgggatggcgctacatgggaccggtcaacggccacagcctgaaggatttgatcgaactgatcggccaggtcagagccctggaaggacccatcgtgattcatgccctgactcaaaaagggaaaggctattcctttgccgaagaggatgccttcaaataccatggggtctccccttttgttcctgaggacggttcctttctgaaaaaatcaaaaagtagcgacaactcagtcagttattccaaggtcttttcagaaaagcttggagagttgatggaaaaggattcgaaggttgttggagtcagtgctgcgatgctgagtggtaccggtttgatcggtctgcagaaaaaatatcctgaacgtattttcgacgtcggcattgctgaaggtcatgccgtcacctgctctgcagggatggccacggaaggcttaaagccctatgttgccatctactccacttttctccaacgtgcgttggatcatatcatccatgatgtcgcaattcagaaacttcctgtccgcttcatgcttgaccgagcgggtttggttggagcagatggtcccacccaccagggtgtttatgacctgacctatctga

SEQ ID NO: 232823 - DNA, 810 bp, Unknown
  Bacterial polypeptide expressing nucleotide sequence isolated from the Sargasso Sea
aactctgtaaatgatggaccagttttgttgcatgttgtaactgaaaaaggtaagggtcacccatttagtaaagatgcaactgaaaaatatcatgctgttccaaaatttgatattattactggcgaacataaaaaaagtgcttctaagaaaacctacacgcaaatattctctgaggaacttataaagcaagctaaagaggatgaaaaaattgttgcagtaactgcggcaatgccatcagggacaggcttagataaattttctttagaatttcctaatcgtttttttgatgttggaatagctgagcaacatgcggtgactttttgtgcaggaatgtccttagaggggtataaacctttttgcgcaatttattcaacatttcttcaaagggcttatgaccaaatagttcacgatgtagcaattcaaaacttaccagttaaatttgccattgatagagcaggatttgtaggggcagatggtgcaacacatcaaggttcatttgatttatcttatctttcatgccttccaaactttgtaataatggcaccctctaatgagcaagaattaattaatatggttaagacatctgctaattataatgatggacctattgcaataagatatcctaggggtgagatagaaggcattgaaaagctaaatacagcaaaaattttaaaaattggaaaaggtaaaattgtgcttgatggtttttgtaaggataaaaaagctgatttagccttcctatctattggcactagattatctgatactattaaggttgcaaaaaatttaaaaaataagggttattcggtc

SEQ ID NO: 232824 - DNA, 907 bp, Unknown
  Bacterial polypeptide expressing nucleotide sequence isolated from the Sargasso Sea
attaggtttttattatgttggtccaattgatggttatgatttagacaatctagtatcagttttaaaaaacgcaaaaaaattaaatcatgagggaccaataatgattcatataaaaactgaaaaaggaaaaggatatgaatttgcagaaaaatctgacgataagtaccatggagttacaaaatttaatgttgaaactggaattcaagaaaaaaataaatcaaatataccatcttacacaaaggttttcgcaaaaaccctgataaagcatgccgaaaaagatagcaaaattattggaataacagcagcaatgccgtccgggacaggcatggatttattttcagaaaagtttccaaatagaatgtttgacgtaggaattgcagaacaacatgcggtaacttttgctgctggtttggcaacagaaggttataaaccttacgcagcaatatactcaacttttttacaaagagcgtatgatcaagttgttcatgacgtagcaatacaaaaccttcctgttagatttgcaatagatagagctggacttgtaggagcagatggaccaacacacgcaggatcttttgacattacatatttatctacacttccaaattttattgttatggcagcaagtgatgaagctgaacttgttaggatgattaatacctctgttgatataaataataacccatctgctttaaggtatccaaggggcaatggtgtaggagttgatttgccagatattgacgaaaaaattgaaataggaaagggaagattaatcttagaaggaaaaaaaattgcaataattaattttggagcaagattgaacgaatgtttattagccaatgaaatattaaataaaaaaggcatcgggattacactagttgatgcaaggtttgcaaaaccacttgat

SEQ ID NO: 232825 - DNA, 876 bp, Unknown
  Bacterial polypeptide expressing nucleotide sequence isolated from the Sargasso Sea
acaaaaagtagctgatgaattaagagaagaattgattgatgcagtttcggttactggtggacatttaggagcaagtctaggtgttgtagagttaagtgtggctcttcattatatttttaatacaccaaatgataaattgatttgggatgtaggtcatcaatgttatccccataaaatcttaactggaagaaaagataagattagaacattaagacaaggaaatggtctctctggttttacaaaaagatcagagagtgaatatgatccttttggtgctgcacatagttcaacttcaatttcatcagccttaggtatcgcagaagcgaataaactggcaaataaatcagataacgttgttgcagtcataggtgacggagccattagtgcaggtatggcttatgaggccatgaataatgctggtgcctcaaaaactaaaatgattgttattttaaatgataatgatatgtcgattgctcgaccagtaggagctatgagcacttacctagcaaaaattttttctggtaaaatttacttcagtttaagagagacaataaaattaattacctcggctttttcgaaaagatttagtgcgaaagctggcaaagcagaagatttacttagatcagctgtaactggtggaactttatttagttcactaggtttttattatattggtccaatagatgggcatgatttaaattctttattaccaatactaaaaaatgcaagggattcaaaacacgatgggccaattttaattcatattaaaacaaaaaaaggaaaaggttattcttttgcggaggaagcaaaagataattaccatggagtatcaaaatttaatataaagactggtgaacaattaaaaggctcaagtaa

SEQ ID NO: 232826 - DNA, 862 bp, Unknown
  Bacterial polypeptide expressing nucleotide sequence isolated from the Sargasso Sea
ttgtttagttcactcgggttttattatattggcccaattgatgggcataatttaaattccttattaccaatcttaaaaaatgctagagactctaaatatgaggggccaattttaattcacattaaaacaaaaaaaggcaaaggttactcttttgcggaggaagcaaaagacaattatcatggggtatcaaaatttaatgtcaagactggagaacaaattaaaagctcaagtaagcttccatcttatacaaaagtttttgcagatacattaattcaacatgctaaaaaggatacaaaaattgtagctataacagcggcaatgccggatggaacaggcctagatagttttagtaaagaatttcctgagagaacttttgatgttggaattgcagaacaacatgcagttacatttgctgcaggattggctactgaaaattataagccctatgcagccatttattctacttttcttcaaagagcatacgatcaagttgttcacgatgttgctgttcaaagcttacctgtaagatttgcgatagatagagctggtttagttggtgctgatggacctacacatgctggcagttttgataccacttatttatcgacattaccaaattttgtagttatggcagcaagtaatgaagcagaattagtaagaatgattaatacctcaaccgaaattaacgatcggccttgtgcctttagatatccaagaggcacaggattagggtctattttgccttcaattaatgagaagatagaaataggaaaatccaaagttgttttggaaggaaaaaaattagcaatattaaattttggagcacgattaaatgagaccttgaaggcgtctgaaatttaaa

SEQ ID NO: 232827 - DNA, 323 bp, Unknown
  Bacterial polypeptide expressing nucleotide sequence isolated from the Sargasso Sea
catgaacaataattataaatttcttaacaatattaatttccctgatgatgtgagaaaactatctcaatctgatataaaaattttggcagacgaggttcgacaagaattaattgacgttgtttctgaaacaggagggcatttaggtgctggactaggagttgtagaactgacagttgtcttgcactatatattcgatactcctcatgataaattagtttgggatgtgggacatcaaacttatccacataaaatattaactggtagaaaaaaacaaataagaactcttagaaaaggtgagggattatcaggttttacaaaaagat

SEQ ID NO: 232828 - DNA, 735 bp, Unknown
  Bacterial polypeptide expressing nucleotide sequence isolated from the Sargasso Sea
cttgcagccacctttttcgggtaaactgccgcatctttttacacctataacgattcgcctgatgccgaccactttccacgagatcccccgcgagcgcccgttgacgccgctgctcgacagcgccaacacgcccgacgaactgcgccgcctggccgaagcggacctggaaaccctcgctgacgaactgcgccaatacctgctctacagcgttggccagagcggcgggcacttcggtgccggcctcggcgtgatcgagctgaccatcgccctgcattacgtcttcgacacccccgatgaccgtctggtgtgggacgtcggccatcaggcctacccgcacaagatcctcaccggtcgtcgcgagcgcatgggcagcctgcgccagaaggacggcctggccgccttcccacggcgcgtcgagagcgagtacgacaccttcggcgtcggccactccagcaccagcatcagcgcggcactgggcatggccatcgccgcccgtctgaaaggcgagaagcgcaagagcgtggcggtgatcggcgacggcgcactgaccgccggcatggccttcgaggcgctcaaccacgccaccgacgtcggcgccaacatgctggtgatcctcaacgacaacgacatgtcgatctccaagaatgtcggcggcctgtccaactacctggccaagatcatctccagccgcacctacgccagcatgcgcgagggcagcaagaagatcctctcgcg

SEQ ID NO: 232829 - DNA, 889 bp, Unknown
  Bacterial polypeptide expressing nucleotide sequence isolated from the Sargasso Sea
tttgaggtcagttgttacaggtggaacattattcagctctatgggcttttattatattggaccaatagatggtcatgatctagattcaatggtttctgtttttaaaaatgcaagggacatacaatataatgggccaattttaattcatctcaaaactcaaaaaggaaaaggttacgagtttgctgaaaaatcagatgataaatatcatggagtatctaaatttaacataaatactggagttcaagaaaaatcaatttctaatgctccatcttatacaaaagtttttgcaaatactttgataaaacatgcagaaaaagatagtaaagtagtaggtattaccgctgccatgccatcaggcacagggatggatatattcggaaaaaaatttccctcaagaatgtttgatgttggaatagcggagcaacatgcagttacatttgcggcaggactagccacggaaggttttaaaccttatgcagcgatttactcaactttcttacaaagagcttatgaccaagtaatacatgatgttgcgatacaaagtttaccagtaagatttgcaatagatagagcaggacttgtaggagctgatggaccaacacatgcgggatcatttgatataacttatttgtcaactttacccaattttgtagtaatggctgcaagtgatgaagcagaattagttagaatgattaatacttcagttgatataaatgataaaccttctgcttttagataccctagaggaaatggagtgggtatagaattgccaaatatcaatgaaaaagtccaaattggaaaaggcagagtagttttagaaggaaaaaaagtggcattattaaattttggtgccagaatgaaagaatgtttatctgcttgtgaaatttaa

SEQ ID NO: 232830 - DNA, 254 bp, Unknown
  Bacterial polypeptide expressing nucleotide sequence isolated from the Sargasso Sea
aatgagcgaaaaattattagataaaattaattatcctgcagatttaaggaaactcaaaaaaaatcaattagaacaagtgtctaaagaattaagatctgaggtaattgatgttgtttcagaaaccggaggtcatttaggcgccgggctcggagtagttgaattaacagtagctttgcattacgtatttaacactcctaaagacaaattagtatgggatgttggtcaccaatgttatccgcacaaaattattacag

SEQ ID NO: 232831 - DNA, 922 bp, Unknown
  Bacterial polypeptide expressing nucleotide sequence isolated from the Sargasso Sea
tttggggatgcatccttgtctggaggcatgtcttttgaagcattaaataatattgggaagctaaattctaattttattggcattctaaatgataataatatgtcaatttcaaaacctgttggaaatatggcggcattattgacaaatattcgaacaaatccactttatgaccaggctcgaaaaattctagatcagtttgttaccagcttacccaaaagtgaaccattgaaacgtcgtattgataaaagtatcgaaagtgtcaaaaatattattttagatagtaaagctggcgttatttttgaagaatttggatttaaatatttaggtcctattgatggtcacaatattccaatgatgatggccgcattaaaatatgctaaaacatatccctggccaatactaattcatgtgattacgcaaaaaggtaaaggtcatgatcccgctgaaaaagatcctattaaatatcatggcgtttctccacaatcttcaacgtcatcaagtcttaaaaaacgatcccattctgaagttttcggcgatacaatgattgatatttgtaacaaacaaaataatgttgcggtaattacaccagcgatggttggtggaagtggcttaaccaagtttagtcaagaacatccgtcaaaattatttgatgttggtattgcagaagagcatgctgtaacgtttgcggcaggaatgtcccgggcaggaacaatgcctgttttagcgatatactctacatttcttcagcgaggatacgaccaactaattcatgatgtatgtcttcaaaaactaccgatggtcttggctttagatagagctggttttgctggtgaagatggggctacacaccatggtgtatttgactacacctatatgttacctattccaaatattacaatactagctccaaaagatgctcagg

SEQ ID NO: 232832 - DNA, 676 bp, Unknown
  Bacterial polypeptide expressing nucleotide sequence isolated from the Sargasso Sea
atggattatgagcttttagataaaattaattttccatctgacttaagagaatttaaaaagaaagatctaaaacaaatctctgaagagttaagagctaaaacaattgagactgtttcaaaaactggtggtcatctaggtgctggattaggtgttgttgaattaactgtagccctccactatgtctttaacactccacatgataaattaatctgggatgttggacatcaagcttatcctcataaaatcattacaggaaggaaaaaaaatatagatacacttagaaagaaagatggtgtttatggttttgtaagaaggtcagaaagtgaatatgatccctttggtacagcccatagttctacagcagtatcagcggggttaggaattaaggctgcaaaagatataaataaagacaattcaaaagttatatgtgttgttggagatggtgccttaagtgcaggtttagcgtatgaaggattaaacaacgcaggtgcacaaaaaaaaggtttaattgttattttaaatgataacaaaatgtcaatagacaaacccgttggcgctatgagtacatatctaaccagattgctttcatctaaatcttactcaagcttaagaaatattattaaaaaaatttctaaaacattaccatcaaatctttcaaagactctttacagaaccg

SEQ ID NO: 232833 - DNA, 754 bp, Unknown
  Bacterial polypeptide expressing nucleotide sequence isolated from the Sargasso Sea
tacagctcatagttcaacagcagtttcagcaggattgggaattaaagctgcaaaagatataaataaagataactcaaaagttatatgtgttgttggagatggtgccttaagcgcaggtttagcgtatgaaggattaaacaacgcaggcgcacaaaaaaaaggtttaattgtcattttaaatgataacaaaatgtcaatagacaaaccagtcggtgctatgagtacttatctaactaggttactatcatctaaatcttactcaagtttaagaaatattattaaaaaaatatctaaaaccttaccatcaaatctatcaaagactctttatagaacagaagaatattctaaagggcttatctctggaggtactttgtttgaggaattggggttttattatcttggtccaatagatggtcacaatatagacgatatggtgtcagttctggaaaacattagagataataaatttgataaaccagtctttcttcattgtataactaaaaaaggtaaaggttatagtcctgctgaaaagtcagaagataaatttcatggtgtagaaaagtttgatattaatacaggtaactcagttaaaaaaacaaatctaaaatcttactctaatgtctttggagaaaaactaacgaaacttgctgaaaatgatgaaaaaatcgtcgcaataacagctgctatgatgtctggaacagggttaaaattattccaacaaaattttgagaaaagattttttgatgttggtatt

SEQ ID NO: 232834 - DNA, 254 bp, Unknown
  Bacterial polypeptide expressing nucleotide sequence isolated from the Sargasso Sea
aatgaaacaaaattacaaatttttaaataatataaattttccatctgatattcgaaaactttcagaaaatgatttacaaaaagtttctgatgaagttagaaaagaaatgattagtgctgtatcagaaactggaggacatttaggggcaggcttaggtgttgttgaattaactgtagctcttcattatgtttttgacacacctaatgataaattaatttgggatgttggtcatcaatcttatccacataaaattt

SEQ ID NO: 232835 - DNA, 764 bp, Unknown
  Bacterial polypeptide expressing nucleotide sequence isolated from the Sargasso Sea
tgacaacggtcgttcatatgcaccaaccattagtcgactttcggaaagtcttataagaattagatctaatccaacctatatgagaagacaacaccgtttggaaaaattggctgaaggtatgccttgggttggagagatactagaaagaggaatcaatgcaactaaagctgccataagagaaatgttcgaacctcctgccttcttcgaggcattaggtatgacctatttaggtccatttgatggacacgatattgatgagattgaacatgcattaagcaatgcggttgaatttgagggtcctgtagtagtccatgtgctgacacaaaaaggaagaggacatgcgccggccgaacaagattcgatcaaacatatgcatgacacctcaggcatgaaatcaggtagctacacagaagctttttctgaagctcttgtaaaggcaggcgaatcaaatccaaaagtagttgctatcactgcagccatgcctgattcaacaggtcttctttcatttagagaaagattccctgagcgcttttttgatgtggggatcgccgagcagcatgccgtaacttctgctgcaggtatggctatgggcggtttacgaccagttgtagccgtgtattcaacttttctgactcgagctatcgatcaaataaatcttgatgttggcctccacgaacttccagtaattttttgtatcgacagagccggagtcaccggtgacgatggggcatcccatcatggacttcttgacatttcgcttcttt

SEQ ID NO: 232836 - DNA, 657 bp, Unknown
  Bacterial polypeptide expressing nucleotide sequence isolated from the Sargasso Sea
tatgatgagtggaactggcttagatatttttaattctcagcatcctgataggttatttgatgttggtattgctgaacaacatgcagtaacgatggctgcaggtcttgctacagaaggttttaaaccatacgtatcaatttattcaacttttttgcaaagggcatatgatcaaattgttcatgacgtagctttacaaaagctacctgtaagatttgccattgatcgtgctggtctagtgggagcagatgggccaacacatgctggttcatatgatattacttttctatcaacacttccaaactttataattatggcaccaagtactcaaaatgaattaattagaatgataaatacaactgtattaattaacgatagaccttcagcatttagatatccaagagcaactggtgaaatagatcttggtgataataattttgatcctattgaaatagggaaaggcattattctttcagaaggtagtgatttagcaatattaaatttaggctcaagattacaaagttgccaagaagcaataacacttcttaacacctataatatatatccaacccttgcagatgctagatttgcaaaaccaattgatgcaaatttattggatcaattattagataatcataaatatttaataacaattgaaga

SEQ ID NO: 232837 - DNA, 934 bp, Unknown
  Bacterial polypeptide expressing nucleotide sequence isolated from the Sargasso Sea
ctcgaatcggcgttgagcgatgcttcgtcatacgaagatgggccaatagttgttcatgtgctgaccgataaaggccgaggttacgctcccgctgaagatgacgaagaaaaacatctgcatgacattggtttatttgaccccgctacaggcaactcctcatccgcttcgagcaaaaacttcacttcggagttcagtaactctttgttgaccatcgcggagcgtcgtccagacgttgtcgctatcacggctgctatgcccggctctaccggactgcttccctttcaacagcggtaccccgaccgtttctttgacactggtatcgccgagcagcacgctttgacttcggctgcgggaatggcgcgagcaggtcttcgtccttttgtcgctatttattcaacttttctcgcccgcggattcgatcaagtgatgtacgacatcggtcttcatggacttccggtagtgatctgtatcgaccgagctggcgtaacgggtcctgatggcgcctctcatcacggtgtccatgacattgcgatgtatgcgcgtgtacccgggatgactatattctctccctcctcgcttcaggagctaccggtgatgatgaaccaggcccttgaaacgaacgggcctgtagccattaggtggcctcgaggtactgccgacgagtcatccgttgttggacaggggctatccgcgcgattagtgagagatggccaggatgtcgccattttggcagcagggaagatgctcaaggctgcgacgagtgccgctgagcttctcgcagaggagggcgttgatgcagcggtgtgggatccgagattgctgaagccgcttgatcaagagatgatccgtgcagtcatcggccagtcattggtcgtcactgttgaagatggcagcagaatgggtggattcggcagtctcgttgccgacgctctac

SEQ ID NO: 232838 - DNA, 871 bp, Unknown
  Bacterial polypeptide expressing nucleotide sequence isolated from the Sargasso Sea
atggcaacagctaaaaaactttcaaatgataaaaacaatgttgtcgctgtaattggtgatggagcaatgagtgcgggaatggcttacgaagcaatgaataatgctggtgcaatgaaatctaaattaattgtgatacttaatgataacgatatgtcaatcgcaccaccagttggagcgatgagtaaatatcttgcaagacttttgtctggcaaaatatattttagcttccgagaaactgtaaaattaattctttcagctttttctagaaggttttctaaaagcgcgggtaaagcagaagatctacttagaagtgcagttacaggtggaacattatttagtcaactagggttttattatatcggaccaattgacggacatgatgtaaataatatggttacgatcttggaaaatgccaaaaactcaaatcaccaaggaccaattcttatacacgcaattactaaaaaaggtaaaggttataaaccagctgaagagtcaggggataaatatcatggtgtttctaaatttgatgtttcaacaggaaaacaatccaaaggaaaatcagcaggaccgtcatatacaaaggtgtttgcgaacactttaattaaacacgcacagaatgatacaaaaattgttgcaattactggcgcaatgccatccggaactggattagatctttttcaaaaaaagtttccagatagaatgtttgatgtaggaattgctgaacaacatggagtaacattcgcagctgggttagctacagagggatataagccttttgcagcaatttactcaacatttttacaaagagcttatgatcaggtagttcatgatgttgcaattcaatctttaccggtaagatttgcaattgata

SEQ ID NO: 232839 - DNA, 613 bp, Unknown
  Bacterial polypeptide expressing nucleotide sequence isolated from the Sargasso Sea
gacgttgctttacagtcattaccagtaagatttgcaatcgaccgagcgggattagttggtgcagatgggccaacacatgctggttctttcgatattacttatctttctactttaccgaattttgttgtcatggcagcaagtgatgagtcagaattagttaaaatgataaatacttcagtcaatataaatgaccgtccttctgcttttagatatcctagaggaaatggaattggagtagaattaccttctattaaggaaaccctcgaaattggaaaaggaagaattattaaagagggaaaaaaagtagctttaataaattttggaacaagattagaagaatgcaaaaaagcttcagaaaaacttttaaataaaggaattgattgtacaattattgatgcaaggtttgctaaaccacttgatgaaaaattaattatagaggtggcatctaatcacgaagtgttaataacaattgaagaagggtctataggaggttttggatctcatgtaatgcagtttttatcagatagaggagtgtttgatagaggtttgaaatttagatctatgatcttaccagatatttttattgatcaagatacaccagagaaaatgtatg

SEQ ID NO: 232840 - DNA, 610 bp, Unknown
  Bacterial polypeptide expressing nucleotide sequence isolated from the Sargasso Sea
atgtctggaacagggttgaaattattccaacaaaattttgaaaaaagattttttgatgttggtattgctgaacaacatgctgttacaatggcagctggattagctactgaaggtttcaagccatttgttgcaatttattcaacatttttacaaagagcttacgatcaaatagtgcatgatgtagctattcaaaaattacctgttagatttgcaattgatagagcaggattagtaggatctgatggtccaactcatgctggttcatttgatattacttacttagccacattaccaaattttatagttatggcgcctagcaaccaaagagagttatctaatatgatagagttatcttgcgaaattaatgacacaccatctgcttttagatttccaagaggaacaggatcagatgagctatttaataatcagcctacagatatcagcataggtaaaggatatattctaattgaaggcaatgatgtagcaatcttaaatttaggcacaagacttgaaaaatgtattgaagctagtaagtttcttaatcaaaataatatttatcctactattgcagatgcaagatttgcaaaaccattagacacacagttaatag

SEQ ID NO: 232841 - DNA, 758 bp, Unknown
  Bacterial polypeptide expressing nucleotide sequence isolated from the Sargasso Sea
aactggaatggatatatttggaaaagaatttcctaaaagaatgtttgatgtaggaatagctgaacaacatgcagttactttttctgcaggtttagcgactgaaggatataaaccttatgccgctatttattctacttttttacaaagggcttacgatcaagttgttcacgatgtagcaatacaaagtttacctgtaagatttgcaattgatagagcaggattagttggagctgatggatcaactcatgccggatcgtttgatattacatatttatcaactcttcctaattttatagttatggctgcaagcgatgaaagagaattagtaaaaatgattaatacttcagtcgatataaatgatagaccttgtgcaataagatatccaagaggaacaggagcgggattagagctaccttcaattgatgaaaaagtcgaaataggaaaaggaagaataattcaagagggtaaaaaggtatgcattatatctttaggaacaagactaaatgaatgtaaaatagctgctgaagaactaaaaagtaaaggaattacaatatctattattgatgcaaggtttgccaaaccacttgataaagagcttattattagatgtgcaagaaatcatgaagtaatgattactattgaggaaggatctattggcggatttggctctcatgttaaaaatttattagctgaaaatggtgtatttgacaaaggtttaaaatttagatctatgactttgcccagatatttttattgaa

SEQ ID NO: 232842 - DNA, 454 bp, Unknown
  Bacterial polypeptide expressing nucleotide sequence isolated from the Sargasso Sea
atgaaaaaacaatataaatatttaaatgaaataaattttccatcagatataaaaaaacttaaaatatctgagcttaaaatattagccgaagaagtaagacaagaaatgattgatgctgtatcagttacaggtggacaccttggcgctggattgggagtagtagaattaactattgctttacattatgtttttgacgccccaaaagataaaatcatttgggatgttggacatcaaacatacccccataagatattgactggtagaaaagataaaataaaaactcttagacaaggaatgggactttcaggttttacaaaaagatcagaaagtgaatacgatccatttggggctgcccatagctcaacatctatttcagctgcgcttggcattgcaactgcaaataaactagaaaaaaaaactaaccaagtagtgtctataattggtgaggagcaat

SEQ ID NO: 232843 - DNA, 978 bp, Unknown
  Bacterial polypeptide expressing nucleotide sequence isolated from the Sargasso Sea
ctcagctttaggtatagctgtagctaatagactttcaaataaatcagataatgttgtagcagtgataggtgatggagcaatcagtgctggtatggcttatgaggcaatgaataacgctggagcttcaaaaactaagatgattgttatattaaacgataatgacatgtcaattgctagaccagttggagcaatgggtacctatttggcaaaaattttttcaggaaaaatttattttagcttaagagaaactattaaattaatcacatctgcattttcaaaaagatttagtgctaaagctggtaaagctgaagatctgcttagatctgcagtaacaggtggaactttatttagttcacttgggttttattatataggccctatagatggtcatgatcttagttctttaatcccaatattaaggaatgccagagattcaaaacatcaagggccaattttgattcatataaaaacaaaaaaaggaaaagggtatgcttttgccgaagaagcaaaagataattatcatggagtatcaaaatttaatgttaaaacaggggagcaagttaaaagtacaagcaaactaccttcatatactaaagtgtttgcaaatactttgatagagcatgctaaaaaagatagtaaaatagttgctataactgctgctatgccagatggaacaggtctagatattttccgaaaagaatttcctgaaagaacttttgatgttggaattgcagaacaacatgcagttacattcgcagctggattagcaactgaaaactataaaccttatgccgcaatttactcaacatttcttcagagagcctacgatcaagtagttcatgatgtagcaattcaaagccttcctgtaagatttgcaatagacagagctggattagttggtgcagatggacccactcatgcaggaagttttgatacaacttatttatcaacattgccaaatttttgtggtaatggctg

SEQ ID NO: 232844 - DNA, 773 bp, Unknown
  Bacterial polypeptide expressing nucleotide sequence isolated from the Sargasso Sea
aaaatttaatgtaattactggggaacaaaaaaagactaaatcaaataaaccggcgtacacaaaagtatttgccgaaacattgatcaaacatgctgaaaatgacacgaaaatagttggaataactggtgctatgccatcaggaactgggttaaatttatttgaaaaaaaatttccagatagaatgtttgatgttggaatagctgaacaacatgcagttactttcgctgcaggactagcaactgaaggttataaaccttttgctgcaatttattctacttttcttcaaagagcttacgatcaagttgttcacgatgttgcaatacaatctttaccagtcaggttcgctattgaccgagcaggcttagtcggtgcagatggtcctactcacgcgggatcttttgacataacatatttatctactttgcctaattttgtagtgatggctgcaagtgatgaagcagaacttgttcggatggttaatacttctgttaatattaataataaaccttctgcttttagatatccaagaggtaatggagtaggaatagagctacctagtattaatgagacattagaaattgggaaaggcagaattataaaatcaggcaaaaaagctgcaataataaatttcggcgccaggttagaagaatgcagaaaggcgtccgagatacttttgaaaaaaggaataaatatcacaatcgttgatgctagatttgcaaaacctttggatgaaaaattaattgtgaaaatttctacaaatcacgaagtgtaat

SEQ ID NO: 232845 - DNA, 382 bp, Unknown
  Bacterial polypeptide expressing nucleotide sequence isolated from the Sargasso Sea
aatgcttttaagtgagttaagtcatccaaatcaacttcatggcttaacagtttcacaattagaggaaattgcctgtcaaattagagaaagacatcttcaagtagtttctactagtggaggacatcttggacctggattaggtgtagttgagcttacattggctttatatcaaactcttgatcttgacttcgataaagttgtttgggatgttggacatcaaggttatcctcataaattaataacaggacgtttcagtcaatttgattctcttagacaacaaaatggagtagcgggatatctcaaaagaagtgaaagtaaatttgatcattttggtgcaggacatgcaagtacttctatttctgctgctttaggaatggcaata

SEQ ID NO: 232846 - DNA, 874 bp, Unknown
  Bacterial polypeptide expressing nucleotide sequence isolated from the Sargasso Sea
cctgctgacaatgcattgccaaagtcgaagccttctgcccccacctattcggctatttttggtcaatggttatgcgacatggcgaaaagtgatcccaagcttatggccgttacgcctgccatgcgcgaaggctctggtatggttgagttttctcagcgctttcctgaacaatattttgatgtcgccattgcggaacaacatgctgtcacgttcgctgccggtctagccaaagacgggttgaatgcggttgttgcaatttattcttcatttttgcaacgtgcctacgatcagctgatccatgatgtagcgatacaaaacctccctgttttatttgctatcgaccgcgcaggtattgtgggtgctgatggtccaacacaccaaggcgcatttgatattgcgtttttgcgctgtattcctaatttggtgatcatggcaccttcagatgaaaacgaatgccgtcaaatgctttacactgggcatatgttaaaacagcctgccgcggtgcgttatccgcgtggtgctggcatgggtatcacgcctaatgaggaaatgacagctatcgacattggtaagtcacgtgtttgccgccagtcaatcaaagattctgaaaagcgcatcgctattttaaactttggctgtttacttccctatgctttagaggcagctgaaatactagatgctaccgtaattgatatgcgttttgtcaaaccactagacggtgaagcggtacttagcgctgcaaatgagcacgcagcattaataacactagaagatggctgtattatgggtggtgcgggaagcgcagtgcttgagcacctgcagcaaaacggcgtgttaaagcctgttaaagtgcttggattacctgacagcttta

SEQ ID NO: 232847 - DNA, 813 bp, Unknown
  Bacterial polypeptide expressing nucleotide sequence isolated from the Sargasso Sea
gtatttgatgctcccaaagataagattatctgggacgtgagtcaccaagcttacccacataaaatcctaactggccggcgtgaccgaataagaacattgagacaaaaaaatggtcttagtggtttcacaaaaagaagtgaaagtgaatatgatccttttggtgcagcacattcaagcacttcgataagtgccgccttgggtttcgcagtcgctcacgatttaggtggtaattgtatatctgggcttggagatgccattgctgtaatcggtgacggcgcaatgtctgcaggtatggcttatgaggctatgaaccatgcaggccacttaggcaaaagattaatagttatcttgaacgataacgaaatgtcgatagcagcaccagttggtgcactttcgagttatttatcgcaactttatgcaggagctccctttcaagatttaaaagcagctgccaagggtgctataagttttttgccagaaccttttcgggatggagctaagcgggcaaaagatttactgaagggtatggctgttgggggcacaatgtttgaagctttaggtttttcttatattggcccgattgatggccatgatttagatcaattgttgcctgtcttgagaactgtaaaagagagggcatctggcccaattttaatccatgcagttacgaaaaaaggccgaggttttgctcctgcagagaatgcagatgataagggtcatgcaactgcgcaatttgatttagttactggtaaacaggacaaaggcaagtcaaatgtaataagttatacatctgctttctcaaatgcgttgctg

SEQ ID NO: 232848 - DNA, 1295 bp, Unknown
  Bacterial polypeptide expressing nucleotide sequence isolated from the Sargasso Sea
tcaatttttaaatgatatcaactttccatctgatttaagaaaagtttctgaagatagtttacaaaaagtagcagatgaggtgagggaggaaatgataagtgctgtttcagaaacaggcggtcaccttggtgctggtttgggagtggttgaattgacagttgcacttcattatgtttttgacacaccaaatgataaattaatatgggatgttggtcatcaatcttaccctcataaaattttaactggaagaaaagataagattagaacattacgacagggtgatggtttatcaggttttacaaaaagatctgaaagtgagtatgacccatttggagcagcccatagttcaacatctatttcatcagcattaggaattgctgaggcaaataaattagaaaataagtcttccaatgtaatagccgtcataggtgatggagcaattagtgcgggtatggcttacgaagctatgaataatgctggagcatctaagacaaaaatgattgttattttaaatgataacgacatgtcaattgcaaaaccagttggagcaatgagaacttacttggcaaaattatttacgggtaaaatatattttagtcttagggaaactttaaaattaattacatctgcattttcaaaaagatttagtgccaaagcaggaaaagcagaggattttttccgttcagcagttactggaggtacattgtttagttcacttggtttttattatgcaggtcctatagatggtcatgatttatcaagcctagttccaattttaaaaaacgcaaaagaatcaagacacgagggtcctataatgattcatatcaaaactcaaaaaggaaaaggttattcttatgcagaaaaagcaaatgatcattatcatggagtgtcaaaatttaatgttgagactggcgaacaattaaagagcaaatcaaaccttccagcttatacaaaagtatttgcaaacacgttagttaaacatgccaaaaaagatagcaaaatagtcggaataacagcagcgatgccaggagggactggtatggatatttttggaaaggagtttccaaatagaatgtttgatgtaggtatagcagaacaacatgctgtaacttttgcagccggtctagcaaccgagggatacaaaccatatgctgcaatttattctacatttttacagagagcatatgatcaagttgtccacgatgttgcaattcaaagtttaccagttaggtttgcgatagatagagcaggattagttggtgctgatgggatcaacacatgctggttcatttgat

SEQ ID NO: 232849 - DNA, 1250 bp, Unknown
  Bacterial polypeptide expressing nucleotide sequence isolated from the Sargasso Sea
tatgaattataaatttttagacaaagttaattacccttcagatttacgtactttatctattaatgatttagataaagtttctgaggagttgagatattatttaattgagacagtttcgcaatgcggtggacattttggggcaagtcttggaagtgtggaattaactattgcacttcattattcgtataatactccctacgataaaattgtatgggatgttggacatcagtgctatggtcataaagtgattacaggaagaaaaaatgagcttgttactataagacaaaaagacggtcttcatccttttccatctagaaaagagaatgaatacgatactttcagtgttggccactctagcacatctattagtgctgctttagggatgtcattagctggaaaaaatagtaacaaaaacttttatactgtcgcagttattggtgatggaggtttgagtgcgggtatggcttatgaagcattaaatcatatgggttcttcagatcaggatattttagttattctcaacgacaatgaaatgtcgatatcgccaaatgtaggagcaatgaataattatttaaccaagatactctcaagtaaaatttattcaactgttaaagaggggagtaagagtatattaaaacaagttcctccatttgataaagttgcaaacaaaactgaggggcatataaaaggcttgtttgcaccaggaatgttgtttgaggaaatgggtataaattattacggtcctatagatggccatgacacaaaatttcttgtcaaaacattaaaaaaccttaaaaaaataaaaggacctaagctactgcatgttgtaactaagaagggaaagggttatttgccagctgaatcagatccagtaaaatatcatgctgtaccaaaattcaataaagacgagggagtgctaaaaggtaataataagaaatatatttattcagatgtttttgacgattggctttgtaaaattgctgagaacgacaaaagagtttttgctattacgccggcaatgagagaaggatcttctttagtgaacttttctaaaagttttccagagaggtatatcgatgtaggaattgccgaacaacatgcagtgactcttgcagcaggccttgcgtgtgaaaaccaaaaacctatagtttgtatttactctacatttcttcaaagagcttatgatcaattaatacacgatatagcattacaagatcttgatgtgttatttgcagttgatagatcaggtt

SEQ ID NO: 232850 - DNA, 616 bp, Unknown
  Bacterial polypeptide expressing nucleotide sequence isolated from the Sargasso Sea
catgcatctcggagatctgaagcatccgaatgagctgcacggactcagcgtcgctgagcttgaggatgtcggtcgtcagattcgtgaacgccatctcgaggtggtgtccaccagcggtggccatctcggcccggggctcggtgttgttgagctcacgcttgctctgtatcaaaccctcgatctcgaccacgaccgtgtgatctgggatgtgggccatcaggcctatccccacaagttgatcaccggccggtacaacgacttcggaacgctccgtcagcagcacggggtggccggctatctcaagcggtcggagagtcgtttcgatcatttcggtgccggtcatgccagcacctccatttctgcagccctcgggatggctctggcgagggacaaccgcggcgaaagcttcaaatgcgttgccgtgatcggcgacggggccatgaccggtggcatggctctcgaagcgatcaaccacgccggtcacctgccagagacccccttgctggtggtgctcaacgacaacgacatgtcgatctcaccgccggtcggggctctctccaatgcactcaaccgggcacgactcagcccaccgatgcagtttctttccggcagtgtc

SEQ ID NO: 232851 - DNA, 1318 bp, Unknown
  Bacterial polypeptide expressing nucleotide sequence isolated from the Sargasso Sea
atgaaaaaatataagtttttagataaagtaaaatttccgtccgatattagaaaattaaaattaagtgaacttgaaacactttgtaatgaagtaagagaagaattgattgatgctgtttcagttactggaggtcacttaggagctggactaggtgtggttgaactcagcgttgctttacactatgtttttgatactccaaatgataaattgatttgggatgtgggacatcaatcctatccacataagattctgacaggtcgtaaagaaaaaattagaactttaagacaaggaaacggcttatccggtttcacaaaaagatcagagagcgaatatgatcctttcggtgcagctcatagttccacatctatttctgcagcacttggtatagcaacagctaataaactatcaaaaaaaaatgataacgtagttgcagtaattggagatggagcaataagcgccggtatggcttatgaggcaatgaataatgccggaacttcaaaaacaaaaatgatagttattttaaacgacaatgatatgtcaattgcaaaacctgttggagcaatgagaacatatttagcaaaattatttactggcaagatgtattttagttttagggaaactgtaaaattaattatttcatcgttttctaaaagatttagtaaaaaagctggacaagctgaagatttttttagaagtgctgtcacaggaggtactttatttaattcattaggattttattatgtaggtccaatagatggtcatgatatagaaacactggtttcagttttaaaaaacgcaaaaaacagtaattttaatggacctataatgatacatattaaaactgaaaaagggaaaggatatcaatttgcagagaagtcaaatgataagtttcacggagtatcaaaatttaatgtcaaaacaggagttcagcaaaagtcaaaagcaactgtaccgtcttatactaaagtttttgctgatacactaattaaacatgctgagagagatagcaaaataattggagttacagcagctatgccatctggtaccgggatggatttatttggaaaaaaatttcctgatagaatgtacgatgttggaatagcagaacagcatgcggtcacattttctgggggattagcaacagagggatacaaaccttatgctgctatatattctacttttttacaaagggcttatgatcaagttgtgcatgatattgcaatacaaaacttaccagttagattcgcaattgatagagctggattagttggagctgatggaccaacgcacgcaggttcatttgatattacatttttat

SEQ ID NO: 232852 - DNA, 777 bp, Unknown
  Bacterial polypeptide expressing nucleotide sequence isolated from the Sargasso Sea
tatgaaaattgcaaaatcattactagataaagttaagtttcctaaagatcttaaaaaatttgatgatcagcagttaaaaactctttgcaaggaactaagagatgaagtaattgaggcagtttccgttactggtggacatcttggtgctggactgggagtagtagaattaactgtagcaatacataacgtttttaacacacctaatgacaaacttatatgggatgttggtcatcagtgctaccctcataaggtgattaccgggcgaagagaaaaaataagaacaataaggcaaccaggaggtctttacggttttacaaagagatcagaaagtgaatatgatccatttggtgcagcgcactcatccacctcaatatcagcaggacttggtatggctgttgccagagatcttaaaaaagaggatcatcaggttatttgtgtgattggggatggagcaattagtgctgggatggcatatgaagccatgaataatgcaggatcaatgaacgcaaaactaatagtgattcttaacgataatgatatgtctatagcgcctccagttggtgcaatgagtgcttacttatccagattgctttcaggaaaaacttttcaatctgcacgaagcttagctaaacacatggctaaaaagtttcccaagagttttcaaaatatggcagccaaagcagaagaatatatgagaggtatggtaacgggtggaactctttttgaggaactcggttttttctacattggtcccattgatggacataaccaagatca

SEQ ID NO: 232853 - DNA, 874 bp, Unknown
  Bacterial polypeptide expressing nucleotide sequence isolated from the Sargasso Sea
agttgctataactgcagcaatgccagacgggacaggtcttgatatttttaaaaaagaatttccacaaagaacttttgatgttggaattgctgaacagcatgcagttacatttgctgcaggcctagcaactgaaaattataaaccttatgcagctatatattctacttttcttcaaagagcttatgatcaagtagttcatgatgtagcaattcaaagcttgccggtcagatttgcgatagatagagcaggactagttggtgctgatggacctactcacgctggaagttttgatacaacctatttatcaacattaccaaatttcgtagtaatggctgctagtgatgaagctgaattagtaagaatgataaatacttcaacagaaattaatgatagaccttgtgcattcagatatccaagaggaattggggtaggtgttaccttaccctcaattgatgaaaaggtagagatcggtaaatctaagattattaaagagggaaaaaaattagctgttcttaattttggagcaagattaattgaaacgctaaaagcagcagaaaatttaaaaaaaaaaggagttgatataacaatagttgatgcgagatttgcaaaacctttagatgaaagtttaatttggcaattagcaaccacccacgaagctataatcacaattgaagaaggatcaattggtggttttggatctcatgtagtcaattttttatcaaaaaaaggtttgatagataatgatttaaaatttaggtctttgacacttcccgatatttttattgatcaggatactcctgagaatatgtataaaattgcaaatctagactctagttcaattgaggaaaaagttctaggatgtattaaattctaa

SEQ ID NO: 232854 - DNA, 1147 bp, Unknown
  Bacterial polypeptide expressing nucleotide sequence isolated from the Sargasso Sea
tcaaattttggaaaatgtaaaaaagtctaaacacgaaggaccaattttaatacacgctataactcaaaagggaaaaggttacaaaccagccgaagagtctggagataaatatcatggagtttcaaaatttaatatttccacaggtcaacaaagtaaatcaaaatctaatgtgccctcatatacaaaagtattctcagaaactttaataaaacatgctgagaaagatactaaaattattggtattactggagctatgccttctggcaccggtcttaatttatttgaaaaaaaatttcctgatagaatgttcgatgtaggtatagctgagcagcatgcagtaacatttgctgctggtttagctacagaaggatataagccctatgctgctatttattcaacatttttacaacgagcttatgatcaagttgtgcatgatgttgctttgcaatctcttccagtaagatttgcaatagatagagcaggattagtgggagcagatggacctacgcatgctggctctttcgatattacctacctatctacattaccaaatttcgttgtgatggctgcaagtgatgagtcagaactggtaaaaatgataaatacttcagttcacattaatgacagaccgtctgcttttagatatccaagaggaaatggtattggaattgagttaccaggaatagatgaaatgttggaaataggtaaaggaaaaatagtttgtgaaggaaaacaagctgcaatattaaattttggagccaggttagacgaatgtaaaaaagctaaagatattttagataaaaaaggaattaaaatatcaataatggatgcaagatttgctaaaccattagatgaaaagttaattctagagatggcttcgaaccatgaattaattttaacaatagaggaaggctcaataggaggttttggttctcacgttatgaaacttctttcagatagaggcgtatttgacaaaggacttaaattcagatcaatgtttttaccagatattttcatcgaccaagatactcctgaaaaaatgtacgagaaagctggtttaaactttaattctattgttgaaaaaattgaagaaggacttaaatctaatattatatttgcaaaaaataaaaataaattatcaaattaa

SEQ ID NO: 232855 - DNA, 1408 bp, Unknown
  Bacterial polypeptide expressing nucleotide sequence isolated from the Sargasso Sea
atgaatgacaatgatatgtctatagcaccccctgtcggggcgatgagtgcttatctctctcgattaatttcgtccaaatcttacagatcaattaggcattttgctaaggagatggcttcaaaatttcctaaaaaattagaagaaacagcaagaagagcagaagaatatgctagaggtatcataacaggtggtacattgtttgaagaacttggtttctattacgtgggacccatcgatggccataatatcgatcatttgctcccagttttgaaaaatattagggatagtaaggaaaagcttcctgtcttagttcatgtggttactgaaaagggaaggggctacaagcctgctgaggactctccagacaagtatcatggagtctcaaagtttgatttggttaccggagagcaaaataaatctaataataaaataccgacttatacaaatgtttttgctaattcattaataagtgaggcaaagaaagataaaaagattattgggattacagctgcgatgccttcgggaactgggctagataaatttaataaagagttcccagatagaacatttgatgttggtatagcagagcaacacgcagtaacctttgccgcaggcttagcggctgagggctataaaccatttgtggctatctactctacttttttgcagagagcttatgatcaggttgttcatgatgttgctattcaaaaattgccagttagatttgctatcgatagagcaggtttagttggagccgatgggcccacgcatgctggctcttttgatttaacctttcttggttgtttgccaaatttcataattatggcgccctcggatgaggcggagctaatgcacatgatagctactgctgccgaaattgatgatagaccctgttcttttcgtttcccaaggggggaaggtgttggcgtaacactgcctgagtttggaagtcctttggagattggtaggggtagagtattggttgagggaagctccattgcactcctaaacttgggaggtaggttaggggaggtgttgtctgctgctgagcaattagctttaatgggttggtcagctaccgttgcagatgctcgttttatgaagcctctagacgaagaattgattaggcagctggtgagcaatcatcggatattgataactgttgaggaaggttccgtgggagggtttggatcacgtctaagtcattttttgacaagctcaggattactagataatgacatagtgtttagaacaatgtgcttacctgacgagtttgtcgagcaagatagtccagatgagcagtattcatatgcaggcttgatgcgagaaaatattttagatttagcactaacattattagatcctaaagctgattctggcgtaatttcgcggacaaaaagtgcctaac

SEQ ID NO: 232856 - DNA, 1057 bp, Unknown
  Bacterial polypeptide expressing nucleotide sequence isolated from the Sargasso Sea
atgaaaaaagactacgaatatttaaatcagattaactttccctacgacttgaaaaaaataccagagtcaaaacttcaaaatgttgctgacgaagtaagaaaagaactaattgaagctgtatccgttaccggaggtcatttaggtgcaagtttaggagttgttgaattaacagttgcattacattatatttttgatactccaaaagataaattgatatgggatgttggtcatcaatgttatccacataagattttgactggaagaaaagatagaattagaactttaagacaaggttctggtctttctggatttacaaaaagattagaaagcgaatatgacccgtttggtgcagcacatagttcaacttcaatttcatctgctcttggtattgctgaagcaaataaactttcaaataaatcagataatgtagttgctgttataggagatggagcaataagtgcaggaatggcttatgaagcaatgaataatgcaggagcttccaaaaccaaaatgatagtaattttaaatgacaatgatatgtcaattgcaagacctgttggagcaatgggtacttatttagctaaaattttttctggcaaaatttactttagtttaagagaaactattaagcttattacttcagctttctcaaagagatttagtgcaaaagctggaaaggctgaagatcttctaagatctgctgttactggaggtacattatttagttctttaggattttattatatcggtcctattgatggtcacgatttaaattctttgcttccaattttgaaaaatgcaagagacacaaaacataatggtccgatattaattcatatcaaaacgaaaaagggtaagggttattcctatgctgagaaagcaaaagataattatcatggagtttccaagtttaatgttaagactggtgaacaattaaaaagtaaggtttctataccttcatatacaaaagtatttgccaatacacttatccaacatgctaaaaaagatagtaaaaaaaagcaattactgcagcaatgcctgatggtacaggaataga

SEQ ID NO: 232857 - DNA, 874 bp, Unknown
  Bacterial polypeptide expressing nucleotide sequence isolated from the Sargasso Sea
ttaagcaaaaaagataataagcttatcggtatcacccctgcaatgaaagagggttcaggaatggtaaattttgaacaagagcaccctgataaattttttgacgttgctatcgctgaacaacatgcgataaccttttctgcaggccttgcattagagggacataaacctgtagttgcaatatactcgacttttttacaacgcgcatatgatcagctgattcatgatgtgtgcatcgagaaattagatgttacctttgcacttgatagagctggtgtggtgggcgaagacgggccaacacactctgggaactttgatttagcttttatgcgatgtgttccaaatattgtaattgcaacgccttcagatgaagatgaactctggaagttactaaatacgctctatgagcataaggggcctgcagctgttagataccctcgaggcagtggaagaggggtaaaagtaaatcagaacgaagatacagtcataattggctcctcaagaacaataagagatggctccaacctatgcatcttaaattttggtgtgctgttagacaggcttgaagatattgcagataaattagattgcgggcttcttgatatgagatttgtgaagcctttagatacaaaagctttagataagattcttaatcaatataaaaaaattgttaccgttgaagaccatacagtttctggtggtgctggaagtgcagtaaatgaatatttttcaagtagattaaatggtgtctcagtgcttaatcttgggttgagtgacgaatttccagaacatggaagccgtagtgaaattttgaaattaaattcattagatcgggaaagtttatcaaaaaaaattacagactattttaattcttaaa

SEQ ID NO: 232858 - DNA, 1059 bp, Unknown
  Bacterial polypeptide expressing nucleotide sequence isolated from the Sargasso Sea
tacatctataagtgcagcattgggtatggctatagctagagatgctaatgaggaggatcataagatcattgcagttatcggcgatggcggaattactgctggcatgtcatatgaggctttatgtcatgctgggtatctgaaaaaagatatgcttgtaattcttaatgataatgagatgtcaatatcaccaaacgttggagcaatgaataaatatcttacaaaaattctctctggtaagactctatcaactattaaacaaaaaggtggtgaacttcttagtgataaatctccaataaaaagaattattaaaaaaataaaagataacgcacaaaatattttatctcctggtcatttatttgaagaaattggatttagttattatggacctatagatggacacgacatttcatcattgaataaggttttgaacaacctgaaaaacaaaagcggtcctattttgctacatgtgattacaaagaaaggtaaaggctacaaaatagctgagcaggatccgattaagtatcatggagtaacgccttttgatgtaaaaacaggtgtcagtgaaaagataaaaaaaccaaagatgctcacatatacaaatattttcagtaaatggataaattatgcggccataaataattctaatttcgtagcaataactccagcgatgagggaaggctcaggacttgtagagtttgaggagaaatttccctctaggttctttgatgtagggattgctgaacagcactctgtaactttagcagcgggtattgcattaggtgggctaaaagctatcgttgcaatatactcgacttttctacagagagcgtttgaccagttggtacatgatgtaaatcttcaaaatttggatgtaatgtttgccatagacagagctggcctagttggtgccgatggagaaacgcatcatggaatttatgatatttcgtttatgcgcatactgcctaatattattcttatgaccccttcaaatgagagagaattactattaatgctgaatacaggacttagtcataaaggtccatcagctataagatatcc

SEQ ID NO: 232859 - DNA, 1261 bp, Unknown
  Bacterial polypeptide expressing nucleotide sequence isolated from the Sargasso Sea
atgaacaagatagaaattaaatatctagataaagttaaatcacctaaagatttagatgaattaaatgatgagcagctcaaagatctagcttcagagctaagatatgatgtcattgaaacagtttcaaagacaggcggacatttaggcgctagtcttggtgtgattgagcttactattgctcttcataaaatatttgacgctcctaaagataagataatttgggatgttgggcatcagagttatccccacaaaattttgacaggcagaagagatcaaatgtcaactttgagaaaaaaagatggtttatctggtttcacaaaaagagatgaaagcaaatatgatcattttggcgctggtcatagttcaacagcaacttctgctggattaggtatgtcaattggcagagatttaaaaaaaagagataaccatgttgtatgtgttgttggtgatggcgcaatgagtgctggccaagcatatgaagcattaaataatgcaggtgcagagaaatctaaattaatagtaatattgaatgataatgacatgtctattgcacctcccgctggagctatgagcgcttatttagcaaaattaatatctggcggaacatatctaggattaagaaactttgctaaacaagttatagagaaacttcctaaatcattagaaaagggcgcaaaaaaagctgaagaaattacgagattaattgcaggtaatggaactctctttgaagcattgggcttttattatgtcggtcctcttgatggacataaccttgatcacctgctcccagttattcgtaatgtaaaaaatgctaataatggtccagtgattattcatgtggttactcaaaaaggaaaaggttataaacctgcagaagactcagatgaaaaatttcatggtgttactaaattcaatatagctactggagaacaggaaaaatcaaagaaaaaaaatatttcatttactaatgtttattccaattctttaattgagttagccaaaaaggataaggatattgtaactatcacagcggcaatgccatcagggacaggacttgataaatttaaagagatttatcctaagaggttttttgatgtaggaatagctgaacaacatgcagtgacattttctgcaggtctcgcaattgaaggactcaaaccttttactacaatttattcaacatttctccaacgggcatatgaccaaataatacagcgatatagccattcagaatctacctgtaaaatttgcaatagataga

SEQ ID NO: 232860 - DNA, 1264 bp, Unknown
  Bacterial polypeptide expressing nucleotide sequence isolated from the Sargasso Sea
ctcggatattcgagatctagatttaaaagagcttgaaagcttagcctcggatatcagagaatatattttagatacaatttctaaaactggtgggcacttggctgctggattaggtacggttgaactctctattgcacttcattatgtttttaatacgcccgtagataaaataatttgggatattggtcatcagtgttacccgcacaaaatattaacaggcagaaaaaataaattaaattctgtgagaaaatataatggaatctcaggttttttaaaaataaaagagagtgattatgatgtatttggtgctggtcactcaagcacatcaataagtgctgctctaggtatggctattgcaagagatattcaaaataaagaacataatattatttcgataataggtgatggaggcatgacagctggaatgtcttatgaggcaatgtgtcatgcagggtatttaaaaaaggatatgcttgttgtgctaaatgataatgagatgtcaatatcaccaaatgttggagctcttaataaatacctaacgagactaatgtctgctataaaggaaaagggtaacaatctactagatgaaagaaatcctatcaaaaagattgcaagagctatcaaagataatacacaaaatatactgacgcccggacatctatttgaagagattggtttcagttatcatggccctatagatgggcatgacctgcagtctctcaatgaggtattgaaaaatttaaaacataagaggggtcctattttactccatgttattaccaaaaaaggtaaaggctataaaatagctgagaaaaatccaataaaataccacggaatcacgccatttgatgtttctacaggtgcagctgataaacctaagcttaaaaactctcttacatacacaaatatttttactaaatggattaattatgcggctcaatataatgagaattttgtagccattacacctgcaatgagagaaggttccgggttagtggaatttgaagaaaactatccaaaaagattttttgatgttggtattgcagaacaacactctgtaactcttgctgccggattagctattggagggattaagccaatcgtggcaatatattcaacatttcttcaaagggcatatgatcaattaatacatgatgttaatcttcaagacttaaatgttatgtttgcaattgatagagcaggcttggtaggtgctgatggcgaaactcaccatggtatatatgatatctcttttatgagagtt

SEQ ID NO: 232861 - DNA, 1111 bp, Unknown
  Bacterial polypeptide expressing nucleotide sequence isolated from the Sargasso Sea
ccactctagcacatcaattagcgcggcattaggtatggcaatagcagcagaaaggcaggggttagaaagaagatgcgtagcaatcattggtgacggcggattaactgctggaatggcatttgaagctttaaatcatgcaggagctcagcgcagcaacttattagtaattttaaatgataacaatatgtcgatatcaccaaatgtcggagcactttcaaaccgttttgctcaattattatctggagaattttattcgagtgttagaaagagcagtaaaaaagtattatccaatatacccgctgcacttgagattgcaaaacgtgcagaagagcatgccaaaggtttaattataccaggaaccttattcgaagaacttggctttaattatattggtccggttgacggacatgacttatctgtattacttagtacattaaaaaatattaaaaaactcgaaggacctcagtttttgcatgtcattacaaagaaaggtaagggttatgctccagctgaagatgatcctattaaatatcacggcgtgacaccatttgaccctagaaaaggaattgtttcttcaaaaacattatcaataccaacttatagtaaagtatttggtgattgggcatgtgatatggccgagcttgatcaacgttttattgcaataacgccagcaatgcgcgagggatcgggtttagtgaggtttgagaaagaacatcccgacaaatattttgatgttgcaatagcagaacagcatagtgtcactatagcagcagggatggcttgtgatggcttaaaacctgttgttgcaatttattcgacatttctacagcgcgcttatgatcaattaatacatgatgtcgccatacaaaacctacctgtattatttgctatagatagagcgggatgtgttggtgcagatggcccgacacataatggagcgtatgatttgagttttatgcgttgtttaccgaatattgttttgatgactccgtctgatgaaaatgaatgtcggcagatgttatatacaggattcaaacttgatcaaccgacagctgttcgttacccccgcggcacaggatctggtgttaaagtaataagaaaaatgacatcg

SEQ ID NO: 232862 - DNA, 1129 bp, Unknown
  Bacterial polypeptide expressing nucleotide sequence isolated from the Sargasso Sea
atgaaatcgctgcttgaaagtgtctcactaccccaggagatacaaaactttaatttgagagaacttactcagttagcgcaggaatgccgtcagcgtataattgaggttacaagtaagtgcggggggcacctagcctcctcacttggtgccgtggaaattacagtagctcttctaaaacattttgatttcagtattgaccgcttggtttgggatgtgggccatcagggatatgcttataaagttttaacaggccgtaatgagaattttgatactcttggcaaatacggtggtatcaaaaaatttctctcaagggacgaaagcagttatgaccattttggagcagggcatgcttcaacctccatttcagccgcgttgggcatggccattggacgtgatctccagcaaaagaagcatagggttgtttcagtaattggtgacggggcgctgacgggtgggcttgcctttgaagccctgaatcacaatggctccctcgataaaaacatgctggttatttttaatgacaacggaatcagcattgatccaaatgttggtgcgatttcaaaactactgacacgctttgcatcttcacaattttacaaccggttcagggaagaaaccattgattttgcagagaaagccccgttttctgagagacttggtatcaaaaccactttacagaaaatgcatgattctgcaaagagctttttttcacctcccagtatgctctttgagcagttaggctggagatattttggaacaattgatggtcataatcttcaggaactgctggatatcatcaaacaagtcaagaacttagacggtcctattgtcattcacgccgttacacagaaaggaaaaggatacgcttttgcagaagaggacgcatataagtatcatggagtaacaccttttgaacctttggatggaaaatttaaaaagaaaaaaacttcaggtcaggcaatgagttattcccaggtatttggtgacaaactcggtgaattaatggaacgtgacgaaagtgtggtggtgttaacagcagccatgctgagtggtacaggaatcgtaaatttgcagccaaaatttcctgatcgcgttttggatgttggcattgcgggaagacacgcggtaa

SEQ ID NO: 232863 - DNA, 1102 bp, Unknown
  Bacterial polypeptide expressing nucleotide sequence isolated from the Sargasso Sea
cgaagaaatgatagaaatttggaaaatataaaagattatgacagtcctgttgtgttgcatgcaattacaaaaaaaggaaagggtcttgattacgctgaggatgatccaatcaaatatcatggagttaaagaaaagaaaaaagatgatgcagttgttaaagttcaagctccaatatatcagaatgtatttggagaagtgatatgtgatttagcagaagaaaataaaaatatagttgcaataactgctgcaatgagagaagggactggattggttgagtattcttcaagatttcctgaaagattctatgatgtaggtatcgctgaaggtcatgcagtaacttttagtggcgggttatcaacggaaggaaaaattcctgttgttgcaatttattcaacctttcttcaaagagcctttgatcatataattcatgatattgctttacaaaatttacctgtcattttttgcatggatcgttctggtttagttggtgaggatggtgcaactcatcacggtgttttagatatttcttatttaagatgtattcaaaatattattatttcagcaccaaaagatggaaatgagttaagagatttgctttatactgcaactttaaatacaactaaaccatttaccataagataccctaaagaacagtcagtaaaatttgaagaaaaatctccacaaaagattgaaataggctcatgggaggtattaacagaaggaagtgacgtgatcattttagcagttggatcaatggtaagtaagagcttagaaatacatagtatgctaatggaaaaaggtatttcctcagaggtagttaattgtagatttatcaaacctatggatgaaaattatttaaatgaatctttaccaaaatataaattagttgttacaattgaagaaggtgtgacagatggtggatttggtgaaggagtaataaactggtcaaataaaaagaatattgaaaattctattttaacattaggtgttccaaacaggtttgtagatcatggaccaagaaatattttattagaagaaataggtttagattcaatgactttattcgaaaagatttataaatttttcaaggaaaatcaatgag

SEQ ID NO: 232864 - DNA, 1363 bp, Unknown
  Bacterial polypeptide expressing nucleotide sequence isolated from the Sargasso Sea
atgcagcttaagtatttaccaaaaataaatgagccaaaagattttcgaaatttctctaaccaagagctagtagaactgtgtcaggagcttagagaatacaccattgaaacgattactggcattggtggtcatttagctccaacattaggagtagtagagctaacggttgccctgcattatgtatacaatacgcctaatgataaacttatatgggatgtcgggcatcaaggatatgcacataagctattgacaggaaggttcaaagatttctcctcgattaggcaatttaaaggtctaagtggatttttgaagcgaagtgagagtaagtatgattcaataggagcaggccatgcatcaacttcaatttcagctgcattaggtattgctgaagcaaggcatcaaaagaaattagattatagagtggctgcaataattggagatggttcaatgactggaggtttagcttttgaaggaataaataatgcgggtcatcttaaacggcaattacttgttattctcaatgataatgaaatgtccattagtcctaatgttggtgccatatctacctactttactagattaatttctaatcctttatacaataaggttagaaatgaattttggaaccttacaggaaaacttccagctactgaaacgacaagaagtttaataaaaaaagtggaggaaagtttaaaaagtttggttgttcctgggatattttttgatgagttggggttcagatactttggtccgattgatggtcataatgttgatctcttagtaaataccttgcagaatattaaggatattaaaacacctgttcttctacatgttctaacaaaaaaaggaaaagggatggtatccgtaaatcaagagaatggagaatatcaaagtgatgcagtaaaatttcatgcagttaaaccctcatcaaaccccagcctaaataccccaaataaaaattccaatacaaaatctaacgctcccatttttcaagatgcttttggaagtttagtttgtgagatagccaacaatagagatgataccgtttgcattactgctgcaatgagagaaggtacgggcctagtaaattattctaaacaatttccagaaaggtattacgatgttggtattgctgaaggtcatgccgttactttttgctctggacttgctacagaggggataaaacctattgcagcaatctattcaacgtttttacaacgtgcttacgatcatattattcatgattgtgccattcaaaatttatctgttttattttgtatggatagagcgggaatagcgggtgaggatggtcctactcatcatggcgctttggatattgcatacatgcgaagcatacagaata

SEQ ID NO: 232865 - DNA, 658 bp, Unknown
  Bacterial polypeptide expressing nucleotide sequence isolated from the Sargasso Sea
ttgaaaatttttaaagaaattccaactcaaaagccgattacacccttattggatagtgtcaatttaccatcagatataagatctttttctttggttgaattacaaaatcttgcaaatgaaatcagagaattcttgctgtattctgttggacaaagtggcggacatctcggaggtggtctgggtgtaattgagctcacaattatattgcattatattttcaatactccttttgataatttagtgtgggatgtcggccatcaggcctatccacacaaaatactcactggtagaaaaaacaaaatgcaaactatcagaaaaaaaggtggcttggctccgtttccttcaagaaaagaaagtgaatttgacgcatttggtgttggtcactcaagcacatcgataagcgctatgcttgggatggcaattgcatccaaagagtctaatccagaaaaaaaacatatagcagtaattggcgatggagcaatgacagcaggcatggcatttgaagctctgagccataccggtcacttaaagccaaacgttttaattattttgaatgataatgatatgtcgatatcagaaaatattggtggattgtctaattatttttcaagaatatgggcatcaaagacctataaaggtattaaaaaaagtggttcta

SEQ ID NO: 232866 - DNA, 565 bp, Unknown
  Bacterial polypeptide expressing nucleotide sequence isolated from the Sargasso Sea
taattatgacattgcgtatttaagatgtattccaaatatgattatatgcactccatctaatgagaatgaagtcagacatttattaacaacagcatatctatataaagggccagctactgtcaggtacccaagagggataggtccaaatgcgcaagttgaacaagagttaaagccatatgaaattggaaaggctaaggttataaatgaagaaaataataaagtaataatattaaattttggagccttgcttgatcaagctaaagaggtggctaaaaacttaaaattgactttaattgatatgagatttgttaaaccgttagatgaagatattcttcgtaaatatctatctaaatcagatgtatttatatctattgaagacggatcgataatgggtggtgctggaagtgctgttcaagaattttgctcaaaagaaaatatcaatattaaatcaatactttttggtataccagataaatttattgaacatgcctcaagagaagagatgttaaatgaagcaggactttcttcagaaagtattgaatctaaactaaaagaattgttataa

SEQ ID NO: 232867 - DNA, 1178 bp, Unknown
  Bacterial polypeptide expressing nucleotide sequence isolated from the Sargasso Sea
ttatgcaggtcctatagatggtcatgatttatcaagcctagttccaattttaaaaaatgcaaaagaatcaagacatgagggtcctataatgattcatatcaaaactcaaaaaggaaaaggttattcttatgctgaaaaagcaaatgatcattatcatggagtgtcaaaatttaatgttgataccggcgaacaagtaaagagcaaatcaaatcttccagcttatacaaaagtatttgcaaacacgttagttaaacatgctaaaaaagatagcaaaatagtaggaataacagcagcgatgccaggagggactggtatggatatttttggcaaggagtttccaaatagaatgtttgatgttggaatagcggaacaacatgctgtaacttttgcagccggtatagcaaccgaaggatacaaaccatatgctgcaatttattctacatttttacagagagcatatgatcaagttgtccacgatgttgccatccaaagtttaccagtcagattcgcgatagatagagcaggattagttggtgctgatggctcaacacatgctggttcatttgatataacttacttatcaactttgcctaactttatagtaatggcagcaagtgatgaagctgaactagttaaaatgattaatacttcagtagatataaatgatagaccttctgcaattagatatccaagaggaactggagtaggtgttgatctcccatcaatagacgaaaaaattgaaattggtaaagggagagttgttcaacaaggtacacaagtttgtattttaaacctcggtactcgacttgaagagtgcaagttagctgcagaggaattaaaagcaaaaggagtttcaacaactttaatagacgccagatttgctaagcctttagacgaagaacttatactaaaatctgctaaggaacatgagcttatggtaactgttgaggagggttcaataggtggtttcggttctcatgttaaaaatttattagctgaaagaggagtatttgacaaaggtttaaaatttagatcaatgactttaccagatgaatttattgaacaagatgatccaaaaaaaatgtacgataaagctggattaaatagttctcaaatttctaacaaaattgctaatattttgtttcaaaaagagacaataagagttgtgaaaaattaat

SEQ ID NO: 232868 - DNA, 991 bp, Unknown
  Bacterial polypeptide expressing nucleotide sequence isolated from the Sargasso Sea
aatgaataaaaattataaatatttaaatagtataaactttccatctgatataaaaaaactttctcaatccgagcttaaaatattagttaaagaattgagagaagaacttattgatgcagtttctgaaactgggggacatttaggagcaggattaggtgttgtcgaactaacagtagttcttcattatatttttaacacacctcacgataaattaatatgggatgttggacatcaaacttacccccataaaattttaacaggaagaaaagataggattagaacattaagaaaaggaggcggcctatctggttttacaaaaaggtcagaaagtgagtatgatccttttggagctgctcatagttctacctcgatatcatctgctttaggtatagctgttgctaacaaattgtcaaataaaactaataatgtcattgctgtcattggtgatggagcgataagtgcaggaatgtcttatgaagctatgaataacgctggctctggcaaaactaaaatgattgtaattttaaatgataatgacatgtcgattgctaaaccagttggtgccatgagagcataccttgctaaaattttatctggaaaattatatttcagttttagagaaacacttaagcttataatatctgcattttcaaaaagatttagcaaaaaagccggtaaggcagaagattttttaagatcagcaatgacaggtggaactctttttaattcaatgggattctattacataggacctattgatgggcatgatgtagatgctcttgtttcagttatgaaaaatgcgaaagaaattaattatgatggtccaattatgatccacataaaaacagaaaaaggaaaaggatatgaatttgctgaaaaatcaaaagacaaatttcatggtgtatccaaatttaatgtaaatactggaatacaagaaaaatctacctcgagctcacctggatatactaaagtatttgctaatacgctaatt

SEQ ID NO: 232869 - DNA, 913 bp, Unknown
  Bacterial polypeptide expressing nucleotide sequence isolated from the Sargasso Sea
atgtctaataattcttccacaccatttcttgataagattagctcgcctcacgatttgaagtcattttccgatgaacaactttttcaagtagcaagcgagttgaggcaagaaactatttctgctgtttcagaaactggggggcatttaggtgccggtcttggggttgttgagctgacagtagcattgcatgctgtgtttgatgcgccaaaagacaagataatatgggatgtttcccatcaaagttacccacataaaattttaactggaagacgaaatcgcattcgaacccttcgacaaaaagatggattgagcggttttacaaaaagatctgaaagtgagtatgatccttttggtgctgcgcattcttcaacttcaatttctgctgctttgggttttgcaactgctagagacttaggaggttcatgtgaagccggtttgggtgaaacgattgcagtgatcggtgatgggtctatgagtgcaggaatggcctatgaggctatgaataatgctggtcatttgaaaaaacgactaatagtaattttaaatgacaatgaaatgtccatcgcaccgcctgttggagcgttgtcttcatacttgtctcaactttatgcagaagaaccgttccaagattttcgacaaatagcaaaaggggctattggttttttacctgaaccctttaaagaaggggcaaagagagcaaaacggttgttgaagtcaatggctgtagggaataccattttcgaggctttaggattttcatatcttggaccaatcgatgggcacgatttaaatcagttactacctatttttaggactatccaaaaaagattagatggccccattttattgcacgtcgttaccaaaaaaggaaaaggctatatgcctgccgaaacggctagagataaaggccatg

SEQ ID NO: 232870 - DNA, 1774 bp, Unknown
  Bacterial polypeptide expressing nucleotide sequence isolated from the Sargasso Sea
ttggtgcagccttggtgttgtagaattaactgttgctttacattatatttttaatacaccgaatgataaactaatttgggatgttggtcatcagtgttatccacataaaattttaactggcagaaaagaaagaataagaactttaagacaaggaaatggcctctctggttttactaaaagattagaaagtgaatatgatccctttggtgctgcgcatagctcaacatcaatttcatcagcactgggtatagcagaggcaaataaattgtctaataaatcagataatgtaattgcagtaattggcgatggtgcaatcagtgcaggaatggcttatgaggccatgaacaatgctggtgcttcaaaaactaagatgatcgtaattttaaatgataatgatatgtcaattgctcgaccagtcggagcaatgagtacttatttagcaaaaattttttcaggaaagatttattttagtttaagagaaactattaaattaattgtatcagccttttcaaaaagattcagtgcaaaggcaggtaaagcagaagatttacttagatcagctgttacaggtggaaccttgtttagctcactcggattttattatattggtccaattgatggtcatgatttgaattcattaattcctattttaaagaatgctagagactctaaacatgagggaccaattttgatacacattaaaacaaaaaaaggaaaaggttatacatttgctgaagaggctaaggataattatcatggagtatcaaaatttaatgtgaaaactggtgaacaattgaaaggaacgagtaaattaccctcatacacaaaggtttttgctgataccttaattcaacatgctaaaaaagatagtaaaattgtagcaattactgcggctatgccagatgggactggacttaataattttcgtaaagaatttcctgaaagaacttttgatgttgggattgctgagcaacacgctgttacgtttgctgcaggtttagctaccgaaaactttaaaccctatgcagctatttactctacttttcttcaaagagcttatgatcaagtagttcatgacgtagcaattcaaagtttaccagttagattcgcgattgatagagcaggacttgttggggctgatggaccaacacatgctggaagttttgatacaacatatttaaccactttaccaaattttattgtcatggcagcaagcgatgaagctgaacttgtaagaatgataaatacctcaaccgagattaacgatagaccttgcgcatttaggtatccaagaggaacaggattaggttcaactctaccctcaataaacgaaaaaattgagatagggaaatcaaaaattatcaaagagggaaaaaaattggcgattctaaattttggagcaagattgagcgagaccttgaaggctgcagaaaatttatcaaaaaaaggtataccaataacagttgttgatgccagatttgcaaaacctttagatgaaaatctcatttggcaattagctacaactcatgaagcaatcatgacaattgaagagggttcagttggtggttttggatctcatgtggtgaattttttgacaaaaaaaggtttaatggactctaatttaaaatttagatcgttaacattaccagatatttttattgatcaagataccccagataaaatgtataaagttgcaaatcttgattcagtttcaatcgaggaaaaagttttagatttacttaattccaatatagttttgaaaaaacagagttaa

SEQ ID NO: 232871 - DNA, 1588 bp, Unknown
  Bacterial polypeptide expressing nucleotide sequence isolated from the Sargasso Sea
ttcggagcagcacacagctcaacctcaatttcttcaaccttaggaatggcaaccgctaaaagactttctaatgataataataatgtagttgcagtgattggagatggcgcaatgagcgcaggaatggcttatgaagcaatgaacaatgctggcgctatgaaatctaaacttgtggtaatattgaatgataatgacatgtcaatagctcgtccggtaggagctatgagcaaataccttgctaggcttttatcaggcaaaatttattttagtttgagagaaactataaaacttattatttctgctttttccaaaagattttcaaaaaaagcaggaagggcagaggatattttaagaagtgcaataactggtggaacattgtttaatgaacttggtttttactatataggtccaatcgacggacatgatgtaaataatcttgttgctattttagaaaatgtaaaaaagtcaaaatatgaaggccctattctaattcatgcaataacaaaaaaaggaaaaggatataaacctgcggaagaatctggtgataaatatcatggagtttcaaaatttaacgttttaactggagagcaattaaaaggaaaagctatagcaccctcttatacgaaggtatttgcaaatactttaattaaacatgcggaaaatgatactaaaattgttgctattactggcgctatgccatctggaactggattggatttatttgaaaaaaaatttcctgaaagaatgtttgatgttggaatagctgaacagcatggtgttacttttgctgcaggactcgctacagaaggctataaaccatttgcagctatatattcgacttttttacaaagagcttatgatcaagtagttcatgatgttgctattcaatcactaccagtaagatttgctattgatagagctgggcttgtaggggctgacggtccaacacatgctggctcatttgatattacctatttggctacacttccaaattttattgtaatggcaccaagcgatgagtcagaacttgtacaaatgataaatacttcagtaaaaataaatgatcgaccttcagcttttagatatccaagaggaaatggtatagggatcgagctacctggaattgataaggttattgaaataggtaagggaagagttatcaaagaaggaaagaaaatagcaattttaaattttggagctagattatacgaatgtcaaaaagcttcagaaattttatcgtctaaaggaataaacgttactattattgatgcaaggtttgctaagccgttagatgaaaaattaattatggagattgcaaataatcatgaagttgttatttctatcgaagaaggttcaattggcggatttggttcacatgtaatgcaattattatctgaaagaggtttttttgacaaaggtttgaaatttagatcaatgattttaccagatatatttattgatcaagacaatccgattaaaatgtatgaaaaggcaggtttagatagccagtctattgtaagaaaaattgaaagtactttagactcaaacgttattttagcaagtaataaaaataaaagttcaaattaac

SEQ ID NO: 232872 - DNA, 913 bp, Unknown
  Bacterial polypeptide expressing nucleotide sequence isolated from the Sargasso Sea
atgaaacctacacttcttgataaaataaattaccctgctgatcttcggcatctttcagatttagatctcaaaaaacttgccatagaattgcgcaatgaaacaattagagcggtttctgagacgggaggacatttaggatcaagcctaggcgttgtagagctaacagttgcaatacattcagtatttaatacaccgcacgataagttgatatgggatgttggacatcaatgttatccacataaaataattactggtcgcagagaaaaaatgagttctcttagacaagagggaggactgtcagggttcacaaagagaagtgaaagtgattatgatcccttcggagcagcgcattcatctacgtcgatatctgcaggcttaggatttacggtagctagagatatggggatggctacgggagatgctgttgcagttattggtgatggatctataagtgctggaatggcttacgaagcactaaataatgcgggtgctgaggggagaagattttttgttatcttgaatgacaatgaaatgtctatcgccccaccggttggcgctatgtcgaaatatttatccagcctatatgcaaatcaacaattttatactcttaaggaattagcagagaattttgcgaaggcactaccagggccacttagagaaggggcaaaacgtgctagaggtttgataacaggactagctggtggaacgggaaatacttttttcgaagatttgggtttttcatacgtcggtccaatagatggacatgatttagaccaactactaccagttttaagaacagtcaaaaccagatctgagggaccagttctaatacattgtgttacaaaaaaaggagctgggtatgcaccagcagaaacgtctgcggataaatatcatggtgtgtcgaaatttgatg

SEQ ID NO: 232873 - DNA, 1322 bp, Unknown
  Bacterial polypeptide expressing nucleotide sequence isolated from the Sargasso Sea
tatgatccgtttggcgctgctcacagctcaacttttatttcatcaacacttggtatggcagtagctaaaaaattatcaaataacaataataatgtagttgcagtgataggagatggggctatgagtgcaggcatggcttatgaagccatgaataatgctggggcattaaagtctaaacttattgtagttttaaatgacaatgatatgtccatagcaaaacctgtaggcgctatgagtaagtacctagctaaacttttatcaggcaaattatattttagtcttagagaaacagttaaaatggttatttctgctttttcaaaaagatttagtcaaaaagccggtaaggcagaagatttactaagagggatagttactgggggaactttatttagtgaattaggtttttattatattggtcctgtagacggacatgatgttgataatttagtacaaatatttgaaaatgttaaaaattcaaatcacgaaggtccaatattaattcatgttagaactcaaaaaggaaaagggtataaaccagcggaagaatcaggtgataaataccatggagtatctaaatttaatatagccactggggaacagagaaaatctaaatcaaatgccccttcatatacaaaagtttttgctgaaacattgattaagcatgctgaacaagatactaaaattattggaattactggtgcaatgccttcaggaacgggcttaaatttatttgaaaaaaaatttcctgatcgaacatttgatgtaggtatagctgaacaacatgctgttacttttgcagctggtctagcaactgaagggtataaaccttatgctgctatttactctacttttcttcaaagggcttacgatcaagtcgtccatgatgttgctattcagtcattacctgtaaggtttgctatagatagagcaggactggtaggagctgatgggccaactcatgccggctcatttgatattacctacttatctaccttacctaattttgttgttatggctgcaagcgatgaatcagaattagttaaaatgattaatacttcagttcatataaatgatcgaccttcagcctttagatatcctcgaggtaacggaataggagttcaaatgccttcaattaatgaacttttagaaataggaaaaggtagaattattaaggaaggaaaaaaagtggcaattctaaatttcggaacaagattagaagaatgcaagaaagcttcagaaatattatctaacaaaggaatagacattacaataatcgatgcaagatttgctaaacccttggatgaaaaattaatcatggaagc

SEQ ID NO: 232874 - DNA, 565 bp, Unknown
  Bacterial polypeptide expressing nucleotide sequence isolated from the Sargasso Sea
taactatgatattgcttatttaagatgtattccaaatatgatgatttgcaccccatctaatgaaaatgaaacaaggcacttgttaacaactgcatatcattacaaaggtccggctgcagtaagatatccaaggggcactggcccaaatgtaaaagttaataaagaacttgatacatatgaaattggtaaatcaagagttataaatcatgaaaatagtaaagctattatattaaattttggtgctcttcttgatcaagctgaagaagtagccaaggatcttaaattaactttgattgatatgagatttgttaaacctttagatgaagaagtgcttcttaaatatctaccaaaagccgatatatttatatctattgaagatgcttcaattatgggtggtgctggaagtgcagtacaagaattctgctctagagaaaatattaatattaaatcaattctaattggaatacctgatgaatttatcgaacatgcatcaagagaacaaatgttggatgaggctgggctttctgcacataaaattaagtctaaactaaaagaattattatag

SEQ ID NO: 232875 - DNA, 880 bp, Unknown
  Bacterial polypeptide expressing nucleotide sequence isolated from the Sargasso Sea
tatgccagatgggactggactagatatttttcaaaaagaatttcccgatagaacttttgatgttgggattgcagagcaacatgctgtcacatttgcagctggattagcgactgaaaattttaaaccctacactgctatttattctacatttcttcaaagagcttacgatcaagtagttcatgatgttgcaattcaatgtttgcccgttagatttgcgatagatagagcaggattagttggtgctgatggtcctacacatgctggaagttttgatacaacatatctaaccactttaccaaattttgttgttatggccgcaagtgatgaggcagaacttgtgagaatgataaatacttcaacagatattaatgatagaccatgtgcgtttagatatcctagaggcacaggattgggttcaattttaccctctattagtgaaaaaattgagattggaaaatctaaaattataaaagaaggaaaaaaattagctattttaaattttggagcaagattaaatgagactttaaaagctgcagaaaatttatccagaaaagggattaatatcaccattgtagatgctagatttgcaaaaccacttgatgaaaatttaatttggcaattagcaacaactcatgaagcaattatgacaattgaagaaggttctattggaggttttggttctcacgtaatagattttttaacaaaaaaaggtttaatggatgctaatttaaaatttagatcgttgacattaccagatatttttattgatcaagatacaccagaaaatatgtacaaatttgcaaatcttgatgctaattcaattgaggaaaaagttttagatttgttaaattcaaatatagttttgcaaaaacaaaaataa

SEQ ID NO: 232876 - DNA, 1885 bp, Unknown
  Bacterial polypeptide expressing nucleotide sequence isolated from the Sargasso Sea
ttgcttgaaagtatctcacaacctcaggagatacaaaactttaatttaagagaacttacacagttagcgcaggaatgtcgtcagcgaataattgaggttacgagtaagtgtggaggacacttggcttcctcacttggagctgtagaaattacagttgctcttctaaaaaattttgatttcagcatcgaccgtctagtttgggatgtaggccatcaaggatatgcgtataaaattttgacaggacgtaacaaaaattttgatacacttggcaaatttggtggcattaaaaaatttctttcaagggacgaaagcagttacgaccattttggagcagggcatgcttccacctcaatttcggcggccttgggtatggccattggaagagatctccaggaaaaggagcatagggtagtttcagtaattggtgatggggcgttaacgggaggccttgcctttgaagccttgaatcataatggttccttagataagaacctgctggttatctataatgacaacggaattagcattgatccaaatgttggtgcgatctcaaaactgctgacacgctttgcatcttcacaattttacaaccgtttcagggaagaatccattgattttgcagagaaagcaccgttttctgagaggctgggtattaaagccactttacagaaaatgcatgattctgcaaagagctttttttcacctccgagtatgctctttgaacagttaggctggagatattttggtacaattgatggtcataatcttcaagaattgctggatatcatcaaacaagtcaaaaaattagacggacctattgtaattcacacaattacacagaaagggaaaggatactcttttgctgaagaggactcatataagtatcatggagtaactccttttgaacctatagacggaaaatttattaagaaaaaaacttcagttcaggcaatgagtttttcgcaggtattaggtaacaaaatgagtgagttaatggaacgtgaagaaagtgtagtggttataacagcagccatgcttagtggtacagggatcgcgaatttgcaaacaaaataccctgatcgggttttagatgttggcattgcggaaggtcatgctgtaacttgttcagcaggacttgcaactactggtaacaaaccctacgtagcaatttattcaacttttctacagcgagctttagatcatattattcacgatgttgcagtacagaaacttcctgtaagatttatgatcgatcgtgctggatttgtgggagcagatggtccaacacatcatggaatgtttgacctcacattccttcgcatgataccaaatatgacgattatggttcctcgtaatggtgcggaattgcgttgcatgattgaatttagctcgagctacgaaactggacctttggctattcggtatccaagagctaatacttctgagttggatgaaaatcaaattccacctcttgaactggggaaagcgcaaattttgcgaaaaggacaaaatgttgcacttttcgcagttggaacaatggttgaaaaggcggaaaaggttgcggatcttcttgaaaagcatggggtttttgcttcggttattaacgcccgttttgtaaagcctatggatgaggatttgatagttgaattgagtagagaagctaaattggtggtaagtcttgaagaaaacacaattcaaggaggatttggcagtgctatgctggaaatcttaagcaagaataaaatctgcaatcacactttgcagattggagctccggactgcttcattcctcaaggttcttatgaagagcaacttaatgaagcagaattaaacgttgaaaaaatttatgaacgtgtccttgaaaatcttcctgatgttgtataga

SEQ ID NO: 232877 - DNA, 1912 bp, Unknown
  Bacterial polypeptide expressing nucleotide sequence isolated from the Sargasso Sea
atgcagaattataaatatttaaataatattaattttccttcagatataaaaaaactcaataatgaagaattaaaagttctatcagaagaagtaagaagcgaaatgattgatgctgtttcaaaaacaggtggtcatctaggtgcgggcttaggtgttgtagaattaacagtagcacttcatcatgtttttgacacacctaaggacaaattgatatgggatgttggtcatcaatcataccctcataaaattttaacaggaagaaaagataaaatacgaactttacgacaaggaagtggattatctggttttacaaagcgatcggaaagtgaatttgacccttttggtgcagctcatagttccacttctatttctgctggacttggtattgcaacagcaaataaattatcaaataaatcagatcaggttatagcagttattggtgacggtgccatgagcgcaggaatggcatatgaagctatgaataatgctggagactcaaaaacaaaaatgatcgtaattttgaatgacaatgacatgtcaattgcaaaaccagttggcgcaatgaaatcttatcttgctaaaattttttcaggtaagatttattttagtttcagagaaacagttaaaatgattatttcatcattttcaaaaagatttagcaaaaaggctggaaaggctgaagattttttgagatcggctgtcacaggtggtacattatttaattcattaggtttttattatgttggtccaattgatggtcatgatttagatgtactattgccaattttaaaaaatgcaaaagaaagcaatcataatggtccaatactaattcatataaaaactcaaaaagggaaaggatatagttttgctgaaaaatctgatgacaaatatcatggagttacaaaatttgatgttcaaactggagttcaacaaaaatcaacaactaaaactcctgcttttacaaaggtatttgcaaatacattaatagagcatgcaaagaaagacagtaaaattgtaggtataaccgctgctatgccatctgggacaggaatggacgcatttagtaaagttttcccggacagaacttttgatgttggaattgctgaacaacatgctgttacttttgctgcaggtttagcaacagagggttataagccttatgcagcaatttattcaacatttttacaaagagcttatgatcaggtagttcatgatgttgcaattcaaagtttaccagtaagatttgcaattgatagagctggtttagttggtgccgatggagccactcatgcaggtgcttttgatattacatatttatcaactttacctaattttattgttatggcagcaagtgatgaagcagaattggtaagaatggtcaatacgtcagtagatattaataatcaaccatgtgcatttagatatccaagaggaaatggagcaggtttagaattacctgatatcaacgaaaaaatagatattggaaaaggtagagttataagagaaggtaagaaagttgccttagtaagttttggtaacagattaaaagaatgtttattggctgaagaaggtttaaaaaaaatgggaattaatccaacaattatagatgctagatttgcaaaacctctggatgaaaatcttatgtggcaagttgcaacaaatcatgaagtgctaattacgttggaagaaggctctataggaggttttggagctcatgtaaatcatttcttaaatgaaaagaatttattagataataatataaaatttagatcaatgattttgcctgataaatttttagaccaagataaaccagaagaaatgtataaagaagctggtctagatgctaaatctattgaagcgaaggttttagaaactttaaattctaaagttgtaattaaaaaaacgaattaat

SEQ ID NO: 232878 - DNA, 1119 bp, Unknown
  Bacterial polypeptide expressing nucleotide sequence isolated from the Sargasso Sea
ttaatcaaccagttctcttgcatattattaccaaaaaagggaaaggactggtctctactcgagaagataatggtgaatatcatagagatgctgtgaaatttcatgctgtaaaacctaattcaactaacggtgaattaaaaaaatctaaggagaaaataataccttcatttcaggatgtatttggttatttatcttgtgaggttgctagaaatcgtgatgatactatatgtataactgcagctatgagggaaggaactggattagtcccgtatgcaaaagaatttcctaatagatactatgatgttggaatagctgaaggacatggtgttactttttctgcaggatttgcaactgaaggattaaggcctatagtagctatatattcaacatttcttcaacgagcatttgatcatattgtacatgacgtggctattcaacatttacctgttatattttgcatggatagatctggtattgcaggtgaagatgggcctactcaccacggatcattagatatagcatatctacgatgtattcaggatatgattgttactgcacctagaaatggaaatgagtttcgtcatcttctttattcagcccttaatcagacaaaatcccctttttcaattcgttatccgaaatcaagtgcagttgagtttgatattgatggtcaagcagagcttttacccattggtagctgggaggttttacgttctggttcagatattacagtattatgtgttggttcactttcttacgatgttgaaagagctgcagtggctttacaaaaagaagatatatcgctagaaatagttaactgccgtttcattaaaccaatggatgaggattatcttagatcaataattgaacgttttaaaattgtaattactattgaagaaggtgtgattactggagggtttggtgatggtgtatcttcttggttattagaaaatgattttcaaggtcaaataaagagattaggtttacctgatagttttattcaacatggcaagcgagacgaattattagatgaaattggtttggatgaaaattcaataattaatactataaaatcattatttgtaaacacttcaaatgatacacttatagaatcataaa

SEQ ID NO: 232879 - DNA, 565 bp, Unknown
  Bacterial polypeptide expressing nucleotide sequence isolated from the Sargasso Sea
atgcagcttaaatatttgaaaaatattcaatcacctgaagatattaggggttattcaatagatgaattaaaagaattatgtgatgagatcagagattatacgatagatactgtaactacagtgggcggacatctggctccaactttaggagctattgaacttaccgttgctttgcaccatgtttttaatacacctaaagataaattgatatgggatgttggacatcaggcttatgctcataaaattttaactggtcgccttaaaaatatgaatactataagacaatttggtggtcttagtggatttttaaaaaggacagaaagtgagtatgatgtctttggcgcaggacatgcctctacctctatttcagcagctttaggtgtagctgctgctagagatcaaaaaaataaagattttaaagttgcagctgtaattggagatgggtcattaaccggtggcttagcttatgaaggtttaaataactcaggaattttgaatacacaaattcttgtagtgcttaatgataatgagatgtctataagtccaaaatgttggagccaatgag

SEQ ID NO: 232880 - DNA, 1438 bp, Unknown
  Bacterial polypeptide expressing nucleotide sequence isolated from the Sargasso Sea
attgaaaatttttaaagaaatacctcttaaaaagccagtaacaccattgcttgatactgttaattttccatcagatattcgctctttctcaattaacgagcttgaagttcttgctaatgaattgcgagaatttttattatattcagttggtcaaagtggaggtcatttaggtggtgggcttggtgtaatagaacttacaatagttttgcatcacatttttaacactccatatgataatttagtatgggacgttggtcatcaagcgtaccctcataaaatcctgacaggaagaaaaaataaaattcagactataagaaaaaaaaatgggctagctccttttccttcaagaaaagaaagtgaatatgatacttttggagttgggcattcaagtacatcattaagtgccatgctagggatggctgtagcatcaaaagaatctaatcctgataaaaaacatgtgggaattattggtgatggtgcaatgactgcaggtattgcatttgaagcgttaagccatatcggccatttaagaccaaatgttcttataattttaaatgataatgatatgtccatttctgagaatattggagggctctctaattatttctcaagaatatgggcatcaaaaatatacaaaggaattaaaaaaagtggcgcaagttttttaaaacctttaccacaagcacatcatctcgcaagaaaagtagagactcaaatgaaagctatggttgcacctggaacaatctttgaagaactaggattaaattatattgggccaattgatgggcataatttaaaagaattaataaatgttatatctaatctaaaagaattcgatggtcctcaatttttacatgttattacaaaaaaaggtgcaggtttagaccctgcagaagcagatagaattggatttcatgccattggaaaaattaattctattaaagatgaaaaaacaaaacaaaaaaaatatcaagatatttttggggaatggattgttgatatggcatcgcaagacaacgatttaattggaataactccagcaatgaaagaaggatctggtcttgttatgtttagtaaaaaatatcctgaaagatattttgatgttgcaattgctgagcaacattctgtaacttttgctgctggacttgctgttgaaaataaaaaacctgtggttgctatatattcaacctttttacaaagagcttatgatcagctaattcatgacgttgcaatacaaaatcttgatgtaacttttgctttggatcgatctggtttagtaggtgaagatggtccaactcattcaggtaattatgacattgcatatttaaggtgtattccaaatatgattatatgcactccatctaatgagaatgaagttagacatttattaacaacggcatatctatatcaaggtccagctactgtaaggtacccaaga

SEQ ID NO: 232881 - DNA, 1045 bp, Unknown
  Bacterial polypeptide expressing nucleotide sequence isolated from the Sargasso Sea
tatgcagcttgaattattaaaaaacattaattctccagatgatattcgaaattattctatagaagaattgaacaaattagtagatgaattacgttattatataatcaaaacaattagtgagattgggggccatctcgcaccaacattaggtgttattgaattaactgtggctttacataaggtttttgaaacaccaagggacaaaataatatgggatgtaggtcaccaaggatatgctcataaacttttaactggacgttttgaccaatttcattcgattagacaatttggtggtttaagtggtttccttaaacgttcagaaagcgaatatgatgttttcggagcaggtcatgcatctacatctgtttcagctgcaacaggtatcgcacaatctcaaaagcactcaggaaaagattttcgtgtcgtgtctgtcattggtgatggctcaatgactggaggattagcattcgaagcattaaataatgctggtcatttaaaaactccaatgattttagtattaaatgataatgaaatgtctattagtcctaatgtaggcgctttaaataattatttaactaagattgtaacaaatcctacatacaatcgtatcagggaagaaatttggaaaatatcaggcaaacttccatttggaaaatcaaaagcaagaacaattcttcatagagttgaagatagtttgaagtcacttttagtccctgggatgctttttgaagaattagggtttagatatattggacctattgatggccataatctaaatgatttgatcaatacttttgaaaaaattaaagatataaaatctccattgcttcttcatgtccttacaaaaaaagggaagggtatggctagtgtcaaaaaagatgaatatcatcttgatgcagtaaaatttcatgccgtaaaacccaatggctccaaaaacggcaaggtttcaagtaaccagaatcaagctacaccttcttttcaggatgtttttggttctcttgtttgtgaaattgcccgcaatagaaaggatactgtatgtataaca

SEQ ID NO: 232882 - DNA, 505 bp, Unknown
  Bacterial polypeptide expressing nucleotide sequence isolated from the Sargasso Sea
catgcatctcggagatctgacgcatccgaatgagctgcatggcctcaagctgtctgagcttgaggatgtcgctcgtcagattcgagagcgtcatcttcaggtggtctccaccagtggcggccatctcggccctggcctgggggtggtggagctcaccctggcgctctaccagaccctcgatctggatcgggaccgggtcatctgggatgtcgggcaccaggcgtatccccacaaattgatcaccggtcgtttcaacgacttccacacccttcgccagcagaacggagttgcggggtacctcaaacgctccgaaagcaattttgaccatttcggtgctggccatgccagcacgtcgatttcagcagcgctgggcatggcgatggcccgggataaccgcggggaggacttcaagtgcgtcgccgtgatcggcgatggtgctctcaccggtgggatggcgctggaagcgatcaaccacgcgggacatctccccgaaacccccttgctc

SEQ ID NO: 232883 - DNA, 1918 bp, Unknown
  Bacterial polypeptide expressing nucleotide sequence isolated from the Sargasso Sea
atgacacaaaaaagcacatttttaaaagatataaatttccctacagatttaaaaaaaatttctgaaaaggatttaccaaaagttgcaaatgaagttagaggtgaaatgatagatgctgtatctcaaacaggtggccatctaggtgcaggtttaggtgttgtagaactaactgtggcccttcactatgtatttgacactccaaatgataaattaatttgggatgtaggacatcaatcttatccacataaaattttaacaggaagaaaagataaaattagaacattgagacaaggtgatggattatcaggttttacaaaaagaactgaaagtgaatacgatcctttcggtgctgctcatagttcaacatcaatttcttctgcgctaggaatagctgaggcaaataaattggaaaataaatcttcaaacgtaatagcagtgataggagacggtgcaataagtgctggtatggcttatgaagcaatgaataatgcaggtgcctctaaaaccaaaattattgttattttaaacgacaacgatatgtcaattgcaaaacctgtcggagcaatgagaacatatcttgcaaaattattgactggaaaaatatattttagttttagagaaactataaaattaattacttcggcattttcaaagaggtttagtgcaaaagcaggaaaagcagaagattttttaagatctgcattcactggtggcactatgtttaattcattaggtttttattatgtgggaccaattgatggacatgatttatcaaccctgattccgattttaaaaaatgcacgggactcaaatcatgagggtccaattatgattcatattaaaacacaaaaaggcaaaggatacagttacgcagaaaaagctaaagatcattatcatggagtttcaaaatttaatgttagcactggcgaacagaataaaagtggatctaatttaccctcatatacaaaagtatttgcaaatactcttgtcaaacatgccaaaaaagatagtaaaattgttggaataacagctgccatgcctggtggaacaggaatggatatttttggtaaagagtttccaaaaagaatgtttgatgttggtatagctgagcaacatgcagtcacatttgccgctggaatggccactgagggatacaagccttatgccgcaatatactcaacttttttacaaagagcatacgatcaagttgttcatgatgttgctatacaaagcttaccagtgagatttgcaattgatagagctggattagttggtgctgatggatcaacacacgctggttcatttgatattacttatttatcaactttaccaaattttattgtaatggctgcaagtgacgaagctgaattggttaaaatgataaatacctcagtagatattaatgacagaccaagtgcaattagatatccaagaggagtaggtgttggagttgaacttccttcaatagaggaaaaagttgaaattggaaaaggaagaataattcaaaatggtagtcaagtatgcctgttaaacttgggtacaagattagaagaatgtaaattagctgcagaacatttaaaacaaaaaggagtttcaactactattgttgatgcaaggtttgccaaacccttagatgaagaattaattattaaatgtgctagagagcatgaagttttagtctctattgaagaagggtcaattggaggatttggttcacatgtcaaaaacttacttgcagagaaaggaatatttgacaaaggtctaaaatttagatcaatgaacttaccagacaaatttattgaacaaaatacccctgaaaaaatgtatgaaattgctgggttaaatgcttctcaaatttcagagaaaattttagatattttatttaacaaaaattcaatcaaagtagtaaaaaattaaa

SEQ ID NO: 232884 - DNA, 1912 bp, Unknown
  Bacterial polypeptide expressing nucleotide sequence isolated from the Sargasso Sea
gatgcctaattatcaatatttaaataaagtaaattttccatctgatattaaaaaattatctatcgatgaattaaaaatcctagcaaaagaaataagagaggaaatgatagatgccgtatcttttacaggtggccatttaggagctggcttaggtgttgttgagctcactgtagccttacaccatgtatttgatacaccaaatgataaattaatatgggatgttgggcatcaaagctatcctcataaaattatcactggtagaaagaataaaatacgaacaatcagacagggcaatggtttatcaggttttactaaaaggtccgagagtgaatatgatccatttggggcagcacatagttcaacatcaatttcttctgcattaggtattgctgttgcaaataaattatctaataaatcgaatgaggtagttgccgtaattggagatggagctattagtgctggtatggcatatgaagccatgaacaatgccggtatttctaaaactaaaatgattgtaatattaaatgataacgacatgtctattgcaaaaccagttggagcaatgagatcatacttagcaaaattactttcaggaaagttatattttagtttaagagaaaccataaagttaataatttccgctttttctaagagatttagtgacaaagcgggaaaagctgaagattttctaagatcagctgttaccgggggaactttattcagttctttaggtttttattacgtaggtccaattgatgggcatgatttagaatcgttaattccaatactaaagaatgctaaacaatctaatcatgagggtccaataatgattcatattaaaacagaaaaaggtaagggttattcatttgcagagaaagcctctgacaaataccatggtgttacaaaatttaatgttaaaacaggagttcaaaaaaaatcggatagcaaaataccttcatacacaaaagtttttgcaaatactttaataaaacatgcagaaaaagatagcaagatagtagctataaccgcagcgatgccgtcaggaacaggtctggatatttttggtaataaatttccaaaaagagtatttgatgttggtattgcggagcagcacgctgtaacatttgcagctggtcttgccacagaaggttttaaaccttttgcagcaatatattctacttttttacaaagagcttatgatcaagttgttcacgatgtagctattcaaaatctaccagttcggtttgcaattgatagagctggacttgtaggagcagatggcccaactcatgctggttcttttgatattacttacttatccacattacctaattttattgttatggcagcaagtgatgaagctgagcttgtaagaatgattaatacatccgtcgatattaacagcaacccttctgccttaagatatcctagaggaaacggtattgggattgaattaccagacatcgatgaaaagataaaaataggaaaaggtagagtcattcttgaaggaaaaaaagttgctttaattaattttggagcaagattaaatgaatgtttactggctagtgaaaaattaaataaaaaaggtattaaaataacaatcgttgatgctagatttgcaaagccacttgatgagaaattaatttggcaaatagcaactgaccatgaagctattattacaatagaagaaggctcaataggtggttttggttctcatgtaagtcaatttttatctgaaaaaaatttattagataataatttaaagtttagatcaatgattttgccagataaatttatagaccataataagcctgagttaatgtataaagaggccggccttgatgctgatgcaatagcaaataaagtttttgatactttaaattcaaagataatagttcaaaaacagaactaa

SEQ ID NO: 232885 - DNA, 1921 bp, Unknown
  Bacterial polypeptide expressing nucleotide sequence isolated from the Sargasso Sea
aatgaataaaatagaaattaaatatctcgacaaaattaaatcacctaaagatttggatgagttaaatgacgaacagcttaaagaacttgcaacagagttgagatatgatgttattgaaacagtttcaaagacaggtggtcatttaggtgcaagccttggagtgatagagcttactgttgctcttcataaaatctttgactcacctaaagacaagataatttgggatgttggtcatcagagctatccacacaaaatactgactggcagaagagatcaaatgtcgactttgagaaaaaaagatggcctatcaggttttacaaaaagggatgaaagtaaatatgaccattttggagctgggcacagctctactgcagcttctgctggacttggaatggcaattggaagagatttaaaaaataaagacaatcatgttgtttgcattgttggtgatggtgcaatgagtgctggtcaggcatatgaagcactaaataatgccggtgcagaaaaatcaaaactaatagtaattttaaatgataacgatatgtcaattgctcctcctgcaggagctatgagcgcttatttagcaaaactaatatcaggtggaacatatcttggtttaagaaactttgccaaacaagttatagaaaagcttcctaaatcacttgagaaaggtgcaaaaaaagctgaagaaattactagacttattgcaggtaatggaactctttttgaagctttaggtttttattatgttggacctatagacggacataatttggatcatttacttcctgtgattagaaatgtaaaaaatgccgataatggcccagtaataattcatgttgttactcagaagggtaaaggttataaacctgcagaagactcagatgaaaaatttcatggagttacaaaatttaatattgctactggagaacaagaaaaaccaaagaaagcaaatgtttcttatactaaaatcttttctaattccttaataaaatgtgctgaaaatgataatgatattgttgctgttacagctgcaatgccatcaggaacgggacttgacaaatttaaagagctttatcctaagaggttttttgatgtaggtattgcagaacaacatgcagtaacattttctgctggacttgcaattgagggacttaaaccatttgctacaatttattcgacatttcttcaaagagcttacgatcaaattatccatgatatagcaattcaaaatctaccagtaagatttgcgatcgatagagcagggttagttggcgcggatggaccaactcatgctggaagttttgatttggcgtatctatcaattttaccaaattttgtagttatggcagcttctaatgaggttgagttagcaagaatggttaaaactgctgctgactatagcttaggcccaatatcttttagatatccaagaggaaatgtttttgggttagatatacctacagaaattgaatcactagaaatcggaaaagggaaaattataaagcaaggtgaaaaaatagctctactaaaccttggaactagaattgaagaagtaaaaaatgcatcagatacattagaagcgatgggtctttcttgcacaattgctgatgcaagatttgctaaacctttagacaaagacttaattagagatctgtcaaaaaaccatgaactaatgattacaatcgaagaaggttcatctggcggttttggtgcccatgtcttaatgtttttagcagatgaaggaattcttgataatggttttaaaattaggaatttatatcttccagatacatttattcagcatggtgatgtaaatgacatgtatgctcaggcagggttaaattcagaaaatattgttaaattagcaatgaaggctctagatataaataataatgaaatcaagattattaagtcttaa

SEQ ID NO: 232886 - DNA, 1924 bp, Unknown
  Bacterial polypeptide expressing nucleotide sequence isolated from the Sargasso Sea
atgtctcagaaatctattttagagaatatttcatcgcctaaagacttgaaaattctgtctttagaccaattattaattttgtctgatgaacttagatcagagcttatatcatctgtatctaaaaccggtggccacttaggagcaggcttaggtgtaatagagttaaccatagcactccattatatttttaatgctccaaatgataaaattatatgggatgtgggtcatcaagcttatcctcataaaatacttactggaagaaaagaaaaaatgaattctctcagacaggaaaatggtttgtcaggttttactaatatccaagaatctgtttacgatgcatttggagctggacactcatctacatcaatttcagctggtctgggcatggctgtcggaagagatttaaaaggagagaaaaacaatataatttcaattattggtgacggtgcaatgagcgcaggcatggcttgggaagctcttaataatttaggatctcaaaaaagaaaaatgattgtcattttaaatgataacgatatgtctatagctcctgcggtaggagcggttagtacatacctttctaagttgatttcatctaagccacttacttcgattagggaaatcgctaagcaagtggcaagtcacctgccaaatgaaattgaaagagcagcaaaaagagcggatgagttggccagaaatatgatgggtggtggaactatttttaataatttaggtatgtattatattggtccaattgacgggcataatattatagatctagttaaaattttaaaaaatcttaaaaactctgtaaatgatggaccagttttgttgcatgttgtaactgaaaaaggtaagggtcacccatttggtaaagatgcaactgaaaaatatcatgctgttccaaaatttgatattattactggtgaacataaaaaaagtgcttctaagaaaacctacacgcaaatattctctgaggaacttataaagcaagctaaagaggatgaaaaaattgttgcagtaactgcggcaatgccatctgggacaggcttagataaattttctttagaatttcctaatcgtttttttgatgttggaatagctgagcaacatgctgtgactttttgtgcaggaatatctttagaggggtataaacctttttgcgcaatttattcaacatttcttcaaagggcttatgaccaaatagttcatgatgtagcaattcagaacttaccagttaaatttgctattgatagagctggatttgtaggggcagatggtgcaacacatcaaggttcatttgatttatcttatctatcatgccttccaaactttgtaataatgtcaccctctaatgagcaagaattaattaatatggttaagacatctgctaattataatgatggacctattgcaataagatatcctaggggtgaaatagaaggcattgaaaagctacatacagcaaaaattttaaaaattggaaaaggtaaaattgtgctcgatggtttttgtaaggataaaaaagctgatttagctttcttatctattggcactagattatcagatactattaaggttgcaaaaaatttaaaaaataagggttattcagttagtgtggctgatgcaagattcgcaaaacctttcgataaagagatgttaatacaaattgctaaaaaccacaacaagctaataataatagaagaggcttcatcaggaggattctcatcaacggttatttcatatttagcaaatgctgacttaatcaatacaaattttaaagttagaagtctcacaatgccagacaaatttttagaacataaaagtcaagaggctcagataatcgaagctggcttagattatgagaatattttaaaaagtgccctttcaattttagaaaatgataaaattgcaaatattagttaat

SEQ ID NO: 232887 - DNA, 924 bp, Unknown
  Bacterial polypeptide expressing nucleotide sequence isolated from the Sargasso Sea
tatgagcgttgatataagcaatttccccaacctggccctcgcggatacgccggtcgagttgcgatccctgcccttcgagcgactgcccgtactgtgcaacgaactgcgtgaatatctgctgcgttcggtgagtcgctccagtggccatcttgcctccgggctcggcaccgtcgaactgacggtggcgctgcactacgtctacaacaccccgttcgatcggctggtgtgggacgtgggccaccaggcttatccccacaagatcctcaccggtcgccgtgatcggatgcagagcatccgccagaaagacggtctgcaccccttcccctggcgcggcgagagcgaatatgacgtgctctcggtcggccactccagcacctccatcggtgcggcgctcggcatggcagttgctgccgaaagcgaggggctggggcgcaaggtggtggcggtgatcggcgacggtgccatcaccgccggcatggcgttcgaggcactcaatcacgccggcgatgtccacaaggacatgctggtggtgctcaacgacaacgagatgtccatctcagaaaatgtcggggcgctcaacaaccacctggcccgcatcatgtccggcaagctctacaccaccatccgcgagggtggcaagaaggtgctggccggcctgccgccggtcaaggagctggccaagcgggccgaggaacacctcaagggaatggtggtgcccggcaccctgttcgaggagttcggcttcaactacataggccccatcgacggccacgacatcaacgccctggtcgagaccctgcgcaacatgcgcaacctcaaggggccgcagctgctgcacgtcaaaaccaagaagggcaagggctacgagcccgccgaaaaggaccccatcggttatcacggcgtgcccaagttcaacccggacga

SEQ ID NO: 232888 - DNA, 1870 bp, Unknown
  Bacterial polypeptide expressing nucleotide sequence isolated from the Sargasso Sea
tatgagtttggacatttcacagtttcccgtgttggctcaggccaacactcctaatgaactccgccagcttcctcaggccctgttacctcaattggccgatgagttgcgggagtttcttcttaagtccgttggcatgtccagcggacattttgcctctggactcggcacggtcgaactgactgtcgccctgcattatgtctataacaccccgtttgatcgtttgatttgggacgttggccaccaagcctatccccataaaatcctcaccggtcgccgcgacagaatgcacaccattaggcaaaagaacggcttacaccctttcccttggcgggaagaaagtgaatacgacacctttagcgtggggcattcaggcacatccatcagtgccgcattagccatggccgttgccgccgaaaaagaacaggctggccgcaaagtggtcgccgtgattggcgatggcgccatgacgggcggtatggtgttcgaggccatgaatcacgcgggtgatttgcacaacgatatgctgatggtgctgaacgataacgaaatgtcgatttcagaaaacgtcggcgcgctcaacaatcacttagcgcagttgatgtcgggccgcctctacaccaccattcgtgaaagcagcaagaaagtgctcaagggcatgcctgtcatcaaagagatggccaagcgcaccgaagagcacctcaagggcatggttgtacctggcaccctgtttgaagagttaggctttaactatatcggccccatcgacggccacgatgtcgatgccctagtggaaaccctgcgcaatatgcgctctctaaagggtccacaagtgctgcacatcatgaccaaaaaaggccgtggctatgaaccagccgagaaagatcctatcggttggcacgcggtacctaaatttgacccctcacagtttaagaagccagcgactaagccaggactgccaaccttctctcaagtgtttggcaaatggttatgtgatattgccgagcaggacgaaaaagtcttaggcattacccctgctatgcgtgaaggttcgggcatggtggagttctcacaacgcttcccgaaacaatatttcgatgccgccattgccgagcaacatgcggtgaccttaggggccggatttgcctgtgaaggctttaagcctgtggtcgccatttactcgaccttcctgcaacggggctatgaccagctgatccacgatgtagcgctacaacgtttacctgtgttattcgccattgaccgtggcggtatcgtcggtgccgacggcccaacccaccagggggcattcgatttaagctttatgcgctgcattccgaatatggtgatcatggcgccatcggatgaaaatgaatgtcgtcagatgctctatacaggttattgctatgatgcaggcccgagcgcggtgcgttatccaaggggcagcgccacaggcgcgactcaggtagaagccatgacggcgctgccgatcggtaaaggcgtgattaagcgtttaggcaaaggtatcgccatgctgaactttggtaccaccttagccgctgccttaaccgccgcagaaagcttagacgccaccgtcgtcgatatgcgctttgtgaagccgttagatgtggatttagtcaaagagatggcgcaaacccacgatgtgatcgtgacagtggaagaaaacgccattatgggcggcgcaggctctggcgtattagaactgttgcaaaagcttaaaatgcccaaacctgtgctgcaaataggtctacccgatgagtttattaaacacggttcaccggaagaagtgacccatgatttacaactcgatgcagaaggtatgttagcgcaaattaatgcctttcttgccgattga

SEQ ID NO: 232889 - DNA, 1207 bp, Unknown
  Bacterial polypeptide expressing nucleotide sequence isolated from the Sargasso Sea
atgtcgcttaaaattttaccaaatatttcttctccagaagatattcgaggtttttctaataaagagttacaggaactttgtatagagttaaggtctcatacaattgaaacaattacagaaattggtggacatttagctcccactttaggtgttattgaattaactgtagctcttcattatgtctttaacactcctaaagataaactagtatgggatgtgggccatcaaggctatgctcataaattacttactggaagatttgaagaatttccgacaatacgtcagttcaagggattaagtggatttttaaagcgctcagaaagcgagtatgatgttattggcgcaggacatgcatccacctcaatatctgcagcattgggtattgctgaagctagacaacaattaaaagaggattttagagtcgctgcaattattggggatggatcgatgactggtggtttagcttttgagggcataaataatgccggacatctgggtaaacagtttttagtgatattaaatgataatgaaatgtctatcagtccaaatgtcggtgctatctcaacatactttactagactaatatcaaatccactctataataaggttcgtaatgaattctgggatctaactggtagactgccaatagcaaaaagtacaaccagaacattgattaaaaaggttgaagagagtcttaaaagcctgatcgttccaggaattttatttgatgaattaggttttcgctactttggtccaattgatggccatgatctagatatggttgttaatactctagataatatcaaagatatacagaacccagtcctattacatattttaaccaaaaaaggtaagggcatggtatctctaaatatgaataatcgtgaataccatgaagatgctgtaaaattccatgcggttaagcccaatggaaaagcaaaaccatctgagaagattgaaaaaaaaataaatagtgaaaaaccggttcctagttttcaggatgtttttggaaaactttcttgcgaaatagcaagaaatagagatgataccgtatgcatcaccgcagcaatgcgtgaagggacagggcttgtcacatattccaaagagtttcctgacagatattatgatgtgggtatagcagaagggcatggagttacttttgcatccggtttagcctccccaggcattcgcccaatagcagcaatat

SEQ ID NO: 232890 - DNA, 1948 bp, Unknown
  Bacterial polypeptide expressing nucleotide sequence isolated from the Sargasso Sea
aatgtccaaaaatctagaaaaccttttgctaaataaagttaaaacacccaatgatctgcggcttcttaatgatgaacagttggatcaggtatccaaggaactccgaaatgaggttatcgaagtggtttctcaaacaggaggtcacttagggtcatcacttggagtggtggagttaaccgtagctttacacgcagtttttaatactccctttgataagctaatttgggatgttgggcatcagtgttacccacacaaaataatcacagaacgtcgaaacgatatgagaagtctgcggcagaagggtggtataagcggatttacgaaacgaagtgaaagtgaatatgatccttttggtgctgcccatagctcaacttcaatatcagctgctctaggctttaccatggctagagaattaggtcaggctattggtgatacgattgctgttataggagatggttcgattacagcaggcatggcctatgaagccctaaataacgttggaagcgaaaataagagaatgttcgtgatcctcaatgataacgaaatgtctattgcgcctccagttggcgcaatgtcatcttacttatctacaatcaactcacatcaagcattcgaaaaattaaaactttttggagaagaaattgaaagtcatttaccttctacacttagagagggggctagaagagcaagacaacttgtaactggaagaagccaatcaacattttttgaagatctaggtttcaactatcttggaccaattgatgggcatgatatgagacagttgctgtatgttttgcgtgctgcaaagtttaggtcaactggtccaaccttaattcatgtttgtactaaaaaagggcatggttatgcaccagctgaaaactccgctgacaagtatcacggagtttcaaaattcaatgttcagactggtcagcaatccaaggctccagcaaatgctccctcatataccagtatttttggcaaatcacttcttgaagaagcaaagttggatacaagagtggttgggataacagcagccatgccatccggaacgggaataaatattcttgccaaagagttgcctgaacgtgtatttgacgtcggtatagccgaacagcacgcagtgaccttcgcggctggccttgccgccggagggatgaagccattttgtgcgatttattcaacctttttgcaacgcgcctatgaccaaattgttcacgatgtagctttgcaaaatcttccagtacgttttgccattgatagagcaggtttagttggagcagatggcgctactcacgctggagtatttgatatctcatatatgtctaatattccaaacatgacggttatggctgcttctgacgaagcagaattagtccacatggttaggactgcggcagaattcgatgaagggccggttgcatttagatatcctcgtgggaatggcactggtattcaattaccccaaagaggtgaaattctcaaaataggcaaagggcgcattatccaagaaggaactgatctggtcatcttatcatttggtgcgcatatgaacttggttaaggatgccgaagtggctttagctaaaatgggtgttagtgtaacaatagctgacgcaaggtttgcaaaaccattagacgtcgaacttgttgatcagttaatggaaaatcactcttgtatgttgacagttgagcaaggctcaatggggggctttggaagcatagtactgcaacatgttaataggaacagaacaagaaatgaaaatttagtatttgatagcatttttgtggctgatagatttatcgatcaagcagatgttaactcaatgtatgaagatgcaggtatgggtataaacgatataattgataaaagtatcaaattattagaacaaagtagtcaaaattctcggaaatttgattttggtaattttaaagaaaatgcagtttcttaa

SEQ ID NO: 232891 - DNA, 1010 bp, Unknown
  Bacterial polypeptide expressing nucleotide sequence isolated from the Sargasso Sea
aatgaaagtatttaaagattttccattagaaagacccaaaaatctttttttagatagaattgagtctccagaagatctaaaaaaactcactattgaagagcttaaagttctagcagatgaattaagggaatttttacttttttcagtaagacaaacaggaggccactttggagccggactaggagcaattgaaataactattgctttgcattatttattaaacatgccttctgacaagattgtctgggatacgggtcaccaagcttatcctcataaaatactaactggtagaagagacaagatgcacattataagaaagattgatggtcttgctccctttccttctattagagaatctaaatttgatgctatgagtgttggacattcaagcacttcaattagtgcagctttaggtatggatgaagctgttaaacaccaaaaaaataataaaaaaatattttctgttataggcgatggcgccatgacagctggaattgcatttgaagcaatgatgcatgcaggacacttaaacaataatctaaagattattctcaatgataatgatatgtctatatcaaagaataaaggtgggctctcagattatcttgcaaaaatatgggcatcaaaatcgtacaaaaaacttaaatctagcggcaaaaaagtacttaaaaatttaccttatggacttcatcttacaagaaatattaaggatagtttgaaatctgcagtgatgccaggaaacttatttgaagatttaggtcttcattacatagggccaattgatggtcatgatatacctcttctaattaaaacaattaatagaatgatggaaaagactgaaccttatttgctgcatgttgttacaaaaaaaggtgctggttttgaacctgctgagaatgaaagaattaaatttcatgcaatttcaaaaatagaaaatacaccggctcctaaaaaagcaaaattccaagatatttttggagattggttgtgtcataaggcagaagaggata

SEQ ID NO: 232892 - DNA, 621 bp, Unknown
  Bacterial polypeptide expressing nucleotide sequence isolated from the Sargasso Sea
aatgcttttaagtgagttaagtcatccaaatcaacttcatggcttaacagtttcacaattagaggaaattgcttgtcaaattagagaaagacatcttcaggtagtatctactagtggaggacatcttggtcctggattaggtgtagttgagttgacgttggctttatatcaaactcttgatcttgattttgacaaagttgtttgggatgtaggacatcaaggttaccctcataaattaattacaggacgtttcagtcaatttgattctctaaggcaacaaaatggagtcgctggatatctaaaaagaagtgaaagtaaatttgatcattttggtgctggacatgcaagtacttctatttctgctgctttaggaatggcaatagcaagagatagaaaaggtgaaaattataaatgtgtcgctgttattggagatggtgcactaactggaggaatggcattagaagctataaatcatgcaggtcacttaccaaatacccctttagttgtagtattgaacgataatgacatgtctatttcacctccggttggagccctctcatcttacttaaataaagtaagagtaagtccaccattacaatttttgtcagatagtgtcaagaa

SEQ ID NO: 232893 - DNA, 991 bp, Unknown
  Bacterial polypeptide expressing nucleotide sequence isolated from the Sargasso Sea
ttgaaaatttttaaagaaattccaattgaaaaaccaattactcctttattggatagtattaatttaccatccgatattagatcattttctatggttgaattagaaaatcttgcaaatgagataagagaattcttactttattcagttggacaaagtggaggacatcttggtggtggacttggtgtcattgagctcaccataatacttcattatatatttaatactccttttgataatttaatttgggatgttggtcatcaagcataccctcacaaaatacttactggtagaaaaaatcaaatgcatagcattcgaaaaaaaggtggtttagctccatttccatcgagaaatgagagtgaatttgatgcatttggtgtgggtcactcaagcacatcaataagtgcaatgcttggaatggcaatcgcatcaaaagagtcaaatccagaaaaaaaacatatagcagttattggtgatggagcaatgactgcaggaatggcatttgaagctttaagtcatactggtcatttgaaaccaaatgttttaattattctcaatgacaatgacatgtccatttcagaaaatgttggcggcttgtctaattatttctcaagaatatgggcttcaaaaacttataaaggtataaagaaaagtggtgctagttttttaaaacctttgcctcaagcataccatcttgctagaaaagtagagacacaaatgaaagcgatggtagctccaggaactatttttgaggagttaggtttaaattatatcggtcccattgatggtcataacctgaaagaattaaaagacgtgatttcaaatctaaaagaatttgaaggcccgcaatttttgcatattattacaaaaaaaggagctggtttagatcctgctgaggctgacaggataggattccatgcaatagggaaaattcagtcaataaaaaataagaaatctaaacaaaaaaagtatcaagatatttttggggattggg

SEQ ID NO: 232894 - DNA, 960 bp, Unknown
  Bacterial polypeptide expressing nucleotide sequence isolated from the Sargasso Sea
aatgataaaacaaataaattttccatcagatttgaggaaatttaaaaaaaaagatttaagacaaatatcagatgaattaagagacgagctcattgacgtggtttctgaaacaggaggacatctaggagcaggtttaggcgtagttgagcttactgtagcgttgcattatgtttttgatacaccaaaagataagcttgtttgggatgtaagtcatcaatgttaccctcataaaattataacaggtaggagagataggattaaaactttgagaaaaggcggaggtctatctggatttaccaaaagatctgaaagtgagtacgatccttttggtgcagcccacagttcaacttctatttcctcaacattaggtatggccgttgcaaaaaaactttctaataataaaaataatgtaattgcagttattggagatggagcaatgagtgctggtatggcttatgaggcgatgaataatgcaggagctttaaaatctaacttaattgttattttgaatgataacgacatgtctattgctagaccagtaggtgcaatgagtaaatatttagcaaagctgctatcaggaaaattatactttagttttagagagacgataaaaatgataatttcatctttttcaaaaagatttagtcaaaaagccggcaaagcagaagatttattgagaaacattgtgacaggcggcactctttttaacgaattaggcttttattatgtaggacccattgatggccatgacgtcgaaaatttagttgaaattcttgataacgtaaaaaactctaatcacaacggcccggttttaattcatgtcagaactcaaaaaggtaaaggctatgggcccgcagaagaatctggtgataaatatcatggtgtttcaaagtttaatgtatcaactggagaacagtctaaatctaagtcaagtgtgccgtcatatacaaaagtttttgc

SEQ ID NO: 232895 - DNA, 571 bp, Unknown
  Bacterial polypeptide expressing nucleotide sequence isolated from the Sargasso Sea
attgaggacaacaaagttacaaaagaagatttttagttttatgagttataaacttttagataaaattaattttccttctgatttaagaaaattatcattaatcgaattagaaaatttatcaaatgagcttagaaataaaactattgaaactgtttcaaaaactggaggacatttaggtgcaggcttaggagttgtggagctaacaatagctttacactttgtttttaatactccaagagatagattgatttgggatgtcggtcatcaatcatatcctcacaaaattctaactggcagaaagaataaaattgaaaccttaagacaaaaaaatggtttgtatggatttgtaaaaagaagtgaaagtgagtatgatccttttggtacagcgcatagttctacatctatttcagcaggcatgggcatgaaagttgccaaggacctaaataatgatgatgctaaaattatatctgttattggcgatggcgctctaagtgcaggaatggcatatgaagcattgaacaatataggagctagtaacaaacaaatgatagtaattttaaatgataaatga

SEQ ID NO: 232896 - DNA, 958 bp, Unknown
  Bacterial polypeptide expressing nucleotide sequence isolated from the Sargasso Sea
ttacacaaaagtatttgctaatactcttgtaaagcatgcaaaaaaagatagtaaaatagttggaataacagctgccatgcctggtggaacaggaatggatatatttggcaaagagtttccaaaaagaatgtttgatgttggtatagctgagcagcatgccgtaacatttgctgctggtatggcaacagagggatacaaaccttatgctgcaatttactcaacgtttttacaaagagcttatgatcaagttgttcatgatgtagctatacaaagcttaccagtaagatttgcaattgacagagctggattagttggggctgacggatcaacacacgccggttcatttgacattacatatttatcaactttaccaaattttattgtaatggctgcaagtgatgaagctgaactggttaaaatgataaatacttcagtagatattgatgacagaccaagtgcaatcagatatccaagaggagtaggtgttggagttgaacttccatcaatagaagaaaaaattgaaattggaaaaggaagaataattcaaaatggaagtcaagtatgccttttaagcttaggaacaagacttgaagaatgcaaactagcagcggaacatttaaaacaaaaaggagtttcaactactattgttgatgcaagatttgctaaacctttagacgaagaattaattattaaatgtgctagagagcatgaaattttaatctctattgaagagggttcaattggaggattcggttcgcatgtaaaaaacttacttgctgagaaagggatatttgacaaaggtttaaagtttagatcaatgaatttaccagacaagtttattgaacaagatacccccaacaaaatgtatgaaattgctggattaaatgcttctcaaatttccaagaaaattttagatattttatttaacaaaaattctatcaaagttgtaaaaaattaa

SEQ ID NO: 232897 - DNA, 1348 bp, Unknown
  Bacterial polypeptide expressing nucleotide sequence isolated from the Sargasso Sea
aaaccaaatatgctaattgttctaaatgataatgatatgtccatttcagaaaatgttggtggcttaaataactatttctcacgtatttgggcatctaaagtttacaaaggaattagaaaaagcggaaaaggttttttagagaatttgccacaagctcatcacattgcaagaaaagttgaaacacaaatgaaagccatggttgcgcccggaagtatttttgaggaattaggtttaaattatattggtccaatcgatggacatgatattggtgaattaaataaagtaattggaaacttaaaggattttgaaggtccccaatttttacatgtaattacaaaaaagggagctggcttagatcctgctgaagcagatcgcataggctttcacgcaattgggaaaattaaacctttagattcaatcaatcaaaagagtaaaccaaaatttcaagatgtttttggtcaatggattgttgatatgggaaagaaagatgaagatttaatagctattacaccggcgatgagagaaggttcaggcttggtaaaatttagtaaagaatttcctgaaagattttatgacgtagcaattgccgaacagcatgcagttactcttgccgctggaatggcatgtgaaaaaaagaaaccagttgttgcaatatattctacttttttgcaacgcgcttatgatcaactcattcatgatgtagcgttgcaaaatttaaatgttctctttgcaatcgatcgagctggcttggttggcgaggatggtccaactcattctggaaactatgatcttacttatcttaggtgcataccaaatatgattattgcagttccagctgatgaaaatgaagcaagaatgttattgaccactacttttaatcataatggtccagctgctgttcgttatccaagaggtggcggaattaatgccgacattgaccttgagctgaaatctttagaggttggcaaaggaagagtaattaattcaatggactcagaccttctagtgctaaattttggaacgttaattgcaactgcacaagaggttgcaaaagaattaaatgctactttattagatatgagatttgtaaaaccattagataaaaaattaatagctgaatactcaaaaggtaaaaaggttattattacaattgaagatggcgccatgtctggaggtgcaggctcggcagtgaatgaatgggctcaagagaataaaataagtgcgcaaattgtaatttgcggcatcccagacgaatttatagatcattcaagcagggaagaaatgattgaggcggttggcctagataaaaatggtattctagccaaagtaaaagattttttaccttaga

SEQ ID NO: 232898 - DNA, 1879 bp, Unknown
  Bacterial polypeptide expressing nucleotide sequence isolated from the Sargasso Sea
aatgaaaatatttaaagaaatccctaaggaagctccttctactgagctacttgataaaattaattatccagaagatcttaaagaactttcgcctcatgatctaaaaactttagctgatgagttaagagagtttttgctctactcggttggaaaaagtggtgggcatcttggagcaggtcttggcgttgttgagttaacagttgttttacattatctttatgatgctccatcagataatattgtttgggacgttggtcaccaagcttatcctcataagatattaactggtaggaaaaatcaaattaattcaataagatcaaaagatggcttagctccctttccatcgagaaatgaaagcaattttgatgcttttggggctgggcattcgagcacgtctataagctcagcaatcggtatggctattgctaataaattaaatgaaggagaaaaaaaaacagttgctgttattggagacggtgcaatgactgctggaatggctttcgaggcaatgcaacatgctggtggagtaaagccagatatgctaataattctaaacgataatgacatgtcaatctctgaaaatgttggagggctgaataattacttctctagaatatgggcatccaaactttataagggaattaaaagcaacggtaaaaagtttttaaaaaatatccctgctgcacatcatttagctcgcactgttgagactcatatgaaaacaatggtagcaccaggtgctatttttgaggagcttggactaaattatattgggccaattgatggtcataatattgatcaacttttgaatgtaattgggaatctaaagaattttgagggaccacagttccttcatataattacaaaaaaaggtgctggatatgatttagctgaagaggataggattaaatatcatgcaatatctaaaagcaatatctcaaaaagtataggaaaaacaaaaccaaaatatcaagatatattcagtgactggatactagacatggctaaagaaaacgatgatcttgttgcaataactccagctatgagggagggatcaggattagttgaatttagtagaggatttcccgaaagatacttcgatgttgcaatagcagaacagcatgctgttactttgtctgctggattggcatgtgagagaaaaaagccagttgtagcaatttattctaccttccttcagagagcctatgatcaactcattcatgatgtagcacttcaaaacttagatgtaacttttgcaattgatagagctggattagttggtgaggatgggcctactcactcaggaaactatgatctagtttacctgaggtgtatacctaatatgatcgtgatgaccccatctgatgaaaatgaaaccagaaaacttttaacaactggtttttttcataatggccctgcctcaataagatatccaagaggatctggccctaatgttgatgttgaaaatgatcttacaccagttgaaattggcaaaggaagattgattaaagaaagatcaaaagatttaattgtcatcaattttggagctttgattgatcaagcaaaagaagttgcaaatactttaggtcttactctaattgatatgcgttttgttaaacctcttgatgaagatattctcaagaaatatctgtctaaggcacaagcatttgtttcaattgaagatggatcggttgctggcggtgctggaagtgctgttcaagaattttgttcagataataatataaacattaaatctaagctttttggaatacctgatgtgtttattgaacatcaatccagagaggaaatgattgaagaatctggcttaaaagcttctaaaataataaaagagatagaggaattaagattagtaaagtaa

SEQ ID NO: 232899 - DNA, 1073 bp, Unknown
  Bacterial polypeptide expressing nucleotide sequence isolated from the Sargasso Sea
ccgtaggtgcaatgagttcttatctttcaaacttctttcttccagatcttattctaatgtaagatcattaatcaaaaaactatcaagtagacttcctgagtcatttcaaaaaactttacatagagcagaagaattttccaaaggatttgtttctggaggaacattatttgaagaattagggtttttttatttaggtccaatagatggacataattttaatcatttaattcccataatgaccaatataaaaaataataaaattcataaacctatttttttgcatgtaatcacaaaaaaaggcaaaggttataagcctgctgaagactctagtgataaatttcacggagtaaataaatttaatattaaaactggtcattctttatctagtagtaataaacaaacattttctgaaatatttggtaaaactcttgaaaatgaggcactacaagatgaaaaaattgtcggtattactgctgccatggcaagcggtacaggactaaattcatttagtaaaaaatttcctcaaagattttttgacgttggtattgcagaacaacacgcagttactatggcggctggactagcaactgaaggctttaaaccttttgttgcaatatattcaacatttcttcaacgtgcatatgatcaaatagtgcatgatgtagcaattcaaaaactaccagttagatttgccattgatagagctggtcaagttggtgctgatggaccaacgcatgctggttcttatgatatttcttttttaaattcattgccaaattttattatcatggcagcatcagatgaaaatgaattgataagaatgataaaaacttcattactaattaatgatagaccttcttcttttagatttccaagaggttctgggtcagggattactgaagaacttaatttaaaccctctagaaattggcaaaggcaagataatcaaagagggcaataaaatagcaataataaattttggagctagactagaagcttgtaaagaagcaatagatattttaaaaatcaacaacgtatttcctactttagtagatgctagatttgtgaagccat

SEQ ID NO: 232900 - DNA, 1915 bp, Unknown
  Bacterial polypeptide expressing nucleotide sequence isolated from the Sargasso Sea
aatgaataaaaaatttaaatatttagataatgttaattttccatctgatattaaaaatctttcattatcagaattaaaagaattagcagctgaagttagacaagagatgattgatgctgtatcggagacaggaggtcatctaggtgccggtttaggagttgtagaacttactgttgctttacactatgtatttaacacgccaaatgataaattaatttgggacgttggtcatcaaacttatccacataaaatattaaccggaagaaaagacaaaataagaagtttaagaaaaggaggtggattatcaggatttactaaaagatctgaaagtgaatatgatcctttcggagcagcgcatagctcaacttcaatatcgtctgctttaggaatagctactgcaaataaactatcaaataaatcagatgatgtaattgcagtaataggtgatggagcaatgagcgcaggaatggcatatgaggctatgaataatgcgggcgcaagcaaaactaaaatgattgtaatacttaatgacaatgacatgtctattgcaaaaccagttggtgcaatgagagcatatttagcaaagattttatctggaaaattatattttagttttagggaaacagtaaaattaataatatcagctttttcaaaaagatttagtaagaaggctggtaaagctgaggattttttaagaagtgctgttaccggtggtactttatttagttcaatgggtttttactatatgggcccgattgacgggcatgatatagatgacctagcttctgtactaaaaaatgctagggacattaactatgatggccctattatgattcatataaaaacaaaaaaaggtaaaggttatgaatttgcagaaaaatcagaagataagtttcatggagtaacaaaatttaatgtaaacactggagttcaagaaaaaaaaaaatcgaatgtacctgcttatactaaaatttttgcaaatactttattaaaacatgctgaaaaagacagtaaaattattgggataaccgctgcaatgccttcaggaactggaatggatatttttggaaaaaaatttccatcaagaatgtttgatgtaggtatagccgaacaacatgctgtaacttttgctgctggtttggcaacagaaggctataaaccctatgcagcaatatattctacttttttacaaagagcttatgatcaagtagtacatgatgtggccattcaaagtttacctgtaagatttgctattgatagagccggactagttggtgctgacggaccaacgcacgctggttcttttgatataacttatctatcaactctgcctaattttgttgttatggcagctagcgatgaggctgaacttgtgagaatgataaatacttcagtagatattaatgataaaccttccgcttttagatatcccagaggaaatggtataggagtagaattgccaaatataagtgaaaaattagaaataggaaaaggaagaattattagagaagggaaaaaagttgcgattttaaactttggcggaagattaaatgaatgtttgattgcatgtgaaaatttgaaaaaaaaaggaattaacttaactttatttgatgcacgatttgctaaacccttagatcaaaataccatttggcaattagcaagagatcatgaaacaattatttcaatagaagaaggttcaataggaggttttggatcacatgtttcacagtatttatttgataataatttaatcgataacaatttaaaatttagatcaatgatattacccgatagatttatagatcatgataaaccagaacaaatgtacaaatatgccggtttggatgctagcagtattgaaacaaaaattcttgacactttaaattctaaagttgttattaaaaaatcaaactaa

SEQ ID NO: 232901 - DNA, 1238 bp, Unknown
  Bacterial polypeptide expressing nucleotide sequence isolated from the Sargasso Sea
ttaggaattgctgaggcaaataaattagaaaataagtcttccaatgtaatagctgtcataggtgatggagcaattagtgcaggtatggcttatgaagcgatgaataatgctggagcatctaaaacaaaaataattgttattttaaacgataacgacatgtcaatagcaaaaccagtaggagcaatgagaacttacttagcaaaattatttactggtaaaatatattttagtcttagagaaacctttaagttaattacatctgcattttcaaaaagattcagtgctaaagcaggaaaagcagaggattttttccgctcagcagttactggaggtacgttgtttagttcacttggtttttattatgcaggtcctatagatggtcatgatttatcaagcctagttccaattttaaaaaacgcaaaagaatcaagacatgagggtcctataatgattcatatcaaaactcaaaaaggaaaaggttattcttatgcagaaaaagcaaatgaccattatcatggagtttcaaaatttaatgttgagactggcgaacaagtaaagatcaaatcaaaccttccagcttatacaaaagtatttgcaaacacgttagttaaacatgccaaaaaagatagcaaaataataggaataacagcagcgatgccaggagggactggtatggatatttttggaaaggagtttccaaatagaatgtttgatgtaggaatagcagaacaacatgctgtaacttttgcagccggtctagcaaccgaggggtacaaaccatatgctgcaatttattctacatttttacagagagcatatgatcaagttgtacacgatgttgccattcaaagtttaccagtaagatttgcaatagatagagcaggattagttggtgctgatggctcaacacatgctggttcatttgatataacttacttatcaactttgcctaactttgtagtaatggcagcaagtgatgaagctgaactagttaaaatgattaatacttcagtagatataaatgatagaccttctgcaattagatatccaagaggaactggagtaggtgttgatctcccatcaatagacgaaaaaattgaaattggtaaagggagagttgttcaacaagggacacaagtttgtattttaaaccttggtactcgacttgaagagtgcaagttagctgcagaggaattaaaagcaaaaggagtttcaacaactttaatagacgccagatt

SEQ ID NO: 232902 - DNA, 1390 bp, Unknown
  Bacterial polypeptide expressing nucleotide sequence isolated from the Sargasso Sea
aaatgataatgatatgtctatatcaaaacccgtcggtgcactgagaagttatcttgcaaaaatattgtctggaaaaatttattttagttttagagaaactgtaaagttaataatttctgctttttcaaaaagatttagcaaaaaagcgggagcagctgaagattttttgagatctgcagtaactggaggtaccctatttagttcattaggtttttactatgttggaccaattgatggacacaatatagatgatttaatttcggtttttaaaaatgctcaaaatttaaattttgaaggcccaatattaattcatttaaaaactgaaaaaggaaaagggtatgagtttgctgaaaaatcagcagataaatttcatggcgtttcaaaatttaatgttaagactggagaacaagaaaaaacaaaatcaaatgttccagcttataccaaagtatttgcaaatactcttgttaaacatggagaaaaagatagcaaaattattggaataactgctgcaatgccaacagggacaggaatggatgtttttggaaaaaaatttcctaacagaatgtttgatgttggaattgctgagcaacatgctgttacttttgcagcaggtttagcaactgaaggatataaaccttacgcagcaatttattcaacatttttacagagggcttatgatcaagtagttcatgatgtggctatacaaagtttgccggttaggtttgcaattgatagagctggtttggtaggagcagatgggcctacccatgcaggatcttttgatataacttatctaagtgcattgcctaactttgttgtcatggccgcaagcgatgaatcggaattagttaaaatgattaatacttcagttgaaattaatgacaagccatctgcatttagatatcctagaggaagtggaattggagtagagctaccatcaattgaagaaaaattagaaataggaaaagggagagtgattaaagaaggcaataaagttgcattaattaattttggagcaagacttaaagagtgtttaattgccgaagaaaatttagttaaaaaaggtataaaaataacattaattgatgcaaggtttgcaaaaccgctagatgaaaatcttatttggcaattagcaacagatcatgaagtacttttgacaattgaagaaggttcaataggtggttttggctcacatgtaagccaatttttaacagaaaaaaatcttttagataataatttaaaatttagatcaatgattttgcctgatagatttattgatcatgataaacctgagctaatgtataaatatgcaggtctagattcacaagcaattgaatcaaaaatacttgatactttaaattctaaaattgtagtaaaaaaaataaattaa

SEQ ID NO: 232903 - DNA, 1879 bp, Unknown
  Bacterial polypeptide expressing nucleotide sequence isolated from the Sargasso Sea
atgaaaatatttagtgagatccctaatgaagttccttcaacaaagctacttgatagaattaattatcctgaggaccttaaagagctttcgcctcctgatctaaagattttagctgatgagttaagagaatttttgctctactcagttggtaaaagtggtgggcatcttggagcaggtcttggtgttgttgagttaacaattgttttacattacctttatgattctccatcggacaatattgtctgggatgttggtcaccaagcatatccccataagatattgactggtcgtaaggatcaaatcagctcaataagatcaaaagatggcctagctccctttccatcaagaaatgaaagtgattttgatgcttttggtgcgggtcattcaagtacttctataagctcagcagttggtatggctattgctaacaaattaaatgagggagagaaaaaaacagtagctgttattggagacggtgcaatgactgccggaatggctttcgaagcattgcaacatgctggtggcataaagccagatatgctaataattcttaatgataatgacatgtcaatctctgagaatgttggaggtctaaataattacttctcaagaatatgggcttctaaactttataaagggattaaaagtaatggtaaaaagtttttaaagaatatccctgctgctcatcatctagcccgcactgttgagactcatatgaaaacaatggtagctccaggagctatttttgaggagcttgggctcaattatattgggccaattgatggtcatgatatagatcaacttttgaatgtaattggaaatctaaagaattttgagggtccacagttccttcacataattacaaaaaaaggtgctggatatgatttagctgaaggagacagaattaaatatcatgcaatatctaaaactaatacctcaaaaaatataggaaaaacaaaaccaaaatatcaagatatatttagcaactggatagtagacatggctagagaagatagtgatcttgttgcaataacaccagctatgagggaaggatcaggattagttgaatttagtaaagagtttccagagagatattttgatgttgcaatagctgaacagcatgctgttactttatctgctggattagcctgtgaaaaaaagaagcctgtggtagcaatctattctacattccttcaaagagcctatgatcaactgattcatgatgtagcacttcaaaacttagatgttacttttgctattgatagagctggactagttggtgaggatgggcctactcattcaggaaactatgatctagtttacttaaggtgcatacctaatatgatcgtgatgactccctcagatgaaaatgaaactagaaagcttttaacaactggtttttttcataatggccctgcatcaataagatatccaagaggatctggtcctaatgttgttgttgagaatgatctttcaccagttgagataggtaaaggaagattgattaaagagggatcaaagaatttaattgttataaattttggagctttactcgatcaagcaaaagaagttgcagatactttaggtcttactctaatagatatgcgttttgtgaaaccccttgatgaagatattcttagaaaatatctatctgaggcacaagcatttgtttcaattgaggatgggtcagttgctggtggcgccggaagtgctgttcaagaattttgctcagaaaataatataaatgttaagtctaaactttttggcatacctgatatattcattgaacatcaatcgagagaggaaatgattgaagaatctggcttaaaagcttctaaaataataaaagagatagagggattagaattagaagagtaat

SEQ ID NO: 232904 - DNA, 337 bp, Unknown
  Bacterial polypeptide expressing nucleotide sequence isolated from the Sargasso Sea
tatggaatatgatcttttagataaaattaattttccatcagatttaagagaatttaaaaagaaagatctaaagcaaatctcagaggaattaagagctaaaacaattgagactgtttcaaaaacaggcggtcatctcggtgcaggacttggtgttgttgagttaactgttgcaattcattatgtgtttaatacgcctcatgataaattaatttgggatgttggacaccaagcgtatcctcacaaaattataacaggtaggaaaaaaaatatcgagacactgagaaaaaaagatggtgtgtatggttttgttagaagatcagaaagtgaatatgaccca

SEQ ID NO: 232905 - DNA, 709 bp, Unknown
  Bacterial polypeptide expressing nucleotide sequence isolated from the Sargasso Sea
ttacagagagcgtttgatcaattagtacatgatgtaaatctacaaaatttaaacgtaatgtttgcaatagatagagctggtctagttggtgctgatggagaaactcatcatggaatttatgatatttcattcatgcgtatactgcctagaattattatcatgacaccctcaaatgagagagagttactattaatgttgaatacaggactatattataaaggcccaacagctataagatatcccagaggtaacactgcatgcagtgatatagccatgactgaagaaaaaataccagtgggaaaatcgaggctgatccaaaatggtcaaaaagttgctattcttgtatttggtcaattgttgagtgaagtaattgatatctctaagaagctttctctgacactcatagacatgagatttgctaagccagttgatacggaaagaatagacgaactatcaaatactcatcaacatttaataaccattgaagatcatgttgtcacaggaggagcaggatcagctgtaaatgaatatcttgtcgagaaagggtatgaaattacaattacaaactttggaataccagatcaaatcatatcacatggtagtcagagcgaattatatgctgagatcggcttagataataaatcattagaatacaaaattaatgagatatacaatcacgtttcaagtaataaaaaaatagcggagtaat

SEQ ID NO: 232906 - DNA, 1627 bp, Unknown
  Bacterial polypeptide expressing nucleotide sequence isolated from the Sargasso Sea
aatggaaaaaaaactattagataaaataaactatccagctgatttaagattgcttaaaaaaaagcaacttaaacaattcacagaagaattaagatctgaagttatagatgttgtttcagaaacaggaggacatttaggagcgggtcttggggtaatagaattaactgtagctttacattatgtttttaatacacccaaggataaattagtttgggatgttggtcatcagtgctatcctcataaaataattacaggcaggaaagataaaatcagaaccctaagaaaaggaggaggattgtctggttttacgaagagatctgagagtgaatacgatccttttggagcagcacatagttcaacatcgatatcatcaactcttggtatggcaacagctaaaaaactttctaatgatacaaacaatgtcgtcgctgtcattggtgatggagcaatgagtgcaggaatggcttatgaagcaatgaataatgctggtgccatgaaatcaaaattaatcgtagtacttaatgacaacgatatgtcaatagcaccgccagtcggagcaatgagcaaatatcttgcaagacttttatcaggcaaaatatatttcagcttccgggaaactataaaattaatactttcagccttttcaaaaagattttctaaacgtgcaggtaaagcagaagatttgattagaagcgcagtcactggcggcacattatttagtcaactgggattttattatgttggaccgatagacggacacgatgtaagtaatttagttaagatttttgaaaatgttaaaaattcaaatcaccaaggcccaatactaatccatgcgatcactaaaaaaggaaaaggatataaaccagccgaggagtccggagacaagtatcacggggtatctaaatttgatgtttcaacaggcaaacaagataaaagcaaatctgcaggaccatcctacacaaaagtttttgccaacaccctcgttaagcatgcacaaaatgatacaaaaattgttgcaattactggtgcaatgccatctggaactgggttagatatttttcaaaaaaagtttccagacagaatgtttgatgtaggaattgccgaacaacatggagttacatttgctgccggattagcaactgaaggatataagccatttgcagcaatttactcaacttttttgcaaagagcttacgatcaagtagttcatgatgttgcaatacaatctttgccagttaggtttgcaatcgatagagcaggtttagttggagcagacggagcaactcatgccggatcatttgatattacctatctttctactcttccaaattttgttgtcatggcagcaagtgatgaagctgaattagtaagaatgattaatacatcagtaaatattaatgatagaccgtcagcctttagatatcccagaggtaatggattaggtattgaattaccagatattaaggaaattcttgaaattggtaagggtaaaattatttctaacggtaaacatttggcaattttaaactttggagcaaggttgaatgagtgtaaaaaagctgcagagatacttaagaaaaaaggaatttcaattacaatttttgatgcaagattcgccaaaccttta

SEQ ID NO: 232907 - DNA, 784 bp, Unknown
  Bacterial polypeptide expressing nucleotide sequence isolated from the Sargasso Sea
atgtcaaattacgaatttttaaataatataaattttccatctgatataaaaaaattatctaattctgatcttaaaattctttccaaagaaattagagcgaaaatgattgaagcggtatctaaaactggaggacacttaggtgccggtctaggagttgttgagttgactgttgctctccactatatatttgatacaccaaaagataaaatagtttgggatgttggtcatcaatcgtatccacataaaattttaacaggaagaaaagataaaatcgaaactttaagaacggggggtggactatctggtttcacaaaaagagatgaaagtgaatatgatccatttggtgctgcccatagctcaacttcaatttctgcagcacttggaattgcaactgctaacaaactttcaaataaatctgaagatgtagtagctgtaattggagatggagcattaagtgcagggatggcttatgaagcaatgaataatgctggatcctccaagactaaaatgattgttattttaaatgacaatgatatgtcaattgctaaaccagttggtgctttgagaacttatttagctaaaattctatctggtaaaatttattttagtttaagagaaacaatcaaattattaatttcatctttttcaaaaagatttatgaaaaaagctggtaaagccgaagacttttttagatctgctgttacgggaggtacgctatttaattcacttggattttattatgttggaccaattgatggacatgatattgatgttttgacctctg

SEQ ID NO: 232908 - DNA, 1882 bp, Unknown
  Bacterial polypeptide expressing nucleotide sequence isolated from the Sargasso Sea
atgaaatttaaagttcttgataaaattgagtatccgtctgatataaagaaattagatgatcgtgagctcattgctttgtcaaaagaactcagagattttctaattgatactgtctctaaaactggtgggcacttagctgctggactcggcacaattgaactcacaatagcgcttcacaaagttttcgatacgccaaaagataaattaatttgggatataggtcatcagtgctaccctcataagattttaactggtcgtaaggatgagatgaaaacacttaggatgaaagatggtatctctggttttttaaaaagacaagaaagcgaatatgatgcttttggagctggacattcgagcacctccataagcgcagcagttggaattgatcaggcaaatataattaataaagatgatgcggatgttgttgctataattggcgatggaggacttacagctgggatggcatatgaggccttgtgtcatgctggtgacttgaagtccaatattttagtaatactaaatgataacgatatgtctatctcgccgaacgttggcgcaatacataattacctgacaaaaatgcttactagcaagacacttaaaaatattaaagatggtagtaaaaaagttctatctaaaattaaaccaattgaaaacctagctagaagagttgagggtggagccaaaaatctcataactccaggtttgctttttgaagaacttggtttcaaatactatggaccagttgatggacatgatttattagatacgattaaactacttaaaaatttgagagcaagaaaaggacctagattattacatatacttactaaaaaaggaaagggttataaattagcagagcagaatcctataacttatcatggagtaacaccatttaatcttaagactggaaaatctgtcaaaaaaaatacagggattaaaaagcctacatacacaaatattttcagtgattggctaaattggactgcggaaaataattcaaagcttgttgccataactccagccatgagagaggggtctggtttggttgaatttgaaaaaaaatttccagagagatattttgatgttggaattgcggaacagcacgctattacttttgcagcaggtcttgcatgtgaaaatattaagcctgttgttgcaatttattcgacttttttacagagagctctcgaccaagttattcatgacgtagctgtacaagaacttgatgttttattagcaattgatcgcgcagggattgtaggtgctgatggtgaaacacatcaaggtatttatgatatatcatatctaaggatgttaccgaatgtggttataatgactccatcgaatgagaaagatatgacaagaatgctgtcaacaggattagaatataaaggattggcagctgtcagatatcctagaggtgagtctaggggtttatcagtggaacttagtgagatagagccaatagatattggaagaagtaagacggtcagacatggaaaagacatcgcatttcttgtttttggcacactattacatactgttattgatgtagcagagacgattaatgctactgtagtagatatgcgttttgcgaaacccatcgatgaagagaaaatctctcttatgtgtaaaaatcatcaactaattgttacagttgaagataatgtcgtcagtggcggtgctggttctagtgtaaatgaatttattttaagtcagaaattaaaaaacaatataaaaaatattggaattccagacaaattaataggacatggaaaccaagatgagattctagctgacattaatttagattataatgggatactagaatcagtcaaagatcatattgatatgatagatcttaaagaaaaggcatagg

SEQ ID NO: 232909 - DNA, 1161 bp, Unknown
  Bacterial polypeptide expressing nucleotide sequence isolated from the Sargasso Sea
tctgaaccgcgcaaggctcagtccgccgatgcagttcctctccggcagcgttgaggaaagcgttcgccatcttcccttcatgggtggcgagctcccagccgagttgaaccgcctgaagggaagtatgcgtcgtctcgcggttcccaaggtgggtgctgtgtttgaagagctgggcttcacctacatggggccgattgatggccatgacatcggtgaaatgatgcggaccttccaggctgcccaccgtgatggtgggcccgtgctggttcatgtcgttaccaagaagggcaagggttacccctatgccgaggcggatcaggtcggttaccacgcccagtccgccttcgatctgaccaccggcaaggccattccgtcgaagaaaccgaaacctgccagttacagcaaggtgttcggccagaccctggtcaagctctgcgaacagaacagtcgcgtggtgggcatcaccgctgccatggccactggaaccggtctggatctgctgcagaaagctgttcccaatcagtatgtggatgtcggcatcgccgaacaacacgctgtcaccttggcggcgggcatggcctgtgaaggtcttcggcctgtcgtggccatctacagcacattcctgcagcgggcctacgaccaactcatccacgacgtcggcatccagaatctgccggtgacctttgttctcgatcgggctggcatcgtcggtgccgacggaccgacgcatcagggtcagtacgacatcagctacatgcgatccatccccaacttcacggtgatggcgcctaaggatgaggcggaactccagcggatgctggtgacctgtctgaaccacgacggacccacagctctgcgcattccccgtggatcgggcgttggcatgcctttgatggaggagggctgggaagcactcccgatcggtcgcggtgagctgttgcgggaaggggatgatctgctgatcgtggcctatggctcgatggtgcacccggctctggacaccgccaccctgcttgaggaagctggcctttccaccacggtgatcaacggccgtttcctgcggcccctggatcaagccttgattcatccgttggcacggcgcatccgtcgcgtggtcaccatggaaagagggcgctctggccgggtggatttggtgcagca

SEQ ID NO: 232910 - DNA, 1267 bp, Unknown
  Bacterial polypeptide expressing nucleotide sequence isolated from the Sargasso Sea
ttttcaaaagattagtgcaaaagcgggtaaagctgaagatttattaagatcagctgttactggtggaactttatttagttcattaggtttctattatattggtcctatagatggccatgacctttcctcattgattccaattttaagaaatgcaagagactcaaaacaccaaggtcctatattaattcatataaaaacaaaaaaaggaaaaggctattcttttgctgaagaggcaaaagatcattatcatggggtatccaaatttaatgtaaagactggagaacaggaaaaaagttccaataaagtaccatcatacactaaagtttttgctgatactctgatacaacacgcaaaaaaagatagtaaaataattgcaataacagctgcaatgccagatggaactggattaagcaattttagaaaagaatttccagatagaacttatgatgttggtattgctgaacaacatgctgttacgtttgcagctggtttagcgactgaaaattacaaaccttatgcagcaatttactcaacatttcttcagagagcatatgatcaagtcgttcatgatgttgcaattcagagtttacctgtaagatttgcaatagatagagcaggattagttggagctgatggacctacacacgctggtagttttgacacgacttatttagcaacactaccaaattttattgtaatggctgcaagtgatgaggccgagttggtaagaatgattaatacttctacagaaattaatgatagaccctgtgcattcagatatccaagagggagtggtattggatcaatattgccatcaattaatgaaaagatagagattggtaaatcaagaattattcaagatggaaaaaagttagctttaattaactttggcgcaagattaagtgaaagtttaaaggcatcagaaaatttaaaaaaaaaaggtgttaatattacaataatggatgcaagatttgctaagccattagatgaaaatttgatatggcaattagcaacaacacatgaagcaattgttacaattgaggagggatcgattggtggattcggttctcatgtaattgattttttatcaaaaaaaggattaatggactcaaatttaaaatttagatcaatgaaacttccagatatttttattaatcaagacaaacctgaaaacatgtataaactcgcaaatttagacagcatttctattgaagaacaaattttagatgtactaaattcaaatattatcttacaaaaacaaaaataa

SEQ ID NO: 232911 - DNA, 1002 bp, Unknown
  Bacterial polypeptide expressing nucleotide sequence isolated from the Sargasso Sea
aaaaatcttcaggtcaggcaatcagttattcccaggtatttggtaacaaacttgaagaattaatggaacgtgacgaaagtgtggtggtgttaacagcagccatgctgagcggtacaggaattgtaaatttgcagccaaaatttcctgatcgtgttttggatgttggcattgcagaaggacacgcagtaacttgttctgcaggacttgctacaacaggcaataaaccttttgttgcgatttattcaacttttttacagcgtgctttagatcatataattcacgatattgcagttcagcagcttcctgtaagatttatgctggatcgtgcaggattcgtgggggcagatggtcctacacatcacggtatgtttgaccttacttaccttcgaatgataccaaatatgacaattatggttccgcgtaatggttctgaattatgctgcatgattgaatttgcctatgactacgaaactggaccgctggctattcgatatccaagaggtaatactgcagaagtgaatgaaaataaaattccacctcttgaatttggaaaagcgcaaattttgagaaaaggacaaaatgttgtactgattgcggtaggtactatggttgaaaaagcagaacagattgctgatcttcttgaaaagcagggggtttatgcttcagttattaatgcccgttttgtaaagcctctggatgaggacttgatagttaatttaggaagagatgctaaattgcttgtaagtcttgaagaaaacacaattcacggtggatttggcagtggtgtgctggaaattttaagtaagaataaaatatgtattcccacgctgcagattggagcaccggatcgcttcattcctcaaggttctcctgaagaacaacttaatgaagcagaattgaacgtggaacaaatttatggtcgtgtgcttgaaaaacttccggaggttgtaaaaaaaataagaaataaaagaacaatggagcgcaagaaacgcgcttcatgat

SEQ ID NO: 232912 - DNA, 904 bp, Unknown
  Bacterial polypeptide expressing nucleotide sequence isolated from the Sargasso Sea
catgagtttagatctccaacattacccaacgcttgcgcttgcgcaaacacccgataaattgaggcagttgccccaagacaaattacgcgagctcgccgatgagttgcgtgagtacttacttaacagcgtaagccaaaccagtgggcactttgcatctggtttaggcacagtggaactgaccgtcgctttgcactatgtgtacgacacccccttcgatcgactgctgtgggatgtaggtcaccaagcttatccgcacaaaatccttacaggccgtgcagagcgcatgagtaccattcgccaaaagaatggtctgcaccctttcccatggccgcctgagagcgactacgacacctttgcagtcggtcattcgtctacatcgattagtgcagggctgggcatggctgtggctgccgaaaaagaaggcaaaaacagaaaggttgtagcggtaattggcgacggtgcaatgaccgctggtatggcgtttgaagcccttaatcacgctggtgatatcaagaaagacatggtagttgtacttaacgacaacgaaatgtctatttctgaaaacgtaggggcgttgaacagtcacttagctcgcttgcttacaggcaactttttcaactctatacgcgatggcggcaaaaagctgctaagcaatgtgcctcctattaaggagtttgccagccgtgcagaagaacacattaaaggcatggttgtcccgggcacgatatttgaagagcttggctttaactacattggccctatcgatggccacgacgtaaatggtgttgtcgatacgctacgcaatatgcgcaagtttgacggcccgcagttacttcacgtagtcaccaagaaaggtaaaggttacgcggttgctgaagaagaccctatcaagttccacgcggta

SEQ ID NO: 232913 - DNA, 982 bp, Unknown
  Bacterial polypeptide expressing nucleotide sequence isolated from the Sargasso Sea
aatgaataaaaattataaaattttaaatagcatcaattttcccagtgatattaaaaaattatctcatagtgaattaaaagtactcgcaaatgaagtgcgagaagaaatgatagatgcagtctcagaaactggtggccacttaggagcgggcctaggtgttgtagagctaacagtagttcttcattatatttttaatacacccaatgataaattaatatgggatgtgggtcatcaatcatatccacacaaaatcttaacaggtagaaaagataaaataagaacattgagaaaagggagtggactttctggttttactaagaggttggaaagtgaatatgatccttttggagctgcgcatagttcaacttctatatcttcagcaataggtatagctgttgcaaataaattatctaacaaatcagatgatgttgttgctgttataggtgatggagcaattagtgcaggaatggcatatgaggcgatgaataatgctggatctagcaaaacaaagcttattgtaattttgaatgataacgatatgtcaatcgccaaaccagttggagcaatgagagcttatttggcaaaaattttatctggtaaaatctattttagtttaagagaaacaattaaacttattatttcagctttttcaaaaagatttagtaaaaaagctggaaaagctgaggactttttgcgttcagcagtaactggtggaacattatttagttcaatgggattttattatgtgggcccaattgatgggcacgatattgatgcactaatttcagtattaaaaaatgcaaaagaaataaattatgaaggtcctataatgattcatattaaaactgaaaaaggaaagggttatagttttgcagaaaaatctgaagataaatatcacggtgtatcaaaatttaatgttaatactggggtccaagaaaaatctaaatcaaatataccttcatataccaaggtttttgcaaac

SEQ ID NO: 232914 - DNA, 955 bp, Unknown
  Bacterial polypeptide expressing nucleotide sequence isolated from the Sargasso Sea
atgagaaaaaattataaatatttagatgatataaattttccatctgacatcaaaaaactttctcagtcggaattaaaggtattggctaaagaagtcagagaagagctaatagatgcagtatctgaaaccggaggtcatcttggagcaggtctaggtgttgtagaattaactgttgctttacattacatattcaatactccaaatgataaattgatttgggatgttggacatcaatcttatccacataaaatactaactggtagaagagataaaattagaactttaagaaaaggtaatggattatctggctttacaaaaagaacagagagtgaatatgatccatttggtgccgcacatagttctacttctatatcatcagctttgggtattgcagttgcaaatgaactttctaataaatctacaaatgtcattgctgttattggtgatggtgcaataagtgccggaatgtcttatgaagcaatgaataatgcaggtgcaagcaaaactaaaatgattgtaattttaaatgataatgacatgtcaattgccaaacctgtaggtgcaatgagaacttatctagcaaaaattttgtctggaaatatttattttagttttagagaaaccgtgaagcttattatatcagctttttcaaaaagatttagcaagaaagctggaaaagcagaagagtttttgagatctgcagttactggaggaacattatttaatgcaatgggtttttattatattggaccaatagatgggcatgatgttgatgctctaatatctgttctaaaaactgcaaaggaaattaatattaaaggccctataatgatacacataaggacaaaaaagggtaaaggatatgagtttgctgaaaaatcagatgataagtaccatggagtttcaaaatttaatataagcacaggagttcaagaaaaaacgaaatcaaatatcc

SEQ ID NO: 232915 - DNA, 1870 bp, Unknown
  Bacterial polypeptide expressing nucleotide sequence isolated from the Sargasso Sea
atgagtttggacatttctcagtttccggtgttggcacaggccaacacacctaatgaactccgccagcttccacaggccctattaccccaattggccgatgagttgcgggagttccttcttaagtccgttggcatgtccagcggacattttgcctctgggcttggcacagtcgagctgactgttgccctgcattatgtctataacaccccgtttgaccgtttgatttgggatgttggtcaccaagcctatccccataaaatcctcactggtcgccgtgatagaatgcacaccattaggcaaaagaacggtttacaccccttcccttggcgggaagaaagtgaatatgacacctttagcgtaggccactcaggcacctccatcagtgccgcattagccatggccgttgcagccgaaaaagaacaggcaggccgtaaagtggttgccgtgattggcgatggtgccatgacaggcggcatggtgttcgaggcaatgaaccacgcgggtgatttgcacaatgatatgctgatggtgctaaacgataatgaaatgtcgatttcagaaaatgtcggcgcactcaacaatcacttagcccaattgatgtcaggccgcttctacaccacgattcgtgaaagcagcaagaaagtgctcaagggcatgcctgttatcaaagaaatggccaagcgcaccgaagaacacctcaaaggcatggtggttcctggcacactgtttgaagagttaggctttaactatatcggccctatcgatggccacgatgtcgatgccctagtggaaaccctgcgcaatatgcgcaatctcaaggggccacaagtgctacacattatgaccaaaaaaggtcgcggttatgagccagcagaaaaagatcctatcggttggcacgccgttcctaaatttgacccatcacagtttaagaagccagcgactaagccgggactaccaaccttctcccaagtgtttggcaaatggttatgtgatatcgctgagcaggatgaaaaagtcttaggcattacccctgccatgcgtgaagggtcgggtatggtggagttctcgcagcgcttcccaaaacaatattttgatgcagccattgccgagcaacatgcggtgaccttaggcgcagggtttgcctgtgagggctataaacctgtggtcgccatttattcgactttcttgcaacgcggctatgatcagctgatccacgacgtcgcattgcagcgtttacccgtactatttgcgattgaccgtggaggtattgtcggtgccgacggcccaacccatcaaggggcgttcgatttaagctttatgcgctgtatcccaaatatggtgattatggcgccatcggatgaaaatgaatgtcgccagatgctgtataccggatattgctatgatgcaggcccaagcgcggtacgctatccaagaggtagtgcaacaggtgcgactcaagttgaagccatgacggcgctgccaattggtaaaggggtgattaagcgtttaggcaaacgtatcgcgatgcttaacttcgggactaccttagccgcagcactcactgccgcagagactttagatgcgacagtggtcgatatgcgctttgtgaaaccgctggatgtggatttagtcaaagagatgacgcaaacccacgatgtgctcgtcacagtggaagaaaacgccattatgggcggcgctggctctggcgtattagagctgttacaacagcttaaaatgcctaaacctgtgctgcaaattggcttgcccgatgagtttattaaacatggctcgcctgaagaagtgatccatgacttacaactcgatgccgaaggcatgttagcgcaaattaatgcctatcttgccgattgat

SEQ ID NO: 232916 - DNA, 842 bp, Unknown
  Bacterial polypeptide expressing nucleotide sequence isolated from the Sargasso Sea
aatgaataaaaaattattagataatataaattttccctcagatttgaggttacttaaaaaaaaacaattaagacaggtatcagacgaacttagatcagagttgatcgatattgtatcagaaactggaggtcacttaggtgcaagtcttggtgttgtagaattaaccgtagctttacattatgtatttaataccccaaaggataaattggtttgggatgttggtcatcagtgttatccgcataaaattattactggaagaaaagataaaattagaactttaagaaaaggcggtggtttatctgggtttacaaaaagatctgaaagtgagtatgatccatttggtgcagcgcatagttccacatcaatttcatcaactctgggaatggcaactgctaaacgactatcaaatgataagaataatgtaattgcagtcataggagacggagctatgagcgctggaatggcttacgaagccatgaacaatgctggggcaatgaaatctaaattaattgttatacttaatgataatgacatgtccattgcacgacccgtcggagctatgagtaaatatttagcaaaacttttgtcaggtaaaatttattttagctttagagaaacaatcaaactaattctttcagccttttcaaaaagattttcgaagaccgcaggtaaagccgaagatatgtttagaagcattgtaactggaggcacactatttagtgaacttggcttttattatataggaccaatagatggtcatgatgtagacaatctagttaccatattagaaaaaatacgaaaatctaatcatgatggaccaattctaatccacaccataccaa

SEQ ID NO: 232917 - DNA, 412 bp, Unknown
  Bacterial polypeptide expressing nucleotide sequence isolated from the Sargasso Sea
atgaaaatattttctgaaataccaacaaagaaacctaagactccagttttagataaggtaaatattccagcagatattaaaaacttaacatctatcgaacttaaagcgttagcagatgatgtcagagcacacatgctttatagcgttggtcaaagcggaggtcatcttggtggtggattaggtgtggttgagctgacggttgttttgcattacctttataatgctccagatgacaaaatcatatgggacgttggtcatcaagcgtaccctcacaaaattttaaccggcagaaaaaaaagtttaaccacaatcagacagaaagatggattagctccattcccaaatagggaggagagtccttatgatgcttttggagttggtcattcaagcacatcaataagtgcagcgcttg

SEQ ID NO: 232918 - DNA, 1870 bp, Unknown
  Bacterial polypeptide expressing nucleotide sequence isolated from the Sargasso Sea
attgaagatttttaaggaaattcctactcaaaagccaattacccccatattggataatattaatttgccctcagatattagatctttttcgttgggtgaattagaaagtcttgcaaatgaaataagagaattcttgctgtattcagttgggcaaagtggcggacatctaggaggaggtcttggtgtaattgagcttacaattatattgcattatatctttaacaccccttttgataatttggtatgggatgttggtcatcaagcctatccgcacaaaatacttactggtagaaagaataagatgcaaactatcagaaaaaaaggtggtttagctccatttccatctagaaaagaaagtgaatttgacgcatttggtgttggtcactcaagtacatcgattagcgcaatgcttggaatggcaattggatcaaaagaatctaatccagaaaaaaaacatatagcagtaattggtgatggagcaatgacggctggcatggcgtttgaagctcttagtcataccggtcacttaaagccaaatgttttaattattttaaatgataatgatatgtcgatatcagaaaacgttggtgggttatctaattatttctcaagaatatgggcttcaaagacctataagggtattaaaaaaagcggtgctagttttttaaaacctttaccacaagcctatcatcttgcaagaaaagtagaaacacaaatgaaagcaatggttgcaccaggaacaatttttgaagaattgggtttgaactatatcggtccaattgatggtcataatcttaaagaattaaaagatgttatttctaatctcagggaatttgaaggcccacaatttttacatgtgattacaaaaaaaggagctggtttggatccagctgaggccgacagaattggattccatgctataggtaaaattcaatcaataaaaaataaaaaatctaagcaacaaaaatatcaagatgtttttggtgattggattgttgatatggctaatagcgatgagaacattattggaattactcctgctatgagagagggttctgggcttgttaaatttagtgaaaaatttcctgatagatattatgacgttgcaattgctgaacaacatgccgttacatttgctgctggtattgcaacagagaataaaaagcctgtggtggcaatttattcgacttttctacaaagagcttatgatcagcttattcatgatgttgcagttcaagatcttgatgtgacttttgctttagatagatcagggttagttggtgaagatgggcctactcattcaggtaattatgatatagcttttctaagatgcatcccaaatatggtgatatgcacaccatctgatgaaaatgaaacaagaaaacttttatcaactgcttatttttataatggacctgcaacagttagatatccaagaggaactggtccaaacaaaacaattgaaaaagaactaaagacatttgaaattggaaaggcaaatgttgtaactgattatgaatctaaaattgtaatccttaattttggtgccctgcttgaggaagcttgctctgtagcacaagacctacagattacccttattgatatgcgatttgttaaacctttagatgaagaattgctcaaaaaatatttaacaaaggcagatatgtttgtttccattgaagatggctcagtaatgggtggtgctgggagtgctgttcaagaattttgttcaagagaaaatattgaaattaagtcggtcctctttggcataccggatacatttattgaacatgcatcaagaaaagaaatgcttgaagaggctggtcttacatctaaaaaaataaaatctaaaatagaagacttgttatag

SEQ ID NO: 232919 - DNA, 850 bp, Unknown
  Bacterial polypeptide expressing nucleotide sequence isolated from the Sargasso Sea
aatgagtaataattacaaatttttaaacaatgtcaattttccaagtgatatcagaaaattatctcaatctgagataaaagttttggctgacgaggtcaggcaagaattaattgacgttgtttcagaaactggtggacacctaggagctggtcttggagttgtagagctcactgtggttttgcattatatatttaatactccacatgataaattaatttgggatgttgggcaccaaacttatcctcataaaatattaactggtaggaaaaataaaattagaacactaagaaaagggaagggattgtctggttttacaaaaagatcagaaagcgagtatgatcctttcggcgctgctcatagttcaacttctatatcttcggcattaggaatggctgttgctaataaattgtcaaataaatctgataatgtaattgcagtcataggtgatggagcgataagtgctggtatggcatatgaggcaatgaacaatgcaggagaaagtaagacaaaaatgatagtcgttttaaacgataatgacatgtcaattgcaaaacctgttggagctatgagaaagtatcttgcaaaaattctgtctggtaagatttattttagttttagagagacattaaaattaatcatatctgccttctcaaaaagatttaaaaacaaagctggaaaagcagaggattttttaaggtctgcagttactggtggtactttatttaattccatgggattttattacattgggccaatagatggacatgatatagatacaatggtttctgtatttaaaaatgcaaaagaaattaattatgatggtccaaattttagttcatgtaaaaactga

SEQ ID NO: 232920 - DNA, 589 bp, Unknown
  Bacterial polypeptide expressing nucleotide sequence isolated from the Sargasso Sea
atgaaagtatttaaagattttccaatagaaagacccaaaaattattttttagataaaattgagtctccagaagatctaaagaaacttactattgaagagcttaaagttctagcagatgaattaagggaatttttacttttttcagtaagacaaacagggggtcactttggcgccggactaggagcgattgagataactattgctttgcattatttattaaatatgccttctgataagattgtctgggatacgggccaccaagcttatcctcataaaatactaactggtagaagagacaagatgcacattataaggaagattgatggtcttgctccctttccttctattaaagaatctaaatttgatgctatgagtgttggacattcaagcacttcaattagtgcagctttaggtatggatgaagctgttaaacaccaaaaaaataataaaaatatattttctgttataggcgatggcgccatgacagctggaattgcatttgaagcaatgatgcatgcaggacacttaaacaataatctaaagattattctcaatgataatgatatgtctatatcaaagaataaaggtg

SEQ ID NO: 232921 - DNA, 1135 bp, Unknown
  Bacterial polypeptide expressing nucleotide sequence isolated from the Sargasso Sea
ctccggaaactgtactctacgctgcgcgaaggcggtaaaaaggtcttctctggcgtgccgccgattaaagagctgctcaaacgtaccgaagaacatctcaaagggatggtcgttcccggaaccctgtttgaagagctgggctttaactacatcggcccggtggacggtcacgatgtactcggtctggtcaatacgctaaaaaatatgcgcgacctgaaagggccgcagttcctgcatattatgaccaaaaaaggtcgcggctatgagccggcggaaaaagacccgattaccttccacgcggtgccgaaatttgaccataccagcggagtcctgccgaaaagcagcggcggcctgccctcctactcgaaaatttttggcgactggctgtgcgaaaccgcggcgaaagacagcaagctgatggccgttacgccggctatgcgcgaaggctcgggcatggtcgagttttccagaaaataccctgaccagtatttcgatgtggcgattgcggaacagcacgcggtgacgttcgccgccggcctggcgatcggcgactacaagccggtggtggccatctactccaccttcctgcagcgcgcctacgatcagctgatccacgatgtcgctatccagaagctgccggttctgtttgccatcgaccgcgcgggaatcgtcggcgccgacggacaaacgcaccagggtgcattcgatctctccttcctgcgctgtatcccggatatggtgatcatgacgccgagcgacgaaaacgagtgccgtcagatgctctacaccggctatcactacaatgaagggccgagcgcggttcgctacccgcgcggcaccggcaccggcgccacgctggagccgctggcttcactgccgatcggcaaaggcgtggtgaaacgcacgggcgaaaaggtggcgatactcaacttcggcactctgctgccggaagcggcgcaggtggcagacaagctcaacgccacgctggtcgatatgcgttttgtcaaaccccttgatgatgcgcttattttgcagcttgccgccgaccacgatgtgctggtaactgtggaagagaatgccattatgggcggcgcgggtagcggcgtgaatgagctgctgatggcccatcgccgtg

SEQ ID NO: 232922 - DNA, 679 bp, Unknown
  Bacterial polypeptide expressing nucleotide sequence isolated from the Sargasso Sea
aatgacaaaatataagtttttagataatgtaaattttccatcggatataaaaaatttaaaatcatcggaattgaatatcctatcaaaggagttaagagaagaattgatagaggctgtttcatttacaggtggtcatttaggtgcaggtttaggagttgttgagttgactgtagccttacaccatgtttttgatacacctaatgataaaatagtttgggatgtgggtcatcaatcgtatccacacaaaattttaacaggtcgtaaaaacagaatcaaaacactgagacaaggaaatggcctgtctggtttcacaaaaagatccgaaagtgaatatgatccatttggcgcagcacatagttcaacatcaatttctgcagctttaggtattgctactgcaaataaactttcaaaaaaatcagaaaatgttgttgccgttattggcgatggagcgatcagtgctggaatggcttatgaggctatgaacaatgcgggcatatctaaaactaaaatgatagtaattttaaatgataacgacatgtcaattgcagaacctgtgggtgcaatgagaagttatctggcaaagttattaactggaaaaatatattttagtctaagagagacgtttaaattaattatttctgccttctctaaaagatttcaaaaaaagctgaaaagcaga

SEQ ID NO: 232923 - DNA, 1921 bp, Unknown
  Bacterial polypeptide expressing nucleotide sequence isolated from the Sargasso Sea
aatgactaaacttataaggcaaataaactttccagcagacttaagaaaatttgataaggataaacttaagcaaatttcagatgaattaagagatgaattgatcgatgtcgtttctgaaactggtggacatcttggtgcagggttgggggtagtggaattaacagtagctttacattatgtattcgacactcctaaagataaattagtctgggacgttagccatcaatgctatcctcataaaattataactggaagaaaagacagaataaaaactttaagaaaaggaggtggcttgtctggatttaccaaaagatcagaaagtgaatatgatccttttggtgccgcacacagctcaacttcaatttcttcaactcttggaatggcagtagcaaaaaaattgtctaacaataataataatgttgtagcggttataggtgacggcgcaatgagtgccggtatggcttatgaggctatgaataatgcaggagctcttaaatctaaactcattgtcgtactaaatgataacgacatgtcaattgctaagccagtaggggctatgagtaagtacttagctaaattgctttcaggtaaattatattttagtttgagagaaaccgtaaaaatggttatatcagctttttcaaaaagatttagtcagaaagcgggtaaagcagaagatttattaagaggtattgttactggagggactttatttagtgaattagggttttattacattggaccagtagatggacatgatgttgataatttagttcagatttttgaaaatgttaaaaattctaatcatgaaggtccaattcttatccatgtaagaactcaaaaaggaaaaggttataaaccagctgaagaatcaggagataaatatcatggagtttctaaatttaatgttgctactggagaacaaagtaagtcaaaatccaatgtaccgtcttacacaaaagtctttgcagaaacgttagtaaaacatgcagaacaagacaccaaaattattggaattactggagcaatgccttcaggaacaggtttaaatttatttgaaaaaaaatttccagataggacctttgatgtaggaatagccgagcagcatgctgtaacttttgcggctggtttggctacagaaggctacaaaccgtatgctgcgatttattcaacctttcttcaaagagcttatgatcaagttgttcatgatgtagccattcagtctttaccagtaagatttgcaatagatagagctggattagttggagctgacggaccaactcacgcaggttctttcgatattacttatttgtctaccttaccaaattttattgttatggctgcgagtgatgaggctgaattagtaaaaatgattaatacttcagtcaatattaacgatcggccttcggcgtttagatatcctagaggaaatggcgtcggagtttcacttccctcaataaatgaatttttggaaataggaaaaggacgaattattaaagaaggaaagaaagttgcaattttaaattttggggcaagattagaggaatgtaaaaaagcttcagaaattttatttaagaaaggaataaatgcaactataatagatgcaagatttgctaaacctttagacgaaaaattgattatggaagcagcaaacaatcatgaagttttaatttctatagaggaaggatcaatcggtggatttggttctcacgtgatgcaattcttatcagatcgaggagtattcgacaaaggattgagatttagatccatgattttaccagatctttttatcgaccaagatactccagaaaaaatgtacgaaaaagcaggtttagatagtttatcgatagctaataaaattgaggatactttaaattcaaatattgttttagcaaaaaataaaaacaaattatctaattaa

SEQ ID NO: 232924 - DNA, 565 bp, Unknown
  Bacterial polypeptide expressing nucleotide sequence isolated from the Sargasso Sea
tctggtttacttaaggtgcattcctaatatgatcgtgatgaccccatcagatgaaaatgaagctagaaagcttttgacaactggtttttttcataatggccctgcatcaataagatatccaagaggatctggtcctaatgttgttgttgaaaatgatctttcaccagttgaaataggcaaaggaagattgattaaacaaggatcaaaagatttaattgtcatcaattttggagctttactcgatcaagcaaaagaagttgcaagtactctaggccttactctaatagatatgcgttttgtgaaacctcttgatgaagatattcttagaaaatatttatctgaagcacaagcatttgtttcaattgaggatggatcagtagctggtggtgcaggaagtgcggttcaagagttttgttcagacaataacatcaatattaagtctaaacttttcggcatacctgatatattcattgagcatcaatccagagaagaaatgatcgaagaatgcggcttaaaagcttctagaataataaaagagatagaggaattaaaattagtagagtaa

SEQ ID NO: 232925 - DNA, 874 bp, Unknown
  Bacterial polypeptide expressing nucleotide sequence isolated from the Sargasso Sea
ctctcccagaaggctgttccgaagcaatacgtggatgtcggcattgcagagcagcacgcggtcaccctggcggccggcatggcctgtgaaggtctgcgcccggtcgtggcgatctacagcaccttcctgcagcgcgcctatgaccagttgatccacgatgtcggcattcagaaccttccggtgaccttcgtgctggaccgggccggcatcgtcggtgccgatggcccgacgcatcagggccagtacgacatcagctacatgcgctccatccccaacttcacggtgatggctcccaaggatgaggcggaactgcagcggatgatggtgacctgtctcaaccacgacggacccaccgccctgcgcatcccccgaggatccggtgttggcatgccattgatggaggaaggctgggaatcgctccccatcggacgaggcgaactgcttcgcgagggtgacgatctgctgatcgtggcctacggctccatggttcaccctgccctggacaccgccacgctgctggaggaagcaggtctgtccaccaccgtgatcaacgcgcgcttcctgcgccctctggatcaggccttgatccatccgctggctcggcggattcagcgggtggtgacgatggaagagggtgctctggccggcggattcggcgccgctgtgctcgagtcgttgtccgatcaggacatcagcgtgccgctcctgcgcatcggtattccggacaagatggtggatcacgccacaccgcagcagagcaaggaatcgctcggactgactccggttcagatggccgagcgcatccgccgccggtttgagctcagtggccgtgactttgccggtgcctcatcgctgccggcggttcaatcctgag

SEQ ID NO: 232926 - DNA, 1918 bp, Unknown
  Bacterial polypeptide expressing nucleotide sequence isolated from the Sargasso Sea
atggctgaaaaattattagataaaataaattatccttctgacttaagaaaacttaaaaagagtcagctagaacaagtgtctaatgaactaagaaacgagcttattgatgttgtttcagaaactggtggtcatttaggcgccggcctaggagttgtggagttaactgttgccctccactatgtctttaatacaccaaatgataagcttgtttgggatgttggtcaccaatgctatccacataaaataattacaggtagaaaagaaagaataaaaaccttgagaaaaggtggtggactatcaggatttacaaaaagatcagaaagtgagtatgacccatttggtgcagctcatagctcaacttcaatttcttcgactcttggaatggcaactgcaaaaaaattatcaaacgataaaaataatgtggtcgctgtgataggagacggggcaatgagcgctggaatggcatatgaagctatgaacaacgctggcgcaatgaaatctaaacttatagtaattttaaatgataatgacatgtcaatagctcctccagttggcgcaatgagtaaataccttgctagattattatcaggtaaaatttactttagtttaagagaaacaattaaattaataatttctgctttttcaaaaagattttcaaaaaaagctggaaaagccgaagatatgtttcgtagcatggtaacaggtggaacgctatttaatgagcttggattttattatattggtccaatcgacggacatgatattaaaaatatggtgactattatggaaaatgttaaaaattcatcatatgacggtcccatattaattcacgcaattacaaaaaaaggaaaaggatataagcccgccgaagagtcaggtgataaataccatggagtatcaaaattcaatgttcaaacaggtgaacaatctaaaggaaaatcaaaatcaccgtcttacacaaaagtctttgctaatacattaattaaacatgcagaaaatgatactaaaatagtcgcaattacgggagcgatgccttcaggaactggcttagacttatttgaaaaaaaatttccagaaagaatgtttgatgtaggtattgcagaacaacatggagttacttttgctgctggattggctaccgagggttataaaccttatgcagcgatatactcaacttttttacaaagagcatatgaccaagtggttcatgatgtagcaattcaatcattaccagtcagatttgcaatcgatagagcaggtttagttggagctgatggcccaacccatgcaggatcatttgatgttacctacttatcgactttacctaattttgttgtaatggctgcaagtgatgaagcagaattagtaaggatgattaatacatctgtaaatattaatgataaaccttctgcctttaggtatccaaggggtaatggtgttggtgttgatctaccaaatattaaagaaactctacaaataggtaagggaaggttgattttacaaggcaaacacattgcaatactaaattttggggcaagattaaatgagtgcaagaaagcctcagacattctaaaaaagaaaggtatatcagcaagtatttttgatgcaagattttcaaaaccattggatgaacaatcaattattgagttggcttcaagccatgaagcaattttaactatagaggaaggatcaataggtggttttggatcgcatgtatcaaaattattatctgaaagaggattttttgataaaggattaaaatttagatcaatgtttttacctgataaatttttagatcaagatactcctgaaaatatgtataaatatgcaggtttggattgtgatagtatagttcaaaaaattgaaaacgttctaaattctaatgttgttattgccaaaaataaaaacttttcttaac

SEQ ID NO: 232927 - DNA, 1840 bp, Unknown
  Bacterial polypeptide expressing nucleotide sequence isolated from the Sargasso Sea
aatgcttttaagtgagttaagtcatccaaatcaacttcatggcttaacagtttcacaattagaggaaattgcttgtcaaattagagaaagacatcttcaagtagtatctactagtggaggacatcttggtcctggattaggtgtagttgagttgacattagctttatatcaaactcttgatcttgattttgataaagttgtttgggatgtaggacatcaaggttatcctcataaattaataacaggacgttttagtcaatttgattcccttagacaacaaaatggagtcgcgggatatctcaagagaagtgaaagtaagtttgatcattttggagctggacatgcaagtacttctatatctgctgctttaggaatggcaatagcaagagatagaaaaggtgaaaattataaatgtgttgcagttattggagatggagcattaactggaggtatggcattagaagctataaatcatgcaggtcacttaccaaacactcctttagttgtagtattaaacgataatgatatgtctatttcgcctccagttggagccctttcatcttacttaaataaagtaagagttagtccaccgttgcaatttttgtccgatagtgttcaagaaagtgttaaaaatattccaataattggtaaggatattccagaagagctaaaaaatattaaaggaagcgttagaagactagcagtgccaaaggttggagctgtttttgaagaacttggatttacatatatgggtccaattgacggacatgatattggaaatttagttaatacttttaacgctgctcataaacttaaaaaacctgtactagttcatgtagtcacaaccaaagggaagggatatccttatgcagaagctgatcaggttggatatcatgcacagtcagcatttgaccttacaactgggaaatcaattccatctaagaaacctaaacctgttagttatagtaaaatatttggtcaaaccttattgaaaatatgtgaacaggatagcaaagtcgtcggtatcacagcagcaatggctacaggtactggtttagatatattgcaaaaaaatattccagatcaatatatcgatgtaggaatagcagaacaacatgcagttactctcgcggcaggaatgtcgtgcgatgatcttaaacctgttgtagctatttatagtacttttctacaacgtgcattcgatcaattaattcacgatgtagggatacaaaatttacctgtatcgtttgtacttgatagagctgggatagttggggctgatggtcctactcatcaaggacagtacgatatcagttatatgagatctatacctaattttgtattgatggcaccaaaagatgagtctgaattacagagaatgttaataacatcaattaactataagggtcctactgctctaagaatacccagaggttctggattaggggtggctgtaatggatgagggttgggaacctttgagtataggagaagctgaaatactggaagaaggagatgatattttaattattgcttatggatcaatggtcgcatcagctattgaaacagcagagattttaaaaaatatgaatattaatgcatgcattgttaatgcaagatttgtgaaacctctcgataaaaaacttattatgcccttagcaagtaggattcaaaaagttataactatggaagagggaaccttaataggtggatttggttctgcaatagttgaattatttaacgataatgaactaaacattccggtatacagaataggtatacccgatgttttagttgatcatgcttcacctgatcagagtaaagaaaaattaggacttatg

SEQ ID NO: 232928 - DNA, 1912 bp, Unknown
  Bacterial polypeptide expressing nucleotide sequence isolated from the Sargasso Sea
aatgtcaaaatataaacttttaaataatgtaaattttccatctgatataaaaaaatattctagttctgagcttaaaattctctctaaagaaattagagaaaaaatgatagaagcagtctcaaaaacaggtggacatttaggcgctggtctgggagtagtagaactgactgttgctcttcattatatttttgatactccaaaagataaaattatttgggatgtaggtcatcaatcatatccgcataaaatattaactggcagaaaagataaaatcgaaacattaagaacaggcggtggattgtctggttttactaaaagagatgagagtgaatatgatccatttggtgccgctcatagctcaacttctatttctgccgcattaggaattgctaccgcaaataagctttcaaataaatctgaagatgtagtagcagtaattggagatggagctttaagtgcaggaatggcttatgaagccatgaataatgccggctcttcaaaaacaaaaatgattgttattttaaatgacaacgatatgtcaatttccaagcctgttggagctttaagaacgtatcttgcaaaaattttatcagggaaaatttattttagtttaagagaaacaattaaactaataatttcttcattctcaaaaaggttcatgaaaaaagcaggaaaagctgaagatttttttagatcagcagttacaggaggcactttatttaattcactaggattttattatgttggaccaatagatggtcatgatcttgatgtattaacttcagttttagagaattcaaaaaaaatgaagtacgatggacctatacttatacatattaaaactgaaaaaggtaaaggatatgaatttgcagaaaaatctacagataaatatcatggagtttcaaaatttaacattcaaactggtcaacaagaaaaagcaaagagtataactccttcttatacaaaagtttttgccaatacattaatcagacatgcacaaaaagatagtaaaattataggagtcactgcagcaatgccaagcggaacaggcatggatctttttgcagaaaagtttccagacaggatgtatgatgttgggatcgcagaacaacatgcagtaaccttttccggtggtttagcaacccaaggttataaaccttttgtggcaatttattcaacttttttacaaagggcttatgatcaagtagttcacgatattgcaatacaatctcttcctgtaagatttgcaattgatagagctggcctggtaggagcagatggaccaacgcatgcaggttcatttgatataacttacttatcaacattaccaaattttgttgttatggctgctagtgacgaatctgaacttattaaaatgattaatacatcagttaaaattaatgatagaccatctgcctttagatacccaagaggaaatggtattggaatagaactacctaatgaagatgaaaaattgattattggaaaaggaagatttataaaagaaggaaaacgagttgcattagttaattttggtgcgagacttcaagaatgcttaacagtagaaaaaaatttatcaaaaaaaggaatttttccaacagtatttgatgctaggtttgcaaaacctttagatgaaaattcattatggcaaattgcaactaatcatgaagtggtaattacaattgaagaaggatccataggtggttttggttctcatgtaaatcattttctaaatgaaaaaaatttattggataaagaaactaaatttagatctatgattttgccagatttatttattaaccatgataaaccagaaaatatgtataaagttgcgggtttagattcaatatcaattgaaaacaaaattattgacacattaaattcaaaagttgtattaaaaaaaactaattaa

SEQ ID NO: 232929 - DNA, 1514 bp, Unknown
  Bacterial polypeptide expressing nucleotide sequence isolated from the Sargasso Sea
taaagataattcaagagttatatgtgttgttggggatggagccttaagtgcgggtttggcatttgagggcctcaacaatgctggtgcacaaaaaaaaggtttaattgttatccttaatgataataaaatgtcaattgataagccagtaggtgctatgagcacctatcttacaaagttgctatcatctaaatcttattcaagtttaagaaatattataaaaaaaattagtaaaacttttccaaaaaatattacagaaactctttatcgaactgaagaatattctaagggacttatttctggtggtactttatttgaagaattaggtttttattatcttggtccgatagatgggcataatattaataacttagtaaatgttttagaaaatataaaagataataaatttgataaaccagtgtttcttcattgcataactaaaaagggtaaaggatacagtccagcagagaaatctgaagataaatttcatggtgtagaaaagtttgatattaatacaggtaactcagttaataaaacaaatttaaaatcttactcaaatgtctttggagaaaaactggtaaaacttgccgaaaatgatgaaaaaattgtagcaataacagctgctatgatgtctggtacaggcttaaaattattccaaaaaaaatttgaaaaaagatttttcgatgtgggtattgctgaacaacatgctgttactatggcagctggattggctacagagggttttaagccatttgttgcaatttattcaacatttttacaaagagcatatgatcaaatcgtacatgatgtagctattcaaaagttgcctgttagatttgcaattgatagggcgggattagttggttcagatggccctactcatgctggctcatttgatattacctatttagctacacttccaaattttatcattatggcacctagcaatcaaagagagttatcaaaaatgatagagttatcttctgacataaatgacacaccgtctgcttttagatttccaagaggaacaggatcagatgaactatttaacaatcaacccacagatattgatataggtaagggatatattctagttgaaggtaatgatattgccatcttaaatttaggaacgagacttgaaaaatgcattgaagcaagtaagtttcttaatcaaaataatatttatcctactattgctgatgcaagatttgcaaaacctttagacacacaattaatagataacttattaaataatcataagtatattttaactatagaagaagggtctattggtgggttttcatcacactttttacattatgttcataatattagatcaaagaacgataatgttgtgataaaaaatttaatttttccagaccgatttgtagaacatatgaccccagacgaacaatatcaagatattaaaatggatacagaatcaataatcaaaaaaattaatagtttttatgaaaataaaattattgatataaaaaattttaaattaaaattttaat

SEQ ID NO: 232930 - DNA, 1942 bp, Unknown
  Bacterial polypeptide expressing nucleotide sequence isolated from the Sargasso Sea
atgcgggcgcgtttgatttcctacaatggaacgacgatgtacgacttgctgaaaaccatcgacgacccggcggatttgcgccgcctcgatcgtcgccaacttcaaccgctcgcggatgaactgcgcgcgttcgtgctcgacagtgtgtcgaagacgggcggccatttgtcgtccaacctcgggacggtcgagctgacgatcgcgttgcactacgtgttcaacacgccgaacgatcgcatcgtctgggacgtgggccaccagacctacccgcacaagatcctgacgggccgccgcgaccagatgcattcgctgcgccagcaggatggcatctcgggcttcccgcgtcgcagcgaatccgaatacgacacgttcggcaccgcgcactcgagcacgtcgatctcggccgcgctcggcatggcgatcggcagtcagctgaacggcgacgaccgcttctcgatcgccgtgatcggcgacggcgcgatgacggccggcatggcgttcgaggcgatgaacaacgcgggcgtgtcggaagatgcgaaagtgctcgtgatcctgaacgacaacgacatgtcgatctcgccgccggtcggcgcgctgaatcgccatctcgcacgcctgatgtcgggccgcttctatgcggctgcgcgcgcgggcgtcgagcgcgtgctgagcgttgcgccgccggtgctcgaactcgcacgcaagctcgaagagcacgcgaagggcatggtcgtgccggctacgctgttcgaagagttcggcttcaactacatcggcccgatcgacggtcacgatctcgattcgctgatcccgacgctgcagaacatccgcgaactgcgcggcccgcagttcctgcacgtggtgacgaagaaaggccagggctacaagctcgccgaagcggatcccgtgctttatcacggccccggcaagttcaacccggccgaaggcatcaagccgtcggccacgcccgcgaagaagacgtacacgcaggtgttcggcgagtggctgtgcgacgaagccgagcgcgatacgcgtgtcgtcggcatcacgcccgcgatgcgcgaaggctcgggcatggtcgagttcgagaagcgcttcaaggatcgctactacgacgtcggcattgccgaacagcacgcggtgacgttcgcgggcggcatggcaaccgaaggcctcaagccggtcgtcgcgatttactcgacgttcctgcaacgtgcatacgaccagctgatccacgacgtcgcgctgcagaacctgccggtcgtgttcgcgatcgaccgcgcgggcctggtcggcgcggatggcgcgacgcacgcgggcgcgtacgatctcgcgttcatgcgctgcatcccgaacatgacgatcatggctgcgtccgacgagaacgaatgccgccagatgctgcacacggcgctgcagcagccgaacccgaccgcggtgcgctatccgcgcggcgcgggcacgggcgtgccgacggtgaaggaattcaccgagatcccgctcggcaagggtgaagtgcgtcgccagacgtcgcagccggaaggcaagcgcgtcgcaatcctcgcgttcggcacgatggttgcaccgtcgctcgccgcggccgaggaactcgatgcgaccgttgcgaacatgcgcttcgtgaagccgatcgatgcggcgctcgtgcgtgaactcgccgagacgcacgactacgtcgtcacggtcgaggaaggctgcgtgatgggcggtgcgggctcggcctgcgtggaagccctgatggagagtggggttatccgacccgtactacaattgggcctccctgacctgttcatcgatcacggcgaccccgcgaagctgctgtcgcaatgcggcctcgacggcgcgggtatcgcgaaatcgattcgcgaacgctttctgaatccggcggccgatgtcgccggtcaggcgaagcgcgtcgcataag

SEQ ID NO: 232931 - DNA, 668 bp, Unknown
  Bacterial polypeptide expressing nucleotide sequence isolated from the Sargasso Sea
agcctatgatcagctcattcatgatgttgctcttcaaaatttgaatgtaacctttgcaattgatagagctggattagttggagaggatggtcctactcattccggtaattttgatatagcttacttacaatgcatcccaaatatggttatagcttcaccatctaatgaaaatgaagcacgcaagcttttatcatcagtttatgagtatgacggccctgctgcagtgagatatcctagagggcaaggacctggtgaagagattgatagagatttggaaacggtcaaaattggaaaagctaacctacttaaaaaaggttcatcaaaactgattatgttaaattttggatcacttttaaatcatgcaaaggaaattgcaaaaaaatatgatatgacattaattgacatgagattcataaaaccattcgatgaagggattttaaaaaaatattctaatgctaagtggtttattactattgaggatggttctttaatcggagggataggatcaacaatagccaactgggttacagagcaaaactttaaaatacaagtaaagtgttttggaattcctgacaaatttattgaacatatgtctagagaacaaatgataaaagaggcaaaactagactatgaatctattaccaaagaattagataaaattttctaat

SEQ ID NO: 232932 - DNA, 1426 bp, Unknown
  Bacterial polypeptide expressing nucleotide sequence isolated from the Sargasso Sea
aatggcatttgaagccttaaatcatgcaggagctcagcgtagcaacttattagttattttaaatgataacaatatgtcaatatctccaaatgtcggagcactttcaaatcgttttgctcaattattatctggagaattttattcgagtgttagaaagagtggtaaaaaagtattatccaatatgcccgccgcactagagatggcaaaacgtgcagaagagcatgtcaagggtttaatcgtgccaggaaccttattcgaagaacttggttttaattatattggtcctgttgatggacatgacttacctgtattacttagtacattaaaaaatattaaaaaacttgaagggcctcagtttttgcatgtcattacaaagaaaggtaagggttatgctccagctgaagatgatcctattaaatatcatggcgtgacaccatttgatcctacaaaaggaattgtttcttcaaaaacattatcaatgccaacttatagtaaaatatttggtgattgggcatgtgatatggccaagcttgaccaacgttttattgcaataacgccagcaatgcgtgaaggatcgggtttagtgaggtttgagaaagaacatcctgataaatattttgatgttgcgatagcagaacagcatagtgtcaccgttgcagcagggatggcttgtgatggtttgaaaccagtcgttgcaatttattcgacatttctacagcgtgcttatgatcaattaatacatgatgtcgccatacaaaacctacctgtattatttgctatagatagagcgggatgtgttggtgcagatggcccgacacataatggagcgtatgatttgagttttatgcgctgcttaccgaatattgttttgatgactccgtctaatgaaaatgaatgtcgtcagatgttatatacaggattcaaacttgatcagccaacagctgttcgttacccccgcggtacaggatgtggtgttaaagtaataagaaaaatgacatcaataccaattggtaaatctgaaattagatgtaaaggtaaaaatattgccatactggcttttggtactatggttgatacatgtgtacgcatcggcgaggaaatcgaagcaacggttgttaatatgcgctttgttaaaccgattgacgagtcagttattttaaatatgtgtgatcaacatgatttaattattactgtagaagaaaacgttgtccatggtggtgcgggatcagctgtgaatgaggttattgcggcatatggtattaaaaagaagattataaatcatggtctaccagataggcttatccagcatggcacaagagatgacatgcttagagatgcacgtttagattaccagggtatacttgatttcattatggagcaaattagtgagcccgcacaaaaaaagaaagaattaactagtttttaa

SEQ ID NO: 232933 - DNA, 647 bp, Unknown
  Bacterial polypeptide expressing nucleotide sequence isolated from the Sargasso Sea
aatgactaaattattagataaaattaattatccttcagatttaagaaaatttgataagaagcatttaaaacaaatttcagaagaacttagaacagaattaatagatgtagtttctgaaaccggcggtcatttaggtgcaggattaggtgttatagagttaactgttgctttacattatgtttttaataccccaaaagataaattagtctgggatgtaagccatcaatgttatcctcataaaataataactggtagaaaaaaagatattcgaactttaagaaaaggtggaggattatcgggctttaccaaaagagaagaaagtgagtatgatccgtttggggctgcgcatagttcaacttcaatttcatcaactttaggaatgtctgtcgctaaaaaactttctaatgacaagaataatgttattgcagtaataggcgatggagcaatgagtgctggaatggcttatgaagcaatgaataacgcaggtgcattaaaatcaaaattaattgtaattttaaacgacaataaaatgtctatagccaaaccagttggagcgatgagtaaatatttagcaaaacttttgtcaggtaaaatatattttagtttaagagaaacaattaaattgatcacttcagcatttcaaaaag

SEQ ID NO: 232934 - DNA, 285 bp, Unknown
  Bacterial polypeptide expressing nucleotide sequence isolated from the Sargasso Sea
aatgaaaaaaaattatcaatttttaaatgatatcaactttccatctgatttaagaaaagtttctgaagatagtttacaaaaagtagcagatgaggtgagggaggaaatgataagtgctgtttcagaaacaggcggtcaccttggtgctggtttgggagtggttgaattgacagttgcacttcattatgtttttgacacaccaaatgataaattaatatgggatgttggtcatcaatcttatcctcataaaattttaactggaagaaaagataagattagaactta

SEQ ID NO: 232935 - DNA, 961 bp, Unknown
  Bacterial polypeptide expressing nucleotide sequence isolated from the Sargasso Sea
caattgggaaaaataaaaccattagatttaattgatcaaaagaatgggccaaaatttcaagatgtctttggtcaatggattgttgatatggcaaagcaaaatgaagatttaatagctatcacacctgctatgagagaaggctctggcttagtgaagtttagcaaagaatttccagagagattttatgacgttgcaattgccgaacaacactcggttactcttgccgctggaatggcatgtgaagaaaaaaaaccagttgttgcaatatattcaacctttttgcagcgtgcttatgaccaactcattcatgatgttgcattacaaaatttagatgttctatttgcaattgatcgagctggtctagtcggtgaagatggtcccactcattccggaaattatgatcttgcttatcttagatgtattccgaatatgattattgcagttcctgctgatgaaaacgaagcaagaatgttattaacaactacttttaatcataacggaccagctgctgttcgttatcccagaggtggaggaattaatgcggttataaatcttgaacttaactctgttgagataggcaaaggaagagtaataaactcactggactcagaccttcttgtgcttaattttggaacgttgattgccacatcagaagaggttgcaaaagagttaaatgcttctttattagatatgaggtttgttaagccattagataaagaactaatagctgaatactcaaaaggcaaaaaagccattattacaattgaagatggcgccatgacaggaggtgcaggttcggcagtaagcgaatgggctcaagaaaataaaattagtgcgcaaattatcatttgtggcatcccagatgaatttatagatcattcaagcagagaagaaatgattgaagcggttggcctagataaagacggaattctagccaaagtaagagattttttatcttaaa

SEQ ID NO: 232936 - DNA, 1193 bp, Unknown
  Bacterial polypeptide expressing nucleotide sequence isolated from the Sargasso Sea
aatgaaagtttttaaagattttccaactgaaaggcctgtcactagtttcttagatgatattgaatctccagaagatttaaaaaaacttacaattgacgagcttgaagttttagcagatgaattaagagaatatttgctttattcagttagacaaacaggtggacattttggtgctggacttggagcaatagagattactattgctttgcattatctattagatatgccttctgacaagattgtttgggacactgggcatcaagcataccctcacaaaatattaactggcagaagagataagatgcatctcatgagaaagattgatggtcttgcagcatttccatctattaaggagtctgaatttgatgctatgagtgttggacattcaagtacttcaattagtgcagctttaggcatggatgaagcctctaaacatcaaaaaaataataagaacatattttctgtcataggtgatggtgcaatgacagccggaatagcatttgaggctatgatgcatgcaggacacttgaataataatctaaagattattcttaatgataatgatatgtccatatcaaagaataaaggtggtctatcagactatcttgctaaaatatgggcatcaaaatcatacaaaaaacttaaatctagcggtaaaaaagttcttaaaaatctgccttatgggcttcatattacaagaaatcttaaagatgggattaagtctgcagtgatgccaggaaatttatttgaagatctagggcttcattatgtggggccaatagatggtcatgatattccacttttaataaaaacaattaatagaatgatggaaaaaaatgagccatatttgctacatgttattacaaaaaaaggtgctggttttgaacctgctgaaaatgaaagaattaaatttcatgcaatctcaaaaatagaaaatactccagctcctaaaaaaactaaattccaagatatttttggagattggttatgttataaagctaaacaagatagcaaattggtaggaataactcctgcaatgaaagaaggttctggaatggttaattttgaaagggaatttccagagagattttatgatgtagcaattgctgaacagcatgctgttacatttagtgcaggaatgtctttagaaggcatgaagcctgtagttgctatatattcaactttccttcaga

SEQ ID NO: 232937 - DNA, 967 bp, Unknown
  Bacterial polypeptide expressing nucleotide sequence isolated from the Sargasso Sea
aatgagcaaaacaaaattcttaaataaaattaattttccaacagatttgaaacagttggatcattctgaacttaaaatacttaaggatgagttaagagaggaaatgataaatgcggtatcagaaactggcggtcatttaggtgcgggccttggagttgtagagttaacagtagctttacattatgttttcgatacaccaaaagataaaattatttgggatgttggccatcaatcctatcctcataaaatattaactggaagaaaagataagattaaaactcttagacaaggcaatggcttatcaggttttacaaaaagatcagaaagtgagtttgatccatttggtgcagcacacagttcgacgtcaatatctgcaggattaggaatagcaactgcaaataaactttcaaataaatcagaagaggtagttgctgtaataggagatggagcaatgagtgctggaatggcatatgaagctatgaataatgccggtgcatcaaaaacaaaaatgatagttattttaaatgataatgatatgtcgattgcaaaacctgttggtgcaatgaagtcttatctagcaaaaattttttcaggaaaaatttattttaactttagagaaacattaaaattaattttttcatcattttcaaaaagatttagtaaaaaagctggcgcagcagaggattttcttagatcagttgttaccggtggaactttgtttaatgcattaggattttattacattggcccaatagatggacacgatttggatgtgttgctacctgttttaaaaaatgcaaaagagtcaaaacacaaaggaccaatattaattcacattaaaacacaaaaaggaaaaggttacagtttcgcagaaaagtcagaggataaatatcatggggtatctaagtttaatataaaaacaggtatacagcaaaaaagtgcatacaaaagtgccatcttacactaa

SEQ ID NO: 232938 - DNA, 1840 bp, Unknown
  Bacterial polypeptide expressing nucleotide sequence isolated from the Sargasso Sea
aagaattttagcagacgaagtaagagaagaaatgatcgatgcagtttctgaaacaggaggtcacttaggtgctggtctaggagttgtagagttaacagtagctttacattatatatttaataccccaaatgataaattaatatgggatgttggtcatcaaacatatcctcataaaatattaactggaagaaaagataggattcgaacattaagaaaaggaaaaggtttatcaggttttacaaaaagaaatgaaagtgaatatgatccttttggtgcagctcatagctctacatcaatttcttcagcattaggaattgcggtcgcaaataaactatctaataaatctgataacgtaatagcagtcataggcgacggtgcaatgagcgcaggtatggcttatgaagctatgaataatgctggaacaagtaaaacaaaaatgattgttattttaaatgataatgatatgtcgatcgccaaacctgtcggtgcaatgagatcttatttagcaaaaatattatcaggaaaaatgtattttagtttaagagaaacatttaaattaattatttctgcattttcaaaaagatttagtaaaaaagcaggaaaagcagaagattttttgagatcagctgttactggtggaactttatttaattcactgggtttttattatattggaccaatagatggacacgatatggattcattagtatctgttctaaaaaatgtgaaagaagttaattataatggtcctgttttagttcatttaaaaacagaaaaaggcaagggatataaatttgcagagagatcggaagacaaatatcatggtgtttcaaagtttaatgtaaatacaggtgttcaagaaaaatctagttcaaatataccatcatatacaaaagtttttgctattactctagtcaaacatgcagaaaaagatagtaagattattggaataactgcagctatgccatcaggtactggaatggatatttttggtgaaaaatttccatcaagaacttttgatgttggaatagcagagcagcatgccgttactttcgcagctggtctagctacagagggatacaaaccttttgcggcaatttattcaacttttcttcaaagagcatatgatcaagttgttcatgatgtagccattcaaagtttaccagttagatttgctatagatagagcaggattagttggtgcagatggaccaactcacgcaggatcatttgatgttacttatttagctacacttcctaattttattgttatggctgcaagcgatgaagctgagctggttagaatggttaacacctctgtagatattaatgataggccatctgcttttagatacccaagaggaaacggtattggtatagatttaccttcaattactgaaaaattggaaattggaaaaggaagagtaattacagaaggtaaaaaagttgccatacttaatttcggtgcaagattaaatgaatgtttaattgcaaaagaaaatctttcaaagaaaggaatcaaacttacaattgttgatgctagatttgcaaaacctctagatcaaaatttaatttggcaattagctactgatcatgaaatacttatttcaattgaagaaggttcagttggaggttttggttctcatgtgggacaatttttatcagataaaaatttgttagataataatttaaagtatagatctatgattttacctgacagatttatagatcatgataagcccgatttaatgtataagtatgctggtcttgatgcagatagcatcgaaaacaaaatattagatacacttaactcaaaaataataattaagaaaactaattaa

SEQ ID NO: 232939 - DNA, 1159 bp, Unknown
  Bacterial polypeptide expressing nucleotide sequence isolated from the Sargasso Sea
gatgttgtatccttagtaaaaatactagaaaatttaaaaaatggaacacatgacaagccagttttacttcatgttgtaacagagaagggtaaaggtcatcctttttcaaaaggatctcatgagaaatatcatgctgtttctgaatttaatatcattaccggtgatactgttaagtcaagctctaacgcaccaacatatactaatgttttctcagatacgttgtgtaaaatagctgaaaaagatgaaaagattttagccattacagctgccatgccttcgggaacaggtctaaacaaatttgcagaaaagtttaaagatagattttatgatgttggtattgctgaacaacacgctgtaacatttgcagctggtatggctgtagaaggtttaaaaccatttgttgtaatttactcaacttttttgcaaagggcttacgatcaagttattcatgatgtagtaattcaaaagttaccagttaaatttatgcttgatagagctggttttgtaggagctgatggagctactcatgctggctcatttgatttagcctatctttgctgtttgccaaatgtagttgtaatggctcctagtaatgaagcagagttggctaatatggttttgaccgcttcaaattatagtgaaggcccaatcttttgtagatatccaagaggtgaaggtgaaggagtggatattcctaaatatttaaataatattgaaattggaaaagggcgaataattcaaagaggaaatgatttagcaattcttgcgttaggtactagagtaggagttgctctgaaagtcgcagataatttgattgctgatggttgttcaattactgttgcagatgcgcgttttgcaaaacctattgatacaaatctccttcaaaaactatgggatgaacatcagaagttaataattatcgaagaaggtgcagtgggaggctttggttctcattgcttgcattttctatcgtctagtggtgctcttaattctagtgacaaagaaattagatgtttaactatgccagataattttgaagaccatgcttctcaaaaggagcaattagcaaatgcaggtttagattcagatgggttgttaaatactatccgtcaaatgctttcgatttcaaattcaaatgatgactttataataaggtaga

SEQ ID NO: 232940 - DNA, 1307 bp, Unknown
  Bacterial polypeptide expressing nucleotide sequence isolated from the Sargasso Sea
gttggcggtttatcaaattacttttcaagaatatggggcatcaaaaacttacaagggtattaagaaaagtggttctagtttcttgaaacctttacctcaggcatatcatttagctagaaaagtagaaacccaaatgaaagcaatggttgcaccaggaactatttttgaggaacttggattaaattatattggtccaatagatggtcataatttaaaagagcttaaagatgtcatttcaaatttaaaagaatttgaaggtcctcaatttcttcacgtaataacaaaaaaaggtgcgggtctagattcagcagaagctgacagaattggctttcatgctataggaaaaataaacgcaataggaaaaataaacgcaataaaagataaaaaaattaagcaaaaaaaatatcaagatatatttggcgaatggattatagatatggccaatataagtgatgatcttattggtattacaccagctatgagagagggatcaggacttgttgagttcagtaaaaaatttccagacagatactttgatgttgctatagccgaacaacactctgtcacatttgcagctggtttatcagttgaaaaaaagaaacctgtagtcgcaatttactccacttttttacaaagagcatatgaccaattaattcatgatgtcgcagttcaaaatctagacgttacatttgcattggatagatctggtcttgttggtgaagatggtcctactcactcaggaaattatgatatagcctacttaagatgcattccaaatatggtgatttgtgctccttcagatgagaatgaaacaagaaaattattaacaacagcatacttacataatgggccagcctctgtaagatacccaagaggtatggggccaaatagaaatgttgataaagatctaaagcctttgaagattggagaagcaaatataatcaatgaagaaagttcagaaatagtaattttgaactttggaactcttttaaatgaagcaaatcaaatctcaaaagaactaaaggccactttagttgatatgcgttttgtaaaacccttagatgaaaagcttttaaaaaaactttttataaaagcagaggtttttatttctattgaggatggttcaattatgggaggtgccggtagtgctgttcaagaatttgcatcaaaagagaatttaaatattagatcaatcctttttggtattcctgataaatttattgagcatgcctctagagaagaaatgttagttgaagctggtttagacgtagaaaatattaaatctaaattaagtaaattgttataag

SEQ ID NO: 232941 - DNA, 857 bp, Unknown
  Bacterial polypeptide expressing nucleotide sequence isolated from the Sargasso Sea
gtttccagacaggacatttgacgtgggaatagcagagcaacatgctttaacttttgcagcgggattagctacagagggatataaaccttatgcagcaatttactctacgtttttacaaagagcttatgatcaagtagttcacgatgttgctttacaatctttgcctgtaagatttgcaatagatagggcagggcttgttggcgcagacgggccaacacacgcaggttcttttgacatcacttatttatctactttacctaattttgtagtaatggctgctagtgatgaagcagaacttgtaaaaatgattaatacttcagttgaaattaatgatagaccttctgcttttaggtatcctaggggaaatggtataggagtcgaactaccctctataaaagaaaaattagtaatcggaaaagcgaggattataaaagagggtagaaaagtggctttactaaattttggtacaaggctcgaagaatgtaaaaaggcatcaaaacaactttccctaaaaggtatcgattgcacaataatagatgcaagattcgccaaacctttagatgaaaaattaattatggaagttgcgactaatcatgaggttttaataacattagaagaaggctcaataggtggctttggatcacatgttatgcaacttttatctgaaagaggcgtttttgatactggcttaaaatttagatctatgattttaccagatatctttattgaccaagatactcctgataaaatgtatgaggtagctggtttagacagtctttcaattataaaaaaagtggaagagactttaaactctaatgtaattttagctaaaaataaaaataagatacctagttaac

SEQ ID NO: 232942 - DNA, 1928 bp, Unknown
  Bacterial polypeptide expressing nucleotide sequence isolated from the Sargasso Sea
aatgcagcttaaaattttaccaaaaatgaaatcacctgatgatttacgtaagctagatagtgagcaactactcaaattagcagatgagttaagacattttactattgaaacagttacagagataggaggacatctagctcctacattaggtgtaattgaattaacgattgcgctacataaagtttttaacacccctaaagataaaatcatttgggatgttggccatcaaggctatgcgcacaagatattaaccggaagattagataaattcaatacaattcgaagaatgggcggtctcagtggttttttaaaaataagtgaaagcgagtacgatacttttggagcaggtcatgcttcaacatctatttctgcagcaaccggaatcgctgaagctcgaaaacacaataataaagattttagagtagtttctgtaattggagatggttcaatgacaggaggattagcttttgaagcgatgaacaatgctgggcatttaaaaacacctatgcttatcattctgaatgataatgagatgtcgatcagtccaaatgttggcgcattaaatacctatctaacaaaaatagtaacaaatccagtttacaatcaaataaggaatgaaatttgggacatcgctggtaaaattacttttggtaaaaaatccattcaaaattttttacgtagagtcgaagaaagtttaaaatcctttttagtccccggaatgctctttgaagaactcgggtttagatattttggcccaatagatggtcataatctaccagaactaatatcaaccttagatcgaataaaggatttaaaaacacccgctctgctccatatccttacaaaaaaaggcaaagggatggtatcaactaatacagaaaataatgattactatttagatgctgttaagtttcatgcagttaagcctaatggtaggataaagagcaatatagaaaataataaccctgcccctattaaagcccctatttttcaagatgtgtttggttccatcgtttgtgagattgcacgaaatagaaaagatactgtttgcattacagcagcaatgcgagaaggaactggtctagtaccttatgctaaagaatttaaagatagatattatgacgtaggcattgcggaaggccatggtgtaacttttgctgcaggccttgctacacaaaatgttcgtcctattgtcgctatttattccacttttcttcaaagagcatatgatcatatcatccatgatgctgcgatacagcacttaccagtcgtgttttgcatggatcgatctggaattgcaggtgaggatgggccaacccatcatggagcattggatattgcatatctgaaatgtatacaaggtatgattgtaacagctccaaaagatggaaacgagcttaggcatttgctctatactgctttggattatagcgatggacctttttcaattcgctatccaaaagcatcttctgaaagttttgatgaaaaagggcaagcagagctactgcctattggaagctgggaagtgtgtcgtaaatcagatggcaacacagtcatattagcagttggcccacaggtatttgatggaattagggcagcagaaaacctatctcaaaaaggaatagagtgcgaggtggttaattgtaggtttattaaaccaatggatataggttatttgcagtcaatctctgatcggtttgatcaagttattattattgaagagggtgtcaaaactggtagctttggagaaagcgtagcggcctggctcgcaacgaaaagatttaaaggaataataaaaactatttcacttcctgatgaatttgttgagcatggtcctagagatttactacttgaaaaatggggtgtaaatcagaaggggattgaagaggttattttaaacgaaaataaaactgtgaaattacaatatt

SEQ ID NO: 232943 - DNA, 1342 bp, Unknown
  Bacterial polypeptide expressing nucleotide sequence isolated from the Sargasso Sea
aatgagtaataattataaatttttaaatgatgtcaattttccaagtgatatcagaaaattatctcaatctgagataaaagttttggctgacgaggtcaggaaagaattaattgacgttgtttcagaaactggtggacacttaggtgctggacttggggttgtagagctaactgtggttttgcattatatatttaatactccacatgataaattaatttgggatgttgggcaccaaacttatcctcataaaatattaactggtaggaaaaataaaattagaacactcagaaaagggaagggattgtctggttttacaaaaagagcagaaagcgagtatgatcctttcggcgctgctcatagttcaacttctatatcttcggcactaggaatagctgttgctaataaattgtcaaataaatctgataatgtagtgcgggtcataggtgatggagcgataagtgctggtatggcatatgaggcaatgaataatgcaggagaaagtaagacaaaaatgatagtcgttttaaacgataatgacatgtcaattgcaaaacctgttggagctatgagaaagtatcttgcaaaaattctgtctggtaagatttattttagttttagagagacattaaaattaatcatatctgctttctcaaagagatttaaaaacaaagcaggaaaagcagaggattttttaagatctgcagttactggtggtactttatttaattccatgggattttattacattgggccaatagatggacatgatattgatacaatggtttctgtatttaaaaatgcaaaagaaattaattatgatggtccaattttagttcatgtaaaaactgaaaaaggaaaaggttataaattcgcagaaaaatcggaagataaattccatggagtctcaaaatttaatgtaaaaacaggagaacagataaagtcttcatccaatgcaccatcatatactaaagtatttgctaactccttaatcaagcatgctgaaaaagatagtaaaattgttggtataacagcagcgatgccatcaggaacaggtatggatttatttggaaaaaaatttcctaacagaatgtttgatgttggaatagcagaacagcacgcagtaacttttgccgctgggatggctacagagggatttaaaccatatgcagcaatatattcaacttttcttcaaagagcttatgatcaagttattcatgatgttgcaattcaatctttgccagtaagatttgcaattgatagagctggactagttggtgctgatggaccaacacatgcaggctcgtttgatataacttacttatcaacactaccaaatttgtag

SEQ ID NO: 232944 - DNA, 880 bp, Unknown
  Bacterial polypeptide expressing nucleotide sequence isolated from the Sargasso Sea
tgccatcaggtaccggacttgatatattttggaaaaaaatttcccagcagaatgtttgatgttggtatagcagagcagcatgctgtaacttttgcagcgggattggctacagaaggatttaaaccttatgcagctatttattcaacatttttacagagagcgtacgaccaagtagtgcatgatgttgcaatacaaaatcttccagtaaggtttgccattgatagagcgggcctagtgggtgctgatggaccaacacatgcaggatcttttgatattacgtatttatcaacattgccaaattttgttgttatggccgcaagtgatgaagcggaacttgttagaatgataaacacctcagtagatataaatgataagccaagtgcatttagataccccagaggaactggagttggagttgaacttccaaatatcgatcaaaagttagaaattggcaaagggaaaatagttttagaaggcaaaggtttagcaattttatcttttggggctagattaaatgaatgtttaaaagcggcagaaaatttgaaaaaaaagggaataaacattacgttaatagatgctaggtttgcaaaaccacttgatgaaaatttgatttggcaaattgcaaataatcatgaatcaattattaccattgaagaaggttcaatagggggatttggttctcatgtatcaaactttttatctcaaaaaaatttattagacaataacttaaaatttagatcaatgatatttcctgataaattcattgaacatgataagccagaaaaaatgtataatgtagcagagcttaactcagcatcaatagaacaaaaaattttagatacaattaattcaaatattgttttgcagaagcaaaaataaa

SEQ ID NO: 232945 - DNA, 1207 bp, Unknown
  Bacterial polypeptide expressing nucleotide sequence isolated from the Sargasso Sea
gttgactgtagctttacactatgtttttgacacccctaatgatagattaatttgggatgtaggacaccaagcatatccacataaaattttaacaggaagaaaacaaaaaattgatactttaagacaaggtaatggcttatcaggttttactaaaagatctgagagcgaatatgacccatttggtgcagctcatagttctacatctatatcatctgcacttggtatggctgaagcaaataaattagaaaacaaatcttcaaatgtaatagctgttattggggatggagcaattagtgctggtatggcatacgaagctatgaataacgctggggcatctaaaactaaaatgatcgttatattaaatgataatgatatgtctattgcaaaaccagtaggtgcaatgagaacatatttagcaaaattatttactggaaaaatttattttagcttaagagaaactttaaaattaatcacctcagctttttcaaaaagatttagtgctaaagctggtaaggcagaagatttttttcgttcagctgttacaggtggaacactatttagctcactaggtttttattatgcaggaccagtcgatggacatgatctttccacacttgtccctattttaagaaatgctagagactcaaagcatgagggtccaattatgatacatattaaaactcaaaaaggaaaaggatattcatatgctgaaaaagctagtgatcactatcatggagtatcaaaatttaatgttgaaactggagagcaacaaaaaagtggttctaatttacccgcttatacaaaagtttttgcaaatacacttgttaaacacgcaaaaaaagacagtaagattgtcggaataactgcggcaatgccaggtggaacaggtatggatatttttggtaaggaatttccaaaaagaatgtttgacgttggtatagctgaacagcatgcagttacttttgctgcaggtcttgcaacagaggggtataaaccctatgccgctatctattctacctttcttcaaagagcttatgatcaagtagtacacgatgtagcaatacagagtctacctgtaagatttgcaattgatagggctggtttagttggtgcagatgggtcaacgcacgcaggctcttttgatattacttatttgtcaactttaccaaattttatcgtaatggcagctagtgatgaagctgaatta

SEQ ID NO: 232946 - DNA, 1633 bp, Unknown
  Bacterial polypeptide expressing nucleotide sequence isolated from the Sargasso Sea
aatgagtaaagcaacaaaacaggattataaatttctaaataatattgatacccctaaggatattaaaaaattaactagtaatgaattagaaattttatgtgaagaggtacgatcatttatgatagataacgtatctaaaacaggtgggcaccttggtgctggactaggagtagtagaactaactgtaggcttgcattacatttttaatactccaaaagatcaaataatttgggatgtaggccatcaaacttatcctcataaaattttaactaaaagaaaaaataggatgcatactttaagacaaggaaaagggttgtctggttttacaaagagagctgaaagtatatatgacccttttggggccgctcatgcatctacctcaatctctgctgctcttggaatattggtaggttcagaaataagaaaaaaaaataaaaaagttgtagcagttataggagatggtgcaatgacagccggtatggcttatgaggcattaaataatgcaggtgctatgaagtatcctctaatagtaatattaaatgataatgacatgtcgatagcccctcctgtcggagccatgagtgcatatttatctaaattaatatcttctggacaatatagagggttaagaaatgttgccagtcaacttgtaaaaaaatttccaaaaaaaatagcaattacagcaaaaaaagctgaagaatatgccagaggtttttttactggaggaacattatttgaagaacttggtttttactatattggacctattgatggtcataacttaagtcatttattaccaatcttaaaaaatgctagagaccactccaaaaaaggacctgtactaattcacgtagtaactaaaaaagggaatggttatatacctgccgagaaatcagatgacaagttccatggtgtgggtaagtttaatgttttgacaggaaaacaaaataaatcagagagcaataagtcctacactaaaattttcgctgaaaacctaattgaattagcaaaaactgataaaaagatttgtgctattactgcagctatgcctactggtacagggcttgatttatttatgaaaaaatttccttctagaacatttgatgttggaatagcagagcaacatgctgttacttttgctgcaggtttagcatgtgaaggcatgaaaccttttgcaacaatttattctacttttttgcaaagagcatatgatcaagtagttcatgatgtagctattcaaaacttacctgtaagatttgcgatagatagagcaggtttagttggagcagatggagcaactcacgcaggatcatttgatatagcatttctatcaaacctaccaaattttataaccatggcagcatctgatgatttagagttagctagaatggttcatacatgcgctgacataaatcatgccccctctgcatttagatacccaagaggttcaggcctgggtctaaaaattaattatccagtaaaaaagcttattatagggaaaggaaaaatagttcaagaaggaaatgatattgctattatttcttacggggctagattacaagaagtaaaactagctgcaaaaaaactagaaagttataaagtttctaccactatagctgatgctagattctgt

SEQ ID NO: 232947 - DNA, 1099 bp, Unknown
  Bacterial polypeptide expressing nucleotide sequence isolated from the Sargasso Sea
aattttccagacgatttaaaaaacttaacatacgaacaactaatacaattgggcgatgaaattagaaatcgattaattgatattaccaataccgtaggtggtcatttagcatcaaaccttggagtagttgaaataaccctagctatgcacacattatttaatagtcctaccgataagtttttatgggacacttctcaccaaacatatgtacataaaatgttaacgggtcgcttaaacgacatgtataccattaaacaatacaaaggtttatccgggtttgctaaaattgctgaaagcgatcacgatacgtttggtgcagggcatgcttcaacatcgttatcagcagcgattggattagctcaagcaagaaatgcaaggaatgaaacccataatgttatttgcatacttggcgatggtggattatctggaggaatggcctacgaagcattaaataatataaaagaattaaaagggaactttatttgcatattaaatgataatgacatgtcaatttcacctccagtcggtgcaatggccaattatattacatcgatcagaacaacaaccgtgtatgatcaagtcaaaaataaatttgaacgaattttaaaccgtgttccaaaaataggaaccccattaaagcgtcgaattgaaaaaacagttgaacgcatgcgtagcacactattagatgttaaagctggtgttttatttgaagaatttggatttaaatatttaggcccaattgatgggcataacctaacagctgtaatggcagctttgcgttatgcaaaaacttatgatggccccataatgttgcatatgaatacaaccaagggaaaaggaatgagtgtggctgaaaaaaacccggtaaaataccatggagtttcaaagcaagctgatccatcaaaaccaacaccaaaaaaacgcccaacatatacacaatgttttggaagcgaaatcattaatattgcaaaagaaaatgaatccattcatgttataacaccggccatgcgcgaaggcagcggcttagtagaatatgaacaacagtttccaaccagatactatgatgtcggcatcgctgaagaacatgccattacatttg

SEQ ID NO: 232948 - DNA, 1678 bp, Unknown
  Bacterial polypeptide expressing nucleotide sequence isolated from the Sargasso Sea
atgaagaaaaattatcaatttttaaatgatataaattttccttctgatttaagaaaagtttctgaaaataatttacaaaaagttgcagacgaggtgagggaggaaatgatagatgctgtttcagaaaccggaggtcacttaggtgctggtttgggagttgttgaattgacggtagcacttcattacgtttttgatactccaaatgataaattaatatgggatgtgggtcatcaatcttacccacataaaattttaactggcagaaaagataaaattagaactttaagacaaggtgatggtttatcgggttttactaaaagatctgaaagtgaatacgatccatttggagcagcccatagttcaacatctatttcatctgcattaggaattgccgaggcaaataaattagaaaataaatcttccaatgtaatagctgtaataggcgatggagcaattagcgcaggcatggcttacgaagccatgaataatgctggagcatctaagacaaaaatgattgttattttaaatgataacgacatgtcaatagcaaaaccagttggtgctatgagaacttatttagcaaaattatttactggtaaaatatattttagtcttagagaaactttaaagttaattacatcagcattttcaaaaagatttagtgctaaagcaggaaaagcagaggattttttccgttctgcagttacaggaggtacattgtttagttcacttggtttttattacgcaggtcctatagatggacatgatttatcaagcttagtgccaatattaaaaaatgcaaaagactcaagacatgagggtcctataatgatccatattaaaactcaaaaagggaagggttattcttatgcagaaaaagcaaatgaccattatcatggagtgtcaaaatttaatgttgagactggagaacagttaaagagtaaatctaatcttccagcttatacaaaagtttttgctaatacgttagtgaaacacgcaaaaaaagatagcaaaatagttggaataacagcagcaatgccaggagggaccggtatggatattttcggaaaggagtttccaagtagaatgtttgatgtaggaatagctgaacaacatgccgtgacttttgccgctggtttagcaaccgagggatacaaaccatatgctgcaatttattctacatttttacagagagcatatgatcaagttgtccacgatgttgccattcaatgtttaccagttagatttgcgatagatagagcaggattagttggtgctgatggatcaacacatgctggttcatttgatataacttacttatcaactttacctaactttgtagtaatggcagcaagtgatgaagctgaactagttaaaatgattaatacttctgtagacataaatgacagaccttctgcaattagatatccaagaggaactggagtaggtgttgatctcccatcaatagacgaaaaaattgaaattggtaaagggagaatcgttcaacaagggacacaagtttgtattttaaacctcggtactcgacttgaggagtgcaagttagcagcagaggaattaaaagcaaaaggagtttcaacaactttgatagacgccagatttgctaagccgttagacgaagaacttgtactaaaatctgctaagcaacatgagcttatga

SEQ ID NO: 232949 - DNA, 1246 bp, Unknown
  Bacterial polypeptide expressing nucleotide sequence isolated from the Sargasso Sea
tctgggcatggcggtagcctctcaggaagaatcagagaaaaaaaatgttgcaattattggtgatggagcaatgacagctggaatggcatttgaagcattaagtcatacaggacacattaaaccaaatgttttgataattctaaatgataatgatatgtctatatctgaaaatgttggaggattgtctaattatttttcaagaatctgggcatctaaaacttacaaaggaataaaaaaaagtggagcaagttttctaaagccattaccacaggcgtatcatcttgccagaaaggttgagacacaaatgaaagctatggttgctcctggaacaatttttgaagaattaggtctcaattatattggaccaattgatgggcataatataaaagaacttcatgatgtgatttccaatcttatagaatttgaaggccctcagtttcttcatgttattactaaaaaaggtgctggattagatcctgctgaagcagacaggataggttttcacgctattggtaaaatcaattcaattaaacaaaagtcttcgaaagcaaaaaaatatcaagatatttttagtgactggattaatgatatggcagctatagataaagatcttattgcaataacgcctgctatgagagaaggatctgggttagtcacttttagtaaaaattatcctgatagatattatgatgtggcaattgctgaacaacatgcagttacattcggagcaggtttagctattggtggaaaaaaaccagtagttgctatctactcaacatttcttcaaagagcttatgatcaggttattcatgacgtagctgttcaaaatttaaatgttacttttgcacttgatagatctggattggttggagaagacggacctactcactcaggaaattatgatattgcatatttaagatgcattccaaacatgattatctgtactccagcagacgaaaatgaaacaaggttgatgctttcaacaggatttaactataaaggacctgcttcaattagatatccaagaggagttggtcctaacgttaaagtagataagaaactagatacagttgaaattggtaaagctagagtaattaatgaggcaggaaaagataaagttattcttaactttggatctctactgcatctagcaagagaaatatcagaaaaatttaaatttactcttattgatatgagatttgtgaagccactagatgaacaaattctaaaccaatatcttaaaaaa

SEQ ID NO: 232950 - DNA, 453 bp, Unknown
  Bacterial polypeptide expressing nucleotide sequence isolated from the Sargasso Sea
tatgcagcttaaatatttaaagaatattcaaactccaaaagatattcgagattataatatagaacaattaagagagctttgtgatgaaatcagaaattatacaattgataccgtcacagctgtaggcggtcatttagcgccaacattaggggcaattgaacttacagttgctttacattatgtatttaatacaccaaaggataaattaatttgggatgtcgggcaccaagcttatgcacataaaattttgaccggacgttttgacagtatgaatacgataagacaatttggcggtctaagtggattcttaaaaaggaccgaaagtgaatatgacgtttttggagctggacatgcttctacttctatttcagcagcattaggtgttgctgctgctagagatcaaaataatcaagactttaaagtttctgcaataattggggatggatcgttaac

SEQ ID NO: 232951 - DNA, 1095 bp, Unknown
  Bacterial polypeptide expressing nucleotide sequence isolated from the Sargasso Sea
aatgtcaaaacaagatatattggatagggtcaattttccaagtgatcttagaaaattaactgataatgatcttaatcacttggctaatgaattaagacaagaaaccatttcaattgtttctaaaacgggtggtcatctaggttcaagtcttggtgttatagaactaactatagcgattcattcggtatttaacactcccttcgataaattgatttgggatgttagtcatcagtgttatccccataaaattcttacgggtagaagaaagggcatgatgacattgagacaagataaaggcttgtcaggttttactaagagaactgagagtgaatacgacccttttggtgcagcacattcttcaacatcaatttctgcagctttaggttttacagtagcgcgtgatcttggttctagtgtaggggattcaattgcggttattggtgatggatcaataagtgctggtatggcttatgaaggtttaaataacgcaggatccgaaggtaggagattatttgttattttaaatgataatgaaatgtctatagctcctccagcaggtgcaatgtcaaagtatttgtcaagtttatatgcaaataatgaattctacagccttacaaaattagcagaaggtttagcaaaaaatctacctggcccattacaggaaggtgcaagacgtgcaaaaagtataattacaggtcttgcttctggtggtacatttttcgaagaattaggattttcttacttagggccaattgatggtcatgatttgaatcaactattaccagtattaagagcagtaaagactagagcaaaaggccccattctaatacactgtgtaacaaaaaaaggcaaaggttattatccagcagaaaactccgctgacaaatatcatggggtatcaaaatttgatattagttcaggggagcaaagtaaatcaaaacctaatgctccttcttacacatcggtatttggaaaagccttagttagtgaagcttctagagatcatcgtattgttgcagttactgctgctatgccatctggtactggagttaatctaatgcagaaagaatatccacaaaggacatttgacgttgg

SEQ ID NO: 232952 - DNA, 1273 bp, Unknown
  Bacterial polypeptide expressing nucleotide sequence isolated from the Sargasso Sea
agcttttttaaaagatttagtgctaaggctggtaaagcagaagatttattaagatcagctgtgacaggtggaactttgttcagttcactcggattttattacattggcccaatagatgggcatgatttaaattcgttaattccaattttaaaaaatgctagagactctaagcacgaaggaccaattttaattcacattaaatcaaaaaaaggaaaaggttatacttttgcagaggcagcgaaggacaattatcacggagtatcaaaatttaatgttaaaactggtgaacaacttaagagtacaagtaaattaccatcatatacaaaggttttcgcaaacaccttaattcaacatgctaaaaaggacagtaaaattgtagctattacagctgcaatgcctgatggcactggtcttgatatttttcgtaaagaatttccagataggacttttgatgttgggattgctgagcaacatgcagttacatttgctgcaggtttagctaccgaaaactttaaaccctatgcagctatttattccacttttcttcaaagagcttatgatcaagtagttcatgacgtagcaattcaaagtttaccagttagattcgcgattgatagagcgggacttgttggggctgatggaccaacacatgctggaagttttgatacaacatatttaactactttaccaaattttattgttatggcagcaagtgatgaagcagagcttgtaagaatgataaatacctcaacggagattaatgatagaccttgtgcgtttaggtatccaagaggaacaggattaggttcaattttgccttcaataaatgagaaaattgagatagggaaatcaaaaattatcaaagagggaaaaaaattagctatccttaattttggagcaagattgaatgaaactttgaaggctgcagaaaatttattaaaaaaaggtgtgccaataacagttgttgatgcaaggtttgctaaacctttagacgaaaatcttatttggcaattagctacaactcatgaagcgatcatgactatagaggagggttcaattggtggttttggatctcatgtggtaaattttttgacaaaaaaaggtttaatggactctaatttaaaatttagatcattaacgttaccagatatttttattgatcaggatactccagataaaatgtataaagtggcaaatcttgactcagtttcaattgaggaaaaagttttagatttacttaattctaatatagttttgaaaaaacaaaattaac

SEQ ID NO: 232953 - DNA, 799 bp, Unknown
  Bacterial polypeptide expressing nucleotide sequence isolated from the Sargasso Sea
ttcacgtaagtttccggaccgctacttcgatgtggcgatcgccgaacagcacgcggtgacgtttgctgccggtctggcgattggcggctataagccggtcgtggctatttactcgaccttcctgcagcgcgcctacgatcaggtgctgcatgatgtcgccatccagaaactgccagttctgttcgccgttgaccgggcaggaattgttggcgcagatggacaaacccatcaaggggcgttcgatctttccttcctgcgctgcatcccggaaatggtcattatgaccccgagtgatgaaaacgaatgccgtcagatgctgttcaccggctatcactacaacgacggtccaacggtcgtgcgttatccgcgaggtaacgcggtgggcgtagagttgaccccgctggaacaactgcctatcgggaaaggtatagtgaaacgtcacggggagaaagtggcaattctcaacttcggtaccctgatgccggaagccgctcaggtcgcagagtcgatgaacgccacgctggtcgatatgcgttttgtgaaacccctggatgaaacgttgatccttgaaatggctgcccaacacgaggtgctggttaccattgaagagaacgccattatgggtggtgctggcagcggtgtaaacgaagtgctgatggcccatcgtaagcccgtcccggtgctgaacattggcctgccagacttcttcatcccgcagggaactcaggatgaagctcgtgccgatctgggtctgaatgccgtcggaattgaggccaaaatcaaggcctggctggcataa

SEQ ID NO: 232954 - DNA, 1657 bp, Unknown
  Bacterial polypeptide expressing nucleotide sequence isolated from the Sargasso Sea
aagaaaaagtaaaattagaactttaagacaaggaaatggattatcaggatttactaaaagatcagagagtgaatacgatccttttggtgctgcccatagctcaacatctatatcatcagctcttggaattgcagaagcaaataagttggcaaataaatcatctaatgtaattgctgttattggtgacggagcaattagtgcaggtatggcctatgaggcaatgaacaatgcaggagcatcaaaaactaaaatgatagttattttaaatgataatgacatgtctattgctaaaccagtaggagccatgagaacttatttagcaaaattatttactggtaaaatatactttagtttaagagagacaataaaattaataacttcagctttttcaaaaagatttagtgctaaggcaggtaaagcagaagattttttacgttctgctgtcacaggaggtaccttatttagttctttaggtttttattatgtaggtccaattgatggctatgatttaaatactcttataccaattttaaaaaatgctagagattctaagcatgaaggtccaattatgattcatattaaaacccaaaaaggaaaaggttattcatatgcagaaaaagcatcagatcattatcatggtgtttcaaagttcaatgttgatacaggtgagcagttaaaaagtggaagtaatgttccagcctatacaaaagtttttgctaatacattagttaagcatgcacaaaaagatagtaaaattgtaggcataacagcagctatgccaggtgggacaggaatggatatttttggaaaagaatttccaaaaagaatgtttgatgtaggtatagcagaacaacatgcagtaacttttgctgcaggtttagctacagaaggttataagccctacgcagcaatttattctacgtttttacaaagggcctatgatcaagttgttcacgatgttgctattcaaagtttgccagttagatttgcaattgatagagctggattagttggggctgatggatcaacacacgctggttcatttgatataacttatttatcaactttacctaattttattgttatggccgctagtgatgaagctgagttagtaaaaatgataaatacttcaattgatataaataataaaccttgtgctataagatatccaagaggaacaggtattggagttgaacttccttcaatagatgaaaaaattgaaataggaaaaggaagaattattcaagaaggaaaacaagtttgtattttgagcttaggaacaagacttgaagaatgtaagttagcagcagaagaattaaagaacaaaggtgttttaactacaattattgatgcaagatttgccaaacctttagatgaagaacttatattaaaatgtgcaagagagcacgacgttatgataaccatcgaagagggatctattggtggttttgcttctcacgttaaaaatttactggctgaaaaaggtgtgtttgataaaggtctaaagtttagatcaatgacattgccggacacttttattgaacaagataatccaaaaaaaatgtacgatctggcaggcttaaattcatctcaaatttcgaaaaaaattttagatattttatttacaaaagaatcgataaaaataattaaaaattaa

SEQ ID NO: 232955 - DNA, 1459 bp, Unknown
  Bacterial polypeptide expressing nucleotide sequence isolated from the Sargasso Sea
aatgaagaaaaattataaatttttaaataatattaattttcctagtgatattaaaaaattgtctcaaaatgagttaaaaacacttgctcatgaggttagagaggaaatgatagatgctgtttctgaaactggtggacatcttggagcaggtttaggtgtggtagaattgacggtagttcttcattatatattcaatacccctaatgataaattgatttgggatgtaggacaccaatcatacccacataaaattctaactggacgtaaagataaaattagaactttgagaaaaggaaatggtttgtcgggttttaccaaaagggccgaaagtgaatacgatccatttggtgcagctcatagttcaacatcaatatcatcagccctaggaatagccatagcaaacaaattatcaaataaatctgacaacgtaattgctgtaataggtgatggagcaattagtgcaggtatggcatatgaggcaatgaataatgcaggatcaagtaagactaaattaattgtaattttaaacgataacgatatgtcaattgcaaaacctgttggagcgatgagagcatatttggctaaaattttcactggtaaaatttattttagcttgagagaaactgttaaacttataatttcagctttctcaaaaagatttagtaaaaaagctggaaaggcagaagattttttacgttcagctgtgactggaggaactttatttagttcaatgggtttttattacgtagggcccatagatgggcatgatatagacgctctggtttcagttttaaaaaatgccaaagatgtaaattatgagggtcctattatgatccatataaaaactcaaaagggcaaaggttatagtttcgctgaaaagtcagaagataaataccacggggttacaaagtttaatgttagcacaggcattcaagaaaaatcaaaatctaacgcaccttcttacaccaaagtctttgcaaatacattagttaaacatgcagaaaaagatagtaaaataattggaattacggctgcaatgccatcagggactgggatggatatttttggtaagaaatttccatctagaatgtttgatgtaggtattgcagagcagcatgcagttacatttgctgctggattagcaacagagggatttaagccctatgctgcaatttattctacattccttcaaagagcgtatgatcaagttgttcatgatgtagcaattcagagtttgccggttagatttgcaatagatcgagctggacttgttggtgctgacggaccaacacatgctggatcatttgatattacttacttatcgacacttcccaattttgttgtaatggctgcaagtgatgaatctgagttagtaaaaatgattaatacttcaattgatatcaatgataggccatcagcttttagatacccaagaggaaatggaattggtatagaactc

SEQ ID NO: 232956 - DNA, 1398 bp, Unknown
  Bacterial polypeptide expressing nucleotide sequence isolated from the Sargasso Sea
gaaattggaggacatttggctcctactttaggtgtgatagaattaactacagcattgcactacgtttacaatacgcctgaagataaactagtatgggacgttggccatcaggcttatgctcacaaactgctgactggacgatatgaggaatttcctagtataaggcaatatggtgggctaagtggttttttaaaacgtagtgagagcgagtatgatgtttttggggcgggacacgcctctactgcaatatctgctgcgcttggggttgctgaggcgcgttatcaaaaaaaagataaacatcgagcggtggctattattggagatggtgctatgactggaggtttggcttttgaggctataaataacgctggacatcttggtagacagattaccgttatattaaatgataatgagatgtctattagcccaaatgttggtgcaataagtaaatactttacaagattgattgctaatcccacttataacagacttaagacagaggcatgggaattaacaaaaaagcttcctcttgcaagaggaacaattcaagcgtttcttagtagattagataaaagtataaaaaatattattgttcctggaatgctctttgaagaaatgggatttcgctattttggtcctattgatggccatgacttagatgagttaattaaaaccttagatacaataaaagatatcgaaaaacctgtgttgctacatgtcatcaccaaaaaaggcaagggtatgtctgtggctgaggataatcctgtaaaataccatggtgtaaaagctaacgggaagagtaacggtagtacaaaaaaacttataaaacagtcagaggtaccatctttccaagatgcttttggttatttatcatgtgaaattgcagaaaacagaaaagatacagtctgtattacagcagcaatgcgtgagggtacagggctagttccttttgagaaaaaatttccagaaagatactatgatgtcggaattgctgaaggtcatgctgttacattttctgctggtttagcaacacaaggaattcgtcctatagttgccatatactcaacatttttacaaagggcatttgaccatatagtccacgatgtttctgtccaaaatctgcctgtcatattctgtatggatagatctggaattgctggagaagatggccctactcaccacggtgctttggatataccatattttcgttgcatacaggggatagttttaacggctcctaaaaatggaaatgaattacgaaatttgttatacactgcgttaaaccataatggtccttttggtataagatatccaaaatttagttctatagaatttgatagaaatggtcaagctgatcttttgccaattggttcttgggaggtggaaaaaaaaggtgga

SEQ ID NO: 232957 - DNA, 832 bp, Unknown
  Bacterial polypeptide expressing nucleotide sequence isolated from the Sargasso Sea
atgagtaagttactagatattgttgatagtccccaggatttaaaaaatttacctgttgataaactacccgatttggcaagggagatacgtgacatgcttttggatactatttccaagacaggaggtcacctctcatctaatttaggcgtagtcgagttgacaatggcaatgcattacgttttcaacagtccgaaggataaatttgtttgggatgtgggacatcaatcttatgtgcataaactgttaacaggaagaaaagacagattcggtacgcttagacaatatgatggcctctgcggatttactcggcgagaagaaagtgagcacgaccactggaattgtgggcatggcggcacatctatttctgctgccctagcatttgcaaaggcccgtgatttaaaaaacgaagaccacgatgtccttgctgttattggcgatggctccttgacagcaggaatggcttttgaagggttgaatcatacgggtcatgttcaaagcgatatgattgttgtgcttaatgataatgaaatgtctatttcagctaatgttggaggcatgtctgcgcatttaagtaaaattatgacaggacaggtcatgcttaaaatcaaacaggaaattgatcaacttctactttctgttccaggtattgggaaagatatctctcgttatgctcacaaaatagatgaagcgataaaaggagtgtttattcccgggcgtttatttgaagatctcggatttcgctatgtagggccaatagacgggcacgatgtgaaagggcttatcgatacctttgctgcagttaaagacctaaaaggtccaacactcatgcatg

SEQ ID NO: 232958 - DNA, 1669 bp, Unknown
  Bacterial polypeptide expressing nucleotide sequence isolated from the Sargasso Sea
aatgaaaaaagaatatgaatttttaaatcaaataaattttccttcagatttaaagaagatacctgagtcgaagttacaaaaagtagctgatgaattaagagaggaaatgatagatgcggtatcagtcactggaggccatttaggggcaagccttggagttgttgaactaagtgttgcgcttcattttatttttaatacccctcatgacaaattaatttgggatgtaggacatcagtgctacccacataaaattttgactggaagaaaagataaaataagaacattgaggcaaggaggtggtctatcgggctttacgaaaagattagaaagtgaatatgatccttttggtgcagctcatagttcaacttcaatctcctcagctttaggtatagctgaagctaatagactttcaaataagtctgataatgttattgcagttattggtgatggggccatcagtgcaggtatggcttatgaagctatgaacaatgctggtgcatctaaaactaaaatgattgtcatattaaatgataatgacatgtctatagctagacctgttggagcaatgggcacttatttagctaaaattttttcaggtaaaatttattttagtcttagagagactattaaattaattacatctgctttttcaaaacgatttagtgcaaaagcaggcaaagctgaagacttgcttagatctgctgtaacaggtggtacgttatttagttcactaggattttattatattggcccaattgatgggcatgatttaagctctttagttccaatcttaagaaatgctaaggactcaaagcatgagggacccattttaattcatattaaaacaaaaaaaggaaaaggatattcattcgctgagcaagcaaaagataactatcatggagtttcgaagtttaacgtaaaaactggagagcaaattaaaagtattaacaaaacaccatcatataccaaagtatttgcagatactttgattcagcatgcaaaaaaagatagtaaaatagttgctattactgctgcaatgcctgatgggactggtttaaatagtttccgtaaagaatttccagaaagaacttttgacgtaggaattgcagaacaacatgcagttacgttcgctgctggtttagccactgaaaattttaaaccttacgcagcaatatattcaacttttcttcaaagggcttatgatcaagttgttcacgatgtagccattcaaagtttaccagtacgatttgcaatagatagagcaggtttagtgggtgcagatggaccaacccatgcaggaagttttgatataacttacttatcgacattgcccaattttgtagttatggcagctagtgatgaggctgaattagtaagaatgataaatatctcaacagaaataaatgatagaccctgtgcatttagatatccaagaggtataggactaggttcagttttaccttcaattaacgagaagatagagataggtaaatcaaaagttattaaagaaggaaaaaaattagctatcttaaattttggagcaagattaaatgaaactttaaaagcagctgaaaatttaaaaaaaaagggaatagacataacaattgttgatgcaagatttgtaaaacctttagatgaaaatttaatttggcaacttgcaaccaccaca

SEQ ID NO: 232959 - DNA, 1510 bp, Unknown
  Bacterial polypeptide expressing nucleotide sequence isolated from the Sargasso Sea
ttttggtgctggacattccagtacgtctataagttcagcagttggtatggctattgctaacaaattaaatgagggagagaaaaagacagttgctattattggagatggtgcaatgactgccggaatggctttcgaagcaatgcaacatgctggaggaataaagccagatatgctgataatcctaaatgataatgacatgtcaatctctgagaatgttggaggcctaaataattacttctctagaatatgggcttccaaactttataaagggattaaaagtaatggtaaaaagttcttaaagaatatccctgctgctcatcatctagcccgtactgttgaaactcatatgaaaacaatggtagcgccaggagctatttttgaggagcttggactaaattatattgggccaattgatggtcatgatattgatcaacttttgaatgtaattggaaatctaaagaattttgaggggccacagttccttcacataattacaaaaaaaggtgctggatatgatttagctgaagaggacagaattaaatatcatgcaatctctaaaacacaaactccaaaaagcacagaaaaaataaaaccaaaatatcaagatatattcagcaattggatagttgatatggctaaagaaaatatagatttagttggagtaactcctgccatgagagagggatctggattggttcaatttagcaaagaatatccagaaagatattttgatgttgccatagcagaacaacatgctgttactttgtccgctggattggcatgtgaaaaaaagaagcctgtcgttgcaatttattctaccttccttcaaagagcctatgatcaggttattcatgatgtggcactacaaaatctagatgtcacttttgcaattgacagagcaggactagtcggtgaagatggaccaactcactcaggtaactacgatcttgtctacttaaggtgtataccaaatatgatagtgatgactccatcagatgagaatgagaccagaaagcttttaacaactggttttttgtatgatggccctgcatcaataagataccctagaggaactggtcctaatattgaggttgaagataatttggtaccagttgaaataggtaaaggaaggctaattagagaaggatcaaaagatttgattatcctaaattttggggctttactcgatcaagcaaaagaagtggctgattttttaaacttcacgctaattgatatgcgttttgttaagcctcttgatgaagatattctcaaaaaatatttattagaagcaaagttatttgtttcaattgaagacggatcaattgcaggcggagcaggaagtgctgttcaagaattttgttcgaataataatattaatattcgatctaaactctttgggattcctgatatatttattgaacatcagtctagagatgaaatgattgaggaatgtggtttaaatgcctctagaataatagaacagatacaggaattagaatcacaagagtga

SEQ ID NO: 232960 - DNA, 265 bp, Unknown
  Bacterial polypeptide expressing nucleotide sequence isolated from the Sargasso Sea
gatgatacataaaagcacatttttaaaagatataaattttccatctgatttaagaaaaatttctgaaaaggatttaccaaaagttgtaaatgaagttagaaatgaaatgatagatgctgtatctcaaacaggtggtcatttaggtgcaggtttaggtgttgtagaactaactgtggcacttcactatgtatttgatacaccaaatgataaattaatttgggatgttggacatcaatcatatccacacaaaatttttaacaggtag

SEQ ID NO: 232961 - DNA, 1291 bp, Unknown
  Bacterial polypeptide expressing nucleotide sequence isolated from the Sargasso Sea
tctgcactaggaattgctattgcaaataaactttctataaaaacagataatgttatagcagtaataggagacggcgcaataagtgcagggatggcttatgaggcaatgaataatgcaggagccagtaaaaccaaaatgatagttgttttaaatgataatgatatgtcaatcgctaaacctgttggagcaatgagaaagtatttggcaaaaattttatctggaaaaatatattttaattttagagaaactattaagcttataatatctgctttttcaaaaaggtttagcaagaaggctggaaaagctgaagattttttaagatcagctgttactggtggaactttatttaattccatgggttttcattatattggaccaatagatggacatgatacagatacattagtttcagtattaaaaaatgcaaaagaaataaaatatgaaggccctattttggttcatattaaaactgaaaaaggcaagggttataaatttgccgaaaaatcaaaggataaatatcatggtgtttcaaaatttaatataaatacaggcatacaggaaaaatcaaaatctaatataccctcatatacaaaagtttttgcaaatacacttgtcaaacatgctgaaaaagatagtaaaattattggtgtaacagcagcaatgccatcaggaactggtatggatatatttgctgaaaagtttccttctagaatgtttgatgtaggaatcgccgagcagcatgcagtaacttttgccgcaggactcgcaacagaaggattcaaaccttttgctgcaatttattcaacttttttacagagagcttatgaccaagttgttcatgatgtagcaattcaaagtttaccagtaagatttgcaattgatagagctggactagttggggctgatggcccaactcacgctggatcgtttgatattacatatctttctacacttccaaattttgttgttatggcagcaagcgatgaagcagatttagtaagaatgattaatacagcagttgatataaatgataaaccttcagcatttagatatccaagaggaaatggaataggagtagatttaccaaacataaatgaaaaaattgaaattggtaaagcgagagtgatttcagagggtaaaaaagttgctttactaaattttggtggaagactaaatgaatgtttaatcgcaaaagaaagtcttgtaaaaaaaggaataaatataactttgatagatgcaaggtttgccaaaccgcttgatgaaaatttgatgtggcaaatatctaccgacc

SEQ ID NO: 232962 - DNA, 1141 bp, Unknown
  Bacterial polypeptide expressing nucleotide sequence isolated from the Sargasso Sea
aatgcaaaattataaatatttaaataatattaattttccttcagatataaaaaaactgaataatgaagaattaaaagttctatcagaagaagtaagaagcgaaatgattgatgctgtttcaaaaacaggtggtcatctaggcgcaggcttaggtgttgtggaattaacagtagcacttcactatgtttttgacaccccaagggacaaattgatatgggatgttggtcatcaatcataccctcataaaattttaacaggaagaaaagataaaatacgaactttaagacaaggaaatggattatctggctttacaaagcgatcagaaagtgaatttgacccctttggtgcagctcatagttctacttctatttctgctggacttggcatcgcaacagcaaataaactatcaaataaatcagatcaggttatagcagttattggtgacggtgccatgagtgcaggaatggcatatgaagctatgaataatgcgggggactcaaaaacaaaaatgatcgtaattttgaatgacaatgatatgtcaattgcaaaaccagttggcgcaatgaaatcttatcttgctaaaattttttcaggtaaaatttattttagtttcagagaaacagttagaatgattatttcatccttttcaaaaagatttagcaaaaaggctggaaaggctgaagattttttgagatcggctgtcacagggggtacattatttaattcgttaggtttttattatgttggtccaattgatggtcatgatttagatgttttattgccaattttaaaaaatgctaaagaaagtaatcataatggtccaatactaattcatataaaaactcaaaaaggcaaaggatatagttttgctgaaaaatcagatgataagtatcacggagttacaaaatttgatgttcaaactggagttcaacaaaaatcaacaaccaaggctcctgcttttacaaaggtatttgcaaatacgttaattgagcatgcaaagaaagacagtaaaattgtaggtataactgcagctatgccgtctgggacaggaatggacgcatttagtaaaattttctcagatagaacttttgatgttggaattgctgaacaacatgctgttacttttgctgcagggtttagc

SEQ ID NO: 232963 - DNA, 1436 bp, Unknown
  Bacterial polypeptide expressing nucleotide sequence isolated from the Sargasso Sea
aatgaaaaaatataaatttttagataatgtaaattttccatcagatataaaaaatttaaaatcctcagaattaataacgctgtcaaaggagttaagagaagaattgatagaggctgtttcatttacaggtggtcatttaggtgcaggtttaggagttgttgagttgacggtagctttacaccatgtttttgatacacctaatgacaaaatagtttgggatgtcggccaccaatcgtatccacataaaattttaacaggtcgtaaaaatagaatcaaaacattgagacaaggaaatggactatctggtttcacaaaaagatctgaaagtgaatatgatccatttggtgcagcacatagctcaacatcaatttctgcagctttaggtattgctactgcaaataaactttcaaaaaaatcagaaaatgttgtggctgttattggcgatggagcgatcagtgctggaatggcttatgaggctatgaacaatgcaggcatatcaaaaactaaaatgatagtaattttaaatgataacgacatgtcaattgcagaacctgtgggtgcaatgagaagttatttagccaaactattgactggtaaaatatattttagtctaagagagacgtttaaattaattatttctgccttttctaaaagattctcaaaaaaagctggaaaggcagaagattttctaaggtcagcagtaacaggtggaacactttttaattcactaggtttttattatgttggaccaatagacggacatgatattgatacacttatttcagttttaaaaaatgcaaaagatactaactttgacggtccaataatgatacatattaaaactgaaaaaggaaaaggttatcaatttgcagaaaactcaaaagataaataccatggtgtttcaaagtttaatataaaaaccggagtacaagaaaaatcaaattctaaaattccatcatatacaagtgtttttgcaaatacattaattaaacacgctgagagagatagtaaaataattggtattactgctgcgatgccatctggaactggaatggatttatttgcaaaaaaatttccaaatagaatgtttgatgttggtattgcagaacaacacgcagtgacattttctgctggtttagccacagaaggattcaaaccttatgcagcaatttattctacctttttacaaagagcctatgatcaggttgttcacgatgttgcaattcaaagtttacctgtcagatttgctatagaccgggcaggtcttgttggtgcagacggtcctacacatgctggatcttttgatataacctacttatcaaccctacctaattttgtagttatggctccaagcgatgagtcagaattagttaaaatgattaatacctcagatgatattaatgacaaaccgtcagcttttaggtaccctcgtggaa

SEQ ID NO: 232964 - DNA, 1192 bp, Unknown
  Bacterial polypeptide expressing nucleotide sequence isolated from the Sargasso Sea
ctgggcatggcggtggcgcgcgacatgcagggcaagagcaaccacgtcgtcgccgtcatcggcgacggcgccatcaccggcggcatggcgtacgaggcgatgaacaacgcgggctacctcgacacgaacatgatcatcatcctgaacgacaaccagcaggtgtcgctcccgacgcagtacaactccctgaaccaggatcccgtgggcgcgctgtcgagcacgttcgcgcgcctgcagagctccaagcccctccgcgagctccgcgagagcgccaaggcgatcaccaagcagatgccggtgcccgtgcaggaggtcaccgcgaaggtggacgagtacgcgcgcgggatgatcagcggcagcggctcgacgctgttcgaggagctcgggctgtactacatcggcacggtggacgggcacaacctgaaggacctcgtggcgattctgcaggaggtgaaggcgacgcgctccgtcggccccgtgctgatccacatcgtcaccgagaagggccgcgggtactcgtacgcggagtccgcgcaggataagtaccacggcgtggcgaagttcgacgtcgcgagcgggaagcagaagaaggcgagcggcgggatccccacgtacacgcaggttttcgccgacgcgctcatcggcgaggcgaggcgggacgagaacgtcgtcgccgtgcacgcggcgatgggtggcggcaccggcctgaaccacttcgagaagtactacgccgaccgcacgttcgacgtcggcatcgcggagcagcacgcggtgaccttcgcggcggggctcgccgtcgagggcctgaagccgatgtgcacgatttactcgacgtttttgcagcgcggcttcgaccaggttgtgcacgacgtcgcgcttcagaagctccccgtgcgcttcgcgatggaccgcgcgggcctcgtcggcgaggacgggcccacgcacgcgggcgcgtacgacgtcgcgttcatggcgtgcctcccggacatggtcgtgatggcgcccatgaacgaggcggagctgtgccacatggtggcgacgtccatcgccatcgacgaccgcccgagctgcttccggtacccgcgcggcgccggcgtcggcgtggacctggagctcgagggcgtggagctgacgaacccggggtaccggggacgggtgatcgagatcggcaaggggcggatcctggaggagg

SEQ ID NO: 232965 - DNA, 1747 bp, Unknown
  Bacterial polypeptide expressing nucleotide sequence isolated from the Sargasso Sea
actatagcattgcactacgtctttgatactcctaatgataaaattatttgggatgttggacaccaaacctatccccataaaatattaactggcagaaaagataaaataacaactcttagacaaggtaatggcctttcaggttttacgaggaggtctgaaagcgaatatgatccatttggtgcagcacatagttcaacatcaatttcagccgcgcttggtattgcaacggcaaacaaattagaaaaaaaaactaatcaagttgtagcagtaattggagatggagcaataagtgcaggtatggcttatgaagcaatgaataatgctggatcttcaaaaacaaaaatgattgtaatattaaatgataacgatatgtcaattgcaaaacctgttggagcaatgagtacataccttgcaaaaattctatcaggaaaaatttactttagcttaagagaaacaattaaactaataatttcagctttttcaaagagatttagtgataaagcaaaaagagcagaagatttattaagatcagtagtaacaggaggaactttatttaattcattaggtttttattatgttggtccaattgatggttatgatttagataatctaatttcagttttaaaaaatgcaaaaaaactaaaccatgaaggaccaataatgattcatataaaaactgaaaaaggaaaaggatatgaatttgctgaaaaatcagatgataaatatcatggagttacaaaatttaatgttaaaactggaattcaagaaaaaagtaaatccaatgtaccatcatatacaaaggtttttgcaaaaaccttgattaagcatgccgaaaaggatagcaaaattattggaataacggcagcaatgccgtctggtactggtatggatttattttctgaaaagtttccacatagaatgtttgatgtaggaattgcggaacaacatgctgtaacttttgctgctggattggcaacagaaggttataaaccttacgcagcaatatactcaacttttttacaaagagcttatgaccaagttgttcatgatgtggcaatacagaaccttcctgttagatttgcaatagatagagctggacttgtgggagctgatggaccaacacatgcaggatcttttgatattacatatttatcgacacttccaaactttattgttatggcagcaagcgatgaagctgaacttgttagaatgattaatacatctgttgatataaataataacccatctgctttaagatatcctagaggaaatggtataggagttgatttgccagatattgatgaaagaattgaaatagggaaaggaagattaatcttagaaggaaaaaaagttgcaataattaattttggagcaagattgaatgaatgtttattagccaatgaaatgttaaataaaaaaggtattggaattacattagttgatgcaagatttgcaaaaccacttgatgaaaatttaatttgggaaatcgcaactaaccatgaagcaataattacaattgaagagggatcattaggaggatttggttcgcatgttagtcaatttttgtcagaaaaaaaattattagataataacttaaagtttagatcaatgattttaccagataagtttattgatcataataagccagaaattatgtataaagaagcaggtcttgatgctgaggcaatagtttcaaaagtttttgatgttttaaattcaaaagttattttacaaaaacaaaattaaa

SEQ ID NO: 232966 - DNA, 1615 bp, Unknown
  Bacterial polypeptide expressing nucleotide sequence isolated from the Sargasso Sea
tcgggctttccgaagcgcgacgagtcggaatacgacaccttcggcaccgcccactccagcacctcgatttcggccgcgctcggcatggccgttgccagcaagctgcagggcgagaaccgcatgggcatcgccgtgatcggcgacggcgcgatgacggccggcatggctttcgaggcgatgaacaacgccggcgtcgaagacgacgtgccgctgctggtcatcctgaacgacaacgacatgtcgatttcgccgccggtcggcgcgctgaatcgccatctggcgcgcctgatgtcgggccgcttctacgccgccgcgcgtgcgggtgtcgaacgcgtgctgcgtgtcgcgccgcccatgctcgatctcgcgcgcaagctcgaagagcacgcgaagggcatgatcgtgccggccacgctcttcgaagagttcggtttcaactacatcggcccgatcgacggtcacgatctcgattcgctgatcccgactttgcagaacatcaaggagttgcgtggtccgcaattcctgcacgtcgtgacgaaaaagggtcagggctacaagctggccgaagccgacccggtgctgtaccacggcccgggcaagttcaatccggctgaaggcatcaagccggccaccacgccgtcgaagaagacctatacgcaggtgttcggcgaatggctgtgcgacgcggccgagctggacgcgcgcgtggtcggcatcacgccggccatgcgtgagggctcgggcatggtcgagttcgagaagcgcttcccggatcgctacttcgacgtcggtattgccgagcagcacgcggtgacgttcgccggcggtctggccgcggacggcatgaagccggtggtcgcgatctactcgaccttcctgcaacgtgcttacgatcagttgatccacgacgtcgcgttgcaaaacctgccggtggtgttcgccatcgaccgcgcgggtctggtcggcgcggacggcgcgacgcacgcgggcgcttacgatctggcgttcatgcgctgcatcccgaatatgacggtgatggccgcatcggacgaaaacgaatgtcgtcagatgctgtacacggcattgcagcagccgaacccgacggcagtgcgctatccgcgcggcgccggcacgggcgtggccaccgtcaagcagatgacggcgctgccgctcggcaagggcgagattcgtcgcgaaacgtcgcaaccggccggcaagcggatcgcgattctggcgtttggcacgatggttgcaccttcgctcgcggcggctgagcaactggacgccacggtggcgaacatgcgcttcgtgaagccgctggacgccgagctggttcgccaactggctgaaacgcacgacgccatcgtcacggtcgaagaaggctgcgtgatgggcggcgcgggctctgcctgcgtcgaagccctgcttgagagtggggttatgcgacccgtactacaattgggccttccggatcgcttcatcgatcatggggatccagccaaactgctcgccgcgtgcggtctcgacgctacgggcatcgcaaagtcgattcgcgaacgctttctttccagcggcgcggtcgccggtcagtcctcggtgaagcgggttgcttaac

SEQ ID NO: 232967 - DNA, 572 bp, Unknown
  Bacterial polypeptide expressing nucleotide sequence isolated from the Sargasso Sea
cttgagaaaattaactgataatgatcttaatcacttggccaacgaattaaggcaagaaactatttcaattgtttcaaaaacgggtggtcatttaggctcaagcctaggtgtgatagaattaactatagctattcattcggtatttaacactccctttgatagattggtttgggatgttagtcatcagtgttatccccataaaattcttacggggagaagaaaggacatgttgactttgagacaagataaaggattatcaggttttactaagagaactgagagtgaatacgacccttttggtgcagcacattcttcaacatcaatttctgcagctttaggttttacagtagctcgtgatcttggatctagtgtaggggattcaattgcggttattggtgatggatcaataagtgctggtatggcttatgaaggtttaaataatgcaggatctgagggcagaagattatttgttattttaaatgataatgaaatgtccatagctcctccagcaggtgcaatgtcaaaatatttgtcaagtttatatgcaaataacgaattctacagcctaacaa

SEQ ID NO: 232968 - DNA, 1522 bp, Unknown
  Bacterial polypeptide expressing nucleotide sequence isolated from the Sargasso Sea
aatgggtaggcttattaaacaaataaattttccagctgatttaagaaaatttaaaaaagatgatctcaaacaaatatctgaagaattaagagatgaattaatagatgtagtttctgagacaggcggtcatttaggtgcaggtctaggagtagttgaactgactatagctttacattatgtctttgatactccaaaagataaattagtttgggatgttagccatcaatgttacccacacaagattattactggacgaagagatagaattaaaacccttcgtaagggtggaggactatctggctttacaaaaagaactgaaagtgaatacgatccttttggagccgcgcatagttcaacttctatttcatcaactcttggaatggctgttgcaaaaaaattatcgaataataataataatgtaatagcagttattggcgatggggcgatgagtgcaggtatggcatacgaggcgatgaataacgctggagctttaaaatcaaaattaattgttattttaaatgataacgatatgtcaattgctagacccgttggagcaatgagcaaatatttagccaaacttttgtccggcaaattatattttagctttagagaaacattaaaaatgataatttcgtctttttcaaaaagatttagccaaaaagctggtaaggcagaagacttactaagaaatattgttacaggtggaactttattcagtgagctaggtttttattatgttgggccaatagatggacacgatgtagaaaatttggttcaaatattcgaaaatgttaaaaattctaattatcagggcccagtattaattcatgtcagaactcaaaaaggcaaaggatacaaaccagctgaagactcaggagataaatatcatggtgtatccaaatttaatgttaatactggtgaacaggcaaaatcaaaatctaatattccatcctatacaaaagtttttgcagaaactttaataaaacacgctgagcaggacactaaaattgttggtattacaggcgcaatgccgtcaggaactggtattaatttgtttgaaaaaaaatttccagatagatcttttgatgtaggaatagccgaacaacatgcagttacttttgccgctggtctagccacagagggttataaaccttatgccgcaatttattcaactttccttcaaagagcttatgatcaagtagttcatgatgttgcattgcaatctcttcccgttagatttgctatagatcgtgcaggacttgtaggcgccgatggtccaacacatgctggctcttttgatatcacttatctttcaactctacctaattttgttgttatggcagcaagtgatgaggctgaactagttaaaatgataaacacttcagtaaacattaatgatcgtccttcagcttttaggtatcctagaggaaatggtattggaattgaattaccatctataaatgaaactttaataattggaaaaggacaagtaattcaagagggtaaaaaagcagtattactt

SEQ ID NO: 232969 - DNA, 1462 bp, Unknown
  Bacterial polypeptide expressing nucleotide sequence isolated from the Sargasso Sea
tatggctgaaaattataaagtattaaatgagataaatgtccctgcagacatgaaaaatctttcaaaagaccaaatacttcaactttctgatgatctgagggatttcttaataaagtcaatatcaaaaactggagggcatcttgctgctggtctaggagcggtagacattacaattgctcttcactatgtatatgatacgcccaaagacattatagtttgggatataggacaccaatgctatcctcataagattttgactggtaggaaagataaaatgtctactttgagaaaaaaagatggtatttctggatttcttaaaatcaatgagagcaaatatgatgcatttggggctgggcactctagtacatccatcagtgcagctatcggatatgagagagcagcaaaattaaaaaatgaagataaaaaaataattgcagtcataggtgatgggggactaactgctggaatggcttttgaggctttgagtcatgcaggcggcattaaatccaatttgctcgtagtactcaatgataatgaaatgtcaatatctccaaatgtaggtgctgtacataaatacttaacacgtattcttactggtaaaacatttaatactattaaggaaagtggtaaaaaagtatttagcaaagttaaagcaatagaagaattagcaaaaaaggttgaaaatcaagctaaaggactcataacacctggtttattatttgaagaacttggttttaaatattatggcccagttaatggtcatgacgttcatgggttaattgaggttctaaaaaatcttaaagataaagacggcccaagaattttacatatagtcacaaaaaaaggtaaagggtataaactagcagaacaaaatccaatctcttatcatggtgtaacaccatttgatataaaaactggtgttgtaaaaacaaataaagttaataataaattaacttatactcaaatattttctcgctggataaacgaaatggctagaatacatgaagatatagtagccataacgcccgcaatgagagaaggctctggattagtagaatttgagaaaaactttccatccagatactttgatgttggtattgcagaacaacatgcgctgacttttgcaggaggcttagcatgtgggggacttaaaccaattgtagcaatatattcaactttcctccagagagcatacgatcaaatgatacacgacattatgatacaaaaccttgatgttttgttggctattgatagagctggaattgtaggggctgacggagagactcatcaagggatatatgatatttcatttttaagaattttgccaaatattgtacttatgactccctcaaatgaacaggaattatgggcgatgctaaatactggatttaaatataaaggaattggagctgttaggtatcctaggggttatactaaaggcttagaccttgatcttaatgat

SEQ ID NO: 232970 - DNA, 334 bp, Unknown
  Bacterial polypeptide expressing nucleotide sequence isolated from the Sargasso Sea
atgactaaattaattagacaaataaattttccttcggatttaagaaaatttaagaaagatcaacttaaaaaaatctcagatgagctaagagaagagttgatagatgcagtctctgaaactggaggacatcttggagctggtttgggtgttgtagaattaacagtagctttgcattatgtctttgatacacctaaagataaactagtttgggatgttagtcaccaatgctatccacacaaaattataactggaagaaaagatagaattaagacacttagaaaaggaggaggtttatctggatttaccaaaagatctgagagtgaatacgacccgt

SEQ ID NO: 232971 - DNA, 1210 bp, Unknown
  Bacterial polypeptide expressing nucleotide sequence isolated from the Sargasso Sea
cgtaccgcctgttaaagagcttgccagcagaatggaagaacatcttaaaggcatggttatccctggtacgttttttgaagaacttggcttaaattatattggcccaattgatgggcacgatgtaaacatgctggttgatacattacgtaatatgcgtaatttaaaaggcccacaacttcttcatataaaaacgcaaaaaggtaagggttacaagccagctgaagccgaccctattggctaccacggcgtccctaagtttgatccaaacacatctagcttgcctaaatcaaaaccgggcgcccctactttttcaaaagtatttggcgactggctatgcgacatggcgcagcaagatgataagttaatggctatcactcctgccatgcgtgaaggctcgggcatggtgcgcttttcaaaagaacatgctgataagtattttgacgtcgcaattgctgaacaacatgctgtaactctagccgcaggttttgcatgtgaaggcttaaagcctgttgttgctatctattcaagctttttacagcgcgcatacgatcagctcattcacgatgttgcattacaaaacctccctgtattatttgccattgaccgagcaggtattgttggtgccgatggcgaaacacatcaaggcgcatacgatctcagctttatgcgttgtattcctaatatggttattatggcacctagcgatactaatgaatgccgccaaatgttgtacaccggttacaaagctaattgcccggttgctgttcgttaccctcgtggaagcgctggtacggcagatattcaaagcgatatgcaacttttcgaaattggtaaagcaaatacagtaaaagaaggttcaaagattgccattttgtcatttggtacattgcttgaaaacgcacaacttgctgcaaatgaacttaatgcaacgcttgttaacatgcgctttataaagccgcttgatacttcactgttaaacgacattattaaaaatcatgatgtaattgttacacttgaagataatgccattgccggtggtgcaggctctgcggttaacgaatacttagctagccagcaggccaatgttaaaatacttaacttaggtattcctgatgagtttattaagcacggcacgcaagacgaaatgcacgatgaaatgggcttaggcgagcaaggtattttaagttcaataaggtcatttactgcttag

SEQ ID NO: 232972 - DNA, 912 bp, Unknown
  Bacterial polypeptide expressing nucleotide sequence isolated from the Sargasso Sea
aatgaaaatattttctgaaataccaacaaaaaaacctaaaactctgattttagataaggtaaatgctcccgcagacattaaaaatttaacacccattgagctcaaaacattggcagatgatgtcagggcacacatgctttttagtgtcggtcaaagcggaggtcatcttggcggtggattgggagtggttgagctaacagttgttttgcattacttatacaatgctcccgatgacaagattatatgggatgttggccatcaagcttatcctcataaaatattaactggaagaaaagaaaatttaacctcgataagacaaaaggatgggctggctccatttccaagtagagaagaaagtccttacgatgcttttggggttggtcattcaagtacatccataagtgctgcacttggaatggcaatcgcaaataaagattcagacaaaaaagttgttgccgttattggagacggagcaatgacagcaggtatggcatttgaagctttgtctcatgcaggtcatataaaaccaaatatgttaatcattcttaatgataatgatatgtccatctcagaaaatgttggtggattgaataattatttttcgcgtatctgggcatcgaaggtttataaggggattagaaaaagcggaaaaagctttttagagaatctgccgcaggctcaccatattgcaagaaaagttgagactcaaatgaaagctatggttgcgcccggaagtatttttgaagaattaggtttaaattatataggtcccatagacggccatgatatcaacgaactaactaaagttattggcaatctcaaggattttgagggtccacaatttctacatgtaattacaaaaaaaggagcaggcatagatcctgctgaggctgatcgaattggctttcatgc

SEQ ID NO: 232973 - DNA, 1004 bp, Unknown
  Bacterial polypeptide expressing nucleotide sequence isolated from the Sargasso Sea
gctcagggcagaaactattaatgtagtttcatcaactggcggccatttgggggcgggtttaggtgtagtcgagctcactgttgccctgcactatgttttcaatacgccaaaagaccatttggtttgggatgtcggtcatcaagcttatccgcataaaattattactggtcggcgaaataaaattcgcacccttcgtcaaggcggaggactttcaggctttacaaaacgcacagagagcgaatatgacccattcggtgcagcgcatgccgctacctctatatctgcggcactcggactctcagtggctagcggatttaagggtatagaaaacaactcgattgcggtgattggggatgggtctatgaccgccggcatggcttatgaagccatgaataacgccggttctatgaatagacgtttaattgtaattctcaatgataatgacatgtctattgctccacctgttggggcaatgagtgcctatctttcacggttgatttcatcacgctactaccgttccctgcgtcacttaatgagagatctagccaagaagtttcccaaacgtttggaacaagctgcagccaaatctgaagaatatgcccgtggattagtaacgggaggtaccatgttcgaggaactgggcttttattatattggtccagtggacggtcacaatctagagcacttgttgccagtattgaagaatgtaagagattccaatgaatccggccccgtactcgttcatgtggtcacaaaaaaggggggcggctacccgcccgctgagtctgcggcagataagtatcatggtgtcggaaagtttgatgccgctacaggggctttagttaaagcacctcagggtccaccttcatataccaaggtttttgccgaggctctaagcgccgaggcgcagacagacaacaaaattatagctattacgggggcaatgccttcaggcactggtcttgatatatttgcgaaaacttttccgagaacgatgttttgat

SEQ ID NO: 232974 - DNA, 811 bp, Unknown
  Bacterial polypeptide expressing nucleotide sequence isolated from the Sargasso Sea
ttgcgaaaacttttccgagaacgatgttttgatgtcgggatagccgagcagcatgcggttacctttgctgcagggcttgcggccgaaggctacaagccttttgctgctatttattccacatttttacagcgtgcttatgactctgtggttcatgacgtttctattcagggtttgcccgtccgatttgctatcgatcgggcggggatggtgggcgccgatggtgtaactcatcagggttcttttgacatcacctatttaggttgtcttccgggaatgattttaatggcggctgctgatgaggcagagttagtacacatggtaaagacccaggttgcgattgatgatagaccctcaggcttaagatatccgagaggaaatggcgtaggagttgaaatgcctcaaacagccgaagttcttgaaattggaaaaggaagaatcaccaaagaaggaaatactgtagcattattatcttatggtacccgcctcgccgattgtcataaagcagccgaaagcttggatgaaattgggttgtcaacgacagtagctgatgcacgatttgcgaaacccattgacgaggatttggtacgtcgtcttgcgatggatcatgaggtccttgttacaattgaagagggaacaataggaggatttgcaagtcagattactcactttttagcttttaatggtttgctagaatctggcttgaaatttaggcctatgtatttacccgatttctatattgatcatgatactcagcagcagcaatataaaattgctggcttaagcgcagaaaatatcgttgacaatgtttaaa

SEQ ID NO: 232975 - DNA, 614 bp, Unknown
  Bacterial polypeptide expressing nucleotide sequence isolated from the Sargasso Sea
aatgaaaaaaaaatataaacttttagataacatcaattttccatctgatattaaaaatctttctcaatcaaatttaaaaatattagcaagtgaagttagagaagaaatgattgaagcagtttctgaaactggtggtcatttaggagctggtcttggagttgtagaactaactgtagctttacactatacatttaatactcccaatgataaattagtttgggatgttggtcatcaaacgtatccacataaaattctaactggaagaaaagataggataagaactttaagaaaaggtggtggcttatcgggttttacaaaaagatctgagagtgaatatgatccatttggtgcagcacatagttcaacctcaatatcttctgctttaggaatagctattgcaaacaaactttctaacaagtctgacaatgttgttgcagttataggtgacggtgcaatgagtgcaggtatggcttatgaagcaataaataatgcgggtgctagtaaaactaaaatgattgtaattttaaatgataacgatatgtccatagcaaaacctgtcggagcaatgagagcatatttggcaaagattttatcaggaaaaatttatttcagtt

SEQ ID NO: 232976 - DNA, 1651 bp, Unknown
  Bacterial polypeptide expressing nucleotide sequence isolated from the Sargasso Sea
aaaagatagaataaaaacattaagacaaggaaatggcctttcgggttttacaaagagatctgaaagtgaatttgatccttttggagcagctcatagctctacttctatttcagctgctttaggaattgcaacagcaaataaactttcaaataaaaatgatgaagtcatagcagttattggggatggagcaattagtgccggtatggcatatgaagcaatgaacaatgcaggtgatgcgaaaactaaattgattgtaatattaaatgataacaatatgtcaattgctaaaccagttggcgcaatgaaatcatatttggcaaaaattttttcaggaaaaatttattttaacttaagagaaactataaaattaataatttcatcattttcaaagagatttagtaaaaaagcaggaaaagcagaagattttttacgatcaatggtaacaggcggaaccctatttagctctttgggattttactatatcggccctatagatggacatgatttagatgtacttctgccaattcttaaaaatgctagagactcaaggcacaatggaccaattctaattcatctaaaaactcaaaaaggaaaaggttatgaatatgctgaaaaatctgatgataaatatcatggtgtttcaaaatttaatgttcaaacaggtattcaagaaaagtctaaatctaacattccagcctacacaaaagtttttgccaatactttgattaaacatgctgaaaaagatagtaagattgtaggaattactgctgcgatgccatctggaactggcatggatattttttcaaaaaaatttcctaatcgaatgtttgatgttggaattgcagaacaacatgctgtaacttttgcggcaggattggcaacagaaggttttaaaccttatgcagccatatattctacctttttacaaagagcttatgatcaagtagttcatgatgtagctattcaaagtttgcctgtaagatttgcaatcgatagagcaggtttagtaggtgctgatggaccaactcatgctggttcttttgatataacttatctatcaaccttgccaaattttgtagtgatggccgcaagcgatgaaggagagcttgtcaaaatgattaatacctcagttgatataaatgatagaccaagcgcattcaggtatccaagaggaattggtgtaggaatgaatttgcctgatattactgaaaaactagtgattggaaaaggcagaattattagagaaggaaaaaaagtggctatattaaactttggtacaagattaaaagaatgtttaatagcagaagaaaatctcaaaaaaaaaggtattgacttaacggttgttgatgcaagatttgcaaaacctttagatgaaaatttgatctggcaaattgctacaaatcacgaagtcataattactattgaagaaggcgcaataggtgggtttggttctcatgtaaacttctttttaaatgaaaaaaatttacttgataataatttaaaatttagatcaatgattttacctgacaagtttattgatcataacaaaccagaagaaatgtataaagatgctgggcttgatgcgagatctatagaattaaaagttttagaagctctaaattcaaaagttttaataaaaaaaattaattaa

SEQ ID NO: 232977 - DNA, 1918 bp, Unknown
  Bacterial polypeptide expressing nucleotide sequence isolated from the Sargasso Sea
aatgacaagattaataaaacaaatcaatttcccctccgatcttagaaaatttaaaaaagaaaatttgagacaaatttcggatgaattaagggatgaattaattgatgtagtatctgaaactggcggacatcttggcgctggattaggagtagttgagcttaccgtagctttacactacgttttcgatacacctaaagacaagcttgtttgggatgtaagtcatcagtgttacccacataagattattactggaagaagagatagaataaaaactttaagaaagggtggagggttatccggttttacaaaaagatcagaaagtgagtatgatccatttggtgcagctcacagctcaacatctatttcgtctactctaggaatgtcagtagcaaaaaaattatctaataatagaaataatgttattgcggtaattggcgatggcgcaatgagcgcaggaatggcatatgaggccatgaataacgcaggagcccttaggtcaaatttaattgtagttttgaacgacaacgatatgtcaatagcgagaccagttggagccatgagtaaatatttggctaaccttttatctggaaaattatatttcagttttagagaaactatcaaaatgattatttctgcattttcaaaaaggtttagtcaaaaagcaggcaaagccgaggacatgttaagaaatatagtgacaggtggaacgttatttagcgaacttggattttattatgttggcccaatagacggtcatgatgtggaaaatttggtacaaatatttgaaaatgtcaaaaaatcaaatcatcaaggaccggtacttattcacgtaagaaccaaaaaaggaaaaggctataaaccggctgaagaatcaggtgacaaataccatggagtctcaaaatttaatatttccactggagaacaatctaaatctacttcaaatactccctcatatacaaaggtttttgcagagactttaataaaacatgcagaacaagatactaaaataataggaataactggagctatgccttctggtaccggattgaatttatttgaaaaaaaattcccggatagaacattcgatgtagggatagcagagcaacatgctgtaacttttgccgcaggattagctaccgagggttataaaccttacgcagccatttattcaacttttttgcaaagagcctatgatcaagtagtacatgatgtagcattacaatctcttccagtaaggtttgctattgatagagcaggtctcgtcggcgcagacggaccaactcatgcgggctcatttgatataacttacttagcaactttaccaaattttgttgtgatggctgctagcgatgaagctgaattagtaaagatgattaatacttcagtagatataaatgatagaccttctgcttttaggtatccaagaggaaatggtataggagcggaattaccctcagtaaatgaaaaattagttattggaaaagcaagaataattaaagagggtaaaaaagtagctttattaaattttggtacaaggctcgaagaatgtaaaaaagcatcggaaaaactttctttaaaaggtatagactgcacaattgtagacgcaagatttgctaaacctttagatgaaaaattaattatggaagttgcaactaatcatgaagttttaataacaattgaagaaggttcaataggaggttttggatcacatgtaatgcaaattttgtctgacagaggtgtttttgacactggtttaaaatttagatctatgattttaccagatatatttatagatcaagatactcctgataaaatgtataaggtagctggtcttgacaacctttcaattgtaaaaaaagttgaagagactttaaattctaacataatattagccaaaaataagaataagatatcttaa

SEQ ID NO: 232978 - DNA, 1222 bp, Unknown
  Bacterial polypeptide expressing nucleotide sequence isolated from the Sargasso Sea
tctggggggaacactatttgaagaattaggattttattacttagggccaatagatggtcataacgtaaaagatttagtttctgttctagaaaatataagagataataggtttgataaacctgtttttttacattgtatcacaaaaaaaggaaaaggttacagtccagcagaaaagtcggaggataaatttcatggtgttgaaaaatttgatattgatactggtgcttcactaaaaaaatctaatcaaaaatcttactcccaagtatttggcgaaactttaactaagcttgcagaaaatgatgaaaagattgtcgcaattacagcagctatgatgtcgggaacaggtctaaaaatttttagagataattataataaaagattttttgatgtaggtattgctgagcaacacgcagtaactatggctgcaggtatggcgactgaaggttttaaaccttatgtggcaatatattcaacctttcttcaaagggcttatgatcaaatagttcatgatgtagctattcaaaaattaccagtaagatttgctattgatagagctggccaagtaggatcagatggtcctacccatgcaggttcatttgatttaacttatttatcaacattgccaaattttataattatggcgccaagtaatcaatcagagttaattaaaatgatgaaaacttcagcatcaatagataattgtccatctgcatttcgttacccaaggggtgttggaatcataaatgatttagatggattggatgaaattgaaattggaaaaggatacattgatactgaaggtgataatgttgctatattaaatttaggcactagactagataatattaaaaatgcctgtaaaattttaaataataacaatatttacccaacaattgcagatgctagatttgctaaacctctagatacaaacttaattgataatttaattgaaaatcataaatatttaataaccatagaagaaggttctatcggaggttttggttcccacgtgttgaactatgtacataatattagattaaaaagatcatcagtaataattaaaaatatattctttccagataaatttatagaacatatgaagccagaagaacaatatgaagaaatgaaaatggacgttaactcaattgtaaaacaaatatcaagattgtatgataataaagttattgatataaaaaattttaatataaaagacaaaaattga

SEQ ID NO: 232979 - DNA, 1492 bp, Unknown
  Bacterial polypeptide expressing nucleotide sequence isolated from the Sargasso Sea
tcaagcacatcgttaagtgcccttgttggaatggcgattggatctaaagaatctaatccagataaaaaacatgttgctgttattggtgatggagcaatgacagctggaatggcttttgaagcgttgggtcatatcggtcatctaaaacctaatgtcttagttgttttgaatgacaatgatatgtcaatatctgaaaacgtaggtggcttatctaattacttttcaagaatatgggcttcaaaaacctataaaggaataaaaaaaagcggtgctagctttctaaaacctttgcctcaagcttatcatcttgctagaaaagtagaaactcaaatgaaagcaatggttgcacctggaactatttttgaagagttaggattaaattatataggtccaattgatggtcataatttaaatcaattgaatgatgttatttcaaatttaaaagattttgaaggtcctcaatttttacatgtaattacaaaaaaaggggcaggacttgattctgctgaagctgaccgaataggttttcatgcaataggtaaaataaattcaataaaagataaaaaaattaaacaaaaaaaatatcaggatatttttggtgaatggattattgatatggctggaagtgatgaaagtcttatcggcataactcctgctatgagagaaggttcaggtcttgttgaatttagtaaaaaatttccagatagatactttgatgttgcaatagcagaacaacattctattacatttgcagcaggattatctgtagaaaagaaaaaaccagttgttgctatctactcaacgtttttacaaagaggatatgatcagttaatacatgatgtagcggttcaaaatcttgatgttactttcgccttagacagatctggtcttgttggtgaggacggtccaacccattctggaaactatgatattgcttatttaagatgcattccaaatatgttgatctgtacaccatcagatgaaaatgaaaccaggaaattactaacaactgcatacttacataaagggccagcctctgtaaggtatccaagaggtgctggaccaaatagtaacattgtaaaagacctcaagccatacaaaataggagaagcgaatgttattagagataaaaactcaaaggttgttatcttgaactttggaactcttttaaaagaggcaactgaaatatcgaaagatttaaaagctactttagttgatatgcgttttgtaaaacctttagatgaaaaaattctaaaaaaactttttaataaagctgaagtatttatttcaattgaagatggttcggtcatgggtggagctggaagcgcagttcaagagtttgcatcaaaagaaaatctaaatattaaatctattctttttggcatacctgataagtttattgaacacgcgtcaagggaagaaatgttaattgaggctgggcttgatatagaaagtattaaatctaaattaagtaaagtgttatcgatgtagt

SEQ ID NO: 232980 - DNA, 649 bp, Unknown
  Bacterial polypeptide expressing nucleotide sequence isolated from the Sargasso Sea
tttgaaaatttttaaagaaataccggttgaaaaacctaatactcctttattagattcggttacttatccatctgatttaagatccttttcaataaacgaacttgaaactctttcaaatgaattaagagagtttttattgtattcagtaggtcaaagtggtgggcatttaggtggtggacttggggtaattgagcttacaataatattacatcatctttatcaaactccctatgataatcttgtgtgggatgtggggcatcaggcatatcctcataagattcttactggaagaaaagataagatcaataccattagaaaaaaaaatggtctagctcccttcccttcaagattagaaagtgaatatgatacttttggtgttggtcattcaagtacatccttgagtgcaattgtaggaatggctgaagcaaacagagagtctaatccggataaaaaacatgttgctgtaatcggcgatggagcaatgacagcaggcatggcttttgaggctcttagtcacataggccatttaaaacctaatttacttataattttgaatgataatgatatgtctatatctgagaatgttggaggtttgtctaactatttttcaagaatatgggcatctaagacttataaaggtattaaaaag

SEQ ID NO: 232981 - DNA, 295 bp, Unknown
  Bacterial polypeptide expressing nucleotide sequence isolated from the Sargasso Sea
aatgtctaaattattggaaaaaataaatttccctgcagatcttagaaagtttaaaaaagaccagctaaaacagatctcagatgaattaagaaatgaactaatagatgttgtgtcagaaacaggtggccatctaggagctggcttaggagtagtagaacttacggtagctttacattatgtgtttaatactcccaaagataaattggtttgggatgtcggacatcaatgttacccacataaaataattactggaagaaaaaataaaattagaacattaagacaaggaaggggtcta

SEQ ID NO: 232982 - DNA, 945 bp, Unknown
  Bacterial polypeptide expressing nucleotide sequence isolated from the Sargasso Sea
ctgttttaaaaaatgcgaaagagtcaaaacataaaggaccaatattaattcacattaaaacacaaaagggaaaaggttacagtttcgcagaaaagtcagaggataaatatcatggggtatctaagtttaatataaaaacaggcatacaacaaaaaagtgactcaaaagtgccatcttacacaaaagtatatgcaaatactcttgttaagcacgctgaaaatgacagcaaaataattggaataactgccgcgatgccctctggtacaggaatggatatttttggaaataaatttcctaataggatgtttgatgtgggaatagcagaacaacatgcggtaacttttgctgcaggtctagcaacagaaggttataagccttatgcatcaatatattctacttttttacagagagcttatgatcaagtagtgcatgatgtagcaattcaaagtttaccagtaagatttgcaatagatagagcaggtctagtaggagcagatggcccaacacatgctggatcttttgacataacatatcttgctactcttccaaattttattgttatggcagctagcgatgaggcagaattggtaaaaatgataaacacatctgttgaaatcaacgataagccgtgtgcatttagatatcccagaggaaatggtaccggagttaagttacctgatataaccgataaaatccaaattggaaaagcaaaagttgttagagaaggaaagaaaattgctattttgaattttggagcaaggttaaatgaatgtttaattgctgaagaaaatttgagaaaaaaaggagttaatgcaactatcgtagatgcacgttttgctaaacctcttgatgaaaatttaatttggcaattagcaactaatcatgaggtgataattacaattgaagaagggatctataggtggttttggggcacacgtaagtaat

SEQ ID NO: 232983 - DNA, 1084 bp, Unknown
  Bacterial polypeptide expressing nucleotide sequence isolated from the Sargasso Sea
atgaaatatgattttttagataacatagataatccctctgacttaagaatattatcaactaatgatctagataatgtttcagaggaactaagacattttcttattgataccgtgtctcaatgcgggggtcactttggtgcaagtttgggggctgttgagctaacagttgcattacactattcttttgatactccaaaagacagaataatctgggatgtcggacatcaatgctatggtcataaagtacttaccggacgaaaggatgaacttcatacaattagaaaaaaaggcggtcttcatccttttccttctagagaagaaagtgaatatgattattttggtgttggacactctagtacatcaattagtgtagcagttggtgcagctattgcctcatcatataaaaaagatgataagaaagttgttgcagtgattggagacggcggcctaagtgcaggaatggcatttgaagcattaaatcatatgggttctatagatgaagatattttagtaattttaaatgacaatgagatgtctatatctcctaatgttggagcaatgacaaattatcttacaaaaattttatcaagcaaagcctattccactgttaaagaaggtagtaaaaatattttaaaaaaagtccccccttccggaatgtttctaacaaaaacagaaaaacacataaaaggcttgttggcaccaggtatgctttttgaagaaatgggtattaattattatggtccaatagacggccatgatactcgttttcttgtaaaaacattaaaaaatttaaaaaaaatatcaggccctaaacttttacatgtaattacaaaaaaaggaaaaggctatctgccagctgaatcagatcctgttaaatatcatgcagtgcctgtttttgacagtaaaattggggttgaaaaagatttaaataaaaagattacatatacaaaagtatttgatgattggttatgtaaaattgcagaaaaagatccaagaatttttgcaatcactccagctatgagagaaggctcaggtcttgttaatttttcaaaaaagtttcctaaaagatatattgatgttggga

SEQ ID NO: 232984 - DNA, 1282 bp, Unknown
  Bacterial polypeptide expressing nucleotide sequence isolated from the Sargasso Sea
atgagtttagatctccaacattacccaacgcttgcgcttgcgcaaacacctgataagttgaggcagctgcctcaagacaaattacgcgagctcgccgatgagttacgtgagtacttacttaatagcgtaagtcaaaccagtgggcactttgcctcaggtttaggcacagtagagcttactgtcgcactgcactatgtatacaacaccccctttgaccgtttgttgtgggacgtgggccatcaagcctatccacacaaaattttgaccggccgtgctgagcgcatgagtaccattcgccagaaaaacggtttacatccgtttccgtggccgccggaaagtgaatacgacacctttgctgttggccactcgtctacatcgattagcgctgcactcggcatggcggtagccgcagaaaaggaaggtaaagacagaaaagtggtatcggtcattggcgatggcgcgatgacagcgggtatggcgtttgaagcacttaaccatgcaggcgatatcaaaaaagatatggtggtggtgctcaacgacaacgaaatgtctatctctgagaacgtaggtgcactgaatagccacctagcgcgtttgctgacaggaaactttttcaactccattcgcgatggcggtaaaaaactgcttagtaacgtaccgcctattaaagagtttgccagccgtgcagaagagcaccttaaaggcatggtcgtgcctggtactatcttcgaagagctgggctttaactatataggccctatcgacggtcacgacgtcaatgctgttgtagatacccttcgcaatatgcgtaacttcgatggcccgcaactgttacacgtggtcaccaaaaaaggtaaaggctacgccgttgcagaagaagacccgataaaatttcacgcagtgccaaaattcaacccggcagacaatgcactgcctaagtctaagccttctgcacccacctactcggctatttttggccagtggctgtgtgatatggcagcacaagaccctaagcttatggcggtgacgcctgctatgcgtgaaggttcaggcatggttgagttttctcagcgttttcctgaacaatacttcgatgtcgccattgccgagcagcatgcagtgacctttggtgctggccttgcgaaagacgggatgaatgcggttgttgcgatttactcatctttctttacacgcgcttacgatcagcttatccacgatgtggcaattcaagacttacccgtattatttgctatagacagagcgggtatttgtgggcgccgat

SEQ ID NO: 232985 - DNA, 345 bp, Unknown
  Bacterial polypeptide expressing nucleotide sequence isolated from the Sargasso Sea
gatgagttttgatatagccaaatacccgaccctggcgctggtcgactccacccaggagttacgtctgctgccaaaagagagcctgccaaagctttgcgacgaactgcgccgctatttgctcgacagcgtaagccgttccagcgggcacttcgcctctggtctgggcacggtggaactcaccgtcgcgctgcactatgtctacaataccccgtttgaccagttaatctgggatgtaggacatcaggcttacccgcacaaaatactgaccggacgccgtgataaaatcggcaccattcgtcagaaaggcggttgcatccgttcccgtggcgcggtgagagcgagtat

SEQ ID NO: 232986 - DNA, 1918 bp, Unknown
  Bacterial polypeptide expressing nucleotide sequence isolated from the Sargasso Sea
tatggattatgatcttttagataaaattaattttccatcagacttaagagaatttaaaaagaaagatctaaagcaaatctcagaagaattaagggctaaaacaattgagacagtttcaaaaactggtggtcatcttggtgcaggacttggagttgttgaattaactgttgcaattcattacgtgtttaatacccctcatgataaattaatttgggatgtgggacaccaagcttatcctcacaaaattataacaggtagaaaaaaaaatatcgagacactgagaaaaaaagacggtgtgtatggttttgttagaagatcagaaagtgaatatgatccatttggtacagcccatagttcaacagcagtttcagcaggattgggaattaaagcggcaaaagatataaataaagataactcaaaagttatatgtgttgttggagatggtgcattaagtgcaggtttagcttttgaaggattaaataatgcaggtgcacaaaaaaaaggtttaattgtcattttaaacgataacaaaatgtcaatagacaaaccagttggtgctatgagcacttatctaactaggttactatcatctaaatcttactcaagtttaagaaatattgttaaaaaaatatctaaaaccttaccatcaaatgtatcaaagactctttatagaacagaagaatattctaaaggacttatcactggtggaactctatttgaggaattgggtttttattatcttggacctatagatgggcataatatagatgatatggttttagttctagaaaatataagagataacaaatttgataaaccagtttttcttcattgtataaccaaaaaaggtaaaggatatagtcctgcagaaaaatcagaggataaatttcacggagttgaaaagtttgatattaacactgggaactcagttaaaaaaacaaatttaaaatcctattcaaatatttttggtgaaacattatcaaaacttgccgaaaatgatgaaaaaattgtagcaataacagccgctatgatgtctggaacaggattaaaattattccaaaaaaattttgaaaaaagattttttgatgttggtattgctgaacaacatgctgttacaatggcagctggattagcgacagagggtttcaaaccttttgttgcaatttattcaacttttttacagagagcttacgatcaaatcgtacatgacgtggctattcaaaaattacctgttagatttgcaattgatagagcaggtttagtaggatcagatggccctactcatgctggttcatttgatattacttatttagcgacattaccaaattttataattatggcacctagcaaccaaagagagttatctagtatgatagagttatcttgtgagattaatgacacaccatctgcttttagatttccaagaggaacaggatcagaagaactttttaataatcaacctacagatatcagcataggtaagggatatattctaattgaaggtaatgatgttgcaatcttaaatttaggaacaagacttgaaaaatgtattgaagctagtaagtttcttaatcaaaataatatttatcctactattgcagatgcaagatttgcaaaaccattagacacacaattaatagatgacttattaaataatcataagtatattttaactatagaagaaggttctataggtggattttcatctcatgttttacattatgtccataatataagatcaaaaaaggataatgttgtgataaaaaatttaatttttccagatcgttttgttgaacatatgacaccggatgaacaatatcaagatattaaaatggatacggaatcaataatcagaaaaattaataatttttatgaaaataaaattgttgatataaagaattttaaatcaaaagtttaa

SEQ ID NO: 232987 - DNA, 1426 bp, Unknown
  Bacterial polypeptide expressing nucleotide sequence isolated from the Sargasso Sea
atgaaaatttttgattctattcccaataaagaacctaccttagagtttcttaatggcattagttcacctgaagatttaagaaaattagataaaaaccaaatgtctttagtggctgatgagttacgagaattcttactatatacagtcggaaaaactggtgggcatttcggagcaggtctaggagttatcgaattaacattagcccttcattacgcttttgagacaccccatgatcgcctagtatgggatgtaggtcatcaaacttatccccacaaaatcttaaccggcaggaaagatgctatggaaagtatgagacaaagcaatggtcttgcacccttccctgttagatctgaaagtgtatatgacacatttggggttggacattctagtacatcaatcagtgcagctcttggaatgataactgctgctgaaaagaaaaacgaaaatagatttgttacagcggttataggagatggagcaatgactgcgggaatggcttatgaggcattagcgcatgcaggctcaatagataaaaatcttttagttattttaaatgataaccaaatgtcaatttcagaaaatattggtggtatgaggaactatttagcaagaatttgggctagtaaaacttataatcgaattagagaaagtggcaaaagtgttttaacttatttgcctggagcaaaagaattcgctagaaaagcagaaatacatgctaaaggcatggttgcaccaggctcgttgtttgaagaattaggttttgaatattttggtcctgtagatggtcatgacgcaaataatctaattaatatacttcatgacttgaaaaatattcatggccctaagtttctccatgtaatcactaccaaaggaaaaggttttgctcctgctgaaaatgatccagttggatttcatgctatcaataaaataaaaaaagaagatctaccctctcatgacaattctttaccaaaaataccgacttattcccaaatttttggacagtggctttcatacaaagccaaaaaagatccaagattaattgccattactcctgctatgggtgaaggatcaggtatggtggagttttctaaagaattccctgatagatactatgatgtagccatagctgaacaacacagtgtaagttttgctgcgggactatcatgtgaaggaatgaagcctgtggttgcaatttatagcaccttcttacaaagggcctatgaccaaatgattcatgatgtagctctccaagatctggatgtgttatttgctcttgatagagctggtttagttggacttgatggagcgacacatcaaggtgcctttgatttatcttacataagatgtattcccaatatggtcatcatggcgccctctgatgaaagtctagcctggaagatgcttaacactgggtatgatcacgaag

SEQ ID NO: 232988 - DNA, 682 bp, Unknown
  Bacterial polypeptide expressing nucleotide sequence isolated from the Sargasso Sea
tttgcctgttagatttgcaatcgacagagccgggttagttggtgctgatggcccaacacatgctggatcttttgatataacatacctttcaacattaccaaattttgtggtaatggctgcaagtgatgaagccgagcttgtaagaatgataaatacatcaatgcatataaacgatagaccatcagcttttagatatccaaggggcaatggtgtgggagttcaattacctgaaataactgagaaaattgagttgggtaaagcaaaaataattaaggaaggaaaaaaagttgcaattttaaattttggagcaagattacaggagtgtattttggcttccgaaaatttaataaaaaaaggaattgatatctctattattgatgcaagatttgcaaaaccgttagatgaaaacttaatatggcaaatcgctacagaacatgaggttttgattacaatagaagaaggttcaatagggggatttggatctcacgtgagccaatttttaagtgaaaaaaatttattagacagtaatcttaaatttagatcaatgatattgcctgatagatttattgatcatgataaaccagagctaatgtataagtttgctaatttagactctattggtattgaaaataaaatattagatactttgaattcaaaagttttaattaaaaaatctaattaa

SEQ ID NO: 232989 - DNA, 1867 bp, Unknown
  Bacterial polypeptide expressing nucleotide sequence isolated from the Sargasso Sea
atgtcaattttaagtaaaattaatctaccgaaagagttaaagaaattatcattcaatcaactacaaaaacttaatgatgagttaagagattacacaattcaagtagtatcgaaaacaggtggtcatttaggggctagtttgggagttatagaattaacatctgctctacattatgtctttgatgctccaaaagacaaaattatctgggatgtaggtcatcaaacttaccctcataaaatattaactggtagaaaaaataagattcatacattaagaaaaaaaaatggtctatcaggttttactaaaagatcagagagcatttatgatccatttggagctgcacatagttcaacttcagtttcagccaatttaggaattacagctgctagagatatgctcaatcaaaattttgatgttattagcattatcggtgatggtgctattagcgcaggattggcttatgagggtctaaacaatttaggacatttaaataaaaattccttgataattttaaatgataacgaaatgtctattgcagaaccagttggtgcaatgagtaaatatcttgtaaaactattaagttcaaaatcatatgagagctttagagatatcataaagaattttactaaaagacttcctaacgaagtaggtgattttgcaaaaaaaactgagggttatttgaaaggatatttaactggaaatacattatttgaagaacttggtttaaactacctaggccctattgatgggcataatttaaaattattagttcaattatttaaaaagtacaaaaaaaaggaattacatggtcctgtttttttacatttaataactaaaaaaggaaaaggttacaaacctgcagaaaattcaaaagataaatttcacggcgtatcatcttttaatttaaaaacaggtgttcaaagtaaatctaaagaaaaaacatttactaatgtggtcagcgacacacttattaaactagcaaaaaaagacaaaaaaattgtagcaattacagcagcaatgccgtcaggaacaggtttggataaattcaaagatgcatacccaaatcgtttctatgatgtagggatagcagaacaacatgctgtaacatttgctggaggtatggctacagaaaaagtgaagccttttgtggcaatatattctacctttttacaaagggcatacgatcaaatagtacatgatatcgccattcaatctttacccgtaagatttttaatagatagatcaggttttgttggtgctgatggagctactcatgcaggatctttcgatttgagttatttatgttgcttaccaaatttcgtagttatggctccttcaagtggagaggaattaaagaatatgattaaattatctattacgattaatgacaaaccatctgcaatcagatatccaagaaatttagccaatgattacaatgaaaaagctaagtttaataaaattaaattgggtgaagcaaaactagtaaaaaaaggaaaaagaattgcttttctcagtttaggcactcggctacaaaaaatcttggaggtttctgaattaattaaaaaaaattataaatttcaatgcagtgtgttggacatgagatttgctaaaccgatagataagaaatccattaattctctaataaaaaatcacgaaatttttgtaactatagaggagaacgcaattggaggtttttcaagtcaagtaaacaactatttgttaaatgagtcatctaaatcaccaaaaattttaaattttttcatgaaagacaaatttattgatcaatctgatattgaggaccaatacactttatcaggtatttcttcaaaaaaaatatatgaaaaactaattaattttttaaagtgat

SEQ ID NO: 232990 - DNA, 1867 bp, Unknown
  Bacterial polypeptide expressing nucleotide sequence isolated from the Sargasso Sea
gttgaaaattttcaaagagattccttctcaaaaaccaaaaacaccattactggataaagttaatgatccatcggacataagatctttttcaattaatgaacttcgaattttatcagatgaacttagggaatatttgctttattcagttggacaaagtggaggacatttaggtggtggtctaggtgtggttgaacttacagttgtacttcattatcttttaaatacaccattcgataatttagtatgggatgttggacaccaggcatatcctcataaaattcttacaggtagaaaaaatcaaattcatacaatccgaaaaaaaggtggactcgcgccctttccttcaatttcagagagtgaatatgactcatttggagttggacactcaagcacatctataagtgcacttcttggcatggcagtagcttctgaagcagaatcagagaaaaaaaatgttgcagtaattggtgatggagcaatgacagctggaatggcatttgaagcattaagtcatacaggacatataaagccaaatgttttgataattctgaatgataatgacatgtctatatctgagaatgttggaggattgtctaattatttctcaagaatctgggcatctaaaacttacaaaggaataaaaaaaagtggagcgagttttctaaagccattaccacaagcgtatcatcttgccagaaaagttgaaacacaaatgaaagctatggttgctcctggaacaatttttgaagaattaggtctcaattatattggaccaattgatgggcataatataaaagaacttcacgatgtaatttccaatctcatggaatttgaaggtcctcagtttcttcatgttattacaaaaaaaggtgctgggcttgatcctgctgaagcagataggataggttttcacgccataggtaaaatcaattcaattaagcaaaagtcttcgaaatcaaaaaaatatcaagatatttttagtgattggattaatgatatggcagctaaagatgaagatcttattgcaataacgcctgctatgagagaaggatctgggttagtcacttttagcaaaaactatcctgatagatattatgatgtggcaattgctgaacaacatgctgttacattcggcgcaggtcttgctattggtgggaaaaaaccagtagttgctatctactcaacatttcttcaaagagcttatgatcagcttattcatgacgtagctgttcaaaatttaaatgttacttttgctctcgatagatctgggctggttggagaagatggacctactcactcaggaaattatgatattgcatatttaagatgtattccaaatatgattatctgcactccagcagacgaaaatgaaacaaggttgatgctttcaacaggatttaactataaaggacctgcttcaattagatatcctagaggagttggtcctaacgttaaagtagatgagaaactagatacagtcgaaattggtaaagctagagttattaatgaagcaggaaaagataaagtcattcttaactttggatctctgctgcatatagcaagagaaatatcagaaaaatttaaatttactcttattgatatgagatttgtgaagccgctagacgaacaaatcctgaatcaatatctgaaaaaagctgatctatttatatctatagaagatggatcaattatgggtggcgctggcagcgctgttcaagaattctgttcaaaaaataatatcaatatcgagtctgagctttttggtatacctgacgaatttattgaacatgcatcaagagaagaaatgctcaatgatgctggattatctgtagataaaataagctctaggctaaaagagttaatataa

SEQ ID NO: 232991 - DNA, 899 bp, Unknown
  Bacterial polypeptide expressing nucleotide sequence isolated from the Sargasso Sea
tgtaggaattactgctgcaatgccatctggaacaggcatggatttattttcagaaaaattcccaaatagaatgtttgatgttgggatagcagaacaacatgctgtaacttttgctgcaggactagcaacagaaggatacaagccttatgcttcaatatactcaacttttttgcaaagagcttacgatcaagttgttcatgatgtagcaatacaaaatcttccggttagatttgctatagatagagccggacttgtaggtgcagatggtccaacacacgcaggatcatttgatgttacttatttgtctacactaccaaattttattgttatggctgcaagcgatgaagctgagcttgttagaatgattaatacttctgttgatattaacaataatccttctgcattaagatacccaagaggtaatggcgttggtgttgaattaccagatatcaacgaaaagatagatataggaaaaggcaggataatcatagaaggaaaaaaagttgcaataattaattttggtgcaagattaaaagaatgtttattagccaacgaaacactaattaaaaaaggtataaatattacattagttgatgctagatttgccaaacctcttgatgaaaatttaatttggcaaatagctacagatcatgaggctataattacaattgaagaaggttctattggtgggtttggatctcatgttggtcaattcttagcagagaaaaatctactagataataatttaaagtttagatcaatgattttaccagataaatttattgatcatgataaaccagagttaatgtataaagaagctggtcttgatgctgaagcaatagtttcaaaagtttttgatgttctaaactcaaaaattattgtacaaaaacaaaattaaa

SEQ ID NO: 232992 - DNA, 1196 bp, Unknown
  Bacterial polypeptide expressing nucleotide sequence isolated from the Sargasso Sea
catgggtggtgagattcctgcggaactcaaccgcctcaagggcagcatgcgtcgcctcgcggttcccaaggtgggtgccgtgttcgaggaacttggcttcacctatatggggccgatcgacggccacgacatcggtgaaatggtgcgcaccttccaggcggctcaccgtgagggtgggcctgtgctggtgcatgtggtcaccaaaaagggcaagggctacccctatgccgaggccgatcaggtgggctaccacgcccaatcagcttttgatctcggcaccggcaaggcgattccgtcgtccaaacccaagccccccagctacagcaaggtgtttgggcagaccctggtcaagctctgtgagcagaacagtcgggtgatcggcatcactgcggccatggccactggtaccggtctcgatctgcttcagaaggccgttccggaccagtacgtggacgttggcatcgctgagcaacatgccgtcaccctggcggcaggcatggcctgcgagggtttgcgtcctgtcgttgccatctacagcaccttccttcagcgcgcctacgaccagttgatccacgacgtaggcatacagaagctgccggtcaccttcgtgctcgatcgtgccggcatcgttggtgccgacgggccgacccaccagggtcagtacgacatcagctacatgcgggccattcccaacttcacggtgatggcaccgaaggatgaggctgagctgcagcgcatgctggtgacctgcctgcagcacgatgggcccacggcgctgcggattccgcgtggctccggggaaggcgttccgttgatggaagagggttgggaatcgctgccgatcggccgcggtgaactgctgcgggaaggcgacgatctgatgatcgtggcctacggctcgatggtggctccggccctggccacagcaacgcttctggaggaagcaggtctctccaccaccgtgatcaacgctcgcttcctgaggcccctggatcaggcgctgatccatcccctggcacgtcgcatcccccgcgtagtcactatggaagagggagccctacctggtggttttggcgcagcggttctggagtcgttgatcgatcaggacatcaacgtgtcgatgctgcgcatcggcattcccgaccagctggttgatcacgccacgccgcagcagagcaggaagctctcggcctgac

SEQ ID NO: 232993 - DNA, 965 bp, Unknown
  Bacterial polypeptide expressing nucleotide sequence isolated from the Sargasso Sea
atctattccatcaaagaaacctaagcctgttagttatagtaagatatttggtcaaaccttattgaaaatatgtgagcaagatagcaaagtcgttggcattacagctgcaatggctacaggtactggtttagatatattgcaaagaaatattcccgaccagtatatcgatgtaggaatagcagaacaacatgcagttactcttgcggcaggaatgtcatgcgatggtcttaaacctgttgtagctatttatagtacttttcttcaacgtgctttcgatcaattaattcatgatgtagggatacaaaatttacctgtatcattcgtacttgatagagctgggatagttggtgctgacggtcctactcaccaaggtcagtacgatatcagttacatgagatctatacctaattttgtattgatggctccaaaagatgagtctgagttacagagaatgttaataacttcaataaaccataaaggtcctacagcactaagaataccaagaggctctgggttaggagtggctgttatggatgagggttgggaacctttaaatataggtgaggctgaaatacttgaagaaggagaggatattttaattattgcttatggttcaatggttgcatcagccatagaaacagtaaagatactaaaaaatatgaacattaatgtatgtcttatcaatgcaagatttgtaaaacctctcgataaaaatcttattattcctctagcaagtaggatccaaaaggttgtaactatggaagaaggaacccttataggaggatttggttccgcaatagttgaattattaaacgataatgaaataaatattcctgtatacagaataggtatacctgatgttttggttgatcatgcttcacctgatcagagcaaagaaaaattaggacttatgcctgatcagatggcagataaaattgttaaaaaatttaagttagataattaaa

SEQ ID NO: 232994 - DNA, 1870 bp, Unknown
  Bacterial polypeptide expressing nucleotide sequence isolated from the Sargasso Sea
ttaaaaaaagtttctgaagataatttacaaaaagtagcagatgaggtgagggaggaaatgataagtgctgtttcagaaacaggaggtcaccttggtgctggtttgggagtggttgaattgacagtggcacttcattatgtttttgataccccaaacgataaattaatatgggatgttggccatcaatcttatccacataaaattttaactggaagaaaagataaaattagaactttaagacagggcgatggtttatcgggttttacaaaaagatctgaaagtgagtatgacccatttggggcagcacatagttcaacatctatttcatctgcattaggaattgctgaggcaaataaattagaaaataagtcttccaatgtaatagctgtaataggtgatggagcaattagtgcaggtatggcttatgaagccatgaataatgctggggcatctaaaacaaaaataattgttattttaaatgataacgacatgtcaattgcaaaaccagttggagcaatgagaacttacttggcaaaattatttactggtaaaatatattttagtcttagagaaaccttaaagttaattacatctgcattttcaaaaagatttagtgctaaagcaggaaaagcagaggatttttttcgttcagcagtcactggaggtactttgtttagttcacttggtttttattatgcaggtcctatagatggtcatgatttatcaagcctagttccaattttaaaaaacgcaaaagaatcaagacacgagggtcctataatgattcatatcaaaactcaaaaaggaaaaggttattcttatgcagaaaaagcaaatgatcattatcatggagtgtcaaaatttaatgttgagactggagaacaattaaagagcaaatcaaaccttccagcttatacaaaagtatttgcaaacacgttagtaaaacatgccaaaaaagatagcaaaatagtaggaataacagcagcgatgcctggagggactggtatggatatttttggaaatgagtttccaaatagaatgtttgatgtaggaatagcagaacaacatgctgtaacttttgcagctggtctcgcaaccgagggatacaaaccatatgctgcaatttattctacatttttacagagagcatatgatcaagttgtccacgatgttgccattcaaagtttaccagttagatttgcgatagatagagcaggattagttggtgctgatggatcaacacatgctggctcatttgatataacttacttatcaactttacctaactttgtagtaatggcagcaagtgatgaagctgaacttgttaaaatgattaatacttcagtagatataaatgacagaccttctgcaattagatatccaagaggaaccggagtaggtgttgacctcccatcaatagaagaaaaaattgaaattggtaaagggagagtcgttcaacaggggacacaagtttgtatcttaaaccttggtactcgacttgaggagtgcaagttagctgttgagcaattaaaagcaaaaggagtttcaacaactttgatagatgccagatttgccaagcctttagacgaagaacttatactaaaatctgctaaggaacatgagcttatgataactattgaagagggatcaataggtggtttcggttctcatgttaaaaatttattagctgaaagaggagtatttgataaaggtttaaaatttagatcaatgactttaccagatgaatttattgaacaaaatgatccaaaaaaaatgtatgataaagctggattaaacagttctcaaatttctaagaaaattgctgatattttgtttcaaaaaggaaacaataagaaggttgttaaaaatt

SEQ ID NO: 232995 - DNA, 1075 bp, Unknown
  Bacterial polypeptide expressing nucleotide sequence isolated from the Sargasso Sea
taacgccggtgcatctaaaactaaaatgatcgttatattaaatgataatgatatgtctattgcaaaaccagtaggtgcaatgagaacatatttagcaaaattatttactggaaaaatttattttagcttaagagaaactttaaagttaatcacctcagctttttcaaaaagatttagtgctaaagctggtaaagcagaagatttttttcgatcggctgttacaggtggaacactatttagctcactaggtttttattatgcgggaccaatagatggacatgatctttctacacttgtccctattttaagaaatgctaaagactcaaagcatgagggtccaatcatgatacatattaaaactcaaaaaggaaaaggatattcatatgctgaaaaagctagcgatcattatcatggagtatcaaaatttaatgttgaaactggagagcaacaaaaaagtggtactaatttacctgcttacacaaaagtttttgcaaatacacttgttaaacacgcaaaaaaagacagcaagattgttggaataacagcagcaatgccaggtggaacaggtatggatatctttggtaaggaatttccaaaaagaatgtttgatgttggtattgccgaacagcatgctgttacttttgcggcaggtcttgctacagaagggtacaagccctatgcagctatctattctacctttcttcaaagagcttatgatcaagttgtgcatgatgtagcaatacagagtcttcctgtaagatttgcaattgatagggctgggttagttggtgcagacggatcaacgcacgcaggttcttttgatattacttatttgtcgactttaccaaattttatcgtgatggcagctagtgatgaagcagagttagtaaaaatgattaatacttcggttgatattaatgataaaccctgtgcaataagatatccaagaggaacaggtattggggttgaacttcccttcatagatgaaaaaatagagataggtaaaggaaaaattattcaagaaggaactcagggttgttttgtgagtttaggaactagacttgaggaatgcaaa

SEQ ID NO: 232996 - DNA, 1081 bp, Unknown
  Bacterial polypeptide expressing nucleotide sequence isolated from the Sargasso Sea
aaaggaaaggttacaaaccaagctgaagattcaggtgataaataccatggagtgtctaaatttaacatagctacaggcgaacagaaaaaatctaaatcaaacgccccttcatacacaaaagtttttgctgaaactttgattaaacatgctgaacaagatacaaaaatcattggaattactggagcaatgccttctggaactggtttaaatttgttcgaaaaaaaatttcctgaccgaacttttgatgtaggaatagctgaacaacatgcagtaacttttgcagctggtctggcaactgagggatataaaccttatgctgcaatttattctacttttcttcaaagggcttacgatcaagttgtgcatgatgttgctattcagtcattacctgtaaggtttgcaatagatagagctgggctagtgggtgctgacggaccaacacatgctggttcattcgatattacttacttatctactttacctaattttgttgttatggcagctagtgatgagtcagaactagtaaaaatgattaatacttcagttcatataaatgacagaccttcagcatttagatatcctcgtggtaacggaataggggttgaaatgccttcaattaatgaacttttagaaattggcaaaggtagaattattaaggaaggtaaaaaagtagcaattttaaattttggcacaagattagaagaatgcaagaaagcatctgacatattatataaaaaaggaattgacattacaattatcgatgcaagatttgccaagcctttagatgaaaaattaatcatggaagtagcgaataatcatgaagttttaatctcaatagaagaaggctcagttggtggatttggttcacatgtgatgcagtttttatctgaaagaggggtgtttgatagaggattaaagtttagatctatgattttacctgatttatttattgaccaagatactccagaaaaaatgtatgaaaaagcaggactggatagtttatcaattgctaataaaattgaagaaactttaaattcaaatattattttagctaaaaataaaagtaagatatctagttaac

SEQ ID NO: 232997 - DNA, 796 bp, Unknown
  Bacterial polypeptide expressing nucleotide sequence isolated from the Sargasso Sea
atgaaaaaaaattacgaatttttagatcagattaattttccatcagacttaaaaaaagttcctgaaacaaaactgcaaaaggttgctgatgaattaagagaggaaatgatcgatgcagtatcagttactggaggacatttgggtgctagtttaggtgttgtagaattaagcgttgcattacattatatttttaatacaccaagtgataaattaatctgggatgtaggacaccaatgttatccacacaaaattttaacaggaagaaaagataaaataagaacacttcggcaaggagggggtctttcaggatttacaaagcgtttagaaagtgaatatgatccttttggagctgctcatagctccacctcaatttcatcagctttgggaattgcagaggcaaataaattatcaaaaaaatcagaaaatgtaatagcagtgattggtgatggtgcaataagtgcaggcatggcttatgaggccatgaataatgcaggtgcctcaaagactaaaatgattgtgatattaaatgataacgacatgtcaattgcgaggcctgttggagcaatgggaacatatttagctaaaattttttctggtaaaatttattttagtttaagagaaactataaaactgattacatcagcattttcaaaaagatttagtgcaaaagcaggcaaagctgaagatttattaagatcagctgtaactggtggaactttatttagttcattaggtttctattacatcggtcctatcaatgggcatgacctttcttcattgattccaattttaagaa

SEQ ID NO: 232998 - DNA, 1299 bp, Unknown
  Bacterial polypeptide expressing nucleotide sequence isolated from the Sargasso Sea
acctagctaagcagctcgcctctcatttacctaaacaactagagcgaacagccaaaagggcagaagaatatgcgcgaggattggtgaccggtgggacactttttgaggaattagggttctattatgtagggcctgttgatggacataatttagaacacctgctgccagtattacaaaatattaaaaatgctaaacaggacaaacccgtattgctgcacgttgtaacagaaaagggccgcggtcacccatttcctgaaaaatcactggagaaatatcatgctgtacagaagtttgatcttgtcaccggcgcccaatccaaagccaaagctaacgccccatcttatacagaagttttttctaaatcgcttatacgagaagcagagcaagatgagagaatcgttgcggtcactgcagcgatgccatctggtacaggcatagataaatttgcacaacaatttccgcagagaagctttgacgttggaatcgcggaacagcatgctgtaacattcgcggccggcctggcaacagagggtttaaagcctttcgtagcgatttactctacttttcttcaaagggcttatgaccaagttgttcatgatgttgcaatccaggggctgcctgtccgttttgcaattgacagagcaggtttggtgggcgcagatggtgcaacgcatgcaggagcttttgatttagcttacctctgttgccttcctggatttattattatggccgctgcagatgaagcggaattagtgcatatgatagcgacggcaagagatataaacgacgccccttctgcgattagataccccagaggtgagggtgtgggggtggagcttccagaccatggtacgcctttgccgataggtaagggacggttgcttcgtaaaggttctactgttgccatactctctttaggatcgcggttgaaagattgtctgttggctgcggagcaattggcagctcttgggctgagcactacggttgcagatgcacggtttgcaaaaccactcgataccgagcttataaagcaaatggctcaagaccatgagctcttgataattcttgaagaaggctctgtcggtgggttctcgagtcaggttttgcattttctcgcacttgagggtttgctggatggtggtgtaaaagttcgtccaatgacactgccagatatatttattgatcatgcttcttcggatgaacaatataaaatcgcgcaattagattcggcgagtataatagacgttgttgttaaaactctcggtaatagtgaattgagtggctcagcctcagcttaaa

SEQ ID NO: 232999 - DNA, 1516 bp, Unknown
  Bacterial polypeptide expressing nucleotide sequence isolated from the Sargasso Sea
taaggagtctgaatttgatgctatgagtgtgggacatcaagcactttcaattagtgcagctttaggcatggatgaagcctctaaacatcaaaaaaataataagaacatattttctgtcataggtgatggtgcaatgacagccggaatagcatttgaggctatgatgcatgcaggacacttgaataataatttaaagattattcttaatgataatgatatgtccatatcaaagaataaaggtggtttatcagactatcttgctaaaatatgggcatcaaaatcatataagaaacttaaatctagcggtaaaaaagttcttaagaatctgccttatgggcttcatattacaagaaatcttaaagatgggattaagtctgcagtaatgccaggaaatttatttgaagatctaggacttcattatgtggggccaatagatggtcatgatattccacttttaataaaaacaattaacagaatgatggaaaaaaatgagccatatttgctacatgttattacaaaaaaaggtgctggttttgaacctgctgaaaatgaaagaattaaatttcatgcaatctcaaaaatagaaaatactccagctcctaaaaaaactaaattccaagatatttttggagattggttatgtcataaagctaaacaagatagcaaattggtaggaataactcctgcaatgaaagaaggttctggaatggttaattttgaaagggaatttccagagagattttatgatgtagcaattgctgaacagcatgctgttacatttagtgcaggaatgtctttagaaggcatgaagcctgtagttgctatatattcaactttccttcagagagcttatgatcagttgattcatgatgtttgtcttgagaatttagatgtaacttttgcgttagatcgtgcaggtatagttggagaagatgggccaacacattcaggaaactttgatattgcttttatgagagcaattcctaacatagttatagccacaccatcagatgaaaatgagatgtggcaagttttaaattcttgttatgaacataaagggcctgcagcagtcagatatcctagaggctcaggaagaggatcagaaataatagataaagataataagtttgagataggtaaagctaaaaaagttctggatggcgagaatttatgtatcttaaattttggcgttcttttagatagagttgaattattagcagagaataataattttggactttatgatatgaggtttgttaaaccaatagatattcaagctttggaagatatagcgaataaatatgatcaaatagttactttagaagatcatacaattatgggtggtgctggaagttgtgttgcagaacatttaaatataattggcatgaataaaaaaattcttcatcttggtcttgaagatagtttcccaaaacatgggtctagaaatgaaattcttgaattaaatgaactagatgcagtctcaatatcagaaaaaatactaaattttattaaatag

SEQ ID NO: 233000 - DNA, 1771 bp, Unknown
  Bacterial polypeptide expressing nucleotide sequence isolated from the Sargasso Sea
aatgaaaatatttagtgaaatccctagtgaagttccttcaactaagctacttgataaaattaattatcctagagatctaaaagagctttcgcctcctgatctaaagattttagctgatgaattgagagaatttttgctctactcagttggtaaaagtggcgggcatcttggagcaggtcttggtgttgttgagttaacaattgttttacattacctttatgattctccatcagacaatattgtctgggatgttggtcaccaagcttatccccataagatattgactggtcgtaagaatcaaataggctcaataagatcaaaagatggcctagctccctttccatcaagaaatgaaagtgattatgatgtttttggtgctggacattccagtacgtctgtaagttcagcagttggtatggctattgctaacaaattaaatgagggagagaaaaaaacagtagctgttattggagacggtgcaatgactgcaggaatggctttcgaagcaatgcaacatgctggaggcataaagccagatatgctgataattctaaatgataatgacatgtcaatctctgagaatgttggaggcttaaataattacttctcaagaatatgggcttccaaactttataaagggattaaaagtaatggtaaaaagtttttaaagaacatccctgctgctcatcatctagcccgcaccgtagaaactcatatgaaaacaatggtagcgccgggagctatttttgaggagcttggactaaattatattgggccaattgatgggcatgatattgatcaacttttgaaagtaattggaaatctaaagaattttgaggggccacagttccttcacataattacaaaaaaaggtgctggatatgatttagctgaagaggacagaattaaatatcatgcaatatctaaaactaatacttcaaaaaatatagtaaaaactaaaccaaaatatcaagatatatttagcaactgggtagtagacatggctagagaagacagtgatcttgttgcaataacgccagctatgagagaaggatcaggattagttgaatttagtaaagagtttccagagagatattttgatgttgcaatagctgaacagcatgctgttactttatctgctggattagcctgtgaaaaaaagaagcctgtggtagcaatttattctacattccttcaaagagcctatgatcaacttattcatgatgtagcacttcaaaacttagatgtcacttttgctattgatagagctggactagttggtgaggatgggcctactcattcgggaaactatgatctggtttacttaaggtgcattcctaatatgatcgtgatgactccatcagatgaaaatgaaactagaaagcttttgacaactggctttttgcataatggccctgcatcaataagatatccaagaggatctggtccaaatgttattgttgagaatgatctttcagcagttgaaataggtaaaggaagattgattgaagaaggatcaaaagatttaattgtcatcaattttggagctttactcgatcaagcaagagaagttgcaagtactctaggtcttactcttatagatatgcgttttgtgaaacctcttgatgaagatattcttagaaaatatttatctaaagcgcaagcatttgtttcaattgaggatggatcagtagctggtggtgcaggaagtgcggttcaagagttttgtgcagacaataacatcaatattaagtctaaacttctcggcata

SEQ ID NO: 233001 - DNA, 1069 bp, Unknown
  Bacterial polypeptide expressing nucleotide sequence isolated from the Sargasso Sea
ttttcaagaatatgggcatcaaaaacttacaagggtattaaaaaaagtggttctagtttcttgaaacctttacctcaggcatatcatttagctagaaaagtagaaacgcaaatgaaagcaatggttgcaccaggaactatttttgaggaactaggcttaaattatattggtcctatagacggtcataatttaaaagagcttaaagatgtcatttcaaatttaaaagaatttgaaggtcctcaatttcttcacgtaataacaaaaaaaggtgcgggtctagattcagcagaagccgacagaataggttttcatgctataggaaagataaacgcaataaaagataaaaaaattaagcaaaaaaaatatcaagatatatttggcgaatggattatagatatggctcaaataagtgatgatcttattggcattacaccagcgatgagagagggatcaggacttgttgagttcagtaaaaaatttccagatagatactttgacgttgcaatagctgagcaacattccgtaacatttgcagctggtttatcagttgaaaaaaagaagccagtagtagcaatatactcaacttttttacaaagagcgtatgatcaattaattcatgatgttgcagttcaaaatcttgatgtaacatttgcgttagatagatccggtcttgttggtgaagatggtcccactcactcaggaaattatgatattgcttacttaagatgcattccaaatatggtgatttgtactccttcagatgaaaatgaaacaagaaaattattaacgacagcatacttacataatgggccagcctctgtgagatatccaagaggtactgggccaaatagtaatgttgataaagatctaaagcctttaaagattggagaagcaaatataatcaatgaagaaagttcagaaatagtaattttgaactttggaactcttttaaatgaagcaaatcaaatctcaaaagaactaaagtccgctctagtggatatgcgttttgtaaaacctttagacgaaaagcttttaagaaaactttttaaaaaggcaaaggttttcattt

SEQ ID NO: 233002 - DNA, 814 bp, Unknown
  Bacterial polypeptide expressing nucleotide sequence isolated from the Sargasso Sea
attgaaaatttttaaagaaataccaactgagttaccaaatacgccattattagattcagttgattatccttcagatttaagatcattttccataaatgaacttgagactcttgcaagtgagttgagagaatttttgctgtattctgtgggccaaagtggtggtcatttagggggcggacttggtgttatagagcttacaataatacttcatcatctttataacactccatatgacaatctagtgtgggatgttggacatcaggcttatcctcataaaattcttactggaagaaaagatagaattatgtctattagaaagaaggatggtttagcgccctttccttcaagatcagaaagtgaatatgatacatttggggttggtcattcaagcacatctttaagtgcacttgttggaatggcggaggctacaaaaaattcaaatccagataaaaaacatgttgctgtaataggtgatggagcaatgactgcaggcatggctttcgaagcactgagtcatataggacatttaaaaccgaatttattagtaatattaaatgataatgatatgtctatatctgaaaatgttggcggtttatcaaattacttttcaagaatatgggcatcaaaaacttacaagggtattaaaaaaagtggttctagtttcttgaaacctttacctcaggcatatcatttagctagaaaagtagaaacgcaaatgaaagcaatggttgcaccaggaactatttttgaggaactaggtttaaattatattggtcctatagacggtcataattttaaagagcttaaagatgtc

SEQ ID NO: 233003 - DNA, 1381 bp, Unknown
  Bacterial polypeptide expressing nucleotide sequence isolated from the Sargasso Sea
aatgctggtaatgcaaaaaaacaattactgggtattttaaatgacaatcaaatgtcaattagtccaaatgtaggagctatgagaaattatcttatgaaaatttccacaaataaatactacaattatataagaaaaaaaattagcactttacctgatatagcttatggaaagacattattgagaagaatagaatctagcgtaaagaattttttgcttccaagaacagtatttgaagatttaggtttcagatattttggtccagtagatggtcatgatgttaatcttcttgtgaatacattagaaaaaattaaagacttcccaggtccagtagtattgcacactgtaacaaaaaaaggaaaaggaattgattatgcagaaaaagatcctatcaaatatcatggtgttaaagcaaaaaaaattggtgaagataaaactttagttcaagatgctcctattttccaaaatgtttttggttctttatgttgtagtctagcaaatgagaatgaaaaaattgtttgtattactgctgcaatgagagaaggaactggtttggtaaaattttcaaaaaaattcccagatagatattttgatgttggaattgcagaagctcatggtgtaacttttgctgctggtttatcaatcagtggcaacatccctattgttgcaatttattcaacatttcttcagcgcggctatgatcaaattgttcacgatatagctattcaaaaattgccagtaattttttgtttagatagatctggtttagttggagaggatggccctactcatcatggtgcattagatatagcatatatgcgttgcatacaaggaatgatagttactgccccaaaagatggaaatgaattaaaaaatttattatatactgctatcaatcataatagtggtccatttagtattcgatatccaaaagattcatctatagcttttcataaagagatccctggagaaaatattccaattggaagttgggaagtaataaagaaaggaacagatgtaacccttttagcagttggatcaatggttgataaagctctatatgttgctaataagttaaaatctaataatattcactgtgaagtagttaattgtagatttattaaaccaatggatgaaaaatatttaaatgaatctttaagaaatttttctaaaattgttacacttgaagaaggagtgttagatgggggttttggagaaggcgtttcaggatggctgtcttcaatgaaagcaaaaaataatttattaaggattggattacctaataattttgttgagcatgggcctaggaaagttttgcttgaagaagttggtcttgattctgaatctttaagtaaaaaagttttaagttttataagtagctaat

SEQ ID NO: 233004 - DNA, 241 bp, Unknown
  Bacterial polypeptide expressing nucleotide sequence isolated from the Sargasso Sea
atgcatctcggagatctgaagcatccgaatgaactgcacggactcagcccggcccagcttgaggacgtggctcggcagattcgtgagcggcatctgcaggtggtgtccaccagcggtggccacctgggccctggcctgggggttgtggagctcaccctggcgctgtaccagacgctggatctcgaccatgaccgtgtgatctgggatgtgggccatcaggcctacccccacaaattgatca

SEQ ID NO: 233005 - DNA, 1747 bp, Unknown
  Bacterial polypeptide expressing nucleotide sequence isolated from the Sargasso Sea
atgcttttaagtgagttaagtcatccaaatcaacttcatggcttaacagtttcacaattagaggaaattgcttgtcaaattagagaaagacaccttcaagtagtatctactagtggtggccatcttggccctggtttaggtgtcgttgagcttacattggctttatatcaaactcttgatctagatttcgacaaagttgtttgggatgtaggacatcaaggttatcctcataaattaataacaggccgtttcagtcaatttgattcccttagacaacaaaatggagtagctggatatctaaaaagaagtgaaagtaaatttgatcattttggtgctggacatgcaagcacttctatttctgctgctttaggaatggcaatagcaagagacagaaaaggtgagaattataaatgtgttgctgttattggagatggagcattaactggaggaatggcattagaagctataaatcatgcaggacacttaccaaatactcctttagttgttgtattaaacgataatgatatgtctatttcacctccagttggagctctttcctcttacttaaataaggtaagagttagtcctccattgcaatttttatccgatagtgttcaagaaagtgtaaaaaatattcccttaattggtaaggatataccagaagaattaaaaaatattaaaggaagcgttagacgattggctgtgcctaaggttggcgctgtttttgaagaacttggatttacatatatgggtccaattgacggtcatgatattggaaacttagttaatacttttaacgctgctcataaacttaaaaaacctgtacttgttcatgttgtcacaacaaaagggaagggttatccttatgcagaagctgatcaagtagggtaccatgctcagtctgcatttgatctgacaactgggaaatctattccatcaaagaagcctaagcctgttagttatagcaaaatatttggtcaaactttattgaaaatatgtgaacaagatagcaaagtcgttggtattacagcagcaatggctacaggtactggtttagatatattgcaaagaaatattccagatcaatatatcgatgtaggaatagcagaacaacatgcagttactcttgcggcgggaatgtcgtgcgatggtcttaaacctgttgtagctatttatagtactttcctccaacgtgctttcgatcaattaattcatgatgtagggattcaaaatttaccagtatcgtttgtacttgatagagctgggatagttggagctgacggtcctactcaccaaggtcaatacgatatcagttatatgagatctatacctaattttgtattaatggccccaaaagatgagtcagaattacagagaatgttaataacttcaataaaccataatggtcctacagcactaagaatacccagaggctcggggctaggagtggctgtaatggatgagggttgggaacctttaaatataggtgaagctgaaatacttgaagaaggggaggatattttaattattgcttatggttcaatggttgcatcagctatcgaaactgtaaagatactaagaaatatgaacattaatgcatgtcttataaatgcaagatttgtgaaacccctcgataaaaatattattatgcctttagcaagtaggattcaaaaagttgtaacaatggaagaaggaaccctaataggtggatttggctccgcaataattggaattataaacgatagga

SEQ ID NO: 233006 - DNA, 1636 bp, Unknown
  Bacterial polypeptide expressing nucleotide sequence isolated from the Sargasso Sea
tctgacaagattgtctgggataccggtcaccaagcttatcctcataaaatactaactggtagaagagacaagatgcacattataagaaagattgatggtcttgctccctttccttctattagagaatctaaatttgatgctatgagtgttggacattcaagcacttcaattagtgcagctttaggtatggatgaagctgttaaacaccaaaaaaataataaaaatatattttctgttataggcgatggcgccatgacagctggaattgcatttgaagcaatgatgcatgcaggacacttaaacaataatctaaagattattctcaatgataatgatatgtctatatcaaagaataaaggtgggctctcagattatcttgcaaaaatatgggcatcaaaatcgtacaaaaaacttaaatctagcggcaaaaaagtacttaaaaatttaccttatggacttcatcttacaagaaatattaaggatagtttgaaatctgcagtgatgccaggaaacttatttgaagatttaggtcttcattacatagggccaattgatggtcatgatatacctcttctaattaaaacaattaatagaatgatggaaaagactgaaccttatttgctgcatgttgttacaaaaaaaggtgctggttttgaacctgctgagaatgaaagaattaaatttcatgcaatttcaaaaatagaaaatacaccggctcctaaaaaagcaaaattccaagatatttttggagattggttgtgtcataaggcagaagaggataacaaattagtaggaataacacctgcaatgaaggaaggctctggaatggttaattttgaaaaagagtttccagaaagattctatgatgtagcaattgctgaacagcatgctgttacatttagtgcagggcttgctttggaaaacatgaagcctgtagttgctatatattcaacatttcttcaaagagcatatgatcaattgattcatgacgtttgtcttgaaaatcttgatgtaacttttgcattagatcgtgcaggtatagtcggagaagatgggccaacacactcaggtaattttgatatttcatttatgagagcaatacctaatatagtaatagctactccatccgatgaaaatgaaatgtggcaagctttaaatgcttgttatgagcatcaaggaccagcagctatacgatatcctcgaggttctggaagaggagcagaaataacagataaaaataataaagttgatataggtaaggctaaaaaaattatagatggtgaaaatttatgtattttaaattttggcgtacttttaaatagagtagaaactttagcaaaaaacaataattttggactttacgatatgaggtttgttaaaccaatagatatccaagctttaaaagatataggaaataaatatgaccaaatagttactctagaggatcatacaattatgggtggtgccggtagctgtgtatcagaacatttcaatatgcttggtataagtaaaaaaattattcatcttggtattgaagataaatttccaaaacatggatcaagaaatgagattcttgagttaaatgaattaagtacagactcaatatcagaaaaaatactaaattttactgaataga

SEQ ID NO: 233007 - DNA, 1609 bp, Unknown
  Bacterial polypeptide expressing nucleotide sequence isolated from the Sargasso Sea
ttttacaaaaagatcagagagtgagtacgatccttttggagctgcacatagttctacatctatatcttcagcatttggtattgcagaagcaaataaattggcaaataaatcatctaacgtaatagctgtaatcggcgatggtgcaataagtgcgggtatggcttatgaagcaatgaataatgccggagcatcaaaaactaaaatgatagtaattttaaatgataatgatatgtcaatagctaaaccagtaggtgctatgagaggttatttagctaaattatttactggaaaaatatattttagtttgagggaaacgtttaagctaattacttcagcattttcaaaaagatttagtgctaaagctggtaaagccgaagatttcttacgttctgcggttacaggaggcacgttgtttaattcattaggtttttactatgtaggaccaattgatggccatgatttgacaactcttgttccaattttaaaaaatgcaagagactctaaacatgaaggaccaattatgatccatatcaaaactcaaaaaggaaaaggttatttatatgcagaaaaagctactgaccactatcatggtgtttcaaaatttaatgttgaaacaggcgagcaagttaaaagtggttctaatcttcctgcttacacaaaagtatttgctaatactttggtcaaacatgctcacaaagatagtaaaattgtaggaataactgccgcgatgccaggcggcacaggaatggatatttttggaaaagaatttcctaaaagaatgtttgatgttggaatagctgaacaacatgctgtaactttttctgctggattggctactgagggatacaagccttatgcagcaatttattctacttttttacaaagagcttatgatcaagttgttcatgatgtagctattcaaagtctgccagtgagatttgcaatagatagagcaggtttagtgggagcagatggatcaacacacgctggttcatttgatattacttatttatccactttaccgaacttcattgttatggctgcaagtgatgaagctgagttagtaaaaatgattaatacttcagttgatataaatgatagacctactgcaattagatatccaagaggaacaggaataggagttgaactgccttcaatagatgagaaaattgaattaggtaagggaagggtaattcaagaaggaaagcaagcttgcattttaagcttaggaacaagacttgaagaatgtaaaatagcagctgaagaattaaagaacaaaggtgtctcaactacaattgttgatgcaagatttgcaaaacctctagatcaagaacttattttaaaatgtgctagagagcatgaggtaatgatcactatagaagaaggatcaataggtggatttggctcccatgtagaaaacttactttcagagaagggtgtattcgataaaggtttaaaatttagatcaatgacattgcctgatgtttttattgaacaagataatccaaaaaaaatgtatgagttggcaggtttaaattcatctcaaatttcaaaaaaaatcttagatattttatttaaaaaggaatcaataaaagtagtaaaaaattaa

SEQ ID NO: 233008 - DNA, 1200 bp, Unknown
  Bacterial polypeptide expressing nucleotide sequence isolated from the Sargasso Sea
tagtggatttttaaagcgttcagaaagtgattatgatgttattggcgcaggtcatgcttcaacctctatttctgcgggacttggcattgcggaagcaagacgtcaactgaatgaagattatagagttgcatctattattggggatggatctatgactggtgggttagcttttgaaggaataaataatgcgggccatttaggaaaacagtttctcgtcatactaaatgataatgaaatgtctatcagcccaaatgttggcgccctttcatcttacttcactaggttaatatctaatccactttacaatagggtgcggaatgaattttgggatttaactggaagattgccaatagcaaaaagtcaaaccagaacactgattaaaaaagttgaagagagtctcaaaggtttgatagtcccagggattttatttgatgaattgggttttcgctattttggcccaatagatggacatgatcttaatatggttattagcacattggaaaatattaaagacatacagaaccctgtgctattacatattttgaccaaaaaaggtaaaggcatggtctctctaaatatgaaaaatcgtgaatatcatgaagatgctataaaattccatgcggtaaaacctaatggtaaggcagctacttctgaaaagattaaaagtaaagtaataaaagaaacaccagtacctagctttcaagatgtttttggaaaattatcttgtgaaatagcaagaaatagaaatgatacagtatgtattacagctgcaatgcgtgaaggaacgggccttgtaccatattctaaggaattcccagataggtattatgatgttggtattgctgagggtcatggagtcacttttgcctccggtctagctgctcaaggagttcgtcctattgcagcaatatattctacatttcttcaaagagcatacgatcatattattcacgattgtgctattcagcaccttccagttatcttttgcatggatcgttctggtatagcaggagaggatggtcccacccatcatggctccttagatatagcctatttacgttgtgtgcaagatatgattgtaactgcacctaaaaatggtaatgagttcaggcatttactttatactgcattgaatattaatgataagccattttcaatacgatatcccaaagcaagcgctgtattatttgatgaaaccgg

SEQ ID NO: 233009 - DNA, 1393 bp, Unknown
  Bacterial polypeptide expressing nucleotide sequence isolated from the Sargasso Sea
aatgtcaattgatagacctgttggtgcaatgagtaattatttaacaaaattactttcttcaaaacaatatacaaatgttagaagtttattaaaaaaaatatcatcaaagttatcaaattcaatatctaaaactttgtataaagctgaggagttttcaaaaggtttagttactggtggcactttatttgaagagttaggtttttattacttagggccaatcgatggtcatgatattaaaacattagttccagttttagaaaatataaaagactcatcagttgataaaccaatttttcttcattgtgtgaccaaaaagggttatggttatgatccggcagaaaagtctgatgataaatttcatggcgttaataaatttaatgttaaaacagggcaatctttaaattcatcaaataaaaaaacatactcctcaatttttggggaaacattatcaaatgctgctaaaaatgatgaaaaaattgttgcacttactgcagcaatgatgagtggaactggtttaaatatttttaattctcagcatcctgataggttatttgatgttggtatagccgaacaacatgctgtaaccatggctgcaggacttgctacagaaggctttaaaccatatgtagctatttattcaacttttttgcagcgggcttatgatcaaataattcatgacgtagcattacaaaaacttcctgtaagatttgcaattgatcgtgctggactagttggagcagatggaccaacccatgctggttcatatgatattacttttatatctacacttccaaattttataattatggcacctagtaatcaaaatgaattaattagaatgattaatacaactgtatttattgatgataggccttcggcatttagatatccaagaggaacaggtgaaatggatattaatgatcataatattgaacctatagaaataggaaagggaattgttattgaacaaggcaatgaagtagcgattttaaatttaggatctaggttacaaagttgccaagaagcaataaaaattcttaatgccaatggaattcagccaactttagcagatgctagatttgcaaaaccaattgatacaaatctactagaacaattattagataatcataaatacttgcttactattgaagaaggttcaagtggtggatttagctctagtattttaaattatattcataataaaagaattaagattacatcaaccaaagtaaataatattttttttccagataaatttatagaccatcaatctcctgaagagcaatattcagaaataggaatggatgctgattctattgccaaaaagatcatacagatttatgaagataacgtagttaattttcaatctttcaataaaaatataagaaattga

SEQ ID NO: 233010 - DNA, 1168 bp, Unknown
  Bacterial polypeptide expressing nucleotide sequence isolated from the Sargasso Sea
tggacataccttagatcatcttttaccagttttaagaacccttcaaaaatctaagtgggatggtccagtttttgttcatgtggtcacaaaaaaaggatatggctatgagccagcagaaaaatctgaagataaataccatggagttagcaaatttaacgtcataacaggagaacaagtaaaatcgacctcaaaagctccaagttatacaaaagtttttgccaatgctttagttaagcaagcccaaaaagataaaagtatagtagcaattactgcagccatgccatcaggaactggccttgacatttttgaaaaaaaattcccaaaaaggacttttgatgttggtattgctgaacaacacgctgttacattcgcagcgggattagctactagagggatgaaaccttatgcagcaatttattctacgtttctccagagagcatacgatcaagttgttcatgacgttgcaatacaatctcttccagtaagatttgcgattgatcgtgccggtcaagtaggagctgacggtgcaacacatgcaggatctttcgacttagcatatctttgtaccttgccaaattttatagtaatggctcctagtgatgaaaacgaactctgtaactgcatagcgacatcaactcagataaataataaaccatctgcttttagatatccaaggggagagggtattggtgttaaaatcaatgagaagcctgaaccatgggaaattggtaaaggtaggattataagagaaggaaaccaggtctgtattttgtctttaggaacaagattaggagactccttgattgcatcagaaaaattggcctcgtatggtttatcaaccacagtagtagacgcaaggtttgcaaaaccaattgacgagttattgatcacgcaacttgccagagaccatgaagttctcgtgacggttgaggagggttcaattggaggtttttcagctcaagttatgtcttttctaacaaaatctgcggcgcttgatagggaattaaaatttagaccgctatttttcccgaatagattcataaatcatggaaagccagatcatcaaaatattgaatgcggtatagaccatgacagtattgtaaaaaccgtcttaggtgcattaggtattgctactccagcaaagttttcaatagaagaaagagcctag

SEQ ID NO: 233011 - DNA, 1630 bp, Unknown
  Bacterial polypeptide expressing nucleotide sequence isolated from the Sargasso Sea
caaatttgatcattttggagcggggcattcatctacttctatttcttcggctttaggtattgcagttgcaagagataagcttagaaaaaaatttaatgttattgcagtaattggtgatggagcgatgagtgctggtatggcgtatgaggctatgaataatgcaggtaatataaatacaaatatgattataattttaaatgataatgatatgtctattgcgccagctgtaggtgctttaagtaattatctctctaatgtagtctcaagtagaccttttaatactgttcgtgaaatagctaaacaaatgatggagttttttcctgaagaactgagcaaaactgcaaaaaaagcagaagatttagctagaaatttgttaaacaagggtgaaagtacaatttttagtcaaatgggaatgttttatttgggtcctgttgatggacatgatgtaaaatctatggttaaaattttagaaaatttaaaggatggaccaatagagggtcctgttttacttcatgttgttacagaaaaagggaaaggacatcctttttcaaaagtatcagaagagaaatatcatgctgtgtctaagtttaatttagttagtggagattcggttaaatcaaactctaacgtaccaacctatacatcagttttttctgatacactttgtgatattgcagaaaatgatgaaaaaataattgccatcactgctgcaatgccatctggaactggactaaataattttaaaaaaagattttatgataggttttatgatgttggcattgcagagcaacatgccgtcacttttgcagctggactagctgttgagggtttcaaaccttttgtagcgatatattcgacttttttacagagggcatatgatcaagtgatacacgatgttgtaattcaaaaactcccagtgaggtttatgttagatagagcaggattagttggagctgatggagcaactcatgcaggttcttttgatttagcttacctatcttgcttgccaaatgtagtcattatggccccaagtaacgaaaatgaattatcaaaaatggtttttactgcttctaagtataacgatggacctattttttgcaggtatccaaggggtgaagctgttggtttaaaaattgaagaaaaattagaaaagttaaaaattggaaaaggtaaaattcttaaaaaaggtaatcaaattgctgtgttatcagttggtacaatgttgaaatctgtactgcaatcatgtgagtttttagataatgatggatatagtatgaccattgctgatgctagatttgtgaaacctatagattatgaaatgttagaaaatctatttcttaatcatcaggctttattaattgttgaagaaggtgctcaaggaggcttttcctcacattgtctaagttatttatctaaaaataattttttaggtcaaaaatctacgtttgttaaatgtctaactttgcctgacaagtttcaagatcatggtagccaagataatcaattaaatgaagcaaatttagatgatgagggaattttaaaagaattaaaaaatataatttcaatattagaaatagttccaaaatataaaaaacaaaatagtttcagtgactcaaaaagatcgtattga

SEQ ID NO: 233012 - DNA, 1516 bp, Unknown
  Bacterial polypeptide expressing nucleotide sequence isolated from the Sargasso Sea
gctatagcaagagatagaaaaggagagaatcataaatgtgtagctgtaattggagatggagctttaactggtggaatggctttagaagccataaatcatgctgggcacctaccaaatacaccttttgttgtagtactaaatgataatgatatgtctatatctcctccagttggcgctctttcatcttatttaaataaggttagacttagtcccccattacaatttttatcagatagtgtacaagaaagtgtgaaaaatattccgttaattggtaaggatataccagaagaattaaaaaatattaaaggaagcgtgagacgtttagctgtgcctaaagttggagctgtttttgaagaacttggatttacttatatgggtccaattgacggtcataatattggtaatttaattaatacatttaatgctgcacatagactaaaaaaacctgtgcttgttcatgttgttacaactaaaggtaagggttacccttatgcagaagctgatcaagttgggtatcatgcacagtctgcatttgatcttactactgggaaatctattccatctaataaaccaaagcctgttagttacagcaaaatatttggtcaaaccttattaaaaatctgtgaacaagatagcaaagttattggtattactgcagcaatggctactggtactggattagatattttgcaaaaaaatatcccagatcaatatgtcgatgtaggaatagctgagcagcatgcggttactcttgcagcaggaatgtcctgcgatggtcttaaaccagttgtagctatttacagcactttccttcaacgtgcttttgatcaactaattcatgatgtagggatacaaaatttacctgtatcattcgttcttgacagagctgggatagttggagctgatggtcctactcatcaaggtcagtacgatattagttatatgagatccatacctaattttgtcttaatggctccaaaagatgagtctgaattgcagcgaatgttaataacatcaattaaccataaaggacctacagctctaagaataccaagaggttctggattaggcgtagctgtaatggatgaggggtgggaaccaattaatataggtgaagctgaaatactagaagagggtaatgatatcttaattattgcttatggatccatggttgcttcggcaattgaaacatcaaagatcttaaaggatatgaatattaatgcatgtattgtaaatgcaagatttgtgaaacctctcgaccaaaaacttattattcctctagcaagtagaatccaaaaaatagtgactatggaagaaggaacattaattggtgggtttggttcggctatcgttgaattatttaacgataatgaagtaaatattcctgtatacaggattggtatacctgatgttttagttgatcatgcatcacctgatcagagtaagaaaaaattaggtcttatgcctgatcagatggcagataaaattattgagaaatttaaattaaataattaaa

SEQ ID NO: 233013 - DNA, 1434 bp, Unknown
  Bacterial polypeptide expressing nucleotide sequence isolated from the Sargasso Sea
ttcagctctaggaattgccatagcaaataaactatctaataaatctaacaatgttattgctgttattggtgatggagcaatcagtgccggaatgtcttacgaagctatgaacaatgcaggagctagtaaaactaaaattattgtagttttaaatgataacgatatgtcaattgccaaacccgtgggtgcaatgagaacatatttggcaagaattttatctggaaaaatatactttagttttagagaaactataaaacttattatttcagctttttcaaaaagatttagtaataaagcaggtaaagcagaagtttttttaagatccgctgttactggaggaacattatttaattcaatgggttttcattatattggaccaatagacggacacgatttagatgctttaattcctgtattaaaaaatgcaaaagaaattaatattgatggaccaataatggtacatatcaagacacaaaaaggcaagggatacaaatttgcagagaaatcagaagacaaatatcatggagtttcaaaatttaatatcagtacaggaattcaagaaaaatctaaatcaaatgtaccagcttatacaaaagtttttgctcaaacacttataaagcatgctgaaaaagatagtaaaatagttggtataacagcagcaatgccttctggaacaggaatggatatatttggagaaaaatttccatcaagaatgtttgatgttggtatagcagaacagcatgctgttacttttgcagccggtctagcaaccgaagggtacaaaccttacgcagcaatttattcaacatttttgcaaagggcatatgatcaagtggtacatgatgttgcaattcaaagtttaccagttaggtttgcaattgatagagctggattagttggtgctgatgggccaacacatgctggctcgtttgatataacttatttatctactttaccaaattttattgttatggcggcaagtgacgaggctgaattagtaagaatgataaatacatcagttgatataaatgataaaccttcagcaattagatatcctcggggcaatggtattggagtaaacttaccttcaaatgatgaaaaaataattattggaaaaggccgtgtaataaaagaaggaaagaagatagctatattaaattttggagctagattaaaagaatgcctaatagctgaagaaaatttaaaaaaaaaaggaataaatttaactattatcgacgcaaggtttgcaaaacctctagatgaaaatctcatttggcaaattgcaacagaacatgaggcaataattacaatagaagaaggatcaataggaggatttggatctcatgtcgggcaatttctttcagataaaaatttattggataataatttaaaatatagatctatgattttgcctgatagatttattgatcaaga

SEQ ID NO: 233014 - DNA, 1047 bp, Unknown
  Bacterial polypeptide expressing nucleotide sequence isolated from the Sargasso Sea
gcccattcatctacctcaatatcatcaggtctgggtatgagtgttgcaagggatattgaaagaaaacattataatatcatttcagtaattggtgatggagcaatgagtgctggtatggcctacgaggcaatgaataatgcaggtgttatgaagaataagctcattgttatactaaatgataatgatatgtctattgcgccacctgtcggtgccatgagcgcatatttagctaagctaatttcagggggtatttatcgtggctttcgtaattttataaaaaaaatcatgagatatttaccgccgccagttcgtcgcggtttggttcgttttgaagagtatgggagaggtttttttacaggtggaacattatttgaagaaatgggtttttattatgtcggtcccattgatggtcataatttcaatcatttattgccaatattgaaaaatgttaaatcaaataatgatgggccaactttaattcatgtagtgacaaaaaagggtaagggctatgcgcctgcggagacatcagaagataaatttcatggagtatcaaagtttaatataaatacaggaaaacaggagccaaaaagtacgaacttaccagcatatacaaaggtattttctgatcaactaatcgaagaagcaaaaagtgatgagaaaattattgctataaccgctgcaatgccttcaggtacaggactagatgcctttcagaaacaataccccgatagatattttgatgttggtatagcagaacagcatgcggtgacttttgctgccggacttgcggtagacgagtttaaaccattttgtgcaatttattccacctttcttcaaagggcctatgatcaagtaatacatgatgttggaattcaaaatcttcctgttaggtttgcgattgatagggcaggattagtcggggatgatggcgcaacccatgctggttcgtttgatataatgtatttatcagcaatcccaaactttactgtaatggcaccatcagatgaactcgagttagcccgaatggtaaaaacatctgcaaagcac

SEQ ID NO: 233015 - DNA, 1128 bp, Unknown
  Bacterial polypeptide expressing nucleotide sequence isolated from the Sargasso Sea
aaaagatttagtgctaaagcaggaaaagcagaggattttttccgttcagcagttaccggaggtacattgtttagttcacttggtttttattatgcaggtcctatagatggtcatgatttatcaagcctagttccaattttaaaaaatgcaaaagaatcaagacatgagggtcctataatgattcatatcaaaactcaaaaaggaaaaggttattcttatgcagaaaaagcaaatgatcattatcatggagtgtcaaaatttaatgttgagactggcgaacaagtaaagagcaaatcaaaccttccagcttatacaaaagtatttgcaaacactttagttaaacatgctaaaaaagatagtaaaatagtaggaataacagcagcgatgcctggagggactggcatggatatttttggcaaggagtttccaaatagaatgtttgatgttggaatagcggaacaacatgctgtaacttttgcagctggtctagcaactgaaggatacaaaccatatgctgcaatttattctacatttttacagagagcatatgatcaagttgtccacgatgttgccatccaaagtttaccagttagatttgcgatagatagagcaggattagttggtgctgatggatcaacacatgctggttcatttgatataacttacttatcaactttaccaaactttgtagtaatggcagcaagtgatgaagctgaactagttaaaatgattaatacttcagtagatataaatgacagaccttctgcaattagatatccaagaggaactggagtaggtgttgatcttccatcaatagacgaaaaaattgaaattggtaaagggagagtcgttcaacaaggtacacaagtttgtattttaaaccttggtactcgacttgaggagtgcaagctagctttagaggaattaaaagcaaaaggagtttcaacaactttgatagacgccagatttgctaagcctttagacgaagaacttatactaaaatctgctaaggaacatgagcttatgataactattgaagagggatcaataggtggtttcggttctcatgttaaaaatttattagctgaaagaggagtatttgataaaggtttaaaatttagatcaatg

SEQ ID NO: 233016 - DNA, 1107 bp, Unknown
  Bacterial polypeptide expressing nucleotide sequence isolated from the Sargasso Sea
attatattggaccaattgatgggcataatttaaaagaattaataaatgttatatctaatctaaaagaatttgatggtcctcagtttttacatgttattacaaaaaaaggtgcgggtttagaccctgcagaagcagatagaattggatttcatgccattggaaaaattaattctattaaagatgaaaaaacaaaacaaaaaaaatatcaagatatttttggggaatggattgttgatatggcgtcacaagacaatgatttaattggaataaccccagcgatgaaagaaggatctggtcttgttatgtttagtaaaaaatatcctgaaagatattttgatgttgcaattgctgagcaacattctgtaacttttgcagctggacttgctgttgaaaataaaaaacccgtggttgctatatattcaacctttttacaaagagcttatgatcaattaattcatgacgttgcaatacaaaatcttaatgtaacttttgctttagatcgatctggtttagtaggtgaagatggtccaactcattcaggcaattatgacattgcatatttaaggtgtattccaaatatgattatatgtactccatctaatgagaatgaggttagacatttattaacaacagcatatctatatcaaggtccagctactgtaaggtacccaagagggattggtccaaatgaagaagttgaccaagacttgaatccatatgaaattggaaaggctaaagttataaatgaagaaaatagtaaagtattaatattaaattttggagccttaattgatcaagctatagaggtagctaaagacttaaaattaaccttaattgatatgagatttgttaaaccattagatgaagatattcttaaagaatatctatctaaatcagatatgtttatatctattgaagatggatcaataatgggtggtgctggaagtgctgtccaagaattttgttcaaaagaaaacatcaatattaaatcaatactttttggtataccagatcaatttattgagcatgcctcaagagaagaaatgttaaatgaagcagggctttcttcagaaagtattaaatctaaactaaaagaaatgttataag

SEQ ID NO: 233017 - DNA, 1075 bp, Unknown
  Bacterial polypeptide expressing nucleotide sequence isolated from the Sargasso Sea
aaaagatcttaaagatgtcatttcaaatttaaaagaatttgaaggtcctcaatttcttcacgtaataacaaaaaaaggtgcgggtctagattcagcagaagctgacagaattggctttcatgcaatcggaaaaataaacgcaataaaagataaaaaaattaagcaaaaaaaatatcaagatatatttggcgaatggattatagatatggcaaaagtaagtgaagatcttattggtattacaccggccatgagagagggatcaggacttgttgagttcagtaaaaaatttccaaatagatactttgacgttgcaatagccgaacaacattctgtaacatttgcagctggtttatcagttgaaaaaaagaaacctgtagtcgcaatatactcaacttttttacaaagagcttatgaccaattaattcatgatgttgcagttcaaaatcttgatgttacatttgctttggatagatccggtcttgttggtgaagatggcccgactcactcaggaaattatgatatagcctacttaagatgtattccgaatatggtgatttgtactccttcagatgaaaatgaaacaagaaaattattaacaacagcatacttacatagtggaccagcttctgtaagatatccaagaggtacagggccaaatagtaatgttgataaagatctaaagcctttaaagattggggaagcaaatatcatcaataaagaaagttcagaaatagtaattgtgaactttggaactcttttaaatgaagcaaatcaaatctcaaaagaactaaaggccactttagtggatatgcgttttgtaaaacctttagatgaaaagcttttaagaaaacttcttaaaaaggcaaaggttttcatttcaattgaggatggttcaattatgggaggtgctggtagtgctgttcaagaatttgcatcaaaagagaatataaatgttagatcaatcctttttggtattcctgataaatttattgagcatgcttctagagaagaaatgttagttgaagctggtttagacgcagaaaatattaaatctaaattaagtaaattgttataa

SEQ ID NO: 233018 - DNA, 1219 bp, Unknown
  Bacterial polypeptide expressing nucleotide sequence isolated from the Sargasso Sea
tgcggctgtaactggtggaacattatttaattctttaggattttcttatttgggtcctattgatggacacgatattgacttattggtctcgacattaaaaaatgcaaaagagagcaaaagtgatggaccaatattaatacatattaaaactcaaaaaggtaaaggatattcatttgcagaaaaagcagatgataaatatcatggagttactaaatttgatgttaaaacaggtgaacaggccaagagtaataataaaattccttcatatacaaaagtctttgctaatactcttattaaacatgcagaaaaagatagtaaaattgttggcataacagctgctatgccttcaggcacaggaattgatttattttcagaaaaatttccaaaaagaagttttgatgttggtattgctgaacaacatgccattacatttgctgggggattagcaactgaaggttttaagccttatgcagccatatattcaacttttttacaaagagcatacgaccaggtcgttcatgacatagccattcagagtctaccagttagatttgcaatagatagggctggtttagtaggggcagatggacctactcacgcaggatcatttgatattacttatctatctacactacctaattttatagtaatggcagctagtgacgaggctgaactggttaaaatgattaatacttctgttgatataaatgatagaccttgtgccttcagatatccccgaggaaatggtatgggagttgaaataccaaatatagactcaaaacttgaaataggcaaaggtaagataataacagagggtaataaagtttgtattttaaattttggagcaagacttcaagaatgtttaacagcagctaaagaacttgaaaacaaaggaattaaaatttcaataattgatgcgagatttgcaaaacctttagatcaagatttaattttaagttgtgcaagagatcatgaaattatgcttactattgaagaaggttcaataggaggttttggttcccatgtttctcatttattatctagcaaaggtatatttgacaaaggattaaaattcagatccttgatattacctgatatatttattgatcaagataaaccagatttaatgtacgaccaagcaggtttaaattcaaaacaaataacagaagaaatagagttgattttatttaacagatcaggaataaaaattattaaataa

SEQ ID NO: 233019 - DNA, 886 bp, Unknown
  Bacterial polypeptide expressing nucleotide sequence isolated from the Sargasso Sea
caaggttataacattgctaaaatagtttcttttatgactgatatgcctgaacatgttggaggtatgacaataaatagatggtgcggatcttctatgcaggcaattcacagtgctgctggagcaattgctatgaatgcaggtaaagtttttatttgctgcggtatagagtctatgacttttgttcctattaatggattaaattacacaccacatccagatttactgaaagatcatccaaatgtttatctttcaatgggtttaactgcagagaatgtagcaaaaaaatataatctttcacgaaaagaacagcaggattttgcaataaaaagccataataacgcatcaaaagctcaattatctaaaagctttgatgatgaaataatttctattaaaaaaaatgatattgaagttaaagctgatggagcaataaggcctaacacttctcaagataccctaaataatttgaagttagtatttgatgaaaatggaacaataacagctggaacagcatctcctttaacagatggcgcagcggcaacattaatttgtgaagaggaatatgctaagtcaaataagcttccgataatagcaaggattaaatcaactgcagttcaaggttgtccaccagaattaatgggactgggacctattaatgcaacaaagaaagctcttaaaagagcaaaattaaatattaatgatattgatatagttgaattaaatgaagcttttgcctctcaatcaatagcttgcattaaggagttaaaaataaatccagagatagttaatattgaaggtggagcaatagcactaggtcatccattaggagcaacgggtacacgcataactgcaaaagctgcatctttaataatgaaaaaaaacaaaagat

SEQ ID NO: 233020 - DNA, 890 bp, Unknown
  Bacterial polypeptide expressing nucleotide sequence isolated from the Sargasso Sea
aagattagctagagaaaaaggcattgatttgggaagtattagcggttctggtccccatgggagaatagtaaaaactgatattttagatgtaaacgtctctagcgttgataccaatcaagaaagtttggcaaccccggttttaagaactaatgttcaacaagcttctggatcatcaataacaaatctttacgctgacagagaatttaaagaaattcctctcaacagtatgagaaaaacagttgcttctaggctaacagaagcaaaacaaaatattccacacttttaccttagaaaagacgctagaatagatgaattattacaagtaagagcaagattgaatgcacatttggcggaaaaaaataataaactttcaattaacgattttattataaaatcctgcgctttagcactgcaatcggtgccaactgcaaatgccatctgggccgaggacaaaattcttcaacttaaaccttctgatattgcagtagctgtttctgtagaagatgggctgtttactcccattatacgagatgccgatactaaaagcttatccaatatttcaaaagaaatgaaagaattggcagataaagctcgctccaaaaagctcatgccaaatgaatatcaaggaggaagtttttcaatttcaaaccttggtatgtttggagtagataattttgatgccgttataaatcctcctcatggagccatactagcagttggcagaggtcttcaaaaaccaatagtaaatgaagatgaatctatttcagtggccaatttgatgtcccttactctttccgtagatcatcgtgtgattgatggcgctctgggcgccaaattgctccaaaatattaccaaataccttgaagacccggtactcatgttaacgtgac

SEQ ID NO: 233021 - DNA, 859 bp, Unknown
  Bacterial polypeptide expressing nucleotide sequence isolated from the Sargasso Sea
agctggatttggacatatttttgttgctggagggattgaaagtatgagtctaattccaatgactgggtataaattatctcctagctacaaagcaaatatggagaatatgaattatcatattggaatgggacatacagctgaagctgttgctgaaaaatataaaatatcaagagaagcttcagatcaattttcatatgagtctcaccaaaaggcagcaaatgcaattgaaaagggattgtttaaagatgagattgttccagttactgttgaagaagtatttgtccaagatggaaataaagtatctaaatctcatacggttgatatggatgagggagttagaagggaaacaacagttgaagctttagctaaattaagacctgctttcaaacttggaggtatagttactgctggtagctcatctcaaatgtctgacggtgcagcttttgttttagttatgtctgaggagatggttaaacagttaggagtcaaaccaattgcaaggatggtaacttgtacttcaggaggagtagatcctttatatatgggaataggacctgttgaagcaattcccaaagctttaagtcaggcaggattaaaattatctgatatagaacaaacagaattaaatgaagcttttgcttgccaagctctagctgtaatccaggagagtggtttaaatccggatactgtaaatgttaatggtggagcaattgctcttggtcatcctttagggtgtactggtgcaaaactttcaatacaattgcttaatgaaatgaaaagaagaaatcaaaagtatggaatggttactgcttgtgttggaggaggtcaaggaattgctggtatttacgagagactctaa

SEQ ID NO: 233022 - DNA, 765 bp, Unknown
  Bacterial polypeptide expressing nucleotide sequence isolated from the Sargasso Sea
tgtgtaaagcaaaacgtttccgttatgccaacaacgatatggtcgagctggaagctcgcctgaaagaagcacgtgaagcgggcgctcgtcatatcctgatcgccactgatggcgtgttctctatggatggtgtgatcgctaacctgaaaggcgtttgcgatctggcggataaatacgacgcgctggtcatggttgatgattcccatgccgtcggttttgtcggcgaaaatggtcgtggctcccatgaatactgtgacgtgatgggtcgcgtggacatcatcaccggtacgctgggtaaagcactcggcggcgcatccggtggttacaccgcagcgcgcaaagaagttgttgagtggctgcgtcagcgttcccgtccttatttgttctccaactcactggcgccagcgattgttgcggcctccattaaagtgctggaaatggttgaagctggcagcgacctgcgcgaccgcctgtgggcgaacgcacgtcagttccgcgagcaaatgtctgccgctggctttactctggccggtgccgatcacgcgattatcccggtgatgttgggtgatgcagtagtggcgcaggcgttcgcccgcgagctgcaaaaagaggggatttacgttaccggattcttctatccggtggttccaaaaggccaggcgcgtatccgtacccagatgtctgcggcgcatacccctgagcagattacgcgtgctgttgaggcgttcacacgcattggtaaacaactgggcgttattgcctgag

SEQ ID NO: 233023 - DNA, 668 bp, Unknown
  Bacterial polypeptide expressing nucleotide sequence isolated from the Sargasso Sea
tttgaataaagaacttgataaacagagggagagtaatcttcatcgaaaggtcaggttatatagtgactatcggcataatctagcctcaaacgattatttccaactgcgctttcatccaaaagttatttctggggcccaaacagcatgtgaaaaatacggttccggaagtggagcttcccctcttctatccgggtttttatcttgccataatgatttgttaaccgaaatcctaaattggaaacaaaaaccttttggaatgctattcaattcagggtttgtagcaaaccaagcaatactaaaacatttaccaggaaaaaatgattttgttctagcagatcgacttattcaccattccttagcacaagctttaatacaatgcccggcaaaattcaaacgctatgatcatttaaatttagatagtttggaagttctcttaaaaaatatccatggaaattacgatactatttttgtggttacagaaagcgtattcagtatggatggtgattatcctaacttaaaagaactagtagccttaaagaaaaaatttccgtttgtattgatacttgacgaggcacacggtacaggcgtttttggtccaaatggaggcggtctagcagaagaaatgggtgttttgccagaaattgatattctggttggaacactgggta

SEQ ID NO: 233024 - DNA, 316 bp, Unknown
  Bacterial polypeptide expressing nucleotide sequence isolated from the Sargasso Sea
ggattaggtccaatttcagcagctaaaaaagctttggaaagagctacactttcaataaaagatattgatattatagaactaaatgaagctttcgcatctcaatcacttgcttgtatcaaagacttagaaatagatattaataaagtaaatctagatggtggtgcgattgctttaggacatcctttgggtgcaacaggtgcgagaataacaggaaaagctgcacaacttttaaaaagagaaaataaaaaatacgctcttgctactcaatgtattggtttaggaatgggaattgcaactataattgagacagtttaat

SEQ ID NO: 233025 - DNA, 199 bp, Unknown
  Bacterial polypeptide expressing nucleotide sequence isolated from the Sargasso Sea
gaattaaatatggacataaataaagtaaatatccatggtggagcaatagcattaggacatcctttaggagctacaggagccaggattactggtaaagttgcaaatttgttacaaaataataataaaaagtatgggttagcgacacaatgtataggtttaggtcaaggtattgcaactgtgttagaaaatattaattaaa

SEQ ID NO: 233026 - DNA, 886 bp, Unknown
  Bacterial polypeptide expressing nucleotide sequence isolated from the Sargasso Sea
ggagaggcggagacagtagtggccggaggaatggagaacctgagccaatctcctcatgtcctcagggatgagagaactacatacaagctcggaagatctccaagaaaaggtgaggagattccccgtgatatggaggattacttcttcacaaatttgagggatgacgtgtgtggatatttcatggcccagaccagtgatgagctatgtaagatgcttgatgtttctagagaagacgcagatagtttcgccgcattgagtcatcagaggactgagaatagcatcagaaatggtatttgggaagatgaaattgtggaggtaattactcctgaaggagtcttggactcgtcacatgacgatcacgttgttttaggaactacaattgagtcactctcaggacttaggacgcactttggccctgactcccttgtgacagctggaaatgcgtccggtgtagtcgatggagcggctgcaattgttgttaagtcgggtgcgagagctaaatcagacggagatgcgccactttcacgaatagtatcttgggggattgtagggttggatcctaagataatggctcatggacctgttcccagtagtaatctggctctccagaaggccggtctgaaagtcgaagatattgatctatgggagattaacgaggcctttgccggacagtgtgtagcctgtatcaaggacctaggtatcgatccatcgaaagtaaatgttaacggaggagcagtcggactcgggcatcctcttgcggctactggaactaggctactattgactctctcattagagctcaggaggagaggcggaaggtatggtgtagcaactgcatgcataggaggaggtcaagggattgcagttgtcattgaagcaatctgag

SEQ ID NO: 233027 - DNA, 457 bp, Unknown
  Bacterial polypeptide expressing nucleotide sequence isolated from the Sargasso Sea
atgaagaaaatttttattttaaccggagaaccatctggagataaattagcagctaccgtaattagtgatttaaaaaaaataaataaggatacagattttttatctgttggaggacaaaatcttcaatccctgggaataaaatctatttacgatttaaaagaaattacttatttaggatttacaaacgtgcttataaacatatttaagataagaaaaaaaattaatgaaactgtaaatactataatagattataaccctgatctattgttcacagttgatagcccagattttactttaagagttgctgaaaaaataaaaaaactaaattcaaaaataaaaactgttcattatgtagcccctcaggtttgggtatggagagaaggaagagttaaaaaaataaaaaattttatagaccatattttgttattatttaaatttgaaaaaaaaatattttgaa

SEQ ID NO: 233028 - DNA, 614 bp, Unknown
  Bacterial polypeptide expressing nucleotide sequence isolated from the Sargasso Sea
cacacagtttgatgaagcagatatttcaattttaaatagtataaggcagcagaaaaaagaagaaggggcaaagaaaaacataaaagtaacctttctaccttttattatgaaggctgtagtaaaaagccttagagagtttccggtttttaatagctcattagaccacacagaggaaaacctagttattaaggattatattaaccttggaattgctgttgatacaccaacaggtttagttgttcctgtgataaaaaacgctgataaaaaatcaattcttggcttatcaaaagaccttatggatattagtgaaagagctagatctggtaaacttaaaccaaatgagatgcaaggtggcactttcaccatatctagcttaggcggaattggaggaacttattttacccccattatcaatccacctgaggtagcaataatgggcgtttcaaaaagtgtttggagggctatctataatcacaactcaaaagaaattatacccacgttcaccatgcccttttctttatcatatgaccatagagttattgatggggcgattggcgccgctttcacatcgttcttttcaaaagcgttatttgacagtaaaactttcgaataaa

SEQ ID NO: 233029 - DNA, 814 bp, Unknown
  Bacterial polypeptide expressing nucleotide sequence isolated from the Sargasso Sea
tggtaaggtatttatttgtgctggtgttgaaagtatgactagagttccaatgcttggatttaatccaatgccacatcctcaattattagaagacaaccctaatgtctatctgtcaatgggaattactgcagaaaatgtagcaaaaaaatataatattgatagaaaagaacagcaagagtttgcaatttcaagtcacgagaaagcatcaaatgcagacagtaagggaaatttaaaagatgaaatcatatctataaaaaatgatacaattgatgtgaccaaagatggaggcataagacctggaactacacaagaaattcttgacggtttaaaattagcatttgatcaatatggtacagttacagctggaacttcatctccattaacagatggtgcagcagcaactttgatttgtgaagaaaattatgcaaaagaaaatggtcttgatatattagccagaataaagtcatgtgctgttaatgggtgtgatcccgaggtaatgggattaggaccaattggagcatcacgaaaagctatggatagagctgggataaactcagctgatttgggagttgttgaattaaatgaagcttttgcttcccaaagtttagcttgtgttcaagacttggaattagataaaaaaattgtcaatttagatggtggtgcaattgcattaggccatccccttggagctacaggtgctagaattactggtaaagctgctcaactacttaaacgtgaaggcaaaaaatatgctcttgctacacaatgtataggtttagggcaaggtatagccacagtgcttgaagcagtttaa

SEQ ID NO: 233030 - DNA, 311 bp, Unknown
  Bacterial polypeptide expressing nucleotide sequence isolated from the Sargasso Sea
tgatgtaagactaagaacttcattaaatttaaaaaagtccatttacaattattatgtttatttaaataacaaaaaaatagataaaaattattttagaaatgattttgaaatactatcggtattaagaaatttaaaagtaattgggatttttacaagattagcagttagagataataaaaaaaaatatttaaaattaattccatatgcatgggaattaatagaaagtagaattaataataatttgatttttgctgatttaaaaaattatttagatgctaattttcctaagaagattagaatgaaaaaatgaa

SEQ ID NO: 233031 - DNA, 335 bp, Unknown
  Bacterial polypeptide expressing nucleotide sequence isolated from the Sargasso Sea
catgccgggcggccaagagagagttctcagacggcggatcaattcggtccaatcgaccaaacagatcaccagagccatggaactcatagctgctacacgagtggttaaagcaatgcaacgcgccaatgctgcacggccctactccacaaaaatgactggagtaatcgaggatctagcagcgggtggcgttggcgctgacgacccacttttgcgagtagcagaaaaaattgactcgatcgggttcgtcgttattacatctgatcgcggtttagccggcgcatacaatagcgcagttatccgggcagctgaacgcgaaattatggcagcccagaccg

SEQ ID NO: 233032 - DNA, 853 bp, Unknown
  Bacterial polypeptide expressing nucleotide sequence isolated from the Sargasso Sea
atgtcggatgtcgtaatcgcaggcgccgcccgcacgcctatcggcgcattcaacggttcgctttctgccctcagcgcagcggagcttggtaccgtcgccatcgcgaacgcactcgaacgcgccggcgttccagccgcggacgtggacgaggtcgtgatgggtcaggtcctgacggccgcgacgggcatgaacccggcccgccaggctctgcttgccgccgacattcctgaggaccgcacagcctatctggtcaatcaggtttgtggctcgggcctgcgtgccgtcgctcaggggtttcaggcgatcaagctcggcgaggccaacgtggtcgtagcaggcggccaggagagcatgagccagtcgccgcatgcctcgctcatgcgcaacggcaccaagatgggcgacgtcaagttcgtcgacacgatgatcaatgacggcctctggtgttcgctgatgggctatcacatgggcaccacggccgagaatgtcgcagagaagtggcagatcactcgcgatgagcaagacgcgttcgccgccggttcccagcagaaggctgaggcggctcagaatgccggccgctttgccgacgagattacagcggtcgcgatcaagactcgcaagggcgacatcgtcgtagacaccgacgagtatccgcgtcacggaaccaccaccgaggccctcggtaagctgcgtcccgccttctccaaggagggcacggtcacggcgggcaacgcttcgggcatcaacgacggcagcgccgcgacggtcctgatgagttccggcgaggccaccaagcgcgggataacgccgctcgcacgcattgcttctgggcgacggcgggcgtcgatccggc

SEQ ID NO: 233033 - DNA, 322 bp, Unknown
  Bacterial polypeptide expressing nucleotide sequence isolated from the Sargasso Sea
ttatttacttgatggtccggttgatgcaacccagaaaatgttagaccaatcaaaatacaatatttctgactttgacctctttgaatgtaatgaagcgtttgcgtctgtcatgctgtcttgggcgcaagtgcatgaggtgcccatagaaaaaattaatgtaaatggaggtgcaatagctctaggtcatcctgtaggttgcactggatctcgtttgattaccactttacttcatgaacttgagcgccaagacaaagagttaggtttcttaacaatgtgccaaggcggttcattaggaatagcaattgtgctagagagaatataa

SEQ ID NO: 233034 - DNA, 436 bp, Unknown
  Bacterial polypeptide expressing nucleotide sequence isolated from the Sargasso Sea
atggattataaaaaatttttttcctcagaacttaaaaatttaaaagagcagggtctttatagaaattttagaaacatagatagacctattaaaaatttccccaatgcagatgaagtcttcgaaaataaagagagggaagttgaggtatggtgttcaaatgattatctaaatatgagtcaacatcctgaggttgtgaatgaaatagttaaaacattgttagaatacggttcaggatctggtggaacaagaaatatctcaggaacatcttcttatcatacagatttagaaaaaaaattggctggtgtacataataaagacgcagctcttttatttgcctctgcttatacagcaaatcaatcaactttgtggacattgggtaaaaaaattaaaaacattgaaattttttctgatgaattaaatcacgcatctctaattc

SEQ ID NO: 233035 - DNA, 325 bp, Unknown
  Bacterial polypeptide expressing nucleotide sequence isolated from the Sargasso Sea
aatgggatatggacctgttccagcgattaagaaattactcaaatcaactggaatttcactggataaaattggaatcatcgaactaaatgaagcctttgcatctcaggctttggccgttactcgtgctttgaatttggaagatgatgatgaacgtgtaaatcctaatgggggcgcaatcgcattgggtcatcctcttggaatgagcggagcacgtctggctttaacagctatgagggaactgcagtcgaaaaaggatcgttacgcactttgtacaatgtgtatcggtgtgggacaggggattgccctgttgatggaacgggtttga

SEQ ID NO: 233036 - DNA, 577 bp, Unknown
  Bacterial polypeptide expressing nucleotide sequence isolated from the Sargasso Sea
atgcaaaaaattgaaagaaaacttgagaacataaatttttccaacagaactggaattagaaataaagattctatcttattaaacggtacatcaatggtaaatttttcaagtaatgattatcttggcctttctaaaaataaaaaactaatttcttcgtcgttaaaatggacaaaactttatggcaccagcttttcgtcctcgaggttagtttcaggaaattttgataaaataaattaccttgaagattcaatcagtaaaaacgttaattgtgagaaaacattaattcttggtagtgggtttcttttaaattctaccttaatacctgctctcacagataataacgttggccaaaggaatgaaatgcttatcttttcagataaatataatcattccagtattaattttggaagttttttaactaaacaaaaaattattagatatagacatttagatttgaatcatcttgaattccttctcaaaaaatcaaacaacaaaattcctaaaattataattacggaaactctttttagtatggatggagacatagtcgatattgagggtgtaagatttttagcaa

SEQ ID NO: 233037 - DNA, 763 bp, Unknown
  Bacterial polypeptide expressing nucleotide sequence isolated from the Sargasso Sea
accagcttacattgtaaatcaagtatgtggatcaggattgagatcgatagcatcaggatttcaaagtataaagtcaggagactcaaaaatagttatcgctggtggtcaagagagcatgtctctagcgccacatgcaattcatttaagagatggaaaaaaaataggtgataccaaattggttgatacaatgattaaagatgggttgtgggacgcttttcatggatatcacatgggagtaaccgctgagaatgtggctactaaatttcaagtgactagacaagaacaagataagtttgctcttaagtcgcaagaaaaagcattaaaagcaataaaagaaaataagtttaaagatgaaataactaattttaaaattaaatcaaaaaaagctgagatagattttaataaagatgaacaccctagagatggtattaatttagaaggcttaactagacttaaaccagtttttcaaaaggatggaactgtaactgctggaaatgcttctggaattaatgacggagcggctgcagtaactttaatgtcagatgaagaggcaaaaaaaagagatttggagaagttagttactatcaagtcttgggctagttgtggtgttgaaccagctctaatgggcactggacctattccagcaacaaaaaaagctttggatttagcaggatggaaaattaatgacgtggacctttttgaagttaatgaagcttttgcagctcacagtattgctgttttaaaaacactgggaattccaaat

SEQ ID NO: 233038 - DNA, 294 bp, Unknown
  Bacterial polypeptide expressing nucleotide sequence isolated from the Sargasso Sea
aagcccttgatagagcaggaataagttctaaagatctgggtgtgattgaattgaatgaagcattcgcctctcaaagtttagcatgtataaaagatataggtttagatgaaaatgcagttaatattgatggtggagctatagcactaggtcatccacttggagcaacaggggcaagaattactggtaaagcagcccagttattaaagcgagagggtgaaaagtatgcactggcaacccaatgtataggtttaggtcagggtattgcaacagttttagaagctatagaaaaatgat

SEQ ID NO: 233039 - DNA, 842 bp, Unknown
  Bacterial polypeptide expressing nucleotide sequence isolated from the Sargasso Sea
cctgcggcgttcggatgtggacccagcggaggtggagcacaccgtctttggcaatgtcatccatacagaagccaaggacatgtatctgagccgagtggccgccatggaggcaggcattccaaaggaagtgcccgcaatgaccctaaaccggctgtgtggcagcggtctgcaagccattgtatctgcagctcaacttattttgctggatgatgcagacattacagtcgccggaggcgcagaaagtatgagccgtgccggtcatctgatttccaccgcacgctggggccaaaagatgggtaacacagtcgccgtggacatgatgacagaggccctccacgatccttttggacacgggcatatgggtattacggcagaaaatttagcagaaaaataccatatcagtcgtgatcagcaggacgctttcgcttttgaaagtcaccaacgagcccagaaggccatcgagggcggccactttcaggatcaaattcttcccatcgacattaaaataaaacgtgaaaccttccagttcgatcaggatgaacacgtccgcgcggacctcaaactgccagacatgacgagccttcggccagcgtttaaaaaagacggcacggtgactgccggcaacgcctcgggcctaaatgatgcagcagcagcggtggtcctaatgagtggagagattgccgagaaacgcggcgccaccccgcttgccaaaatcatcggctatggccacgctggagtggagccctcggaaatgggcataggccccgtaccagcggtaaaaaatatgctggaccgcatcgacatgagcatcaaagacttcgatattatcgagagcaatgaag

SEQ ID NO: 233040 - DNA, 589 bp, Unknown
  Bacterial polypeptide expressing nucleotide sequence isolated from the Sargasso Sea
atgaactataaaaaattcttctcagacgagcttatttctttaaaatctcaaggtctttatagaaagtttagggcaataaatagaaataaatctagttttcctaaagccactgagaggtttgaaggccaggaaagagaagtagaggtgtggtgcagtaatgactacttaaatcttagccaacatccggaagtaactaagacttctatagaagttatcaatgaacttggtaccgggtcaggtggaaccagaaatatatcgggcacctcaacctatcatgtagatctcgaaaaacttcttgctgacttgcatagaaaagagtccgcactgcttttcccgtctgcatacactgccaaccaatctactctttggactttatgtaaaaacatggaaggaatagaagtattttctgatgaacttaatcatgcctccttaattcaaggcataaaaaatgctgatgttgtaactcacatatttagacataatgatactgaacatctagaagagcttttaaataatgctaatgcaaacacacctaagttagttgtttttgaatcgctctattctatggaagggcttcgatctccttgca

SEQ ID NO: 233041 - DNA, 916 bp, Unknown
  Bacterial polypeptide expressing nucleotide sequence isolated from the Sargasso Sea
taatgatttagttgaaacatcaaaaatcaacaaaaatgatattgaagatataatagccggatgtgcatatccagaaggagctcagggatacaatattgctaagatagtttcatttatgacaaatatgcctgaacatgttggtggaatgacaataaatcgttggtgtggatcatcaatgcaggcaattcatactgctgcaggggcaatttcaatgaatgccggaaaagtttttgtttgttgcggtatagagtcaatgacatctgttccaattaatggtttaaattattctcctcatcctgagcttttaaaaaatcaacctgatgtatatttatcaatgggtctaacagcagaaaatgtagcaaaaaaatttaatatatccagaatagaacaacaagagtttgcaatcgaaagtcatattaaggcatttaaagctcaatcttcagatgcttttgatgaagagattacaataattaataataaagaaattgaagttgttaaagatggtgcaataagaccaaatactaatcaagaaatactggatggacttaaattagtttttgatcaaaatgggactgtaactgcgggcacttcttctccattaacagatggtgcatctgcaactttgatttgtgaagaagaatatgcagtatctaacaaccttcctattttagctaaaataaaatctactgctattaatggatgtcctcctgagttaatgggattaggaccaattggagcttctaaaaaagctttaaaaagagctgagctaaaaattagtgatattgatataattgagttgaatgaagcttttgcatcacaatctcttgcttgtataaaagagcttaatattaatcctgataaagttaatacagaaggaggggcaattgctctaggacatccactaggagctacagga

SEQ ID NO: 233042 - DNA, 322 bp, Unknown
  Bacterial polypeptide expressing nucleotide sequence isolated from the Sargasso Sea
aatgggtcttggaccaattaatgcttcaaaaaaagcattaattagagccggcttaacaatagaagatatagacatagttgaactaaatgaagcttttgcctcacaatcgcttgcatgtataagagagcttaatatgaatgaaaataaagtcaatattcatggtggagctatagctttaggacatcctttaggagccacaggttcaagaattaccggtaaaacagcatcattacttaaaaataatgataaaaaatatggattagcgacacaatgtattggtttaggccagggtattgcaactgttctagaaaacattaattaa

SEQ ID NO: 233043 - DNA, 916 bp, Unknown
  Bacterial polypeptide expressing nucleotide sequence isolated from the Sargasso Sea
cgaaggcgaaaaagaatttattcgtcttaattcgaactcttacctcgggctaggccttcatccagaagttattgacgctgaagaaaaagcatccgctcagtttggagcaggtccaggtgccgtccgatttataagtggatcatactctgcacacagaaacttagagttggaattggctgatttccatgatagagaagcttccatgattttttcctccgcctatgccacgataatctcgacgatcacctcaattgtgactaaagacactgtagtaatcagtgatgaattaaaccataattgcatcataaatggcactaggatgtcctctgcatgcggtaaggttatctatccacaccttgatatggatgtactgtcatcttccctgaaagaatgggctggaaaagccaaaagagccctgataatcaccgacggtattttcagtatgaggggcgaccatgctcctttagaccaaataatggagatagcccaagagcacgattatatgtacgaggaaaacgctgtagtcctggtcgacgattcacatggagtcggtgcgatgggaaaaactgggcgtggagtagaagagtttaccaaatcaaccccagttgacattctagttggaaccttgggtaaagctttcggagtaaacggagggtatgtgacttcttccaacgccgttatcgattttctcagggaaaaatcaccgatgtacatttactccaatcccatcactaccggggaagcctctgccgctagaaaagcagtacaagtcgtgaacagtcacgagggaagatccctgctaaagaacctcagagatcttaccaaacattttgaagacggagtgacggccattggtatggaaacgattcctggaaatcatccagttgttcctctaatgatacgagataccgaacaa

SEQ ID NO: 233044 - DNA, 436 bp, Unknown
  Bacterial polypeptide expressing nucleotide sequence isolated from the Sargasso Sea
agtgacggagcagctgcaatggttgtaatgtccgatgcaacagcacgacgtcatcagatcattccgatggtgcgtgtgctaagcacagcggttattggagtgtcgccagccttgatgggtatggggccggtgtatgcgactcgcaaattactccatcgttcgggaattcatttacgagatattgggctttttgaaataaatgaagcttttgcagcccaggcgatggcatgcgtcgaagaattaaagcttgatcatgacagggttaatgtttgtggcggtagtttggctattggacatcccctcggagcaagcggtgcccgtatttccacaacacttattcacgcaatgcgagatcgacaggttcatcttggcttggctacgatgtgtattgggcttgggcagggaatcgcagtagtttttgaattgatagaatgat

SEQ ID NO: 233045 - DNA, 169 bp, Unknown
  Bacterial polypeptide expressing nucleotide sequence isolated from the Sargasso Sea
aatctaaatggaggagcaatagcacttggtcatcctctgggttgctctggagcaagaattattaccactcttttaaatgtaatggaacaaaataattcaaggacaggacttgcaactatgtgcataggtaccgggcagggaatcgctacaattttggaaaggaactaac

SEQ ID NO: 233046 - DNA, 753 bp, Unknown
  Bacterial polypeptide expressing nucleotide sequence isolated from the Sargasso Sea
tatgcaatacaaaaatttctttaaatctgaattgaaaaatcttaaagaacaaggtctttatagggactttagaaacatagacagacctataaaaagttttccaaatgcggatgaaagttttaaaaacaaagaaagagaagttgaggtttggtgctctaatgactatcttaatatgagtcagcacccagaagtcgtaaatgaaattgttaaaacactacttgaatatggatcaggttcaggtggaacaagaaatatttctggtacatcaacctatcatactgaactagaaaaaaaactggcaaatgttcataataaagaggcggcattagtttttgcttctgcttatacagcaaaccaatctactttatggactttaggaaaaaaaattaaagatattgagatattttctgatgaattaaatcacgcatctttaatacaaggtattaagaatagtggagctaagtgtcatatatttaaacacaatgatattgatcatttagaacagttactaaaagagtcaaatttagataaccctaagttaatcgtttttgaaagtttatactctatggaaggtataagatcacctatagttaaaattgtagagttagcaaaaaaatataactgtatgacatatctggatgaagttcattcagttggactttacggtgaagaaggtaaaggtattgcagtagaaatgggagttgaagataaaatagatattattaatggaactttagctaaagcatatggtca

SEQ ID NO: 233047 - DNA, 304 bp, Unknown
  Bacterial polypeptide expressing nucleotide sequence isolated from the Sargasso Sea
aatgagtttagaaaaaataataactgatgcttgggaaaataaagatcaggtaaatcaaaattcagacaaaagtttaaaggatacaattaatcaaattattgatgatttggattgtggcaaattaagagttgcagagaaaattaatggagaatgggtaactcaccaatatataaaaaaagctataatgctaagttttagaatttatccaatggaaaatttaagtggtccatacagcagttggtatgataaagctcatctattaaaaggaaaaacggcagggtggacaaaagaagatcatataaaa

SEQ ID NO: 233048 - DNA, 368 bp, Unknown
  Bacterial polypeptide expressing nucleotide sequence isolated from the Sargasso Sea
agctcgtattaaatctacagccgtagttggttgtccaccagaattaatgggtcttggcccaattaatgcatccaaaaaagctcttaaaagagctaatttatctattaccgatattgatattgtggaactaaatgaggcatttgcttctcaatctttagcatgtattaaagaattaaagatggacataaataaagtaaatatacatggtggagcaatagcattaggccaccctttaggtgctactggagcaaggattactggtaaagttgcaactttattacaaaataataataaaaagtatggattagcgacacaatgtataggtttaggtcaaggtattgcaactgtgttagaaaatattaattaaa

SEQ ID NO: 233049 - DNA, 768 bp, Unknown
  Bacterial polypeptide expressing nucleotide sequence isolated from the Sargasso Sea
aatgcaaaaaattgaaagaaaactagagaacataaatttttccaatagaactggaacgagaaataaagatttaattatattaaatggtaaatcactagtaaatttttcaagcaatgattatcttgggctttctaaaaataaaaaactaatttcttcatctttaaaatggacaaaactttatggtaccagcttttcatcctcgaggttagtttctggaaattttgataaaattaattacgttgaagattctattagtaaaaatgtaaattgtgagaaaacattgatttttggtagtgggtttcttttaaattctaccttaatacctgctctaacagaaaataacgttggccaaagtaatgagatacttattttttcagatagatacaatcattccagtattaattttggaagttttttaaccaaacaaaaaataattagatacaaacatttagatttgaatcatcttgaatatcttctcaaaaaatcaaataaaaaagttcctaagattataattacggaaactctttttagtatggatggagatatagtggatattgagggtatgaggtttttagcaaaaaaatttaattcttttctttatatagacgaggcccactcaatgggggttttaggaaaaaatggttttggaatagcttctaatctatataatgaaaaagaagttgttattggaacttttggcaaaagttttgggagttacggtggctttgtttcatcctcaaaaaaagtttatgctaaaataattaattc

SEQ ID NO: 233050 - DNA, 118 bp, Unknown
  Bacterial polypeptide expressing nucleotide sequence isolated from the Sargasso Sea
gatgccgctttcactgtcttacgatcaccgcgtgattgatggggcaatggcagcacgatttttgaaagaagttattggctatttagagagccctggtcggctcctgttagccatgtga

SEQ ID NO: 233051 - DNA, 826 bp, Unknown
  Bacterial polypeptide expressing nucleotide sequence isolated from the Sargasso Sea
ggcggtcattcgcgcactattttagaaaagacttcacctggtggctatttgattggattcgataaagataatcaagccttgcgcgtagcaaaacaggcgttacaggattttgaaggaagagttgaattggttcaaggttcttatgcaggtatgttgcaaccattgaaccaagccaggacaggactggtagatggaatattgtttgatttaggtatttcatctcgtcaagttgatgaatctggctatgggcttagttttaaccgatcagaaacattggatatgcggtttgataagtctcaagatttaatggctatggatgtgataaatgagtatgactttgaggatttgagtagaattttcaaagagtatggtgaggaaaggtattctaaaagaattgccagaaagattattgactcacgtccgctcagtaccactgacgaactagctgatttagtgactacttgtgttaggaaagacgctagcggtagacatcccgctactcgagttttccaggctctcaggatagaagtgaatcaagaattagaggatttgcatgcaggattagagtcagcactgacggcattaaaagtgcaaggccggatggccgttattagctatcatagcctggaggatcgaattgttaaaaattttatgagagataaatcgaaggcgtgtcagtgtcctaaagcgattccggtttgtgtgtgtgaagtgttgcaacgattacgattagttaataggaaggtgattaagccttctgtaaaggaagttgataggaataggcggagtagaagtgcccgtcttagagttgcagagaaaataggat

SEQ ID NO: 233052 - DNA, 886 bp, Unknown
  Bacterial polypeptide expressing nucleotide sequence isolated from the Sargasso Sea
gctgctttgcgtacagcaattagggaaatataaaggcatgtttagcaaatttcaggcacatgatttaggagaaatcgtaataaaaaatattttaactaaaacaaaaattagacctgaatatattgatgaggttattattggacaagttttaactggtgatacagggcaaaatccagcacgacacgcagcgattagagcaggtataccaaaagaaaaaactggatatttaattaatcaggtttgtggatctggtttaagagctatcgttgcaggatatcaatccatttctttaggggattccaaaataattgtagctgggggacaagaaagtatgactaattgtgatcaaaaagttatgttaaaagatggtttaattgatgtgtttaataactaccatatgggtataacagcagaaaatgttgcgcaaaagtggaatattacaagagagcaacaagatacatttgctgcttcctctcagaacaaagcagaattagcaataaaaaataacaggtttaaggaagaaataatttacaacaaagctcccaaggatgagcatccaagacttggagtaacaactgaaagtcttggaaaactaaagccagcttttaaagaaaatggaactgtgactgcaggaaactcttctggaataaatgacggagctgctgctgtattattaatgaatagggacgagtccgaaaaaagaggtcttgagcctatagctaaaatagtatcatgggcaacatcaggagtagatccatctttaatgggttctggtccaattccagcatccaaaaaagcattagaaaaagctgggtggagtataagtgatttggatttggttgagtcgaatgaggcatttgcagcacaaagtcttgcagttgtttaa

SEQ ID NO: 233053 - DNA, 199 bp, Unknown
  Bacterial polypeptide expressing nucleotide sequence isolated from the Sargasso Sea
aacacgctggggttgaatcctgcgaacgtgaacccgatgggcggcgcgattgctctggggcacccgctgggggcgaccggtgcgattcgcgcggcgacggtggtgcacgcgctgcgtcggcacaagctgaagtacggcatggtcacgatgtgtgtggggacaggccaaggcgccgccggcatcatcgaggcgttgtaac

SEQ ID NO: 233054 - DNA, 463 bp, Unknown
  Bacterial polypeptide expressing nucleotide sequence isolated from the Sargasso Sea
aatgaattataaagattttttcaaaaaagaaattataaaaactaaagcgtctggtttttacagagaatttgttcctatcatacgcgaaagaaaaatattcccattttcctatattgcgcatgaagcaagtagcgatgatcagtttaatagtgagacaaaaatttggtgtacgaatgattatctgaacatgagtcaaaacgaagttgtaattgaaaaaatgattgatattatcagaaaagtgggtgcaagctctggtggtacacgaaatatttcaggcactaccccttatcacattgagcttgaaaataaaatagcacaatttcatagcagagaaaaagcattagttttcaattctgcttaccttgcgaatcagacatcactgtggaccttatgtaaaaaaattcccaatgttcaaatattctcagatgagttaaatcatgcatctttaattcaaggcatcaaa

SEQ ID NO: 233055 - DNA, 178 bp, Unknown
  Bacterial polypeptide expressing nucleotide sequence isolated from the Sargasso Sea
aaagtaaatatacatggtggagcaatagcattaggccatcctttaggtgctactggagcaaggattactggaaaagttgcaactttattgcacaataataataaaaagtatggattagcaacacaatgtataggtttaggtcaaggtattgcaactgtgttagaaaatattaattaaa

SEQ ID NO: 233056 - DNA, 160 bp, Unknown
  Bacterial polypeptide expressing nucleotide sequence isolated from the Sargasso Sea
ggtggtgcaattgcacttggtcacccactaggttgctctggttcacgtatctcaggtacgcttatcaacctaatggaatcacaagacgtaagcctaggcttagcgactatgtgtattggtttaggccaaggtattgctaccgtatttgagcgtgtataag

SEQ ID NO: 233057 - DNA, 247 bp, Unknown
  Bacterial polypeptide expressing nucleotide sequence isolated from the Sargasso Sea
attaattgaacttaatgaagcatttgcatcgcaatcgattgctgtaataaatgagttgaatcttgatagaaacattataaatgttaacggaggtgcaattgcactgggtcatccattaggatgctcaggtgccaaactttcagtacagttatttgacgaaatgaaacaaagaaagttgaaacacggaatggtaactatgtgtgttggaactggccaaggagccgcaggaatttttgaaatattataa

SEQ ID NO: 233058 - DNA, 786 bp, Unknown
  Bacterial polypeptide expressing nucleotide sequence isolated from the Sargasso Sea
aatgcgtgacgcctttatttgtgacggaattcgtaccccgattggccgctacggcggcgcgctggcgggggttcgcgctgacgatctggcggcgatcccgctgcgtgaattgctccgtcgcaacccgcgcctggatgccagcgccatcgacgatgtgattttcggctgcgccaaccaggccggtgaggacaaccgtaacgtggcgcatatggcaacgttgctggcgggttatccgcacagcgtggcgggcaccaccatcaaccgtctgtgcggttccgggctggacgccatcggctttgccgcacgagccattaaggcgggcgatgcggatctgttgattgccggcggcgtcgagtcgatgtctcgcgcgccgttcgtcatgggcaaggccaccgcgccgttccagcgtcaggcggaaatgttcgataccaccatcggctggcgttttgtgaacccgctcatgcagcaacaatttggtactgacagcatgccggaaacggcggagaatgtagccgaattgttaaatataagccgtgaagatcaggacgccttcgcctaccgcagccagcagcgcacgtcaaaagcgcagcgtgacggcattctggcgcaggaaatcgtaccggtacagattatcggtaagaagggcgcggtcagcgcggtgcgcgacgatgagcacccgcgtgcggaaaccacaatggaacagcttgctcagttgaaaaccccgttccgcaagggcggcgtggtgacggcaggcaacgcctcgggcgtgaacgacggcgcggcggc

SEQ ID NO: 233059 - DNA, 385 bp, Unknown
  Bacterial polypeptide expressing nucleotide sequence isolated from the Sargasso Sea
ttaaccccaaaagctagaatattaagctctgctgcaactggtgttgaaccaagtgttatgggaattggaccagtttcagcaacaaaaaaagttctttcactttcaaataccaatttaaataatataaatattattgaacttaatgaagcgtttgcatctcaagctttagcaacaatgagagatctatcattgtcagatgatgatgaaagagtaaacattaatggtggggcaattgctttaggccatccacttggtatgtctggtgcaagattagtgcttacagcaactgaacaattacaccaaagtaaaaataataaattagcactttgcacaatgtgtgttggggttggtcagggcagtgcgattattttagaaaacttataaa

SEQ ID NO: 233060 - DNA, 832 bp, Unknown
  Bacterial polypeptide expressing nucleotide sequence isolated from the Sargasso Sea
attccctgtttaactgaaaattctttaggtacaagaaataaatgcattgttttttcagataaacttaatcatgcaagtattaattatggatgtttgatttccagacaaaagtgttttagatataatcaccgtgatttgaatcaccttgaaagtcagttaaaaaaaactccaagtaaaatgagaaaaatgattatctctgagacgctcttcagcatggatggggatcttgctgatttaaatgggttaagatatctttcaaagaaatatgcttgtatactctatcttgatgaggctcattcgtttggtttatacggtaagaatgggtatggttttgcctcagatgtaaataaaaatacaaatgaaattattgtaggtacctttagtaaagctataggaagttatggatcttttgtttcatgctcaagagatttttataaaaaaattgttaattcttgcggaggattaatttactcgactgcattaccaccttcaattcttggcgcaatatcagcttctttgaaaaaaattacaaaagcatcaaaattaaggaaaaaaattaaaagtaattctgattttcttttagaaaaattaaaaagtttaaactttgatacagcaaaatctaattcacatataattcctttgatcttaagagatcgttcaaagtgcgaaagtttaaaaaaatatctatttgatcacggatattttgtaaaagaaataagtcctccaacagtaccttctggatatgatagaataagattatctttaactgcaagtatgagtagggtcattataaaaaattttataaaacatatttcaaactttaaacactaat

SEQ ID NO: 233061 - DNA, 447 bp, Unknown
  Bacterial polypeptide expressing nucleotide sequence isolated from the Sargasso Sea
gatggattattcaaaatttttcaactcagaattagaaaaactaaagaaagaaggtctctatcgcaagtttagagagattgatcgacctattaaaaaatttccaaaagcagatgaaacacaaggagaaattgaaagagacgttgaagtatggtgctcaaatgattaccttaatatgagtcaacatccagaagttgtcaatgaaactgtcaaaactcttttagaaataggttcaggttcgggaggaacaagaaatatatcaggcacaagttcttatcacacagcattagaggaaaggctagcaaaagttcataataaagacaatgctcttctttttgcttcagcttacacagcaaatcaatctacattatggacgctaggtaaaaaaataaaaaatttagaaatattttctgatgaactaaatcatgcctctttgattcaaggtataaa

SEQ ID NO: 233062 - DNA, 649 bp, Unknown
  Bacterial polypeptide expressing nucleotide sequence isolated from the Sargasso Sea
catgtctaattctccacattaccaaaatttaagaaaaggcgaaaagttagataatgaaaaaatgaaagactcgatgattattgatggactgttggatgtttataatcaatatcatatgggaataacagcagaaaatgttgctgaaaaatatcaaatcacaagagaacaacaagatgaatttgcagtcaaatctcagagtaaagcggcagaagcaattaaaacaaataagtttaaagatgaaattgtaccaataaaaataaaagatgaaaatatatttgatactgatgaatatccaaaaatcggaacaactttagaaaaattagctacacttaaaacagtatttaaaaaagatggaactgttacagcaggcaatgcttcaggattaaacgatggagcagcagctcttactttaatgactgcaaaaactgcaaaagaaaaaaagttaaaacctttagctaaaattatttcctgggcgcagtgtggtgttgatccttctgtaatgggaacaggacctattccagctactagattggcattaaaaaaagcaggatggaaggaagatcagatagatttagtagaggctaatgaagcttttgcagctcaagcaatttctgtaaataaagaacttggttttaattctgatatagta

SEQ ID NO: 233063 - DNA, 234 bp, Unknown
  Bacterial polypeptide expressing nucleotide sequence isolated from the Sargasso Sea
ggggctgaacgacggtgcggcggcggtgctggtgatgtcggcgcagaaggcggcggcattgggcctgacgccgctggcgcggatcaaggcgtacgcgaacgcgggcgtggatccgagcgtgatgggcgtgggcccggtgccggcctcgcgccgtgcgctggagcgggcgggctggacgccgggcgacctggacctgatggaaatcaacgaggcgttcgcggcgcaggcgctggc

SEQ ID NO: 233064 - DNA, 361 bp, Unknown
  Bacterial polypeptide expressing nucleotide sequence isolated from the Sargasso Sea
tatgaaaagggtagttgttactggtattggattacttacatccataggtaacaataaagaagaaacttggaataatttaattaacctaaaatcaggtattaaaaaaattgatcattttgatacctctgaacttacatgcaaaatagctggtcatatatcgcataatccagaagatccattttattatgatagattaaaacatcttgaccaaaaagatataaagcgcaacgatagatttattcagtacggtattgcagctgctaaaatggctgttgaagactcaggtattgaaaatataaatgatgtagccaaacttaaagttggtgtttcagtgggctctggaataggaggactagaaaca

SEQ ID NO: 233065 - DNA, 442 bp, Unknown
  Bacterial polypeptide expressing nucleotide sequence isolated from the Sargasso Sea
caaatttctgacggagcagcaggtttgttatggatggatgaaaagcgagccaaagctctcggattaaagcctcgtgcaaaaattgtcgcaaatgtagttgttggcactgatccttattatttactggatggccctgtagatgctacaaaaaagattttgtcaaagtctgggatgagtctttctgatattgacttatttgaatgcaatgaagcttttgcatctgttgttttatcttggcttggggaaaatccagatattgattctgaaaaagttaatgtaaacggtggagcgattgcactaggtcatccagtaggagcgacgggttctcgtctgatagttactgcattaaacgaacttgaaagaagagatggttctttagcaatggttactatgtgttgcggcggagcaataggcacggcaacaatttttgaaaggatttagc

SEQ ID NO: 233066 - DNA, 742 bp, Unknown
  Bacterial polypeptide expressing nucleotide sequence isolated from the Sargasso Sea
atgcaatataaaaatttctttaaatctgaattaaaaaatcttaaagaacaaggtctttatagggactttagaaacatagacagacccataaaaagttttccaaatgcagatgaaaattttaaaaataaagaaagagaagttgaggtttggtgctctaatgactatcttaacatgagtcagcatcctgaagttgttaatgaaattgtaaaaacactacttgaatatggatctggttcaggtggaacaagaaatatttctggtacatcaacctatcatactgaacttgaaaaaaaactggcaaatgttcataataaagaggcggcattagtttttgcttctgcttatacagcaaaccaatctactttatggactttaggaaaaaaaattaaagatattgagatattttctgatgaattaaatcacgcatctttaatacaaggtattaagaatagtggagctaagtgtcatatatttaagcacaatgacattgatcatttagaacagttactaaaagagtcaaatgtagataatcctaagttaatcgtttttgaaagtttatactctatggaaggtataagatcacctattttaaaaatagtagagttagcaaaaaaatataactgtatgacatatctagatgaagttcattcagttggactttacggtgaagagggtaaaggtattgcagtagaaatgggagttgaagataaaatagatattattaatggaactttagcaaaag

SEQ ID NO: 233067 - DNA, 698 bp, Unknown
  Bacterial polypeptide expressing nucleotide sequence isolated from the Sargasso Sea
gggcgatactgctgaaaatgttgcaagtaagtatcatttatcaagaaaagaacagcaagattttgctataaaaagtcaaaaaaaagctcataaagcttatgaatcagaatattttaaaaatgaaattactaaaatcattattgaaaatgatgaagtatctcaagatggatgtataaggccaaatacatctcaagaaattctagataatttaaagcttgcttttaaccaaaaaggaacagtgacagctggaacttcttcgcctttaacagatggagcatcagctactttaatttgtgaagaaaactatgccaaaaaaaataacctaaatatcttagcaagaattaagtcttgtgcagtccagggttgttcacctgaattaatgggtttaggaccaatagaagctagtaaaaaagctcttataagagcaaatttatctattaaagatattgaaatagtagaattaaatgaagcttttgcatcacaatctttagcttgtattaaagaactaagcattagtgaggaaattgttaatttagatggtggtgcaattgctttgggacatcctttaggagcgacaggagcaagaattacaggcaaagctgcccaattactaaaaagagaaaataaaaaatatgctttagcaactcaatgcatcggtcttggtcaaggaattgccactattttggaggcaatttaaa

SEQ ID NO: 233068 - DNA, 877 bp, Unknown
  Bacterial polypeptide expressing nucleotide sequence isolated from the Sargasso Sea
tatgaataacatttatataatgtcagcagttagatccccaatagggacctttggaggaactttaaaaaactttcatccagttgatctaggaacttttgttgcaaaagaagcaataaaaaggtccaattttgaatcgaaggaaattagtcatgccgtttttggtaatgtaattcatactgagccaagagatatgtatgttagtagagttgttgctttgcaatctggattaaataaaggatcgtctgcttttaccgtcaatagattatgtggctccggccttcaggctatagtaagtgcaacccaacttatagctcttgacgatacagaaatagccttagctggaggtgtagaagtaatgtctagtggaactcatgttgttcaaggttttaggtggggttcaaaaatgggtgatgcaaaagtttatgatatgatgttgggggctcttcaagacccttttggacatggacatatgggtattacagcagaaaatatttctggtaggtatcaaataagtagacttatgcaagatgagtttgcgttatctagccagatgaaggcaaagaaagctatagaaaagggtatttttaaagaacaaattgttcctattgaaataaatacaagaaaaggcatagaaatttttgatacagatgagcatccaaaacctgaaactacattggaaactttatcaaatttgaaagcagcttttaagaaagatggatcagttacagctggaaatgcttctggtataaatgacggagcatcagcattaattttagctaatgaaaaaaaagcaaaaaaaggtaccccgctagctaaaataatttcgtatggatttggtggagttgatccagatgaaatgggtatgggtcctatacca

SEQ ID NO: 233069 - DNA, 557 bp, Unknown
  Bacterial polypeptide expressing nucleotide sequence isolated from the Sargasso Sea
aaaagaaatagtagttgaagaagatgaacagcctctttcagcagaccttgaaaaaattaccaggcttcgacctgcatttgataaagaaggtactgtaaccgctgcaaattcttcatcaatttctgacggagctgctgcacttgtgatgatgcgcgaatctacagcaaaaaaaaggggaataactccgttggcattaatccatggtcacagtagttttgcccactctcctgactggttcaccactgctcctataggtgcaataaaaaaattattggacaaagttcagtgggacatacatgacgttgatctttttgaaatcaacgaagcatttgccacagtgacaatggcagctatgaaggatcttgaactgcccgtggaaaaagtaaatatccatggcggagcttgtgcacttggacatccggtcggtgcttccggaaccaggattcttgtcactcttatctcagctctgaaaaaatacaacaaaaagcgaggtgttgccagcctttgtattggaggaggagaagccactgcaatggcagtagaagtgctttcctgag

SEQ ID NO: 233070 - DNA, 265 bp, Unknown
  Bacterial polypeptide expressing nucleotide sequence isolated from the Sargasso Sea
ttgattgataaaaatataattaaaaaaatcgttaatttagtaaatgttaaaaaccgcgatatattggaaataggtccaggtagcggagctctcacagaggaaattttgaagaataatcctaagtcaatatcagtaattgaaaaagataataatttagcaaataaacttcgaaataattttaagaatgagagcgtaaaagtatacaatgatgatattttaaaatttgatttagaaaaaattgataaaaaaaattcaataatatttg

SEQ ID NO: 233071 - DNA, 772 bp, Unknown
  Bacterial polypeptide expressing nucleotide sequence isolated from the Sargasso Sea
atcgctataaatgaaggcttagatttatcaaaaattaaaggcactgggccaaatggtcgaattgtcaaaagagatctagaaaataaaattaattcaaaaactttgatagttgataatttaaatgaagataaaaattttaaacttgtaaagaacacaaatattcggaaagtaattgcaaaaagattaacagattctatacaaaacgcaccgcatttttatcttacggtagattgtaatattgacaaactattagcttttagaaaggaaattaatcaagagcttaatgaagaaaaaaaagtttcattaaatgattttataatcaaagctgttggaaatacacttgtcaatgtaccagaggtgaatgctagttgggataaggataatacaaaatattataattctgctgatgtttctatagcagtagcaatcgataaaggactaattactccaattattaaaagtgttgaaaataaaggattagaaactatatctcttgaaatgaaaaaattaattaaaaaagctaaagaaggtttattgaaacctgaggagtataacggtggaactttttcaatttcaaatttaggaatgtttggaattaaacattttacatcaattattaatccacctcagggagctatacttgctgttgggtctggcattaaacaacctattgtaaataatgataaattagaaataggtactataatgaacgttactttatcttgtgatcatagagtaatagatggtgccactggatcaaaatttttagcaa

SEQ ID NO: 233072 - DNA, 241 bp, Unknown
  Bacterial polypeptide expressing nucleotide sequence isolated from the Sargasso Sea
gaagcttttgctgctcaagcttgtgccgtaaataaagctttaggtcttagtgaagacattgtaaatgttaatggtggagccattgcattaggtcatccagttggcgcaacaggatcgattattatgactaagctagtccatgaattaaaaagaagaaaaggaagatatggacttgcaactatgtgtataggtggaggacaaggcattgcagttataatcgagagttgtaagtctttatagt

SEQ ID NO: 233073 - DNA, 433 bp, Unknown
  Bacterial polypeptide expressing nucleotide sequence isolated from the Sargasso Sea
tatgcaatataaaaatttctttaaatctgaattaaaaaatcttaaagaacaaggtctttatagggactttagaaacatagacagacctataaaaagttttccaaatgcggatgaaagttttaaaaataaagaaagagaagttgaggtttggtgctctaatgactatcttaatatgagtcagcacccagaagtcgtaaatgaaattgtaaaaacactacttgaatatggatctggttcaggtggaacaagaaatatatctggtacatcaacctatcatactgaacttgaaaaaaaactagcaaatgttcataataaagaggcggcattagtttttgcttctgcttatacagcaaaccaatctactttatggactttaggaaaaaaaattaaagatattgagatattttctgatgaattaaatcacgcgtcttta

SEQ ID NO: 233074 - DNA, 190 bp, Unknown
  Bacterial polypeptide expressing nucleotide sequence isolated from the Sargasso Sea
cggtcttgatcctgacacagttaatgttaatggtggtgccattgctcttggtcatcccttaggttgtactggagcaaaactttcaattcagttattaaatgaaatgaaaagaagaaatcagaagtatggaatggtcactgcttgtgttggaggtggtcagggaattgcgggtatttatgaaaggctttag

SEQ ID NO: 233075 - DNA, 391 bp, Unknown
  Bacterial polypeptide expressing nucleotide sequence isolated from the Sargasso Sea
atcaaagagctaaacattgaacctatcgcccgtttattatcctaccacgttgctggtttagagccaaaaataatgggagtaggtccaatttatgctgttccgggtgcattagaaaaagctggaatgaaacttaatgacattgaacaagttgaactaaatgaggcatttgcctgtcagtcattagccgttataagagaattagacattaatcctgaaattgttaatgtaaatggaggagcaatagcccttggtcatcctttgggttgtacaggcgccaaattgtccgttcaacttttcagtgaaatgaaaaaaagaaatcaaaaatacggaatggtcaccatgtgcgttggtacagggcagggagccgcaggaatttttgaaatgctgtaaa

SEQ ID NO: 233076 - DNA, 322 bp, Unknown
  Bacterial polypeptide expressing nucleotide sequence isolated from the Sargasso Sea
atgggattgggaccaattaacgcttcaaaaaaagctcttaaaagagctaatctagatattaaagatattgatattgttgaattaaacgaagcatttgcatctcaatctattgcctgcattaaagaacttaaaattaatcctgaaattgttaatatagaaggtggggcaatagctttaggtcacccattgggcgcaactggtactcgcataactgcaaaagccgcttctttaatgattaagcataataaaaaatatgctttagcaacacaatgcataggtcttggacaaggtatagcaacagtgttagaaagagttggttagt

SEQ ID NO: 233077 - DNA, 778 bp, Unknown
  Bacterial polypeptide expressing nucleotide sequence isolated from the Sargasso Sea
tttgggtgtgcaaattgttggcacgggaagcttcttgcctgacaatgtggtcactaacgacgaccttgcttcgcttggttgcgatgccgactggatcgttcagcggaccggtatccaggaacgtcgtcacgcgccctcagagatgaccactagtgacatggcggtcagggccgcccaaaacgccatcgaagatgcaggtattgcacgtggcgacattgatctgttgctgatggcaaccatgactcccgactatctattaccagcaacagctgcccaggtacagcatcagctgggtttgcagtgcgcggccgttgatatgaccgctgcttgtgccggttttttatatgccatggtgactggttttcagtacgtggcaaccgggtgtagccgctatgccttgattattggtgccgatatcaattcacgaattacaaatccacaggacaaacgtacgtatccgttgtttggggatggggcaggggcagtcgtgttgggaccgggaggttcagggcagggccttgaagcctacacccttggtgccgacggggcaggtaccgaattgctaaagcgccctgtgggtggctccaaggagccattttctgccgattgcgggagcggggaacgatggtatctggagatggatggccggagtgttttcaaatgggcagtgagactcgttgaggattcgtcaaaacaaatactgaatgcgggtgaatgtccggtcgaggatgtaaagctttggttgtttcaccaggccaacgagcggattctcgaagcg

SEQ ID NO: 233078 - DNA, 617 bp, Unknown
  Bacterial polypeptide expressing nucleotide sequence isolated from the Sargasso Sea
agccaataatgcagacacaaatggtaaatttgaagatgaaataacaattataaaagataaaaaagttgatgtaatgaaagatgggggtattagacctggaactacccaagaaattttaagtgggttaaaattagcttttgataataatggaacggtgacagctggaacatcatcgccgttaactgatggagctgctgctactttaatttgtgaagaagagtatgcaaaaagtaataacttagaaatattagctagaataaagtcaacagctgttaatggctgcgaacctgaagtaatgggattagggcctattggagcttctaaaaaagcccttagtagagctggcttaaaatcatctgatttagatataatagaactcaatgaggcttttgcttcacaaagtcttgcttgtgtaaaagatctagaattagatgaaaaaagtgtaaatatagatggtggtgcaattgcattaggtcatccattaggtgccacaggtgctaggataactggtaaagctgctcagttggtcaaacgtgaaggaaagaaatttgctttagctacacagtgtattggtcttggtcagggaattgcaacagttcttgaagcagttgagtaaa

SEQ ID NO: 233079 - DNA, 700 bp, Unknown
  Bacterial polypeptide expressing nucleotide sequence isolated from the Sargasso Sea
catcataaaagctcatttgacaagtcatatagagacataactcatagttcaatgagaaaaacaattgctgatagattagttaaatctgcaactgaagcgccacactttttcctttctgttgattgcgatatttcagagatcaataagattagggaaaatgttaataaaggtgacataaatatttcaattaatgattttataataaaagcatcagctttagcattaaaaaaatttcctaaggctaactgcagttggaacaacgattttataagatattattattcttatgatatatctgttgcagttgcagtagaggatggtttgataaccccaattgttaaaaatgcaattagcaaaggaattgaagaaatctcaatagaagtaaaattattagcatcaaaagcaaaaaaaggtgaattaagtcctgaagaatatagtggtggaaatttcacagtatccaatttaggaatgtttggtattaaaaattttaatgccataataaaccctccacaaagcatgatactcgctgtaggaaaagcagagccaagagctgttgtaagtaacaatgaaatcacaatatcaaatctaatgactgtaactttgtcctgtgatcaccgtgccgttgatggtgcattaggggctcaatggttaaacaaatttaaagatttcatacagaacccatcattaatgttattatagg

SEQ ID NO: 233080 - DNA, 637 bp, Unknown
  Bacterial polypeptide expressing nucleotide sequence isolated from the Sargasso Sea
ttgccaaaaaaaatagaaaagtctaaagaaaaaattgaaaagttcatcatagatttcaatcagataaatgcaggaccagctgttagaaaaatagctagagagcttgagattgacttgaacaaaatattgggctctggtaagaataaattgattactaaagatgatttaaaaaactacatacactcagggacatcccaagaaaaattggcttatgctaatttaaaaagtctggaaacttatggtgaatataaacttcaaaatcagtcaaaaattaggaaaactgcagcaaaaaacttgactaaatcttggcaaataatacctcatgtaacccattttgaagaagcaaacataacaaaaattgaaaaacaaagaaaagatttaaataatgtctcatcaattaaaattacaccgttagcatacataataaaagcaacatctatagctttagaaaagtttccattgatgaattcatcgttagtcgatgaaggaaaggtaatgattaaaaaatatgtaaatattggcgtagcagttaatacccaagaaggcttagtcgtaccagttatcagaaatgtcactgaattaaaaatagcggaaattgcaaaaaatattttagatttatctgcaaaagcaaaaaata

SEQ ID NO: 233081 - DNA, 730 bp, Unknown
  Bacterial polypeptide expressing nucleotide sequence isolated from the Sargasso Sea
tattcagatgatgaaaaacaaaacccacatttatatttgtcgatgggaattactgcagaaaatgttgcaaaaaaatttaatatttcaagaacagaacaacaaatatttgcattagaaagtcataggaaagcaaacgaagcacagcaaaaagggaaatttaatgatgaaattacaagaataagaaattatgaaacagatgaaaatatcagacccaatagcacaatggaaaaattagatagtttaaaattagcatttgatgaaaatggaaccgtaactgctgcaacttcgtcccctcttaccgatggtgctgctgtaacacttatatgtgaagaaaattttgcaaaagaaaatggattaaacattcttgggagaattaaatctaccgcagtagaaggttgtgatccaaattatatgggtttaggtccaatttcagctactaaaaaagctttagaaagagcaaaactttcaattaaagatatagatattgttgaacttaatgaagcttttgcttctcaatcaatagcttgtatcaaggatttagaaatagatgttgaaaaagtaaatttggatggtggtgcaattgcattaggacatccattaggtgctacaggtgctcgaattactggtaaagctgcacagttattgaaaagagagaataaacaatatgctctatctactcagtgtattggattaggaatgggaattgcaactataatagaagctatttaat

SEQ ID NO: 233082 - DNA, 526 bp, Unknown
  Bacterial polypeptide expressing nucleotide sequence isolated from the Sargasso Sea
aaagaaactccttcttacattgtgaatcaagtttgtggttcgggattaagatccatcgcctctggttttcattcaattctttcaaacaattcaaatatagttgttgcaggtggacaggagagtatgtctcaagctccgcatgtaattcatttgagaaatggaaaaaaacttggtgatactgaattaattgactcaatgattaaagacggactttgggatgcatttaatggttaccacatgggcatcactgcagaaaatgttgctcaacaatttcaggttacaagaaaagatcaagatatatttgcatttgactcacagacaaaagctttaagagcacaaaaagaaaataaatttgataatgaaattttacctttcaatatagaattaaaaaaaggcagtacaaccttccaaaaagatgagcatccacgagcaggcatttcaatggaagctttggaaaaaaaaaaagctgcctttcaaaaagatgggactgtcactgctggtaatgcttctggaattaatgacggag

SEQ ID NO: 233083 - DNA, 658 bp, Unknown
  Bacterial polypeptide expressing nucleotide sequence isolated from the Sargasso Sea
atggcgtcctcttgcgtgcctggccaacactacgacactgcaaccggaacgtgtgtggaatgtgcgcccggctactaccagccaagggcgggccagagcaactgcctcgaatgcagggccggcacatactccgccgggtcggtcgtgccgtctgcgtggacgcgctcaacagaccgcatgtgtcgcggtggtacaccgcagatgggtggttcgtttcatttgagtgacgcactaacggcgtgccgtctcaaccctgattgtcggtcgattgtagccgattgtacatatgggtgggatcccactacgtacacacccccgtacacagggggctatttggaatactgccccaatgatggtgaaggaggctctggagcagttgggacatgtctctacacgccaccaagtggtatcagcagtggctccggcgggtgcgccagctgccccgccggcacttatcagccgtatggcaacgcgggaaccatgaatacttattaccccgattattattttccaacggacggagtgggaacccccgcgggaaccgtgcctatccccgggggaacgtatccgtttgcagcggcgcatgcagacgactccactgattgtcagcactgcccgccgggttcgatgtcaaacgcagaatcaacttcggtcgatg

SEQ ID NO: 233084 - DNA, 577 bp, Unknown
  Bacterial polypeptide expressing nucleotide sequence isolated from the Sargasso Sea
tgataatcttttgacatttagatctgacataaataataaaagagttgaattaccaaaagtttctttaaatgattttattataaaagctgttggattaactttgatgaaagttcctgaagtaaatgtcagttgggataaagataacacaaaattttttaatacggctgatatttctattgctgtagcaattgaaggaggtttagtcactccaattattaaaaatgtagaaaaaaaaggtttagagactatatctaatgaagtaaaaacaatggtaagaaaagccaaagagggttctcttttaccagaagattataatggtggaagtttttctatctcaaatttaggtatgtttggtattaaacatttcacttcaattataaatcctccacagggtgctatcttggcagtaggttcaggtgagaagaccccaatagttaaaaatgataaaatagaaatagctactttaatgaacgtaaccttatcctgtgatcacagagtaattgatggggcaaccggggctaaatttttaaatgaattaaaacggtttatagaaactccttctttaatgatattgtag

SEQ ID NO: 233085 - DNA, 357 bp, Unknown
  Bacterial polypeptide expressing nucleotide sequence isolated from the Sargasso Sea
aatctacagctgtagttggttgtccaccagaattaatgggtcttggcccaattaatgcatctaaaaaagctttaaaaagagctaatttatctatttccgatattgatattgtggaactaaatgaggcatttgcttctcaatctttagcatgtattaaagaattaaagatggacataaataaagtaaatatacatggtggagcaatagcattaggccaccctttaggcgctactggagcaaggattacaggtaaagttgcaactttattgcataataataataaaaagtatggattagcgacacaatgtataggtttaggtcaaggtattgcaaccgtgttagaaaatattaattaaa

SEQ ID NO: 233086 - DNA, 688 bp, Unknown
  Bacterial polypeptide expressing nucleotide sequence isolated from the Sargasso Sea
agcagctggcgcgcgcatattctgatcgccaccgacggcgtattctcaatggatggcgtcatcgccaacctgcaaggcgtgtgtgatttagccgataaatacggcgcattagtcatggttgacgactcacatgccgtgggctttgtcggcctaaacggccgtggttcacacgaacactgtggcgtgatgggccgtgtcgatattatcaccggcaccctaggcaaggccttaggtggcgcatcgggcggtttcacttcaggcaaaaaagaagtcatcgactggttacgtcaacgctctcgcccttacctattctctaactcattggcgccttcaattgtaactgcctctatccatgtattagagatgctcaaatcgggccaagcactgcgtgaagcggtatgggaaaacagccgttacttccgcgaaaaaatgtcagcggcaggctttaccttaggtggtgcagaccacgcgattatccctgtgatgattggcgatgccaaactggcgagcgatttcgctaaccgtttattagcagaacatatttacgttatcggcttctcattccctgtcgtgccaaagggacaagcccgtattcgtactcaaatgtcagcggcccacacccgtgagcaactcgacaaagcgattgaagcctttacccgtatcgctaaagaaatggcgattatttagg

SEQ ID NO: 233087 - DNA, 214 bp, Unknown
  Bacterial polypeptide expressing nucleotide sequence isolated from the Sargasso Sea
atgatcaaggcgtacgcgaacgcgggcgtggatccgagcgtgatgggcgtgggcccggtgccggcctcgcgccgtgcgctggagcgggcgggctggacgccgggcgacctggacctgatggaaatcaacgaggcgttcgcggcgcaggcgctggcggtgcacaagcagatgggctgggacacgtcgaaggtgaacgtgaacggcggggcgatcg

SEQ ID NO: 233088 - DNA, 936 bp, Unknown
  Bacterial polypeptide expressing nucleotide sequence isolated from the Sargasso Sea
gagcaaggttttaatattgggtaaaattgttacttttatgactggtatgaatataaatacagcgggtatgactgtaaatagatggtgcggttcttctatgcaatctattcatatcgcggcaggatctatagctatgggatctggtaaggcatttatttgttgcggagtagaaagcatgaccagagttccgatgaatggttttaatccaatgccacatcctaaattaaatgaagataatcctaatgtatatttatctatgggcacaactgcagaaaatgttgctaaaaaatatcaattaactagaaaagatcaacaagagtttgcaatctcaagtcatcaaaaagcttatgaagctgaaacgaaaggtaattttaaagatgaaataactatcataaatggttgtgataaagatggaggaatacgaccaaatactaatcaagaaattttagatggtttaaaactagcatttgatgaaaatgggactattacagcaggaacatcttctcctttaactgatggtgctgcagcaactttaatttgcgaagaagaatacgcaaagaataataatttagatattttagctagaattgtttcaacagctgttgaaggatgtgcaccagaagtgatgggtttaggacctataggagcttcaaataaagcacttaaaagagcgaatttatcaattaaagatattgatattgtggaattaaatgaagcattttcttctcaatcattagcttgtatcaaggatttaaatatagaccataataaagttaatattgatggaggtgcaattgcattaggacatccattaggtgccactggagcaagaataacaggtaaagcagcagatttattaagaagagaaaataaaaaatacgctttatcaactcaatgtataggattaggtcagggtatcgctacagtacttgaaaa

SEQ ID NO: 233089 - DNA, 469 bp, Unknown
  Bacterial polypeptide expressing nucleotide sequence isolated from the Sargasso Sea
ttggcgtcgctcgctgaacaaaccgaagcactaaaatcgcagggactgtacaagcatgagcgggttatcgccggaccgcagcaagcggcaatcgacgtccacaacaatgacgatacatgcgaggtcctgaatctctgcgccaacaactacctcggactcgccaatcaccctgcaatcatcaaggcagctcacgaagcactggacacgtttggctatggcatggcatctgtgcgatttatttgcgggactcagacgattcacaaggaactcgaggagtgtatcagccgattcctcggcaccgaggacacgattctctacccatcctgtttcgacgcaaatggcggtctgttcgagaccattttgacgaacgaagatgcagtcatcagcgacgcactgaatcatgcgagcatcatcgatggcatccgactttcgaaggcgcagcgcttccgctataaaaataacgacatgg

SEQ ID NO: 233090 - DNA, 820 bp, Unknown
  Bacterial polypeptide expressing nucleotide sequence isolated from the Sargasso Sea
attggttacttttttgtctgatttgaatattaaaattccaggtatgactgtagatagatggtgtggatcctctatggaagctattcatattgcagctggtaaaattgcaatggggtctggaaaagtttttttgtgtggaggagttgagagtatgacgcgagtaaagactggttttgatcctttgccatatccatacacaaaaaataatgatcaaaaccctcatctttatctgtcaatgggtattactgctgaaaatgttgcaaaaaaatataaaatttcaagaacagaacagcaagaatttgcattagatagtcatgagaaagcaaattttgcaaaaaatagtgggaactttaaaaatgaaattataaaaataaataattgtgaacatgatgaaaacattagaccaaatagtaatatggaaaaattaaataagttaaaacttgcattcaataataacggaacggttacagctgcaacagcttctgcattaacagatggtgctgctgtaacattaatatgtgaagaaaattttgctcgagaaaataatttagaaattttgggcaggattaaatctactgccatacaaggttgccacccagattttatgggattaggtccaatatcagcctcaaagagggcattaaaaagagctcaactcacaataaaagatattgatatagtagaattaaatgaagcttttgcgtcacaagctttagcatgcataagagacttagatatagatcagaaaaaagttaacttggatggaggtgctatagctttaggtcatccattaggagcaactggcgccagaataactggt

SEQ ID NO: 233091 - DNA, 436 bp, Unknown
  Bacterial polypeptide expressing nucleotide sequence isolated from the Sargasso Sea
gatggtgcttcagcagtactcgtcatgagcgctgaaaaggccgccgaattaggcttgcgtgcgcgagctcggtttcacagtttcgctttggcgggtgctgatccagtaaccatgttaaagggcccaattccagcgactgaaaaagtcatggctcgctcgggtctaactcttgaagacatcgacttgtttgaggtgaatgaggcttttgcttcagtcgtgttggcttggcaaaaggagcatggcacagacctcaacaagacaaatgtgaacggtggagctattgctttagggcacccactcggatgttcaggtaccaagttgatggcaacgcttttgaacgaacttgaacgcaccaacggaaggtacgggcttcaaacaatgtgcgaaggcggaggcatggcaaacgcaacaatcatcgaaaggttggacgcgtaat

SEQ ID NO: 233092 - DNA, 268 bp, Unknown
  Bacterial polypeptide expressing nucleotide sequence isolated from the Sargasso Sea
tttatttccgatattgatattgtggaactaaatgaggcatttgcttctcaatctttagcatgtattaaagaattaaagatggacataaataaagtaaatatacatggtggagcaatagcattaggccaccctttaggtgctactggagcaaggattacaggtaaagttgcaactttattgcaaaataataataaaaagtatggattagcgacacaatgtataggtttaggtcaaggtattgcaactgtgttagaaaatattaattaaa

SEQ ID NO: 233093 - DNA, 583 bp, Unknown
  Bacterial polypeptide expressing nucleotide sequence isolated from the Sargasso Sea
atttgtagaaaatggtaaaagagtatctaaatctcatgttgtagatatggatgaaggtgttaggagagatactactcttgaggctttatcaaaacttagacctgcatttaaaatgggtggaattgttactgctggtaattcatctcaaacttctgatggtgctgcttttgttttagtaatgagtgaagaaatggtcaagcaactaggggttactccaattgctagaatggttacttgtacatcaggtggtgttgaccctctatatatgggtattggacctgttgaagctattccaaaggcattagatcaagctggattaaaactatctgatattgaacaaacagaattaaatgaggcttttgcttgtcaagctttagctgttattcaagaagctggtttagatcctagtacggttaatgtcaatggtggagctatagcattaggacaccctctaggttgtactggagctaaattaactattcaacttttaaatgaaatgaaaagaagagatcaaaagtatggaatggttactgcttgtgtcggaggaggtcaaggaatagctgggatttttgaaaggctttaa

SEQ ID NO: 233094 - DNA, 835 bp, Unknown
  Bacterial polypeptide expressing nucleotide sequence isolated from the Sargasso Sea
tatgacagttaacagatggtgggctcttcaatgcaagcaattcatgatgctgctggagctatcgcaattaactctggagatgtattttatgtgcggtgtagaaagtatgacatttattccaatgaatggattaacatacgatcttcatcttcaattaagtaaagataatccaaatgtatatatgtctatgggtattacagctgaaaatgttgcaaaaaaatttgatatttctcgaaaagagcaacaagattttgctattagtagtcattctaaagctaattcagcaagagaaacaaacatgttcgacgatgaaattgtttccattataaataatcatgaaataatcaataaagatggaggaattcgacctaatacctcacacgaaattttagatggattaaaattagcttttgatgaaaatggaactgtaacagctggtacagcttcaccattaacagatggtgcttcagcagtaattgtgtgtgaggaagaatatgcaaaaaaaaatagtctaaatattttagcgcgtatcaaatctacagccgtagttggttgtccaccagaattaatgggtcttggcccaattaatgcatcaaaaaaagctcttaaaagagctaatttatctattgatgatattgatatcattgaactaaatgaagcatttgcttctcaatctttagcatgtattaaagagttaaatatggatataaataaagttaatatacatggtggagcaatagcattaggccaccctttaggtgcaactggagcaaggattacaggtaaagttgcaactttattacaaaataataataaaaagtatggattagcgaca

SEQ ID NO: 233095 - DNA, 712 bp, Unknown
  Bacterial polypeptide expressing nucleotide sequence isolated from the Sargasso Sea
aatgattgatgcaaaaaaatctttaggccaaaattttttggtagataaaaatataattaaaaaaattgttaatttagttgaaattaaaaataacaatgttatcgaaatcggaccaggaaagggagctttaaccgaagaaatattaaaagctaaaccaaaatttttatccttaatagaaaaagataaacaatttattaatgatttgaaaaatagatttgatagaaataaatacgttcaagtttttggagaagatattcttaaatttaatttagaaggcaaaataaaaaaaaatacaattatttttggtaaccttccttacaatatttcatcacaaattcttataaaatttttaagatttaaagcatggccgcctaaatttagtcatttgatcttaatgtttcaaaaagaattaggtgaaaaaataattggaaaattctctacttcaaattatggcagattatcaattttagcaggatatagacttgaattacaaaaaaaatttatggtatcgaataattgttttttgccaagacctaaagttaagtcgattgttcttcacttaaaaccaaagaaaaaaaattcttttttaataaaaaatatatataatttggagaaaataactaatactttattttctaataaaagaaaaatgataaataaaaatattaaaaagatattggctcttagtgaaattcaacaaatcgacgaatta

SEQ ID NO: 233096 - DNA, 433 bp, Unknown
  Bacterial polypeptide expressing nucleotide sequence isolated from the Sargasso Sea
atgtcaatagactctaatgaaggattaactaaagaagatgcttactactcatttcaaactagacttgtcaatgtaagaagatatttaactaatatagttgataattttttcattcaatatgggattgtatctaaaaattgggatactaaaactattataaaaagtaatgaaaatggtcaaaggaaaggaatttataaaacaaagtattcaactgatggaattaatattggagtaggaatgaattgggtttttgataatggtctgtcttcaggactatatttaattaaaattataagtaaagagccatcatttacctatgaactttcagaggactgggaatgtaatagttcttgtcagtcaaactatgagagcaatgtaaaaaagtatactcctaacaattcggttaatttaagttttggttataatttttaat

SEQ ID NO: 233097 - DNA, 688 bp, Unknown
  Bacterial polypeptide expressing nucleotide sequence isolated from the Sargasso Sea
aatgatttttgcaaaaaaatcccttggtcagaatttcttaatagataaaaatataatcttaaaaattctaaatttagttaatgttcatgatagaaatattattgagataggtgccggtcaaggtgccttaactgaagaaattctaaaaagaaatcctaaatctttgtgcttagttgagaaagatacaaatttagcaaaaaaactaaaagaaaaatattcgacaaataaaatagtaacgatttatgaaaaagatataattaaatttaatttagaaaaaattgccaaaaaaaactccattattttaggtaaccttccttacaatatctcatcacaaatactagtaaaaattcttaaatttcataaatggcctcctaaatttaatgatgtaatttttatgtttcaaaaagaattgggtgataaaattataggtaaattcaaatcaataaattatagtagattatcaattttgacaaatttgagattaaaaattgtaaataaatttttagtgtcaccaaattgttttttacctaggccaaaagtaaaatcaataataattcactttagacctaaaaatcagaaaaatatacatattaaaagaattgaaaatctagaaaaagtaacaaatattttattttctaataaaagaaaaatgataaacaaaaatatcaaaagaattttaaatcaaagt

SEQ ID NO: 233098 - DNA, 658 bp, Unknown
  Bacterial polypeptide expressing nucleotide sequence isolated from the Sargasso Sea
aatggatgcaaatttttgcacaacagatcctaaagctttaaatttttcaaaatgggataatgtccactacatgcctaattgtgtagatcaatcactagaaaatctcgaaatttataataataaatattttaaaagtgatgttttttttgcaatgagtcatggtgttcatagaggagttctaaaaaaaggtaagattgatgcaagagaatattttattaacaaattaattgatattacacctaatataaagtttgactgctatggtcttaatggaaatcaaccaatttggtcagatgattttttaaaaattttatctcaaaacaaaataggcataaacctaagtcaaggaaaatcctcaaatttttatagtagtgataggttttcacaacttgtcggcaatggtttgcttgtaatgatagatgaaaaaacaaatataggtaaattttttgaaaaaaatgaaattattacatacaagaatgtatcagatttatcagaaaaaattattaaatattcaaatgataactacacaaggtcaagaatagcaaaaaaaggaagagataaatatttcaaatattttaactcaaaaattgttgctgattttttaattaacaaaacctatggctttgataaaaaatatttttgggaagaaattatataa

SEQ ID NO: 233099 - DNA, 733 bp, Unknown
  Bacterial polypeptide expressing nucleotide sequence isolated from the Sargasso Sea
aagtaaagataatccaaatgtatatatgtcaatgggcatcacagctgaaaatgttgcaaaaaaatttgatatttctcggaaagaacaacaagattttgctattagcagccattacaaagctaatttagctagagaatcaaatatgttcgacaatgaaatagtgtctatcacaaataatgatgagaaaattaataaagatggtggcattcgacctaacacctcacatgaaattttagatgggttaaaacttgcttttgatgaaaatggaacagttacagctggtacagcttcaccattaacagatggagcatcagcagtaattgtttgtgaggaagaatatgcaaaaaaaaataatctaaatattttagctcgtattaaatctacagccgtagttggttgtccaccagaattaatgggtcttggcccaattaatgcatccaaaaaagctcttaaaagagctaatttatctattaccgatattgatattgtggaactaaatgaggcatttgcttctcaatctttagcatgtattaaagaattaaagatggacataaataaagtaaatatacatggtggagcaatagcattaggccaccctttaggtgctactggagcaaggattactggtaaagttgcaactttattacaaaataataataaaaagtatggattagcgacacaatgtataggtttaggtcaaggtattgcaactgtgttagaaaatattaattaa

SEQ ID NO: 233100 - DNA, 955 bp, Unknown
  Bacterial polypeptide expressing nucleotide sequence isolated from the Sargasso Sea
atgcaagaagaagttgtaattttatctggatctagaactgcaattggtagctttggaggatcactaaaatcagtatcaccaattgaacttgggactgtagttgcaaaaaaggctttagaaaattcaggtgttgacaaaaatgagtttggccaggttgcttttgggcatgttattaatactgagcctaaggatatgtacctttcaagagtaatctcattaaattctggattgcccaaaagtgtagctgcaatgaatgtaaatcgtttatgtggatctggtttacaggctatagtttctgttattcaaagtttaacattaggagatactaattttggccttgcaggaggatcagaaaatatgagtaattcaccacatattataaaatctaatagatggggtaaacgaatgggcaatactacagttgaagatatgatgttaggagcattaaattgtccttttggcacaggtcatatgggagttactgcagaaaatgttgctaacgagtataatatttcaagggaagtacaagacagtttttctttggaaagtcaacagagagcttcttctgcaattgaaaaaggttattttaaagaacaaatagtagatattgaaatcaaaaaaaatacatttaatgtcgacgaacatccaaaaaatacagatttagaaagtttaaaaagtctgaagtcagtttttatggacaaaggtacagtaactgcaggaaactcgtcaggtttaaacgacggtgcagccgctttagttctgagtactgctacagccgctggatccaatggattaaaagttaaagcaaaaatcttaggttattctcattcaggagtaagacctgaagttatgggtataggtccaataatcgctgtaaaaaaactttttgaaaaaactggcctatgtgaaaaagattttgatgtaatcgaaagcaatgaagcttttgcagctcaag

SEQ ID NO: 233101 - DNA, 703 bp, Unknown
  Bacterial polypeptide expressing nucleotide sequence isolated from the Sargasso Sea
atgggtttaactgctgaaaatgtagcaaaaaaatataatctttctagaaaagagcaacaagactttgcaattttaagtcatactaatgcttcaaaagctcaattatctaaaagctttgatcaagaaataactattattaataaagataatattgatgtgataagtgatggtggcataagaccaaatacttctcaagaaatattaaacaatttaaagttagtgtttgatgaaaatggaactattacagctggtaccgcctcacccctaactgatggcgcttctgcaactttagtttgtgaagagcaatatgccaaagataacaaattatcaataatagctagaataaaatctactgccattcaaggttgccctcctgatttaatgggattaggaccaattaatgcttcaaaaaaagctcttaaaagagctaatatagatattaaagatattgatattgttgaattaaacgaagcttttgcatctcaatctattgcctgtataaaagaacttaaaattaatcctgaaattgttaatatagaaggtggtgcaatagctttagggcacccattaggcgcaactggtactcgtataactgcaaaagctgcctccttaatgaataaacataataaaaaatatgctttagcaacacaatgcataggtcttggacaaggcatagcaacagtgttagaaagagttgaatagt

SEQ ID NO: 233102 - DNA, 928 bp, Unknown
  Bacterial polypeptide expressing nucleotide sequence isolated from the Sargasso Sea
atgtcaaaagaggtatatatagttgatggaatcagaactccaattggaaatttttgtggaacattatctactattagaacagatgatttagcagcccattctattgcttcattaatggcaagacatccacatttggatttggaattagtggaagacgttatttttggatgtgcaaatcaagctggagaagacaatagaaacgttgcaagaatggctggtttattagcaggcctaccaattagtgttggtggagaaacggtaaatagattatgtgcttctggaatggcagcggttgttaatgcagcaagagcaataaaagatgattcaggagaattgtttatttctggtggggttgaacacatgacaagaggtccgtgggtgatgtcaaagtcctctaaagcatttggaagagattcaaaattgcatgattcttcatttggatggcgttttatcaatcccaaattagaagaattatacggaactgaaggaatgggggtaaccgcagaaaacttggtggaaaagtataatttatccagagaggaacaagatgaatttgcattatggtcgcaacaaaaagtactaaaagcccaagaatctggtttttttgatccagaaatatgtcctgttgaaattccccaaagaaaaaaagacagtattattttttcaaaggacgagtttaaccgaccaaaaacgactctagattctttagcaaaattaaaacctgcctttaagaaaaatggaagcgttaccgccggaaatgcctctggattaaatgacggtgctgcagcacttttaatttcttctgaaaatgctttaaaatcacaaaatttaaaaccaatggctaggattgtcagttcagcaatagctggagtgtctccatctattatgggaattggaccggtgttggcctctaataaagcattaaaaa

SEQ ID NO: 233103 - DNA, 1006 bp, Unknown
  Bacterial polypeptide expressing nucleotide sequence isolated from the Sargasso Sea
tcaaaaattaatccaaaggaaattgaagatgttgttataggatgtgcatttcaagttgatgaacagtgttttaatattggaagattggtaacttttttatcagacttagacataagagtgccaggcatgtctgtagatagatggtgtggatcttctatggaggcaattcatattgctgctggaaaaatatcgatgggctctggtaaagtatttatttgtggaggtgtagaaagcatgacaagagttaaaactggcttcgatcctttaccttatccttattcagatgaagaaaaaataaatccacatttatatttatcaatgggaattacggcagagaatgttgcaaaaaaatataatatttcaagaacagagcaacaacagttctcattagaaagtcatagaaaagcgaatgaggcacagcaaaaaggtaaatttattaatgagattactaaaataggtgattgtgaaactgatgaaaatattaagcctaatagcacaatggaaaaattagatagtttaaaattagcttttgatcagaatggaactgtaacagctgcaacttcatctcctctaactgatggagctgctgcaactcttgtatgtgaagaaaattttgctaaagaaaatggcttagaaattcttggaaggataaaatctactgctgttgaaggttgcgatccaaattatatgggattaggtccaattgcagccactagaaaagctttggaaagagccaaactttcaattaaggagatagatattgttgaactcaatgaggcttttgcgtctcaatcactagcttgtataaaagatctagatattaatattaaaaaagtaaatttagatggtggcgcaattgctttaggacatcctttaggcgcaacaggttcacggataacaggaaaagctgcacaacttttaaaaagagaaaataaaaaatacgctcttgctactcaatgtattggtttaggtatgggaattgcaactataatagaatcagtttaat

SEQ ID NO: 233104 - DNA, 859 bp, Unknown
  Bacterial polypeptide expressing nucleotide sequence isolated from the Sargasso Sea
atgaactataaaaaattcttctcagacgagttaatttcactgaaatcacaaggtctatacagaaaatttagggctattaataggaataaatctagctttccaaaagctacagaaagatttgaaggtaaagaaagagaggttgaagtttggtgcagtaatgactacttaaatttgagtcagcatcccgaagttaccaaaacttctgttgaggtcataaaccaactcggtacaggatctggtggaaccagaaatatttcaggtacatccacttaccacgttgatctcgaaaacttgcttgcagatctacacaataaagagtctgctctactatttccgtcagcatatacagcaaatcaatcaacgctatggactttatgcaagaacatgggaggagtggaagttttttctgatgagcttaaccatgcttctttaatccaaggcattaagaatgcggatgtcgtaactcacatctttaggcataacgatacagatcatttagaggagttgttaaaaaccgcgaacgcaaatactcctaaaattatagtttttgaatctctttactctatggaaggacttaggtctcccttgcaaaaaatcatagagattgcaaaaaaatataatgcccttacctatcttgatgaggttcactcagtaggtctttacggtcctgaaggaagaggcataactgcagagaaaggtcttgaggatgatatagatattatcaatggaactttatctaaatctttcggacaaatgggaggttatgtcgctgctaactcagatatcattgactatataaggagtttcgcccctggctttatttttacatcttccatgaaccccctcatcgcagctgcat

SEQ ID NO: 233105 - DNA, 1141 bp, Unknown
  Bacterial polypeptide expressing nucleotide sequence isolated from the Sargasso Sea
aatgaagagtgcagttttagttggttttaaaagatctcctttcacaatagcaaataaaggtttgttagcaggtgtaagacctgaagatattttatctcaagtaattaatgatttagtcaaaacaacaaaagttaataaagaagatatagaggatattattgcaggctgtgcttaccctgagggagctcaaggttataacattgctaaaatagtttcctttatgactggcatgcctgaacatgttggtggtatgacaattaatcgttggtgtggatcttctatgcaatcaattcatagtgcagcaggtgctatttcaatgaatgcaggtaaagtttttatttgttgtggtattgagtcgatgacatctgttccaatcaatgggttaaactactcgcctcatccagagcttataacagagcaaccaaatgtttatttatcaatggggcttacagcagaaaatgttgctaaaaaatttaatatatccagaaaagaacaacaagaatttgcaattcaaagtcactctaaggcatttaaagctcaatcttcaaatgcatttgatgaagagattacaattattaaaaataaagaaactgaggttgttcttgatggcgcaataagaccaaacactaatcaagaaatcttagatgggcttaaattagtttttgatcagaaaggaacagttactgctggtaccgcttcacctttaacagatggagcctcagcaactttggtatgcgaagagggttatgcaatctcaaataatctacctattttagcaagaataaaatccacagcaattaatggatgtcctccagaattaatgggattggggccaattggagcatctttaaaagctttaaaaagagcaagacttgatattaatgacattgatataatagaattaaatgaagcttttgcgtcacaatcacttgcttgtataaaagagcttaacataaatcctgataaagttaatattgagggaggagcaatcgcacttggacatccattaggcgcaactggaactagaataactgctaaagcagcctatctaatgagtaaacaaaataaacaatatgctttagctacccaatgtataggtcttggacaaggtattgcaacagtgttggaaaaagttgaataa

SEQ ID NO: 233106 - DNA, 1138 bp, Unknown
  Bacterial polypeptide expressing nucleotide sequence isolated from the Sargasso Sea
aatgtcttctgctgttattgtaggttttaaaagatctccttttactatagctagaaaaggcaacttggctgatgttaggcctgaagatattttatcccaagttattaatgatttagttaaatctacaaatattaataaagagcatatagaagatattattgcaggatgtgcttatccagaaggagaacaaggatttaacatagcaaaaatagtttcatttatgacaaatatgccagagcatgttgctggcatgacagtaaatagatggtgcggatcttctatgcaagcaatccatatagctgctggagcaattgcaatgaatgctggtaatgccttcatttgttgtggtattgaaagtatgtccaaggtacctataaacggtttaaattattcgccgcattcaaaattaaatgaatcaaatcctaatgtatacttatctatgggcaatacagcagaaaatgttgcaaaaaaatataatttgagcagagaagttcaacaagatttctctattagtagtcacaaaaaagcatttaatgctcaaaatcaaaactattttaatgatgaattaacttctatacatatagataataaaattattgaattggatgaagcaataagacccaatacttcacaagaaatactaaatggacttaagttagtttttgatgaaaatggtactgtaacagctggaacatcttcaccattaacagatggagcggctgctactttagtatgcaatgaaaactatgcaaaaaaaaataatttaccaattttagcaaaaattatatctacagctgtaaatggatgtccacctgaattaatgggtttaggacctataggagcaacaaaaaaagcccttaagagagcaaatttagatattaaagatatggatattatagagttaaatgaagcttttgcatctcaatctttggcttgtatgaaagatctgaatattgatcctgaaaaagtaaatattgatggtggagcaatagctctaggtcatcccttaggtgctacaggaacaagaataactgcaaaagctgctcaaattatgcagagagagaaaaaacaatatgctcttgcaactcaatgtataggattaggtcaaggaattgcaacaatattaaaatcttattaa

SEQ ID NO: 233107 - DNA, 692 bp, Unknown
  Bacterial polypeptide expressing nucleotide sequence isolated from the Sargasso Sea
aatgaaaaaaatttttaaaagatcttttgagaggaatgataaaagagaattgctattgtttggatattcagaacatcaggaacaaccatcaaaagaattagaaattacacctgctccaagcccccatatgcgctggaatccttcaagacaagagtgggtaacgtattctgctaccagaaaagtcagaacctcatttccacctgaggaatattgtccattatgtccaggtgcagaattaaattttccaactgaaataccttttaagaattttgaaatagcaatctttcctaacaggtgggctagttttaatacaaaaaacagacaaatgtcaattgaaggaatagacgctcagccatctaatggagagtgtgaggttgttgtttattcttccaatcataaagataccatagcccaaatgtctcttgatagggtagagcttctttttaatgcttggtctgatcgatatataaatttaatgaaaagagatgatataaaatacgtgatgccttttgagaatagaggaattgaatgtggtgttactctacatcatcctcatggacaaatttatgcttatcctattatccccccagttattcaaaaagaaattgaggcatttagtaaagaaaattttattgaaaaattaatgaaaaatttagaacaaaactattatgtttatcaagatgattatgtca

SEQ ID NO: 233108 - DNA, 2038 bp, Unknown
  Bacterial polypeptide expressing nucleotide sequence isolated from the Sargasso Sea
atggctgaattaaaagaagtttttgttcctgatatcggcggagatgaagtacaggttatcgaaatctgtgcttctgtgggcgataccttagcagcggaagagtcgattctgaccgttgaaagcgacaaggcgaccatggacattcctgcgccgttcgcgggcgtgttagccgaattgaaagtggccgtcggtgacaaagtcagcgaaggtaccttaattgcgatgatgcaagcggcgggcacggctaatgttcaagctgcgcctgttgctcaagctgccgctcctgcgccagctccagcagcacctgctccagtacaagcggctccagcccctgtggctgccgcgcctgcgacgggcgcaacccaagtggttgaagtcactgtgccggatatcggtggtgacacagatgtgtctgttatcgaagtcttagtcgccgctggcgataagattgaggttgacgctggccttatcacgctagaaaccgacaaagcgaccatggacgtaccatcgccattcgcgggtgtggtgaaagaagtgaaagtggctgtgggtgacaaggtttctcaaggctcattagtgatcatgctcgaagtgggcggcgcggcacctgccgcagcgccacaagcgagcgcgccagcagcctctgctcctgttgctcaagcggcatcttccgtcacacaagcagcagcgccagttgcgccagtagcagctgcggcaccagtggttgcggttaaagaaatccaagtgccagatattggcgatgcgagcaatgtcgatgtgatcgaagtgctcgtgtctgtgggcgatgacatcactgttgaccaaggcttaattacccttgaaaccgacaaagcgaccatggaagtacccgcgccattcgccggtaaactgttgtcgttaaccgttaaagtgggtgacaaggtttctcaaggtagcgtgattgcgacgattgagactgtaactgcaggtagtgcgccagtgccaatagctcaagccgcaacacctgcaccagtcgcccaagaagcggcaccagcacctgttgcaaccgctcctagccgtccacctgtgccacaccacccaagtgcgggtgcgccagtggcgaccggtgtggttcatgcgtctcctgcggttcgccgtttggcccgtgaatttggtgtggatctcactcaagtgacgggttctggccgtaaaggtcgcatcatgaaggaagacgtacaggcgtatgtgaagtacgaactgtctcgtcctaaggcgacagcagcaacctcagttgcagcgggtaacggtggtggtctgcaagtgattgctgcaccaaaagtggatttcagcaagtttggtgaagtggaagaaattccattaagccgtatccagaagatctctggtccaaacctgcaccgtaactgggtaactattcctcacgtgactcagttcgatgaggctgatatcaccgagatggaagagttccgtaagcagcagaacgacgcggcggcgaagaaaaaagccgattataagatcactccgctggtctttatgatgaaagctgtggcgaaaacgctgcaacagttcccggtgttcaactcaagcttaagcagcgacggtgaatcactgatccagaagaagtactaccacatcggtgtggcggttgatacgccaaacggtctagtggtacctgtggtacgtgatgtggataagaaaggcattatcgagttatctcgtgagctggccgatatttcgatccgcgcccgtgacggtaagctgaagtctgccgatatgcagggtagctgcttcactatttcaagcctaggtggcattggtggtactgcatttaccccaatcgttaactacccagacgtggcgattttaggtgtgtctaaatctgaaattaagcctaagtggaatggtaaagaattcgagcctaaattgatgttgccactgtcgctatcatacgatcaccgcgtgatcgatggtgctatggctgcacgctttagcgtgaccctgtcaggaattctgtccgatattcgtactttgattctgtaaa

SEQ ID NO: 233109 - DNA, 454 bp, Unknown
  Bacterial polypeptide expressing nucleotide sequence isolated from the Sargasso Sea
atgaataattcaaatcaactatataagaataccttagatgacattgaagctgatgggctttataaaaaagagaggattatcacaacgccccaaagtgtaaaaattaaaactaataataatgatgaagttttaaatttttgcgctaataattatctaggattagcagataatccagatgtaatcaatgcagcaaaagatggacttgataaatatggctttggtatggcatctgtacgttttatatgtggcacacaaaaccttcataaagaattagaattaaaaatatctcaattctttaattctgatgatacaattttatatacttcctgttttgatgctaatggaggactatttgaaacattacttagctctgaggattctgttatatctgactcattgaatcatgcttcaattattgatgggattcgattatgtaaggcagcaacgttatagg

SEQ ID NO: 233110 - DNA, 1183 bp, Unknown
  Bacterial polypeptide expressing nucleotide sequence isolated from the Sargasso Sea
tatgagagaagcatatatagtaaaagcttatagaactgctgttggtaaagcaccaagagggttttttaagttcaaaagaccagatgaacttgctgcagaaactattgaatatttaatatcacaaattcctggatttgataaaacacaaattgatgatttaattgtcggtaatgcgatgcctgaggctgaacagggctttaatgtagctagattaatttctttgatgggtcttaaagtagatgatgtaccgggtgttaccattaatagattttgtgcatctggattggaaacaattgcagttgctacagcaaaaattagatcaggcatgtcagaatgtattattgctggtggtgtcgaaagtatgagctatataccaatgacaggttttaaacctgttcctaattataatactgtatccaaaggaaaagaggattactattggggtatgggattaactgctgaggaagttgcaaatcaatatagtgtttcgagagaggatcaagataaattcgcttatgaatctcatcaaaaagctgtgaaagccttggaagaaaagaaatttgattcacagattgccccgataactgttaatgaggtttatttagatgaaaatttaaagaaaaaagaaagacaaactacttttaatcaagatcaagggcctagaaaagatactagtattgaagcgttatcaaaattacgaccagtattctcgtcaagtggatctgtaacagctggtaattcttcacaaatgagtgatggtgctgcttttgtaatgattgtaagtgaggatatgttaaaaaaattaaatattgaacctattgctaagcttgttagttatagtgtagcaggtcttccacctaaaataatgggtatggggccagtaagagctgttccaaaagcgctaaaacaagcaaatatgaaaattaatgatattgaattgattgaacttaatgaggcattcgcatcacaatcgattgctgtaataaatgagttgaatcttgataaaaatattattaatgttaacggaggtgcaattgcactgggtcatccattaggatgctcaggtgctaaactttcagtacagttatttgatgaaatgaaacaaagaaagttgaaatacggaatggtaactatgtgtgttggaactggccaaggagccgcaggaatttttgaaatattataa

SEQ ID NO: 233111 - DNA, 1258 bp, Unknown
  Bacterial polypeptide expressing nucleotide sequence isolated from the Sargasso Sea
atgctaaaagaaataaaattaccagacctaggtgaaggaatagactcagctgatgttagcgaaattttagtttctcccggggataatgtgtcggtcgatgatataatattggttttagaatcagagaaagccagtatggaaataccatcagaagataacggggttgtaaaaaaggtttttgtttcatctggtgatgttgtaaaaacaggtgagattttgattatgcttgaggttgctaaatcatcagagtcgaaagtagaaaaaaaagatattaaagaagaagaaacgactagtcaaataagcgacacaaaagagaaaccaagttcagcagttgcttcagaagagaaaccagaaaaaagaacattagataaaacatttgcaagcccaggagttcggaggctggccagagaactagaaatagacctctctggtgttggtgccacaggcccaaaggggcgtataaccaaagatgacctacacgcttttataaaacaaaaaatgtcccaaggtggtgcaccaattgggtacaaacaaccagaaatagatttttcaaagtggggggatattgaaatcaaaccactcactaaaatacaaaaaataactggacaaagattacagcaatcctggcaaacaatcccacatgtcacacaatttgacgaagcagatatttcagtattaaataatataagggaggagaaaaaagcagaaggggtaaagaaaaacataaaagtaacctttctaccttttattatgaaggcggtagtaaaaagccttaaagagtttccggtttttaatagctcattagatcacacaggggaaaacttagttattaaggactatattaacctcggaattgctgttgatacaccaacgggtttagttgttcctgtgataaaaaacgctaataaaaaatcaattctcggtttatcaaaagaccttatggatattagtgaaagagctaggtctggcaagcttaaaccagatgaattgaagggtggaacttttacagtatctagtttaggtggtattgggggaacttattttacccctatcatcaatccgcctgaggtagcaataatggggatttcaaaaagtgtttggaggactgtctacaatcacaactcaaaagaaatcatacctacgttcacgatgcccttttccttatcatatgaccatagagttattgatggggcgattggagctgcatttacttcgtttttttcaaaagcgttatttgatagtaaaactttcgaataaa

SEQ ID NO: 233112 - DNA, 968 bp, Unknown
  Bacterial polypeptide expressing nucleotide sequence isolated from the Sargasso Sea
tgtggccgaagccaaaccggtacaggcgccggtagaaagcaagcccgctgcagtagtgaaagcgccgcaagcgcccgtggcccgtgaagccagcgaacgcccgttggcctcgcctgccgtgcgcaaacacgcgctggatgccgggattcaactgcgcctggtccagggcacagggcctgcgggccggattctgcatgaagacctggaggcctacttgcatcaagggccggccaccagcaccagtgccgccaacccttatgccgagcgcaatgacgaacaccagatcccggtgatcggcatgcgccgcaagatcgcccagcgcatgcaggacgccacccgccgcgccgcgcatttcagctacgtggaagagatcgacgtcaccgccctcgacgagttgcgcgtgcacctcaacgagaagcacggtgcgacacgcggcaagctgaccctgctgccgtttatcgtgcgggccatggtggtagccttgcgcgacttcccgcagatcaatgcgcgttacgacgacgaagcccaggtcatcactcgccttggtgccgtgcacgtgggcgtcgccacccagagcgacgtgggcctgatggtgccggtggtgcgccacgccgaagcccgcagcctgtggggcactgccgaagaaatcgcgcgtttggccaatgccgcacgcacaggcaaggccagccgtgaagagctgtccggttcgaccattaccctgaccagccttggcgccctgggcggcatcgtcagtacgccagtgttgaacctgccggaagtggccatcgtcggcgtcaaccgcatcgttgagcggccgatggtgatcaagggccagattgtggtgcgcaagatgatgaacctctccagctccttcgatcaccgcgtggtcgatggcatggacgcggcgcaattcatccaggccattcgcggcctgctcgaacaacccgccagcctgttcctggagtaag

SEQ ID NO: 233113 - DNA, 1177 bp, Unknown
  Bacterial polypeptide expressing nucleotide sequence isolated from the Sargasso Sea
tatgagccgcgacgtcgtgatcgtgggtgcggcgcgcacgccgatcggcaagtttcgcggcgcgctcgcgggcgtgcgtgccgatcatctgggtgcgcatgtgatcgatgaactggtcaaacgtgtggggctcgcgccggaagtcgtcaacgacgtaatcttcggctgcgtcacgcagattggcgagcagtcggccaatatcgcgcgcacgtcgttgctcggcgcgggttggccagaccgcatcccgggcctcacgatcgaccgaaaatgcggctccggggaggaagcggtgcacgtcgccgcgggtctgattgcattcggtgcggccgaggtggtggtggccggcggcgcggaaaacatgagccgcgtcccgatgggcagcaatcgcgatctgcatggtgaggcgttcggctggatggcgagcgagcggtacgagctgacgagccagggtgaagcagccgagcgtctgtgcgacaagtgggaactcgggcgcgaacagctcgatgcgttcgcggtggagagccatcggcgtgcggcggccgcggcagcggaaggctggtttgcgcgcgagatcgtccccgtgccggtgcagcgtctgcgcgagaagtcgcaggaaggcgaggcgccgcttttctccgcggatgaaacaatccgtcccggcacgcacgccgagaagctcgccacgctgaagacgagttttcgcagccaggggcgcctgacggccggcaattcgtcacagatatcggacggcgcggcggccctgctgctgatgtccgccggccaggcgaaggcgctcggcgtgaaggcgcgcgcacgggtgcgggcggtcgccaccgtcggcgccgatccgaccttgatgctcaccggtcccattgcggcgacgcgtgaggtgctggcgaaggctgggcttggcatcgacgatatcgatctgttcgaggtcaacgaggcctttgcgtccgtgccgctcgtgtggatgaaagaactcggcgtgccgcattcgaagctgaacgtgaacggcggggcgatcgcgctgggccatccgctgggcgcgagcggggcacgcatcatgacctcgatgctgcatgagctggaacggcgtggcgcgcgctatggcttgcaggcgatctgctgcgcgggcggcctcggcacggcgacgattatcgagcggctggactga

SEQ ID NO: 233114 - DNA, 187 bp, Unknown
  Bacterial polypeptide expressing nucleotide sequence isolated from the Sargasso Sea
gatgacgacccgcgcgtcaacccgaacggcggcgccatcgcactcggccacccgctcggcatgagcggtgcgcgcctggtgacgacggcgatgtatcagttgcaacgcacgggcggacgttatgcgctgtgcacgatgtgcatcggcgtgggccagggcattgcgctggtgatcgaacgcgtttgag

SEQ ID NO: 233115 - DNA, 938 bp, Unknown
  Bacterial polypeptide expressing nucleotide sequence isolated from the Sargasso Sea
catgacagatgtagtaatatgcggtttttcacgttcaccttttacaccagctcataagggaggtcttagcaaaattaggccagatgatttagcagctcaggtagttaaaggattaatagaaaagacgggaataaagaaagaagatgttgaagatttgattttaggatgtgctttccctgaaggagagcaaggaatgaatttagcacgtaatgtcgttttcttgtctggattgccaaacagtgtcggaggcgttactgtcaataggttttgcgcttcctcaatgcaggctatacatcaagctgcaggttcgataatatcaggatctggagatgttttcatagctgcaggtgttgaatctatgtcaagagtaccaatgggaggcttcaatcccatgatgaatccttctttggttgatcttgatgcttacattggtatgggtcatacagctgagaatttagcaaagaaatattctatccccagagaaaggcaggaagagatggcgttgtctagtcaccaaaaagctggagaagcaatttcaaacaattcatttgatgaagagattgtttctataggagatataagccaagatggttgcgtaagatcagatacaaatcttgaatccatggctaaattaaaaccagcttttgacaaaggaggtgtagtaactgcagccacttcttcaccgcttactgatggggcagcagcagtattagtatgttcagagaaatatgctaaagataataatctaaatattatggcatacattagaggaatggcaatttcaggttgcgatccagatataatgggcataggtccggttttgtcttcaatgaaggcactagatagggctggtctgaaacttagtgatatggattttattgagatgaatgaagcctttgcagctcagagccttgcttgtattgatgagttgggagtcg

SEQ ID NO: 233116 - DNA, 1135 bp, Unknown
  Bacterial polypeptide expressing nucleotide sequence isolated from the Sargasso Sea
atgaagaaaatttttattttaactggtgaaccatcaggagataaattagcctccgaggttataaagcaaataaaattaaaagaaagtaatatagaatatttatgtcttggtggtgaaaatcttaaatcgcttaatatagagagtatatctgatctcaaagatataacatatattgggattacgagtgtgttgcttaacatatttaaaataaaaaaaataataaatgaaactgttaaaaaaatagttgagtttaagccagatattttattttctgtagatagtccagatttctccctaagagttgcagaaaaggtaaaacaacaaaatccaaatattaaaacaattcactatgtatcacctcaaatttgggtgtggagaaaagatagaataaaaaaatataaaaattttatagatcatatgttacttctctttaaatttgaaaaaaaatattatgatgaggaaaatatgaatagtacttttgttggtcatccattattagagttgaagtcaaataaagtggatatatcgaatatattaccaaaagataaaaaaattatatctatatttcctgggagtagaatttcagaaattgatttattattaccaatattggtagattttatgaaattaatgaataaaaaatataataatttttactttgtaattcattcaacggagttaatgcgtaatataattttgaaaaaactttctaattttaaagatgacaattaccaaatagtaacgaacccaaatattaaagaagatataattaagcactctttttttgcagtgtcaaaatctggcaccatatctttagaaatttgtaaatatgaggtaccctcaataatcatttataagatgaacccaattaatttcttttttatcaaaagaatggttaaaacaaaatttgcaaatattataaatatcataaatcaaaaagaaattattcctgaattattacaaagtgaatgtaattcaaaagagatatttaactcagtcaattattttatccaaaagccagaaatgataaaaaaacaaaaaaagctagtaaaaaaaactgtaaaatcaatgcaaaatgatgaattgtcatctttaaatgctgccaatattgtacttaattatataaaaaattaaa

SEQ ID NO: 233117 - DNA, 460 bp, Unknown
  Bacterial polypeptide expressing nucleotide sequence isolated from the Sargasso Sea
ttgtcgaagctaaaattaaaaaacaatacatttgttcatagagattttcatgtttctaatttaatgaaactaaaaaaaaagattggaattttagatagtcaagatgcagtttatggaaataaagcctatgatttagcctctcttattgatgatgtgagattaaaaacttcattaaaactaaaaaattctatttataattattatgtttatttaaataaaaaaaaaataaacaaaaatcattttagaaatgattttgaaatactatccgtattaagaaatttaaaagtaattggtatttttacaagattagcagttagagatgataaaaaaagttatttaaaattaattccgtatgcctggaaattaatagaaaatagaattaataataatttaattttcgaagatttaaaaaattatttagatgctaatttttctaagaagattagaatgaaaaaatgaa

SEQ ID NO: 233118 - DNA, 1312 bp, Unknown
  Bacterial polypeptide expressing nucleotide sequence isolated from the Sargasso Sea
aatgagtgatagacaacaggtaactaatgcaaagggtgagcgtatcgctattgtggcgggcttaagaacgccatttgcgaaacaggcgaccgcattccacggagtatcggcgctcgatatgggtaaaatggtggttaacgaactgcttgttcgtagcgaactggatcctaaattgattgagcaactcgtgtatggtcaggtggtacaaatgcctgcggcaccgaatattgcccgtgaaatcgtattaggaacgggtatggatgtgtctaccgatgcctatagcgtgacccgtgcctgtgcgaccagtttccaatccgcggtgaatgtggccgagtcaatcatgaacggcaatatcgacatcggcattgctggcggcgccgattcctcttctgtattacctattggtgtgtctaaaaaacttgctcatgctttagtcgatctgaacaaagcccgtacatttggccaaaaattacagatttttcgccgtttaggcattaaagatttattgcctgtgccacctgccgttgccgagtattcaacgggtttgtccatgggacaaaccgccgagcaaatggccaagacttacaacatcagccgcgccgaccaagacgcgctggcgcaccgctcccacacgctggcgagtgaaacttgggcttcaggccatctgcgtgaagaagtgatggtggcccatgttcccccttacaaacagtttattgagcgcgataataatattcgtgaaaactccgatttaagctcttacgccaaactgcgtcccgctttcgataaaaagcatggcagtgtgactgcagcgaacagtacgccgctgaccgatggcgcctcggcgatcattttgatgagtgaagggcgtgctaaagccttaggttatcaaccaattggttatattaagagctacgcatttaccgccattgatgtatggcaagacatgctaatgggcccatcttatgcgacgccattggcattaaagcgcgccggcatggaattagaggatttaaccctcatcgaaatgcacgaagcttttgcagcgcaaaccctagcgaatatgcagatgtttgcctccaaaaaatttgccgaagaaaaacttggccgcaaccgcgccattggcgacatcgatatgagcaaatttaacgtgctcggtggttccttagcctatggccatccatttgcggctacaggtacgcgtttaatcactcaggtttgtcgtgaacttaaacgtcgtggcggcggaacgggtctggcaacggcctgtgctgcgggtggtcttggtgctgcaatgattgtggaagtggagtaa

SEQ ID NO: 233119 - DNA, 833 bp, Unknown
  Bacterial polypeptide expressing nucleotide sequence isolated from the Sargasso Sea
gatgcaacgagacgtagtggtggtaagcggtgtgcgtacggcaatcggcggttttggcggcagcctgaaggattttccgccgacggatcttgccgcacgcgtcgtgcgcgaagccttggcacgcgcgaatgtgtcgggtgacgaagtgggccacgtggtgttcggcaacgtcgtgcataccgagccgaaagacatgtatctggcccgcgtggcggcgatcaacggcggcgttgcgcaacatgctccggcgttgacggtcaaccgcctgtgcggttcgggcctgcaggccatcgtctcggccgcgcaaagcgtgctgctcggcgatgccgacattgcgatcggcggcggggcggaaaacatgagccgcgcgccgtactcgatgccggctgcgcgtttcggtcagcgcatgggcgatgcgcgcctcgtcgacatgatggtcggcgcgctgaacgatccgttccagtcgatccatatgggtgtgaccgccgagaacgtcgcgcgcaagtacgaaatctcgcgtgaagcgcaggacgcgcttgcgctcgaatcgcatcgccgtgcggcccatgcgattacgagcggctatttcaaggatcagatcctgccgatcacgattccttcgaagaagggcgacgtcgtgttcgatacggacgaacacgcgcgtatgaacgcgacggcggaagacttctccaagttgaagccggtgttcgtgaaggaaaacggcacggtcacggcgggcaacgcgtcgggcatcaacgacgccgccgccgcggtcgtgctgatggagcgcagcgtcgctgaaaagcgcggcatcaagccgttggcgcggctgg

SEQ ID NO: 233120 - DNA, 163 bp, Unknown
  Bacterial polypeptide expressing nucleotide sequence isolated from the Sargasso Sea
tgataaaattaaaaaggttaacggtcaatttattgtgagaaagatgctcccaatatctttatcttatgatcatagagtcattgatggtgcagaaggtgccagattttgtgtgcacttatctaaaagtctaggtaaagattttgcattcaagcttgcagtttaa

SEQ ID NO: 233121 - DNA, 633 bp, Unknown
  Bacterial polypeptide expressing nucleotide sequence isolated from the Sargasso Sea
caatttcaagtcacgagaaagcatcaaatgcagacagtaaaggcaattttaaagatgaaatcacatctataaataatgatactattgatgtgactaaagatggaggcataagacctggaactacacaagaaattcttgacggattaaaattagcatttgatcaaaatggtacagttacagctggaacttcatctccattaacagatggtgcagccgcaactttgatttgtgaagaaaattatgcaaaagaaaatggtcttgatatattagccagaattaagtcatgtgctgttaatgggtgtgatcccgaagtaatgggattaggaccaattggagcatcccgaaaagctatggatagagctggtataaactcagctgatttgggagttgttgaattaaatgaagcttttgcttcgcaaagtttagcttgtgttcaagatttggaattagataaaaaaattgttaatttagatggtggtgcaattgcattaggccatccccttggagcaactggtgctagaattactggtaaagctgctcagctacttaaacgtgaaggcaaaaaatatgctcttgctacacaatgtataggtttagggcaaggtatagctacagtacttgaagcagtttaat

SEQ ID NO: 233122 - DNA, 532 bp, Unknown
  Bacterial polypeptide expressing nucleotide sequence isolated from the Sargasso Sea
cttggatgttataaataattattcagaatatgaattagcagatatattttataagtttggagaagaaaaattttccagaaaaattgctaaaaaaataattaatgcaagaaaaataaaagatattgaaaatactaaagaattatcattattaattaaacaaagttataaaaataaatctaaaattgatccagcaacgagaacatttcaggctcttagaatatatgtcaatgacgagttaaatgaattatcaaaagctttagaaaaaagtttaaatctcctgaaggttaaaggaaaaattataatagtttctttccatagtttagaagataggcttgtgaaagattttttcaaccacaatagtggtaaacgatggcgttcctcccgccactatccggagctagctgacgatggtccaatcaccttaaaactaatcaccaaaaaaccaattagaccatcagatttggaaacaaacataaatccaagatctcgttcagctaggcttcgggtagctgaaaaaatttcaattaattaa

SEQ ID NO: 233123 - DNA, 688 bp, Unknown
  Bacterial polypeptide expressing nucleotide sequence isolated from the Sargasso Sea
gaataagaatttatttgtagcactaatcccggcaagaggcggatctaaaggcttaaagaaaaaaaatctttatcctgttaataataaacctctaatttcatggacaattgaatctgctatttcatctcattatttagaacagattttcgtgagttcagatgataactctattttagaaattgcatcaaaagaaggcgttaattgtattgaaagacctgctaatctagctgaggatacatcatcaatggaatcagttattatgcactcaattgagcaaattgataagcaaggtattgggttcaaatatcttattttacttcaaccaacatcaccattacgtgatagtaaagatattgacttagcttgtaaaaaatttattcaacttaaagctaattctctcatttctgttaccaatgtggagagctcagtactaaaaacattagttaaagacgataacggttttttaagaccagcttttgataataaatttccaagcatgaacaggcaacagcttccgttagcttataagcctaacggagctatatatataattaataaaaaactatttttaaataatccaactttatttcaaaaagacacagcaatgtatgagatgaaagagaataaaagtattgatgttgactcgattaatgacattcataccattgaaaaactaaatttaatatag

SEQ ID NO: 233124 - DNA, 1312 bp, Unknown
  Bacterial polypeptide expressing nucleotide sequence isolated from the Sargasso Sea
aatgagtgatagacaacaggtaactaacgcaaagggtgagcgtatcgccattgtggcgggcttaagaacgccatttgcgaagcaggcgaccgcattccacggtgtgtcggcgctcgatatgggcaaaatggtggttaacgagctgctggcccgtagcgaactggatcctaaattgattgagcaattggtgtatggccaggtggtacaaatgcctgcggcaccgaacattgcccgtgaaatcgtgttagggaccggcatggatgtgtcaaccgatgcatatagcgtgacccgcgcctgtgcgaccagttttcaatctgcggtgaatgtggccgagtcaatcatgacgggcaatatcgagattggtattgccggcggtgccgactcttcctctgtattgcctattggtgtgtctaaaaagcttgcccatgccttagtcgatttgaataaagcccgcagctttggccaaaagttacaaattttccgccgtttaggcatcaaagacttattgcctgtgccgcctgccgttgctgagtattctacgggattgtccatgggacaaaccgcggagcaaatggccaaaacgtataatatcagccgcgccgaccaagatgcattggcgcaccgctcccacacgttggcgagtgaaacgtgggcttcaggtcacctacgtgacgaagtgatggtggcccatgttccaccttataaacagtttatcgagcgcgataataacattcgtgaaaactccgatttaagctcttacgctaaactgcgccctgctttcgataaaaagcatggcagcgtgacagccgctaacagtacgccgctgaccgatggtgcctcggcgatcattttgatgagtgaaggtcgcgctaaagccttaggttatcaacctattggttacattaagagctacgcatttaccgcgattgatgtgtggcaagacatgttgatggggccatcctatgcaacgccattggcattaaaacgcgccggcatggaattagaagatttaactcttatcgaaatgcacgaagcctttgcggcacaaaccttagccaacatgcagatgtttgcctcaaagaaatttgccgaagaaaaactagggcgtaatcgtgccattggtgaaatcgatatgagcaaatttaacgtgctcggtggctctttagcttacggccatccatttgcggctacaggtacgcgtttaatcactcaggtttgccgtgagcttaaacgtcgtggtggcggaacgggactagcaacggcttgtgctgcgggtggtttaggggctgcaatgattgtggaagtggagtaa

SEQ ID NO: 233125 - DNA, 751 bp, Unknown
  Bacterial polypeptide expressing nucleotide sequence isolated from the Sargasso Sea
tgatcctaccccagagttagataaaaataatccaaatgtttatatgtctatgggtgtaactgctgagaacgttgccaaaaaatttaatatttcaagaaaagaacagcaagaatttgctattttaagtcatgagaaagcttatcaagcacaaaaagataagaattttgataatgaaataaccccaataaacataaacaataatgaaattaaattagacggagctattagacctaatactacccaagaaattttagatggattgaaattagtttttgatgaaaatggaacagtaactgcaggtacctcatccccgttaactgatggagcttctgctactttggtttgtgaggaagattatgcaaaagcaaataatcttgatattttagcaaaaattaaatctatggctgtgcaaggctgccctcctgaattaatgggtcttggaccaataaatgcatcaaaaaaagcacttagaagagccaatttaaatatagatgatattgacatagttgaattaaatgaagcttttgcttcacaatcaatagcttgcattaaagatttagacatcaatccctctaaaattaatctcaatggaggtgctattgctcttggtcatcccttaggtgctacaggaagtcgaattacagctaaggctgccagcttattattagataaaaataaaaaatatgcacttgctactcaatgcattggcttagggcagggtatagctactattttagaaaatcctaattaa

SEQ ID NO: 233126 - DNA, 962 bp, Unknown
  Bacterial polypeptide expressing nucleotide sequence isolated from the Sargasso Sea
aatgaacgtttatttatgtaaccctaaccgctctgccattggccggtatgcaggtgggctagccagcattcgccctgatgatttgctcgcgcaagttattcgtgcagtactaacacagtgccctcagttaccagcagaaagtattgatgatgcgtttttcggctgtgcgaaccaagctggtgaagacaatcgcaacgttgctagaatggccactttgcttgcaggcgtgccattttcggtaccagccaccacaattaatcgtttgtgtggctctggtatggatgccattggccttgcttaccgttcaattgcagcaggtgaagcagaccttattcttgctggcggcgttgagtctatgtcgcgagctccatttgtgatgggcaaagcacaaagcagatttgaccgctcacaaatacttgaagataccaccatgggttggcgcttcattaaccctgcgttaaagcagcagtacggcactgaaaccatgcctgagactgcagaaaatgtagcagcgaaattctcgattagccgagaagcacaagacaactttgcgtatcagtctcagcaaaaagcggctgcagcccaagcgtctggccgttttgctaaagaaataacacctgtgacctttcagccaagaaaaggcgatgccatcgtcatcgacaaagacgaacacatacgccctcaaactacattggaggcattggcaaaactaaaagcaccatttcgtgaaaacggctcggttaccgcaggtaatgcatcgggtattaacgatggcgcatctgccatgcttgtagcaagtgaagctgccgttgaacgctataacttaacgcctgttgctcaaattaaaggaatgactaccgctggcgttgaacccactattatgggtataggcccagtaccagcggttaataaattgcttgcaaaacaaaagttgagcctagacgatattggcacaattgaac

SEQ ID NO: 233127 - DNA, 253 bp, Unknown
  Bacterial polypeptide expressing nucleotide sequence isolated from the Sargasso Sea
gatcgacgtggttgaactgaacgaagcgtttgcctcagtggcgctcgcatggctcgccgaactgggttatccgcatgagaagaccaatccgaacggcggcgcgattgcgttaggtcatccgctcggcgccaccggcgcgcgcctgatgaccactctcctgcacgagcttgaacgcacgcaaggccgctacggtttgcaggcaatgtgcgaaggcggcgggctggccaacgtcacgatcatcgagcgcctctaa

SEQ ID NO: 233128 - DNA, 304 bp, Unknown
  Bacterial polypeptide expressing nucleotide sequence isolated from the Sargasso Sea
aatgcatctaaaaaagctcttaaaaagagctaatttatcaattactgatattgatattgtggaactaaatgaggcatttgcttctcaatctttagcatgtattaaagaattaaatatggacataagtaaagtaaatatacatggtggagcaatagcattaggccatcctttaggtgctactggagcaaggattacaggtaaagttgcaactttattgcaaaataataataaaaaatatggattagcgacacaatgtataggtttaggtcaaggtattgcaactgtgttagaaaatattaattaa

SEQ ID NO: 233129 - DNA, 1068 bp, Unknown
  Bacterial polypeptide expressing nucleotide sequence isolated from the Sargasso Sea
ttaatttaaataaaaatactaatttaaaaaacttaaaaattctccatgttacaaattttaatgaaagacacaacggaagactattttataactctgggcgaaggattaataatggatttataaggttagatcatagcgttcttgaattaagcgatagagacatagttagttattctagaaaatttaatgattttaaaggagccaacaaattaaataacaaattattggaaataataagtaattatcttccagatataatagtttttggtcatgccgatttaattgaaaatgaaactattgaatttattaaaaaaaattaccccgatataaaattgtgtcaatggtttcttgatagaatggacggagaatggttaaaaaataaaaatagattcattaaaaaaatcgatttaatgcatgctaatttttgcactactgaaccaaaatcattaaaattttcaaaatataaaaatgtgttttatatgccaaattgtgttgatcaatcacttgaaaaacttgaaatttataacaataattattttaaaagtgatgttttttttgcaatgagccatggcgttcatagaggtgttttaaaaaaaggaaagacagatgcaagagagcatttaattaaaaatttaattaatataactcctaatattaaatttgattgttatggacttgatggaaatcaaccaatttggtcagacgattttcttaaaataatgtcacaaaacaagataggattaaatttaagccaaggtaaatcatcaaattattatagtagtgataggttctcgcaacttattggtaatggtttgcttgtaatgatagatgaaaaaacaaagataggtgatttttttgaaaaagatgagattgttacatataataatatttcagatctttcagaaaaaattattaaatattctgaagataattacgcacgaaaaaaaatagcaaaaaagggaagagtaaaatattttaaatatttcaactcaaaaatagttgctgatttcataattaataaaacctttggtataaataaaaaatatttttgggaaaaatttttataaa

SEQ ID NO: 233130 - DNA, 733 bp, Unknown
  Bacterial polypeptide expressing nucleotide sequence isolated from the Sargasso Sea
ccttattcagataaagaaaaacaaaatccaaatttatatttatcaatgggaattactgcagaaaatgttgcaaaaaaatataatatttcaagaactgagcagcaagaatttgctttggaaagtcacagaaaagcaaacgaagcacaacaaaaagagaaatttgttggtgagattactaaaatagataattgtgaaaaagatgagaatattagacctaatagcacaatggaaaaattagatagtttaaaattagcgtttgatcaaaatggaactgtaactgctgcaacttcatctcctttgactgatggggctgctgcaacactcatatgtgaagaaaattttgctaaagaaaatggattagaaatttttggaagaataaaatctattgctgttgaaggttgcgatccaaaatttatgggattgggtccaatttctgcttccaaaaaagctttgaatagagcaaaacttagaattgaggatatagatattattgagttaaatgaggcttttgcttctcagtcacttgcttgcattaaagatttaaaaattaatactaaaaaagtaaatttagatggtggagctattgctttgggacatcctttgggagcaactggtgcaagaattactggtaaagctgcacaattattaaaaagagagaataaaaaatatgctctatctactcaatgtattggtttagggatgggaattgcaactataattgagtctatttaag

SEQ ID NO: 233131 - DNA, 1101 bp, Unknown
  Bacterial polypeptide expressing nucleotide sequence isolated from the Sargasso Sea
ttaaatctatagaaagtagaaataacttagatacggcagatgtagatgatgttgtcttaggatgtgtacaccctataggagagcaaggagcagatattgcaagaactgccgtacttgaagctaaatgggatcaaactgtaagtggagttcaagtagatcgtttttgtgcatcaggtttagaagcagtaaatattgctgctgctcaagtaatgtcaggacaatccgatttatcggttggtggaggtgttgaatctatgtcacgagttcctttaggtagctcaggaggagcatggatggctgaccctactgtagcttataattcttatttcgttccacaaggtatctctgcagatttattagcaacaaaatataattattccagaaatgatgtagatagttatgcggtaagctctcaacaaagagcctcagaagcatggaagaataataaatttaaaaattcaattattcctgtgaaagatcaaaataacttaccaattctagaagtagacgaatatatgagacctgatacaacaatgcaatctttaggagcattagaaccctcatttgaaaaaatgggtaatcacggtttcgatgatgtagcaattttaaaatatcctgaattagaatctataaagcacgttcatcatgctggtaattcttcagggatagtagatggagccgctggagttttactaggtaataaaaaaatggcagataaatatgaattaaaagctagagctaaaattcgatcctttgcatctattggttctgaacccacaataatgctaacgggacctgctgactctgcggaaaaagcattaaagaaggcaaatatgaatgcttcagatattgatttatttgaaatgaatgaagcctttgctgctgtagtactgcgtttcatggaagcattaaatattgaccattctaaagtcaatgtaaatggaggggccatagctttaggccatcctttaggagctacaggtgcaataatattaggaacagtattagatgaattagaaagaagagatctatctacaggactaattactttgtgcgttggagctggaatgggtacagcaactataattgaaagaatttaat

SEQ ID NO: 233132 - DNA, 1129 bp, Unknown
  Bacterial polypeptide expressing nucleotide sequence isolated from the Sargasso Sea
aatgatagagtcagttataattggagcaaaaaggtctccaattggtataaagaatggtaagatggttggcattcgaccagatgatttagcatctcaagtagttcgtggtcttatggaaaagattaagatagaaccaagccatgttaatgacttggtccttggatgtgcattccctgaagggtctcagggcatgctaatggcaaaaggtgttgccattcttgctggacttccagagacagtaggcggctctgttgtgaaccgtttttgtggctcatccatggatgccgtacatcaaatcagttcaagaattgaaacgggtgacattgaaatgggaatcgctgtaggagttgaagatatgttctctgttccaatgggcggatttaatccagatttccatcctgaacttgctgagcaggaatattatatcggaatgggagagacagcagaaattcttgcgcgtgagggatccattcccagggatgagcaggaagaatttgcaatcaaatcgcatgaaaaagcattggacgcttggaaaaatggtcgatttgatgatgaggttattccaactgatatgtacgacgaggacataattcataaggatgagggccctagagtgcccgaccttgaaaaaatcaaaagcctcagccctgcattcttggaaaatggtaccataactgctgcaacatccagtcctgtttccattggtgcttccgcaataatgattaccagtagaacctatgcagaaaaaaattctattcaaataaaagcagcaataaagggacgttccatagttggagtggattggagaagaatgggaatgggacccctccctgctaccgaaaatgttctgaagagtctaaatatgacaataaatgacattgatgtgattgagctaaatgaggccttctcagcccaggcactttacgtaataaaagaaggaggatgggatgctagaaaagtaaatctaaatggaggggcaatagcgcttgggcatcctctgggttgctctggagcaagaattatcaccacacttttgagtgtaatggaacaaaaaaattcaaggaccggattagcgaccatgtgtataggtacgggacagggaatcgctactatcctggaaagggactag

SEQ ID NO: 233133 - DNA, 784 bp, Unknown
  Bacterial polypeptide expressing nucleotide sequence isolated from the Sargasso Sea
gctgaaccacgggtcaataatcgatggggttaggctgacaaaggcatcaagggcggtttatccgcacaacgatatggaagctctggagagggtcctcaggcagaacaaggactcggaaaggaagttgatcatcacagatggggtattcagtatggatggcgatatcgcccctcttgacgagattgccgatctcgcagaggaatacggtgccatgacattcgtcgatgactgtcacggggagggggttctcggagaaggtagggggatagtatcccacttcggtctccaaggccgggtcaccttcgaggtagggtctttctccaaggcactcggagtgcaagggggtatccttgctggaagcgatgatgtcaggacacacgcactgaatcacagcaggtcatggctactctcgggaagccagccaccgggcgtcgcagccgctcagaaggcggctatcgaggtccttatgtccgagcctgagcatgtcaggaggctttgggataacaccacatacttccgagacgaactcaaatcaatgggtttcgataccggggtcagcgagactcccattgtgcccgttatgtgcggcgagagcaggaaggcccaggaactctcgtccctgatgagggatgagggagtgatggtgggggccatagtcttcccaatggttgcacgcgatatggccagagtcaggactcagatgtcagcagggctgagccgcgatgagttggactcagttctcgaatcatttgacaggtgtgggagaaagatcggtcttatctga

SEQ ID NO: 233134 - DNA, 1129 bp, Unknown
  Bacterial polypeptide expressing nucleotide sequence isolated from the Sargasso Sea
aatgtataattcagtaatagttggatattccaggtccccttttgcaatggcaaataaagggaaattaatagatgtaaaaccagttaatctgttagctgaagtaattaaaaaccttgtttcacaatcaaaaattaatccaaaagaaattgatgatgttgttataggatgtgcttttcaggttggtgagcagtgttttaatattggaagattagtaacttttttatcagacttagatatgagagttccaggtatgtccgtagatagatggtgtggatcttctatggaagcaattcatattgctgctgggaaaatagcaatgggatcaggtaagatatttatttgtggaggggtagaaagtatgacaagagtaagaactgggtttgaccctttaccttatccttattcagatgaaggaaaacaaaatccacatttatatttatcaatgggaattactgcggagaatgttgcaaaaaaatataatatttcaagaacagagcaacaaaagttctctttagaaagtcatagaaaagcaaatgaagcacaacaaaaagaaaaatttataagtgagattactaagataggtgattgtgaaacagatgaaaatattagaccaaatagtacaatggaaaaattagataatttaaagttagcatttgatcagaatggaactgtaacagccgcaactgcctctcccctaactgatggcgccgctgtaactttaatatgtgaagaaaattttgctaaagagaatggtttggaaatttttggaagaataaaatctacagctgttgagggatgtgatccaaattatatgggattaggtccaatttcagctaccaaaaaagctttggaaagagctaaactttcaatgaaagatattgatattgtggagctaaatgaagccttcgcatctcaatcacttgcttgtatcaaggatttagagatagacattaaaaaagtaaatctagacggtggtgcaattgctttgggacatcctttaggtgcaacaggtgcgaggataacaggaaaagctgcacaacttttaaaaagagaaaataaaaaatacgctcttgctactcaatgtattggtttgggaatgggaattgcaacaataattgaagcagtttaa

SEQ ID NO: 233135 - DNA, 508 bp, Unknown
  Bacterial polypeptide expressing nucleotide sequence isolated from the Sargasso Sea
aatggaaaaattaaatagtttaaatttagtattcgatcagaatggaactgtaacagctgcaacttcatctcctctaactgatggagctgctgcaactctaatttgtgaagaaaattttgctaaagaaaatggtttagaaattcttggaagaataaaatctactgctgttgaaggatgtgatccaaattttatgggattaggtccaattgtggctagcaaaaaagctttagaaagagctaaactttcaataaaagatattgatattgtggagctaaatgaagcttttgcttctcaatcgttagcttgtatcaaagatttagatatagatattaataaagtaaatttagacggtggagcaattgcattaggacaccctttaggagcaacaggtgcaaggataacaggaaaagctgcacaacttttaaaaagagaaaataaaaaatacgctcttgctactcaatgtattggtttgggaatgggtatagcaactgtaatagaggcagtttaa

SEQ ID NO: 233136 - DNA, 613 bp, Unknown
  Bacterial polypeptide expressing nucleotide sequence isolated from the Sargasso Sea
aatgcttcccctagattattttcttttcttacaaattatactttttttatttattaccccaggtactccgagaatagtgattatatctttatctattagttttggtgtccgtaattgtgtttgggtagcactaggcgatgtgactgcaaacattttacaagcgagtttaataatatttttacttcattctttttttattgataatcctaacctattaaactttattaaatggattggggttgcctatctattttatctagcgactgatgtttatttttcaaaagttaaaaatttaaaaaacgtaaattctgagaagtctagattatctttatttaaagatggtttcttagttgcaggtacaagtccaaaagcttgggctttttttccattaatatttccacaatttattaattttgagacaaattatgttgtccagtttttaattttaataataacttacgttgttttagattttttatctttgatttgttatgctttccttgcaaataaattaattgattggttaaaagcgaatccaaagactattaacacaatttccgcgtgtgtacttttttcaattggagtatttatagcgttaacacaacaatattaa

SEQ ID NO: 233137 - DNA, 2029 bp, Unknown
  Bacterial polypeptide expressing nucleotide sequence isolated from the Sargasso Sea
atggctgaattaaaagaagtttttgttcctgatatcggcggcgatgaagtacaagttatcgaaatctgtgcttctgtgggcgataccttagcagcggaagagtcgattctgaccgttgaaagcgacaaggcgaccatggacattcctgcgcctttcgcgggtgtgttagccgaattgaaagtggccgtcggtgacaaagtcagcgaaggtaccttaattgcgatgatgcaagcagcgggcgcatccgctcaagctgctgcgccagttgctcaagctgctgctcctgcgccagctccagcagcacctgctccagtacaagcggctccagcccctgtggctgccgcgacagcgacgggcgcaacccaagtggttgaagtcactgtgccggatatcggtggtgacaccgatgtgtcagttatcgaagtcttagtcgccgctggcgataagattgaggttgacgctggccttatcacgcttgaaaccgacaaagcgaccatggacgtaccatcgccattcgcgggtgtggtaaaagaagtgaaagtggctgtgggtgacaaggtttcccaaggctcattagtgatcatgctcgaagtgggcggcgcggctcctgctgcagcgccacaagcgagcgcgccagcagcatcagctcctgtcgctcaagcggctcctgctgcgccaattgctccagttgcagctgcagcaccagtggttgctgttaaagaaatccaagtgccagatattggtgatgccagcaatgtcgatgtgattgaagtgctagtgtctgtgggtgatatgatcaccgccgaccaaggtttgatcacgttagaaaccgataaagcgaccatggaagtgcctgcgccattcgccggtaaactgctgtcgttaaccgttaaagtgggtgataaggtttcgcaaggtagcgtgattgcgacgattgagactgtgactgctggtacagctcctgtgccagtagctcaagccgcagcgccagtttctgcacctgtcgcccaagaagcggcaccagcacctgttgcagccgcgccgagccgtccaccggttccacatcacccaagtgcaggtgcgcctgtgtctactggtgcggttcatgcgtctcctgcggttcgccgtttggcccgtgaatttggtgtggatcttactcaagtgacgggttctggccgtaaaggtcgcatcatgaaggaagacgttcaggcgtatgtgaaatacgaactgtctcgtcctaaggcgacagcggcaacttccgttgcagcgggtaacggtggtggtctgcaagtgattgccgcaccgaaagtggatttcagcaagtttggtgaagtggaagagattccattaagccgtatccagaaaatctctggtccaaacctgcaccgcaactgggtaactattcctcacgtgactcagttcgatgaagctgatatcactgaaatggaagagttccgtaagcagcagaacgacgcggcggcgaagaagaaagccgattataagatcactccgctggtctttatgatgaaagctgtggcgaaaacgctgcaacagttcccagtgttcaactcaagcttaagcagcgacggtgaatcactgatccagaagaagtactaccacatcggtgtggcggttgatacgccaaacggtttggttgtgccagtggtgcgtgacgtggataagaaaggcattatcgagttatctcgtgagctggccgatatttctatccgtgctcgcgatggtaagctcaaatctgctgatatgcagggtagctgcttcactatttcaagcctaggtggcattggtggtactgcatttaccccaatcgttaactacccagacgtggcgattttaggtgtgtctaaatctgaaattaagcctaagtggaatggtaaagagttcgagcctaaattgatgttgccactgtcgctatcctatgatcaccgcgtgatcgatggtgctatggctgcacgctttagcgtgaccctgtcaggaattctgtccgatattcgtactttgattctgtaaa

SEQ ID NO: 233138 - DNA, 1012 bp, Unknown
  Bacterial polypeptide expressing nucleotide sequence isolated from the Sargasso Sea
aatgagaaatgcagttattgtgggttacaaaagatcacccttcacttttgctcgtaaaggtgaaatggctaatataagaccagaagacattctttcacaaacaataaatcaattacttaatgaaatacaaattaataaaaatgacatagaggacattattactggttgtgcttatcctgaaggagcacaaggtaataatattgctaaaattgtttcattcatgacagatatgccagaacatgtagcaggtatgacagttaacagatggtgtggttcttcaatgcaagctattcatgatgcaactggcgcgattgcaattaactctggagacgtttttttatgttgcggtgtagaaagtatgacatttatacctatgaatggtttaacatacgatcctcatcctcaattaaataaagataatccaaatgtatatatgtctatgggtattacagctgaaaatgttgcaaaaaaatttaatatttctcgaaaagaacaacaagattttgctattagcagccattctaaagctaatttagctagagaatcaaatttgttcgacaatgaaatagtttctataacaaataatgatgagaaaattaataaagatggtggaattcgacctaacacctctcatgaaattttagatgggttaaaacttgcttttgatgagaatggaacagttacagctggtacagcctcaccattaacagatggtgcatcagcagtaattgtctgtgaggaagaatatgcaaaaaaaaataatttaaatattttagctcgtatcaaatctacagctgtagtcggttgtcctccagaattaatgggccttggtccaattaatgcatctaaaaaagctcttaaaagagctaatttatctattaccgatattgatattgtggaactaaatgaggcatttgcttctcaatctttagcatgtattaaagagttaaatatggacactagtaaagtaaatatacatggtggagcaatagcattaggtcaccctttagga

SEQ ID NO: 233139 - DNA, 580 bp, Unknown
  Bacterial polypeptide expressing nucleotide sequence isolated from the Sargasso Sea
gatgcgggtggaaagaaaaaaacaagaagcgaaaccatagatacagatgagggacctagaaaagaaacttctattgacgcgctatcaaaattaagaccagcatttagacttaacggccaagtaacagcaggaaattcgtcacagacttccgacggatccgcttttgtagtggttacgtcagaaaaaatggttaaagaattgaacgtgaaaccgatagcaagaatggccgcatactctacagcaggcgtcgaacctagaataatgggaataggaccagccaaagctgtaccaaaagcccttttgcaagccggcttaaaattacaacaaatagaccaggttgaattaaacgaggcttttgctgctcaagccctttctgtaatgaaggcaatggatttggacaaagaaatagttaatgtaaatggtggcgttgttgctttagggcaccccttaggtatgaccggagctatgctttctattaaacttataaatgaaatgaagaggagaaaacaaaaatacggtatagttacagcttgtgtgggtgggggacagggcgtttgtggtgtttttgaaaacctataaa

SEQ ID NO: 233140 - DNA, 982 bp, Unknown
  Bacterial polypeptide expressing nucleotide sequence isolated from the Sargasso Sea
aagtttaaataatacagataatcatttagatgtatctgataatttaaaaactaattcaaatgagaaagaaaatataatagatagtagtaatttgaataatgataattcttctatcgagcaaacagaaattagtagaaaagcaataagtccattagcaaaaagaattgcaatacaaaataatatagatataaatttaattattggcactggccctagaggaagaattgttaaagatgatgtaagaaattatttaaataaaaacaacaatttaaataaaaaacattatattaaaaataaagaagatattataaaaaaaccttctttaatgagaaaagtaattgctgaaagattatcttattctaaaaaagaagttcctcatttttatttaactgttgattgtaatgttgatgaattattaaaaggaaggcatttaataaataatgatgtagaagtaaaagacaagatttctataaacgacatagttattaaggcattaggtatggctctttatactgttcctgaagctaattgctcttggaaagaagatgaaattacctattatggttcggttgatattagcgtcgctgtagctgtcgatgatggtttgtttactccggttttaaagaatgttgactttttaaaattaagtgagatatctgcaaaaatgaaagattttgtagttagagcaaattcaggtaagctcttacctaatgaatatgagggaggtaatttttctataagtaatttaggcatgtatgaaataaataatttttccgcaataattaaccctccacaatctggtatattagcagttggaagtataacaaaaaaacctattattattaatgatgaaataaaaattgctaatataatgacatgtcaattatctggtgatcatagagttattgatggagctgtaggagctaaattattaaaggaatttaaaagtataatagaaaacccaataaaaatgatagtttag

SEQ ID NO: 233141 - DNA, 163 bp, Unknown
  Bacterial polypeptide expressing nucleotide sequence isolated from the Sargasso Sea
aagtggcgatattggggagtttcacgaactaaagagaaaaatgagaaactaatactacccctttctctttcgtatgaccatcgagtaattgatggggcggccggagcagcgtttgttgttgccttttcaaatgttttaaaagacataagaaaattcaaatagt

SEQ ID NO: 233142 - DNA, 169 bp, Unknown
  Bacterial polypeptide expressing nucleotide sequence isolated from the Sargasso Sea
aacatttgaaaaaattagaaaagttgatggtcagttcattgcaagaaaaatgctcccagtatcattgtcttatgatcatagggtaatagatggagcagagggagctagattttgtgttcatttagccgaaagcttaggaaaagattttgctttcaaattggcagtttaa

SEQ ID NO: 233143 - DNA, 862 bp, Unknown
  Bacterial polypeptide expressing nucleotide sequence isolated from the Sargasso Sea
gacgccaacgggcggtttattcgaaaccattttaggtgctgaagacgcggtcatttcagattcgttaaaccatgcatcgatcattgatggcgtgcgtttatgtaaagctaaacgttaccgttatgccaataacgatatggccgaattagaagctcagctgaagcaagcagatgccgatggcgcccgttttaaactgatcgccacagacggcgtattttctatggatggtgtgattgctgacttaaaatccatctgtgacttagccgacaaatacaatgcgctggtgatggtggacgacagccatgctgtgggttttgttggtaaaaatggccgcggcacccacgaatactgcgatgtgctggaacgtgttgatattatcactggtactttaggcaaagctttaggtggcgcttctggtggttatacctcaggcaaaaaagaaatcatcgagtggttacgccagcgttcacggccttatttattctctaactctttagcaccttctattgtaacggcctctatcaaagtgctggacttattggcgaacggtgatgcactgcgcgctaagttatgggacaacgtcagttatttccgcgaaaaaatgtcagccgctggttttacgctggcaggcaaagatcacgctattattcctgtgatgttaggtgatgccaaagttgcagctgaaatggcgcgccgtatgctcgctgaaggcatttatgtagtgggattctctttccctgtagtgcccaaagatcaggcgaggatccgcactcagatctcggccgcgcatgacaaagaacacctggataaggccatcacagcctttattcgtattggtaaagaaatgggcgtaattgcctga

SEQ ID NO: 233144 - DNA, 851 bp, Unknown
  Bacterial polypeptide expressing nucleotide sequence isolated from the Sargasso Sea
taacaatggatcgagcactccagacgttcctgtcattatagacggtgtaagaaccccctttttaagaagtaatggtgctttttccaactttatggcctatgaccttggacgcttggccatttcaggacttatgggaaagacaggcctaagccctaaagaagttgaccaggtgatttatggaattgttgttcccgatccttcaactcccaatattgcaagggagtgtatgctaggagctggactcagtgactcaacacccgcccataccatttcaatggcatgcattacatcaaatatggccgcaacgacagctgcggaccaaatcagacttggcaaatgcaaaacggccgtcataggtggagttgaccacatgtctgatccgccaatcagagtttccagaaacctccgccaggcccttattagacttcaaaaagcgaagtcacctgttcaagtctttaatcaaattagaaaattatcgcttaaagaccttatgcctcaagtcccgtctataacagaattttctaacggacttacaatgggacaaggttgtgaaagaatggccatggcgatgggggccactcgagaagaaagtgatgagttcgcagcaagaagtcaccagctcgcctcgaaggcccaacaagaaggcatttatgagggagatatcatacctattaaagtccctccaaaatttggcgtcgttgatcaagacaatggtcctcgaggagacacgacagtcgaaaacctttcaaaactaagaccagcttttgataaaaaatttggtattgtaacagctggtagcgcctcattcctaacagatggcgcctctgcagtcctcatgatgggacaaaaac

SEQ ID NO: 233145 - DNA, 319 bp, Unknown
  Bacterial polypeptide expressing nucleotide sequence isolated from the Sargasso Sea
tgggcttaggtccattaatgcatcaaaaaaagcattacaacgagcagaattaacaatagatgatatagatattattgagttaaatgaagcatttgcagcacaatcattagcatgcattagagaacttaatatggatgaaaataaaatcaacattcatggaggagctatagctctaggacatcccttaggggctactgggtctagaattacaggtaaaactgcatccttactcaaaaaaaatggaaaaaaatatggtttatcgactcaatgcattggtcttggccaaggtattgcaactgtcttagaaaacattaattaa

SEQ ID NO: 233146 - DNA, 891 bp, Unknown
  Bacterial polypeptide expressing nucleotide sequence isolated from the Sargasso Sea
ttgcgtgaattactcaaccgcaacccacacctggatgccagcgttattgacgatgtgatcttcggttgcgccaaccaggcgggcgaggataaccgcaacgtggcgcatatggcgaccctgctggcgggttatccgtacggcgtgtccggtaccaccattaaccgcctgtgcggctctggtctggacgcaattggctttgccgcgcgggccattaaagcgggtgatgcggacctgatgattgccggtggcgtggagtccatgtcccgcgcgccgttcgtcatgggcaaggccaccgcgccgtaccagcgtcaggcggaaatgtttgataccaccatcggctggcgttttgtgaacccgctcatgcagcaacaatttggtactgacagcatgccggaaacggcagagaatgtagctgaattgttaaatataagccgaagggaccaggacgcctttgcgtaccgcagccaacagcgtacggcgaaagcgcagcgcgacggcattctggcgcaggaaattgtgccggtacagattattggtaagaaaggtgcggtcagcgcggtgcgtgaagatgaacatccgcgtgcagaaaccactttggagcaactggcctcgctgaaaaccccgttccgcaagggcggcgtggtgacggcgggcaatgcttccggtgtcaatgacggtgctgcggcgctgattatcgcaagccagcagcaggccgccgcgcagggcttaacgccacgtgcgcgcatcgtcgccatggcgaccgcgggcgttgagccgaagtacatggggcttgggccggttccggcggtgcgtaaagtgctggagcgcgccgggctgaatattaacgatatggatgtaattgagctgaatgaagcctttgccgcccaggcg

SEQ ID NO: 233147 - DNA, 802 bp, Unknown
  Bacterial polypeptide expressing nucleotide sequence isolated from the Sargasso Sea
ccgaagatggacgcgatgtatccaatcatctcattggggcgaaacagcggataacatcgccaaggaaatgcagatcagccgcgaagaacaagatgccttcgccgtggaaagccaccgccgcgccgtaaacgccatgaacactggcaagttcgctgatgagatcgtgcccatttccgtgccgcagcggaagggcgacgcgattgtcgtcgatacagatgagcacccgcgctacaagaaggacggcgacaactacgtgcttaccactgacgctgacgacatggcccgcctgcgcccggccttcacgaagaacggcacggtgacggcgggcaactcgtctggcgtcaacgacggcgccgcagcagtgctgatgatgagcaagaaaaagaccgaagagctgggcctgaagccgaagctccgctgggtcgcatcgaacgtagctggagtggatccgggcgtcatgggctacggccctgtgccagccacagagaaactactcgcccgccaacgcctgaagatcgaggacatcgacctgatcgagctaaacgaggccttcgcggcgcagatcatcggctgcatgaagcgcctgggtgtggatcacaccaataccaacgtcaacggcggcgctattgcgttgggtcatccgacaggtgcgtccggggcgcggatcatggtgacccttatgcacgagatggaacgccgcgcgccggaccgcgataagtcgaaacccttctatggtctatgctcgctatgtgtcggcgtgggcatgggggtttcgaccctggtcgagtggatcggagactaa

SEQ ID NO: 233148 - DNA, 222 bp, Unknown
  Bacterial polypeptide expressing nucleotide sequence isolated from the Sargasso Sea
gacattattgggctcacatgatgcaattatttctgatgagttaaaccatgcatcaataattgatggtatacgacttattaaagcaaaacgatatcgatttaaaaatagagatatgaatgaccttgaattaaagctaagtgaaaggaatgaatatcgtaatgttatgatagcaacatatggtgttttctccatggatggacatatagcaaaaatagataaaat

SEQ ID NO: 233149 - DNA, 394 bp, Unknown
  Bacterial polypeptide expressing nucleotide sequence isolated from the Sargasso Sea
agagcaaaagaactcgaagtgaaacctttggccaaaatagttgatgccgagttggtaggttgtgatccggtgcttatgttagagggccccatcccagtgacagagaaaatgttggccaagaccgggcttgatataaatgatatagatgtcttcgaaattaatgaggcatttgcgtcagtggtgatttcttgggccaagtcggtcggagcggacatggacaaagttaatccaaacggcggtgcaatagctctaggacatccgcttggagcaacaggatgctttttgactacgaaagcggtgcatgagttacacaggactaacggaaaatatgggctgattgcaatgtgttgtgggggtggtttgggtacaggcacgatcataagcaaggtttaac

SEQ ID NO: 233150 - DNA, 652 bp, Unknown
  Bacterial polypeptide expressing nucleotide sequence isolated from the Sargasso Sea
atgcgaacgactcctttccttgcacacttacaacaacaaatagaagacgtaaaagtgcagggcctgtacaaagctgaacgagtgataagctctcagcagcaagcaacagtgaccgtaggtcatgaacaggttttaaatttttgtgccaacaactacttaggtttagccaataacccggaactgattaaagccgctcagcaaggtctggattcccacggttttggtgtggcgtccgtgcgttttatctgcggtactcaggatattcacaaagaactggaacaaaaaatcagcggctttttaggcactgaagacactattttgtactcctcctgttttgatgccaacggtggtttattcgaaaccattttaggtgctgaagacgcggtgatttcagattcgttaaaccatgcttctattatcgatggcgtgcgtttatgtaaagccaaacgctaccgttatgccaataacgatatggccgaattagaagcgcagctgaaacaagctgatgcagatggcgcacgttttaaactgatcgcgacagacggtgtgttttctatggatggtgtgatcgctgacttaaaatccatctgtgatttagcggataaatacaatgcgttggtgatggttgatgacagcccatgctgtaggtttt

SEQ ID NO: 233151 - DNA, 583 bp, Unknown
  Bacterial polypeptide expressing nucleotide sequence isolated from the Sargasso Sea
aagattgttcaaaaaaagaagaaaaaatttttagatagagatgaacatccacgttctgatacactgttagaaaaattaagtaccttgccaacaccatttaggaataatggttctgttacagctggaaatgcaagtggtgttaatgatggttccgcagccctaataattgcatctgaaaaagctattaaagaatataatttaacaccaaaagctaggatcttatcctctgccgcaactggtgttgaaccaagtgttatgggaattggaccagtttcagcaacaaaaaaagttctttcactttcaaatatcaatttaaataatataaatattattgagcttaatgaagcatttgcatctcaagctttagcaacaatgagagatctatcattgtcagatgatgatgaaagagtaaacattaacggcggggcaattgctttaggccatccacttggtatgtctggtgcaagactagtgcttacagcaactgaacaattgcaccaaagtaaaaataataaattagcactttgcacaatgtgtgttggggttggtcagggcagtgcgattattttagaaaatttataaa

SEQ ID NO: 233152 - DNA, 638 bp, Unknown
  Bacterial polypeptide expressing nucleotide sequence isolated from the Sargasso Sea
gcagaaagcattaaaagctatttctaatgggagaatgagtaaagaaatcacttatgtaaaagttaaacaaaaaagaagtgatgatttacagattgacaaagacgaacatccacgagaaacaactaacgaaaaattgtccaatctaccaactccttttaaaattaatggtacagttacagctggtaattcaagcggagttaatgatggagcagcggctctaatcattgctgatgaagaagcaattaaaaaacataacttaacacctatagcaaaaattatctctgcagcaagttcaggagttcaaccatcatatatgggtattggtccagttactgcttcacaaaaagttttaaaaaaatctaatattagtatagataatattgatgttttagaaattaatgaagcttttgctgcacaagttctggcatgtttgagagaatttggcgtcccagacaacgatgaaagagttaatccaaatggtggagcaatcgcactagggcatccattaggtatgtcaggaacaaggctagtgttgacagctgcaaaagaacttgaaataacaaataaaaaatacgccttatgcacaatgtgtgttggggttggtcaaggaagtgccattattcttgaaaaagtttgaa

SEQ ID NO: 233153 - DNA, 856 bp, Unknown
  Bacterial polypeptide expressing nucleotide sequence isolated from the Sargasso Sea
atgagcttcgatcttgctacgcgcctggccgagcgccaggccgccgatctgttccgccaacgcccgctgttgcagaccccgcaggggccgcacgtgcgcgcggacggtcaggagctactggccttctgttccaatgactatctaggcctggccaaccaccccgaggtgatccgcgccatgcagcagggcgcggaaaaatggggcgtcggcggcggcgcatcgcatctggtgatcggccacagcaccccgcaccatgagctggaggaggccctggccgcgttcaccggcaggccgcgtgcgctgctgttctccaccggttacatggccaacctggcggtcgtcaccgccttgctcgggcagggcgacagcgtactgcaggatcgtctcaaccacgcctcgctactcgatgccggcctgctctgcggagcgcgattctctcgctacctgcacaacgacgcagtgagcctggccaaccgcctgcgcaaggtcactggcaactgcctggtggtcaccgatggtgtgttcagcatggacggcgacctggccgatctaccggcattgtgcgccgaggcgcgcgccgcgcaggcctgggtgatggtcgatgatgcccatggcttcggcccgctgggcaccaccggtggcggcatcgtcgagcacttcggtctgggccaggatgacgtacaggtgctggtcggtaccctgggcaaggcctttggtaccgctggcgccttcgtcgccggcagcgaggaactgatcgagacgctgattcagttcgcccggccctacatctacaccaccagccaaccgccggcggtggcctgcgccaccttgaagagcctggagcttctgcgcagcg

SEQ ID NO: 233154 - DNA, 967 bp, Unknown
  Bacterial polypeptide expressing nucleotide sequence isolated from the Sargasso Sea
ccggccctgacggtgaaccggctctgcgcttcgggattggcggcagtcaatattgcagcgaacaaaatcaagacgggcgaagcggacctgatgatcgccggcggcgtcgaaagcatgacccgcgcgccctttatcatgcccaagccggaacaagcgttcagccgggcggcattggtagaagacaccacgatcggatggcgcatggttaacccgcgcatgaaggtcgagtttgggatcgattccatgcctgaaaccgccgaaaacgtggctgaagattatgacatcagccgggcagatcaggatgcctttgccgcccgctcgcaggagcgtgcagccaaggcccaaagcagcgggcgttttgccaaggaaattgtgccggtaactattccgcagcgacgcggcgacgatatcctttttgatcgcgacgagcacccgagggaggtttcgctcgaaaaactgtccaagttgagagcatcgttccgtcagggcggatcggtcacggcgggcaatgcgtcgggggtaaatgacggcgcggcggccacgttgatcgcctcggcggcagcctgtaaagcctatggcctgaagccgcgggcacgcatcctcggcggagcatcggcgggtgttacgccgcgcgtcatggggatcgggccggtgcctgcggtgcaaaagctcttggcccgcctgaaccagtctatcgaagcattcgacgtgattgaattgaacgaggcctttgcgagccagtcgctagccgtcttgcgcgagttggggctgtcggatgacgcagaacatgtgaacccgaatggcggcgcgattgccctggggcatccattgggcatgtcggggacgcggctgattggcacggccctgatcgagatggaagaacgcgaggcgcgtttggctcttgcaacgatgtgcgtcggagtaggtcagggagaagcgctggccatcgaacggatgaccgtgtgat

SEQ ID NO: 233155 - DNA, 769 bp, Unknown
  Bacterial polypeptide expressing nucleotide sequence isolated from the Sargasso Sea
tgacgttaagacactcgatatgatgcttggtgcattgaattgtccttttggtactggtcatatgggtgtaacagccgagaatgttgcgcgcgaacaaaatgtttctcgtcgtgagcaggatgagtttgccctagaaagtcaaaaaagagctgcatcggcagcatcaaataatttgtttgatagccaaattaatccaatagaaataaaagtaaaaagggacttggtccctttcgaaaaggatgagcaccccaaagctacaactttggacgatttagcttccttgcgcccagtttttgagaaggacggtacagtaacagctggaaatgcatctggaataaatgatggtgctgctgcaatcgttttgtcatctgcagaagctgttgaaaaatatggtttaaaacccaaggctaagattttaggttatggacatgctggcgttagacccgaggttatgggtgttgggccaattcctgcggttcaaaacttattgaaaaaaactggtcttgttgtatcagattttgatgttattgaaagtaatgaggcttttgcggcacaagcaattgcggttaatcgggggctcagtttagatcctgctattgtgaacccgaacggtggagccatcgcattaggtcaccctgttggtgctacaggagcaataataacgcttaaggctttatatcagctcgacaacataaatggaaaacgggctttgattacgatgtgtattggaggtggtcagggaattgctctagctattgaaaggatttga

SEQ ID NO: 233156 - DNA, 829 bp, Unknown
  Bacterial polypeptide expressing nucleotide sequence isolated from the Sargasso Sea
agagcgctacgaagagttggtcgctggaggtctgaattgggatccaccgactctggaaagcgcaagtgaacctgaatgcacggttgatggtcaacagatgattatgctctcagccaacaattatctcaatctgaccactcacccaaaagtggtcgcagccatgattgaagcgactcaaaaatatggggccggtagtggttccgtccgggcgatttccggaaccatggacattcatttgcaagctgaagaagccgtggccaaattcaagggcgtggaggctagtttaatctatagtgcagggtacacagccaatgtcggcctcattccaacgttggttcagggaaagcaggatgtcatcatatccgatgaattgaatcacggttcaatcatcgatggggtccgcttgacgaaggcccaacgcgaggtctacccacacaatgacatggatggcctcgagcaggctttgaaaaatcactcagatgcagatcgaaaactcatcattaccgatggagtattttcgatggatggtgacatctgccccctggatgagattactgaattggctgaagcccatgatgccatggtgatggttgacgactgtcatggagaaggggtcatgggtagtcggggcgcaggtattgtcgaccatttttctctccaaggtcgtgttgattttgaagtggggtcattttccaaagccctgggggtccaaggaggcatcttagccggcagtgctcaaatgcgcttgcatgcgttgaatcattcccgttcttggctgctttcgggtagtcaaccacccggtgttgcagcagctcagaaagccgctgta

SEQ ID NO: 233157 - DNA, 885 bp, Unknown
  Bacterial polypeptide expressing nucleotide sequence isolated from the Sargasso Sea
tggtacagaagccatgagtcgggctcctttgatttttaaaccacaaatggcaaattggttttcgcgcttgtctagagcgaagacttttggtgctaaaatgggcacagcgatgcaatttaggccggggtttttagcgcctattatctcactcttgcacggcttaaccgatcctttatgtggctacaatatggggcaaacagccgaaaaggtcgcatatcaatttggggtgactcgtgaggacatggacgcttttgctgcccacagtcatcaacttgcagtgcaggcacgagagaagggttattatggttctttagccacattgtattctcatcgagggcgcgcttttgaaaaggacgatggtgtgcgtgatgattccagtattgctaaactcagtaaattaaaaccggtatttgatcgtaaatacggaatggttacagcggcgaacagttcccaaataacagacggtgctgctctattattgttagcaagcgaagaagctgtaaagcaacataatctcgatgttttagggattattaaagacgtagagtgggctgggttagatccaacggtaatggggctaggtcctgttatggcatcgacccccatcttgcagaggcatgacttatctcttgatgatgttgactactgggaaattaatgaagcatttgcagcgcaagtattagggtgcttgggtgcttgggaagataaagctttttgtcataagcactttggaatggatgaagcactggggacggttgatcgtgctaaattgaatgttgatggtggtgcaattgcactgggtcaccccgtcggagcaacgggagctcgtttagtattgcgtatgctggatatattaaatcgtgagaaaaaacacgaggtgttgcc

SEQ ID NO: 233158 - DNA, 580 bp, Unknown
  Bacterial polypeptide expressing nucleotide sequence isolated from the Sargasso Sea
tgatgctaacggtgcgctgattaaagtgctgcatgatgaagtgattcgcccagaaacctcaatggaatcattagcggcgctgcgcccagtattcgacccagcaaacggtactgtgactgccggtacctcttcagcattatctgacggagcttcggcaatgttagtgatggaagaatctaaagctcgcgctttgggtctaccaatccgtgcccgtatccgctcaatggcagttgcaggttgtgacgcggcaattatgggttacggtccagtacctgctactcaaaaagcactggctcgcgcaggcatcacagttaatgatttggatgttatcgaactgaacgaagcgttcgctgctcagtctctaccctgtgttaaagacctaggtctgctcgatgtggtagaagacaagatcaacctaaatggtggcgcgattgcgcttggccatccactgggttgttctggtgcacgtatttcaacgacgctgatcaacctgatggaacacaaagatgcgaccttaggtttagccactatgtgtatcggtttaggccaaggtattgcgaccgttttcgaacgcgtttaa

SEQ ID NO: 233159 - DNA, 781 bp, Unknown
  Bacterial polypeptide expressing nucleotide sequence isolated from the Sargasso Sea
atgcctttcgatctcgccgcccgcctggcccagcgccaggcggaggacctctaccgccgccgcccgctgctggaatcgccgcagggcccggaggtggtcattgacggccagcccatgctggccttctgttccaacgattacctggggctggccaatcaccccgaggtgattgccgcgctgcgcgccggcgccgaacgctggggcgtcggtggtggcgcctcgcacctggtcaacggtcactgcgccccgcaccacgaactggagctggcactcgccgagttcaccggtcgcccgcgcgcgctgctgttttctaccggctacatggccaacctgggcaccgtcaccgcgctcgtcggcaagggcgacagcgtgctggaggaccgcctcaaccacgcctcgctgctggatgccggattgctttccggtgcgcgcttttcgcgctatctgcacaacgatgccgccagcctcgcctcgcgcctggagaaggccgaaggcaacacgctggtcgttaccgacggcgtgttcagcatggacggcgacctggccgacctgcccagcctttgcgcgacggctagacagcagaatgcctgggtgatggtcgacgacgcccacggcttcggcccgctgggcgcaacgggtggcggtatcgtcgaacacttcggcttgagcatggaggacgtgcctgtactggtcggtacccttggcaaggccttcgacaccgccggcgccttcgtcgccggtagcgaggaactgatcgagacgctgatccagttcgcccgcc

SEQ ID NO: 233160 - DNA, 694 bp, Unknown
  Bacterial polypeptide expressing nucleotide sequence isolated from the Sargasso Sea
aatacagaggacgaggttttattaaaagatggattagtagatgcatttggatcttatcatatgggcataacagcagaaaacgttgctgaaaaatggcagattacaagatcaatgcaagatgaattctcaattaactcccagttaaaagcattaaaggcaatgaaagaaaacaaatttaaagaagaaatagcaggaggtctcataaaccatgatgatgatgaacaccctagggcaggattgacattagaaaaattaaaccaaatgagccctgtatttaaaaaagatggaacagttaccgtagcaaactcttcaggcattaatgatggagctgcaggcgtggtagttatgagcgagaaggaaacaaaaaaaagaagtcttaaacctcttgctaaaattatttcttgggcaacatctggggtagagcctgctgtaatggggacaggtccaattcccgcatctaaaaaagctttaagcaaagcaggttggggaattaatgatgttgatttagtagaagctaatgaggcttttgcagcccaaagtcttgcagtgatgcaggagttaaatattccaaaggaaaagctaaatgttaatggtggagcaatcgcccttggccacccaattggagcaacaggtacaagaatattggtcacactcatacatgaaatgaaaaaaagaaagtctaataaaggtctag

SEQ ID NO: 233161 - DNA, 895 bp, Unknown
  Bacterial polypeptide expressing nucleotide sequence isolated from the Sargasso Sea
tcctgaaggtccacaaggaatgcttatggcaagaagtatatctattttagcagatcttcctctttcaacaggtggaaaagtggtgaatagattctgcggatcatctatggattctgttcatcaagtgagccaagctgttattgcaggtgatattaaagcaggtattgcttcaggtgttgaagatatgtttacagtgcccatgggaggttttgttccagatttcaatgagcaactaaatgaaaaagaattttatattgggatgggagagacggctgaaaacttagctaaagaattggatatttctagagaggatcaagaaaatttttcaattctttcacataaaaaagcattagatgctattggtagtaataaatttgataacgagataattcctgtagaatttaatggtcaaacattttctaaagacgaaggtcctcgtgttccagatgttgataagatgaagtctttatctccagcatttgatgctgcaggttctattaccgcagctacatctagccctatatctcttggtgcatcagcgatattgattggaggccaaggtatggctgacagctcaaattcggcttttgagatagtttcaaggtctattgtaggtgttgattggaaaactatgggcgaaggtccgcttccggctacagataaagcattgaagaatgcaggtttgtcaatggatgatattgatgtaatagaattgaatgaggcctttgcagctcaatccttatatgttatacgcaagggaggttgggatatggataaaatcaacttgaatggaggtgctattgcattaggtcatccattgggttgctctggtgcccggattcttaccactttaacaaatgtgatgatgcaaaaagatgttgaattaggtcttgca

SEQ ID NO: 233162 - DNA, 856 bp, Unknown
  Bacterial polypeptide expressing nucleotide sequence isolated from the Sargasso Sea
gatgccatggcggtctgttcgaaccctgttcggtgccgaagacgccatcatctccgatgctctcaaccacgcctccatcatcgacggggtacggctgtgcaaggccaagcgttatcgctacgccaacaacgacatggccgagctggaagcccagctcaagcaggctgacgccgacggcgcccgcttcaagctgatcgccaccgacggggtcttctccatggatggcgtcattgccgacctcaaatccatctgcgatctggccgacaagtacgacgccctggtgatggtggacgactcccacgccgtcggcttcatcggcgagaacggccgcggcacccacgaatactgtggcgtgatggacagggtcgacatcatcaccggtaccctgggcaaggcgctcggcggcgcctccggtggctacacctccggcaagaaggaggtgatcgactggttgcgccagcgctcccgcccctatctcttctccaactcgctggccccctccatcgtcgccgccaccatcaaggtgatcgacatgctggccgaaggccatgcgctgcgctccagcctcaaggagaacagccaatacttccgcgagcggatgagcgccgccggcttcaccctggccggggccgatcacgccatcattccggtgatgctgggtgacgccaaactggccgccgagatggcaagccgcatgctggccgccggcatctacgtggtgggcttctccttcccggttgtgcccaagggccaggcccgcatccgcacccagatgtccgctgcccacacccgtgagcaactggacaaggccatcgatgccttcattcgcatcggccgcgaactcgacatcatctga

SEQ ID NO: 233163 - DNA, 800 bp, Unknown
  Bacterial polypeptide expressing nucleotide sequence isolated from the Sargasso Sea
aaaagaacgtactattacaacatcacaaaacattaatataaataccgaagaaggtggagaagtattgaatttttgcgctaataattaccttggtttagcaaataataatgaaataattaatgaaacaaaaaaagctttagatcaaaatggatttgggatggcttccgttcggtttatttgtggaactcaggatattcacaaaaaattacaaaaaagaatttcagacttttttggaacagatgatacaatactttatacgtcttgtttcgatgcaaatggtggtttgtttgaaacattgttaggacaagaagatgctatcatttcacactcattaaaccatgcttcaattattgatgggattcgtctttgtaaagcaaaacgtttacgctataaaaataatgatatgaatgatctacaatcaaaacttttagaatgtcaagattctagaataagacttattgctactgatggtgttttttcaatggatggatatattgctaaacttgataaaataactgaacttgcaaaaaaatatgatgcaatggttatggttgatgatagtcatgccactgggttcattggtaaaactggcagagggtctgcagaacattgcggtgtaatgaataaaattgatatttggacatctacacttgggaaagcattacgaggtgcatctggaggttttactactggccgacaagaaattattgacttactaagacaaagatcaagaccctatatattttcgaatacagttgccccatcaattgttgctgcaagtattaaagtctttgatattc

SEQ ID NO: 233164 - DNA, 865 bp, Unknown
  Bacterial polypeptide expressing nucleotide sequence isolated from the Sargasso Sea
tatgcaagctattcaagaatggggtttcggcttaggttcagtcagattcatatgtggtacccaaacaatacataaagaattagagcaatcagttagcaattttttaaacaaggatgatacaatcttatactcttcctgttttgatgcaaatggtggtttgtttgaaacaattctggatgaagaagatgctgttttttctgatgagttaaatcatgcatcaattattgacggaatcagattatgtaaagctcaaaagcatagatataaaaattgtgatatgaacgatttgcaagaaaaattaagtgattcagatgcaagggttaagctgattgttacagatggagtatttagcatggacggaacaattgcacctgtagactcgattgttcaattagccaaaaaatataatgcattagttatggtagatgattgtcatgctactggcttcattggtgcaaacggaaaaggaagtggagaacattgtggagttttagataaagttgatattatttcttcaacttttggtaaggctcttggaggagcatctggaggatttatctctgcatcaaaaaatattgtagatacacttagacagaaatctagaccttaccttttttcaaatagcttagcaccaccattggtagtagcatgctttaaagcgctggaaataatcaatgataacaaaaaccttataaccaagcttcatgataacacattatattttagagaaaaaatcaaagaaattggctacgaagtaaaaggagattcgcatccaattgttccgataatgatttatgatgccaaacaagcggttgctttgtctgaaatgttattagaaaaaaaatatttatgtaattccattttc

SEQ ID NO: 233165 - DNA, 538 bp, Unknown
  Bacterial polypeptide expressing nucleotide sequence isolated from the Sargasso Sea
aatccaaagatgaaggaaagctatggaatagattcgatgcctgaaactgctgaaaatgttgcagaaaaatatcaaattagtagagaggaccaagacagaatggccttatctagtcaacaaaaagccgctaattcaatttccagtggccgattggcaaaagaaataacttcggttaagattcctcaaagaaaaggtgaacctataatttttgataatgatgagcaccctagaggtacctcacttgaaaaactatcatcactaccttcaccgtttcgccaaaatggaagcgttactgcaggaaatgcaagtggagttaatgacggtgcggctgcaattataattgccagtgaagctggtgtaaaacgaaaccacttaacacctaaagccagaataatttcagcagcaagtgctggagttgagccagcatatatgggtattgggccggttccagcctctataaaagcactaaaaatcgctggtctaaatatagaggatgtggatgtaattgaaataaatgaagcatttgcggctcagggtt

SEQ ID NO: 233166 - DNA, 823 bp, Unknown
  Bacterial polypeptide expressing nucleotide sequence isolated from the Sargasso Sea
gttacaaaagctttcggaagagacgctcagatgtatgactcttcatttggatggagatttgtcaatccgaaaatgaaagaattttatggagtagatggaatgggaacaacagctgaaaatctagccgaaaaatataatatttcaagaaaagaccaagatatatttgcattcaattctcaaatgaaagcttcaaaagcacaaaatgaaggtagatttgatgaggaaattgtagaagttgtaattcctcaaagaaaaaaagaatctatcattttctgtaaagatgaatttataaaaccaaatacttctttagaaattttatcaaaactacgaactgcatttaaaaaagaaggaggaagtgttacagcaggaaactcatcaggactaaatgacggagccgctgctatgcttttatcctctgaaaaaggagttaaagaaaataatcttgcacctattgcaagaattgtaagttctgcagtagttggagtagaacctagaataatggggataggaccagttaaagcttctaacaaagcactagaaaaagcaggtttaacaatggaggacatggacattattgagttaaatgaagctttttctgcacaagcactagcttgtattagaaaatggggacttaaagataatgatgaaagaataaacccaaatggaggagctatagcgcttgggcatccattaggcgtaagcggaacaagaattctacaaaccgctgcaatagaattaaagaaaaaaaataaacaatacgcattagtctgtatgtgtattggagtcggtcaaggttacgcaacaataattgaaaaagtataaa

SEQ ID NO: 233167 - DNA, 841 bp, Unknown
  Bacterial polypeptide expressing nucleotide sequence isolated from the Sargasso Sea
ccggcgaaagtggttaatcgcttttgtggctcagccatggatgccttacatcaagtaagcaccgcaattgaaagtggtgatattgaagtaggcattgctgctggtgtcgaggatatgttctctattccacctggaggatttgcccctgactttcatcctgagttagctgaacaagaatattatataggtatgggagaaacagctgaaaatttagcaaatgatggaaatatttcaagagatgctcaagaggattttgcaatgaattctcacaaaaaggccttagcggcatgggaggctggtaaatttgataatgaaataattccaatcgatatgtatggtgaaagcactgtttctaaggatgaaggtcctcgtgaacccgatggagaaaaaatcaaaagtttaaatcctgcttttgttgaaggtggctcagtaacagccgcaacaagtagtcctttttcattgggtgctgctgctttacttgtaacatctgaatcttttgccaaagaaaatggacttacaattcgagctgaaattgtttctcgagctgttgcaggtgtggactggacacgcatgggtatgggaccactccctgctactgaaaaagcattaaaaaaggctgaccttaccatggatgatattgaggtcattgagctgaatgaagcttttgctgcgcagtctctttatgtaattaatgaaggtgggtgggatcctaacaaaataaaccttaacggtggagcgattgctcttggtcaccctcttggatgctctggagctcgaatcataggcacactcattaatgtaatggaacaaaaggaaaaacagattggactagcaaccatgt

SEQ ID NO: 233168 - DNA, 341 bp, Unknown
  Bacterial polypeptide expressing nucleotide sequence isolated from the Sargasso Sea
gtgggccccgcgcatcatggggattggcccggtgcctgcctctcagaaactgatgtcgcagcttgggctctcgcagtcggattttgatgtgatcgaactgaacgaagcctttgccagccaagggcttgccacgttgcgcggtcttggcattgcggatgacgatccgcgcgtaaaccccaatggcggcgcaatcgcgctggggcatccgctgggcatgtccggtgcgcggatcaccggcacggccgcgctgcaactgagcctcaccggcggcaatcgcgccttggccaccatgtgcgttggcgtcgggcagggcatcgcaatcgcgctcgaagggatctgag

SEQ ID NO: 233169 - DNA, 645 bp, Unknown
  Bacterial polypeptide expressing nucleotide sequence isolated from the Sargasso Sea
tttccttcagcttatactgcaaatcaatcaacactatggactctttgtaagaaactcagtggatgcgaagtatattcagacgagttaaatcatgcctcaatgatacaaggtattaaaaatgcaaacgtaccaactcatgtttttaagcataacgacacagatcacttggaggaattactaaaaacctcaaatgctaatacccctaaaataattgtatttgaatctctttattctatggaaggtctaagatcgcccataaaaaaaatagtatctcttgctaaaaaatacaatgctctgacttatttagatgaggttcattctgtcggactttatggtccagaaggaagaggaatagctgctgaattaaatgtatccgatgacatcgatattatcaatggcacactatccaaggcctttggtcagatgggcggatatgttgcagctagtagagatataattgattttataagaagttttgctcctggttttatttttacttcatctgcaaatccaagtatcgcagcagctagtttagtagcaatagatcttgctaaaggtgctaatttacttagaaagaatataaaaaataattctgacttaataagacaaggtatgagagattcagaaattccgtttcttgaaaat

SEQ ID NO: 233170 - DNA, 790 bp, Unknown
  Bacterial polypeptide expressing nucleotide sequence isolated from the Sargasso Sea
aatgaacaatgtttacattatgtcagcaaacagatctgcaattggaggatttggaggtactcttaaaaatcattgtcccgtcgatctaggaactttagttgcaaacgaagctattacaagatctggatatgaggctaatgaagttgagcatgctgtttttggtaatgttatacatacagaacccagagatatgtatgtgagtagagttattgcgctacaggctggaatggataaagcatctgctgcgttgactgtaaatcgactttgtggttctgggctccaggcaattgttagtgcttctcaaattattatgcttggagatgcttcagttgcaatggcaggaggtgtagaggttatgtcaaatggtgcacacattgttcaagggtttcgatggggttctagaatgggtgatggacaagttcatgatatgatgttaggggcacttcatgatccttttggtcacggacatatgggtataactgcagagaatatttctagtagatatcaaattagtagagaaatgcaggatgaatttgcattaactagtcaaaaaagagctcataaggccatccaaaatggtatttttaaggatcaaatcctacctattgaaataaaaacaagaaagggaattgaagtttttgaagtagacgagcatccaaaaccagacactagtatagaaacattatcaggtctcaaaactgcttttaaaaaagatggtgttgtaacagcgggtaatgcttcaggaattaatgatggtgcttctgctttagtattagctaatgaagaaaaa

SEQ ID NO: 233171 - DNA, 854 bp, Unknown
  Bacterial polypeptide expressing nucleotide sequence isolated from the Sargasso Sea
gggtacactgaagagtttttgcccggtagatctgggtactttggtcgctaaagatgcaattgcaagatctgggtatgatgctaacgaggttgaacacgctgtttttgggaatgtaattcatactgagccgagagatatgtacgtaagtagagttatagctcttcaagctggtatgagtaaagaatccgctgcgttaacagtaaatagactttgtggctcaggacttcaggctattgtaagtgctattcaactattaatattaggagatgcgaaaatatcaatagctggaggtgtagaagttatgtctaatggggcacatattgtagaaggctttcgttggggatcaagaatgggagacggaaaagttcatgatatgatgctcggtgcattacatgatccatttggtcatggtcatatgggtattacggctgaaaatatatcaagcagatatcaaattagtagagacatgcaagatcaatttgctttaagtagtcaacaaagagcaagcaaggcaattaataatggatcttttaaagagcaaatattaccaattgaaataaagactagaaaaggaattgaaatttttgaaacagatgagcatccaaagccagatactagcatagatactttatctagtctgagaacggcttttaaaaaagatggagtggttacagctggtaatgcttctggaattaacgatggcgcgtcagccttgatcctcgctaatgaagataaggccaaaaaaggtacgccattagccaggattgtttcgtatggatttggtggtgttgaccctgatgaaatgggtatgggaccagttccagcttcaaaaatggcattaaacaaagcagggt

SEQ ID NO: 233172 - DNA, 271 bp, Unknown
  Bacterial polypeptide expressing nucleotide sequence isolated from the Sargasso Sea
accctagacgatattggcacaattgaacttaatgaagcatttgcagcgcaagcattagcctgtatgcaggaacttggacttagtgcagatgatccaagagtgaatcccaatggcggcgccattgcacttggccatccactcggtatgtcgggggcacgcctgctgcatactgccgcattacaatttgaacaaacctcggccgattatgcactatgcagtatgtgtattggtgttggccaaggtatagcgacattgctaaaacgcatttagg

SEQ ID NO: 233173 - DNA, 826 bp, Unknown
  Bacterial polypeptide expressing nucleotide sequence isolated from the Sargasso Sea
aactcaaaccattcataaacaattagaagattccgtcagcaaatttcttggtaaggatgatacaattctctactcttcatgttttgatgcaaacggtggattttttgaaacaattttaaatgatcaagatgctgtgttttcagatgaacttaatcatgcttctataattgatgggattagactttgtaaagcacaaaaatatagatataaaaattgtgatatgaatgatttagaagaacaactaagtcaatcttcagctagaattaaacttattgttactgatggagtattcagcatggatggcacaattgcccctatagataaaattgttaacttagccagtaagtatgatgcgcttgttatggttgatgattgccatgctacaggttttattggagaaaatggtagaggaagcggtgaatactataatgttttagatagggttgatataatttcttcaacttttggtaaagctcttggtggagcatccggaggatttgtttcggcttcaaaaaatattattgacaccttaagacaaaaatctaggccatatcttttttccaatagtttagctcctgctttagtagtagcatgtataaaagcattagaaataattgattcaaataaaaatcttttaaagcaacttcaacaaaatacactattctttagaaaacagataaaagaaattggctatgaggtaaagggtgactcacatccgattgttccaataatgatttatgatgcaaaaaaagcagtagctttatctgaaatgcttttagaaagaaatatatatgtaattccattttcttttcccgttgttccaaaa

SEQ ID NO: 233174 - DNA, 562 bp, Unknown
  Bacterial polypeptide expressing nucleotide sequence isolated from the Sargasso Sea
aagctaattgactacgatgaagtagtacgcccagaaagcacggctgaaagcatggccgcacttcgcccagtgttcgacccagtaaacggtactgttactgcgggtacatcttcggcgctgtctgacggtgcatcgggtatgctgcttatgtcagcagaccgtgcgaaagagcttggcctaacgcctcgtgcgaaaattcgcgcaatggctgtggcgggttgtgatgcggcaattatgggttacggcccagtgccagcaacacaaaaagccctcaagcgcgctggccttactatggacgatattgaacttgctgagtttaacgaagcgttcgcagcacaggcgctatcgtgcattaagcaactaggttggatggaccacctagatactaagattaaccttaacggtggtgcaattgcacttggtcacccactaggttgttctggttcacgtatctcgggtacgcttatcaacctaatggaatcacaagacgtaagcctaggcttagcgactatgtgtattggtttaggccaaggtattgctaccgtatttgagcgtgtataag

SEQ ID NO: 233175 - DNA, 799 bp, Unknown
  Bacterial polypeptide expressing nucleotide sequence isolated from the Sargasso Sea
ggtttcagatggggaactaaaatgggtgatgcaaaaatttttgatatgatgctaggatcacttcaagatcctttcggccatggtcacatgggtattacagcagagaatatttctgatagatatcagataagtagagttatgcaggatgagtttgcctatagtagtcaaaaaaaagctcataatgctatcaaaaaaggatttttcaaagatcaaattgtaccaattgaaataaaatcaagaaaaggcatagatatctttgatactgacgagcatataaaacctgatacaactcttgagattttgtcaaatctaaaatctgcctttaaaaaagatgggtctgtcactgctggaaatgcatctggtattaacgatggttcttcagctttgatacttgcggatgaaaagagggcaaaaaatgggatgccattagctagaatagtttcttatggttttggcggtgtcgagccggatgaaatgggaatgggtcctataccagcctcaaaaatggctctacaaaaatcaggattaaaagttgatgatatagatctggttgaatcaaatgaagcttttgctgcccaagcttgtgcagttaacaaacagttaggattagatccagaaaaagtcaatgtaaatggtggtgcaatagcattaggacatccagttggagcaacaggttcaatcattatgactaagttagtatatgaacttagaaaaaggaaaggtaaatatggcttggcaacaatgtgtattggcggtggacagggtatagcagttctcattgaagctatatacaattaaa

SEQ ID NO: 233176 - DNA, 462 bp, Unknown
  Bacterial polypeptide expressing nucleotide sequence isolated from the Sargasso Sea
ccgccggaaacgcctccggggtgaacgatggcgccgccgcgctgattatcgccagcgaacagcaggcgcgggcgcaggggttaaccccacgtgcacgaattgtggcgatggcgaccgcgggcgtggagcccaggtttatggggctggggccggtgccggcggtacgcaaagtgctggagcgcgccggactgaatattaacgatatggatgttatcgaactgaacgaagcctttgctgcgcaggccttgggcgtgctcaggcagctggggctggcggacgatgccgggcatgttaaccccaatggcggtgctatcgccttaggtcatcccttgggaatgagcggcgcgcggctggcattgagcgccagcctggagctgcagcgacggaacgggcgctatgcgctgtgtacgatgtgtattggcgtgggtcagggcattgccatgatccttgagcgagtgtgag

SEQ ID NO: 233177 - DNA, 439 bp, Unknown
  Bacterial polypeptide expressing nucleotide sequence isolated from the Sargasso Sea
gatggccaacacgccgagcgtcggcgacgaagtcgcggccgatgatgcgtgtgcgccgcccatggagctcgcgctcttctcgtccaacgactacctcggcctgagcacgcatccagaggtgcgcgcggccgccgccgctgctgccgccgcgcacggctgcggcccgcggtcgtcgtctctggtggcgggattcacgtgcttgcaccaggagctcgagacggagctcgcgcggctcaaggaggcggaggcggcgctcctgcttccgaccggctacgcggccaacacggccgtcctcggcgcgctcgccgactcgccgagctgcgccatcttctccgacgagctcaaccacgcgtccatcatcgacggcgcgcggctcgcgagcaaaggagcgggggccgcgctgcacgtctaccgacacaacgacatggagcacctggac

SEQ ID NO: 233178 - DNA, 799 bp, Unknown
  Bacterial polypeptide expressing nucleotide sequence isolated from the Sargasso Sea
acatcctgttgtgataatggagtccacgaaggtaacgaaagaattgggaactggttctggaggaactagaaatatatctggcacatcaacatatcatgctgatttagagaaaagtcttgcagagcttcataacaaggaagcaagtctattatttccttcagcttatactgcaaatcaatcaacactatggactctttgtaaaaaactcagtggatgcgaagtatattcagatgagttaaatcatgcctcaatgatccaaggtattaaaaatgcaaacgtaccaactcacgtttttaaacataacgacacagatcacttggaagaattactaaaaacttcaaatgctaataccccaaaaataattgtatttgaatctctttattccatggaaggtttaaggtcgccaataaaaaaaatagtatctctcgctaaaaaatataatgctcttacttacctagatgaagttcactccgtaggtctttacggacctcaaggaagaggtatcgcagcagaattaggagtttcagatgaaattgatattattaatggaactctatcaaaagcttttggtcagatgggcgggtatgtcgcagctagcaaggatataattgattttataagaagttttgctccaggttttatttttacttcatctgcaaatccaagcatagctgcagctagcttagtagcagtagaccttgctaaaggtgctgacttacttagaaaaaatataaaaaataattctgatttaataagacaaggtttgagagattcaaaaattccttttcttgaaaatgac

SEQ ID NO: 233179 - DNA, 913 bp, Unknown
  Bacterial polypeptide expressing nucleotide sequence isolated from the Sargasso Sea
cctggacgcggtgggcagcgccttccgtgccatcgcttctggcgagatggagctggccatcgccggcggcgtggaatccatgtcgcgtgcaccctacgtgatgggcaaggcggccactgccttcggtcgtgagcagaagatcgaggacaccaccatcggctggcgctttatcaacccgctgatgaaggcgcagtacggcgtcgacgccatgccgcagaccgccgacaacgttgccgacgactatcaggtcagccgcgccgatcaggacctgttcgccctgcgcagccagcagcgcgccgcgcgcgcccaggcccaaggtttcttcgccgaggagatcgtgccggtggtgatcaagggcaagaagggcgacaccgtggtcgacaccgacgagcacccgcgcgccgacaccagcctggaggcgctgaccaagctcaagccggtcaacggcgagggcaagacggtcaccgccggcaacgcctcgggcgtcaacgacggcgccgtggcgctgatcctggcgtctgccgaagcggtgaaaaaacacggcctgaccccgcgtgccaaagtgctgggtatggccagcgctggcgtggcgccacgggtgatgggcatcggcccggtgccggcggtgcgcaagctgctggagcggctgaacctgagcatcgaccagttcgacgtgatcgagctcaacgaagccttcgccgcccagggcctggcggtgatgcgcgagctgggcctggccgacgatagcgccaaggtcaaccccaacggcggcgccatcgccctcggccacccgctgggcgccagtggtgcgcgtctggtgcagaccgctttgcaccagttggagaaatccggcggcaagcttggtctggcgaccatgtgcgtgggcgtggggcagggcctggcgctggccatc

SEQ ID NO: 233180 - DNA, 842 bp, Unknown
  Bacterial polypeptide expressing nucleotide sequence isolated from the Sargasso Sea
ggaggctgccagtgagccaaggtgcacaatagatggcaggcagatgataatgttgtcagcaaacaactacctcaatctcacgacacacccccgggtagtcgaggctgcagtggaggcaaccaggaagtatggcgcgggttccgggtcagttcgagcaatagcaggaacaatggacctccatctggaagcggaacggacctgtgcagaattcaaggaagtcgaggcatcactgatttactctgcaggatataccgcgaacgtcggactaattcccaccttggtgagggggccccaagacgtaatcatctcggatgagctcaaccatggctcaataatcgatggagtcagactgacaaaggcatccagagcggtttacccccacaacgatatggaagctctagaacgagtcctcagagagaacaaggactcggaaaggaaactaatcatcaccgacggagttttcagtatggatggcgacatcgcccctcttgacgagattgcagatctggccgaggaatatggggctatgacattcgtcgatgactgccatggagagggtgttctcggcgaaggtagggggatagtttcacacttcgggcttcaaggccgggtaaccttcgaagtagggtcattctccaaagcactcggtgttcaaggaggcatacttgcaggaagcgatgatgtaaggacacatgcactgaatcacagcagatcatggcttctctcaggaagccagccaccaggtgtcgcggccgctcagaaggctgctatagaggtccttatgtcagagcctgagcatgttcggaggctttgggagaacaccacatacttcatgagatgaa

SEQ ID NO: 233181 - DNA, 858 bp, Unknown
  Bacterial polypeptide expressing nucleotide sequence isolated from the Sargasso Sea
caacaccgagcccaaggacatgtacctgtcgcgcgtggcggccatcaacggcggctgcgccgagggcacgcccgcattcaacgtcaaccgcctgtgcggctcgggcctgcaggccatcgtcagcgccagccagtccatcctgctgggcgacaccgacgtggccattggcgccggagccgagaacatgagccgcgtgccctttgccagcctgaacatgcgctggggcgcccgcatgggcgacaccaagatggtggacatgatgatcggcgcgctgcacgaccccttccacaacatccacatgggtgtgacggccgagaacatcgccgccaagtggggcatcagccgtgaagaccaggacaagctggccgtcgagagccacaaccgcgccgaacgagccacgcaaaacggactgttcaaggaccagatcgtgcccgtcaccctgaagagcaagaagggcgacgtgttgtacgccaccgacgagcacttccgccccggcgccacgatggacgacctggccaagctcaagcccgtgttcctcaaggaaaacggcacggtgaccgctggcaacgcctcgggcatcaacgacgccgccgccgccgtggtgctgatggaagccggtgccgccaaggcccgtggcgccaagcccctggcccgtctggtggcctatgcccatgcgggtgtggaccccaagtacatgggcatcggccccgtgcccgccacgcagctggcgctgaaaaaggcaggcctcaccgtcaacgacctggacgtgatcgaagccaacgaagccttcgccgcccaggcctgtgctgtgaccaaagacctgggtctggaccccgccaaggtcaaccccaacggctc

SEQ ID NO: 233182 - DNA, 630 bp, Unknown
  Bacterial polypeptide expressing nucleotide sequence isolated from the Sargasso Sea
aaaaaagagccaaagaagctctggatctggggttatttaaagaacaaatcaagccaatagaaataaaaactaggaagggtataactatttttgataccgacgaacatttaaaacctgaaacaactctagaaactttgtcgggcttgaggtcagccttcaaaaaagatggttctgtaaccgctggaaatgcgtctggtattaatgatggtgcatcagcattaatcttagcaaatgaaaaacaagcacaaaaaactaaacctttagctaggatagtttcttatggctttggaggtgttgatccagatgaaatgggcatgggtccaatacctgcttcaaaaatggctttaaacaaatcaggattaaagttagatgatttagatcttgttgaatcaaatgaagcttttgctgcgcaagcttgtgcagtcaacaaacaactaggtttagatccaggtaaagtaaacgttaatggtggcgccattgctcttggtcatcctgtaggtgcaactggttcaataataatgactaaattaatctatgagcttagaagaagaaaaggaaaatatggtttagctactatgtgtattggtggtggtcaaggtatagctgtaattattgaagctatatattaat

SEQ ID NO: 233183 - DNA, 777 bp, Unknown
  Bacterial polypeptide expressing nucleotide sequence isolated from the Sargasso Sea
acccgctgatgaaggcgcagtacggcgtcgacccgatgccggtcaccggtgacaacgttgccgaagactacggcgtcagccgcgccgatcaggacgccttcggcctgcgcagccagcagcgtgcggcggcggctcaggaaagcggctactacgccgaggaaatcgtcccggtggtgatcaagaccaagaaaggcgagatcgtcgtcgaccgtgacgagcacccgcgtgccgacaccaccgccgaaggcctggccaagctcaagccggtcaacggcgaaggcaagaccgtcaccgccggcaacgcctcgggcctcaatgatggcgcctcggcgatgatcctggcctctgccgaagccgttcagaaatacggcctcaagccgcgcgccaaggtgctgggcatggccagcggcggcgtggcgccacgcctcatgggcgtcggcccggtgccggcggtgcgcaagctgctgactcgcctgaacctggatatcaatgccttcgacgtgatcgagctcaacgaagctttcgccgctcaaggcctggccgtcacccgcgacctcggtctgccggacgacagtcccaaggtcaacccgaacggcggcgccattgccctcggccacccgctaggcatgagcggtaaccgcctggtgctgactgcggctcatcacctagagaagaccggcggcaaactcggcctggcgaccatgtgcgtgggtgtcggccaaggcctggcgctggccatcgagcgggtgtgtcccgaagcaagttcgggcgcgtagg

SEQ ID NO: 233184 - DNA, 613 bp, Unknown
  Bacterial polypeptide expressing nucleotide sequence isolated from the Sargasso Sea
ggacgatttgcgaaagaaatcactgcggttacttatcaaccaagaaaaggcgaaccggtcgtaattgatactgacgaacatttacgcccacaaactaccctcgaagcgctggctagcttaaaggcgccgttccgcgacaatggctcagtaactgctggtaatgcttccggtattaacgatggggcagcagcaatgatagtggctggcgaagccgctgtagaaaagtataatttacaacctgtggcacaaattaagggcatggcaacggcgggggtcgaaccttcagtaatgggtattggaccggtacctgctgtacgcaagttattggcaaaacaacagcttagtcttgatgacattggaattattgaactcaatgaagcgtttgctgcacagggccttgcttgtatgcaggaactcggtatcgccagtggtgatccgcgagttaatcccaacggtggtgcgatagcactaggtcatccgctgggaatgtctggtgcccgattattacaaactgccgcattgcagttgcagcaaaccaacgcagattacgcgctctgtactatgtgcattggcgttggtcagggcatcgcaacacttttaaaacggatatagg

SEQ ID NO: 233185 - DNA, 744 bp, Unknown
  Bacterial polypeptide expressing nucleotide sequence isolated from the Sargasso Sea
ttggcgcattgaattgcccttttggtactggtcatatgggtgtaacagccgagaatgttgcgcgcgaacaaaatgtttctcgtcgtgagcaagatgagtttgccttagaaagtcaaaaaagagctgcatcggctgcagcaaataatttgtttgatagccaaattaatccaatagaaataaaagtaaaaagggacttggtcccattcgaaaaggatgagcaccccaaagctacaactttggacgatttagcttccttgcgcccagtttttgagaaggacggtacagtaacagctggaaatgcatctggaataaatgatggtgctgctgcaatcgttttgtcatctgcagaagctgtcgaaaaatatggtttaaaacctaaggctaggattttaggttatggacatgctggtgttagacccgaggttatgggtgtcgggccaattcccgcagtgcaaaacttattgaaaaaaactggtctcgttgtatcggattttgatgttatcgaaagtaatgaggcttttgcggcgcaagcaattgcggttaatcgagggctcaatttagaccctgctattgtgaacccgaacggtggagcgatcgcattaggccacccagttggtgctacaggagcgataattacgctgaaggctctatatcagctcgaaaatataaatggaaaacgagctttgattacgatgtgtattggaggtgggcagggaattgctctagctatagaaagaatttaaa

SEQ ID NO: 233186 - DNA, 879 bp, Unknown
  Bacterial polypeptide expressing nucleotide sequence isolated from the Sargasso Sea
ttcttcttaatgaatcagtaaaaggtctaaatattatacctgatggaatttatgttgatgttacatatggcggaggtggtcattcaaaagttatcctaaaaaaactcggaccaagaggaaggctaatagcatttgatcaagatattgatgctcataaaaataaaattactgataatagattaaaactaattgaatcaaactttaaatttctcaacaaccatcttaattatttgcatatagctcagatagatggattgcttgcagattttggagtttcttcatatcaaattgacacaaaaaatagaggtttctcaataagatttgatgctaagcttgatatgaggatggaccaatcccaggatattgatgctcaatttattataaataaatatgatagagaaaaactagaaaatatttttcaaaattatggtgagttaaggaactatagaaggatagtagatataatagtttcagagagaaaaaacaatgaaataaaaacctcaggagatcttaaaagaattctagagcccttatcaaatagttcagaaaaaaacaaatttttagcaaaagtctttcaagcaataagaattgaagttaatgatgaaataaatattataaaaacacttttgattcaatcttcaaaaatattgaaaaaaggaggaaggctagtttgtatatcatatcattcattagaagatagattagtgaaaagatttattcaaaacggaacatttgaaagtgatgtaatatcagatatctatgggaataaagatttaaaatttaaaaaaattggaaatctaattagtccagataaagaagaagttagattaaataatagatctagaagtgcaaaattaagagtagcggaaaaaatatgaa

SEQ ID NO: 233187 - DNA, 770 bp, Unknown
  Bacterial polypeptide expressing nucleotide sequence isolated from the Sargasso Sea
agttacaattgctacccgtgaaggcggcgaagtcctcaatttttgctccaacaactatttgggcttatcggataatgcagaaattaaaggtgttgcacaagatgcattggaaaatcatggttttggtatgtcttctgttcgctttatatgcggtacacaggacatccataaggaactcgaacaaaagatttcaaaatttttcaacaccgaagacaccattctgtacacctcatgttttgatgctaatagcggtctatttgaaacattattaggaccagatgatgcaataatatcagataccttgaatcatgcatctattatagatggaattcgactctgcaaagctcaacgatttcgctataataatagtgacatggctgatttggatatcaaacttcaggcagcgcaggatagccgcctgcgaatgattgctacggatggcgtattttccatggatggctatattgccaagctagatgaaattaccgaattggcaaataaatatgacgccttggtcatggtagatgactctcacgccactggatttataggccagacaggtcgtggttctgcagaacatcatggcgtgatggataaagtggatgtatggacttctactttgggaaaggcgttgggaggtgcttcagggggttttacgaccgggagacaagaaattatcgatatgctgcggcaactctcacgaccctatcttttttccaataccttagcgcctagtattgtagctgctagtttaaaggtgtttgatatgc

SEQ ID NO: 233188 - DNA, 870 bp, Unknown
  Bacterial polypeptide expressing nucleotide sequence isolated from the Sargasso Sea
gtttggttttggtatggcatcagttcgatttatctgcggaacccatgaagtacatgaaaagcttgaaaaacaaataagtcatttcttgaacacagaagacaccatcttatatagttcgtgttttgatgctaacgctgggttgtttgaaactctccttgggcctgaagatgctatcatctctgatgagttgaatcacgcaagtatgattgatggaattcgactttgtaaagcaaaacgctttcgttacttaaataacaacatgaaagacttagaagaaaagcttaaacaagcctcaagtgctagatttaaattgatttgtaccgatggagtgttttctatggatggtacggttgcgaaccttcctgagatttgcaaccttgctgacgaataccaagcccttaccatggttgatgattctcatgctattggttttattggacctaatggtcggggtacccctgaagcttttaacgtacaaaacaaaatcgacatcataacaggaacactgggaaaagcccttgggggagcttctggtggatacactagcggcaaaaaggaagtgatccagtggcttcgccagcgatcgaggccttacttattttctaactccattgctcccattatagctcacgtaggatctattgtttttgaaagacttgaatcatctcatagccctagacaaaaattaatggaaaacacgaactatttccgcaaaaatataaaagcattaggatttgatattatagatggtaaccacccgattattcccattatgattggagatgcggaaaaagcaaaaaaaatggctgaccttcttttgcaagaaggcatctacgttataagcttttcttatcctgtggtaccaaaaga

SEQ ID NO: 233189 - DNA, 730 bp, Unknown
  Bacterial polypeptide expressing nucleotide sequence isolated from the Sargasso Sea
tggtgtcgattcgatgccggagaccgcagaaaacgtcgccgttgaattcggtatcagccgtgcggatcaggacgcgtttgcgatgtcgagccagaaaaaggccgcccgcgcgcagcgtgatggcaccttggctcaggaaatcgtgggcgttgaaatcgcgcagaagaaaggcgaccccgtgcacgtgacgctcgacgagcatccgcgcgaaacatccctcgaaagcctgggcaagctcaagggcgtggttcgccccgatggcagcgtgaccgctggcaatgcctcgggcgtaaacgacggcgcgtgtgcactactgctcgcgagccaggaagccgccgatcaatacggactgcgtcgccgcgcacgtgtagtgggtatggcgacggcgggcgtggaaccgcgcatcatgggcatcggcccggcgccggccacacaaaagctgttgaagcaactgaacatgacactcgagcagttcgacgtcatcgagttgaacgaggcgttcgcttcacaagggcttgccgtcctgcgcacactcggtctgcgcgacgacgatccacgcgtcaatccgaatggcggagcgattgcactcggccacccgctcggagcatccggcgcgcgcctgatcaccactgcgctttaccaactggaacggatcaacggtcgctttgcgctttgcacgatgtgcatcggcgtgggtcaaggcatcgccctggtaatcgagcgggtctga

SEQ ID NO: 233190 - DNA, 307 bp, Unknown
  Bacterial polypeptide expressing nucleotide sequence isolated from the Sargasso Sea
gatgttgattacatggaaaataaacgaagcgtttgctgcacaagtacttgcaaatatcaccgctttttcttccaatcacttttctcagcgatatttaaaccaagcaaaagccctaggtagcattgatcaagataaacttaatattaatggcggggctattgctttagggcatcctttaggaatgactggcacacgtattgtattaaccttgctaaattccatgaaacgcgataataaacagcatgggatagcaagtttgtgtattggtggcggacaaggcgctgcgatttggctggagagcaactaa

SEQ ID NO: 233191 - DNA, 867 bp, Unknown
  Bacterial polypeptide expressing nucleotide sequence isolated from the Sargasso Sea
actgggaaaacttagaagaagttttttatggtaatgccaatcaagctggtgaagacaatcgtaacattgctagaatggctctacttttagcagatcttccgcataccgttccaggaatcacgctcaacagattatgtgcctcaggtatggaagctatatcaagcgcatcaagaatgataaaatctaatgaagcagatatgacagttgcaggaggtgcagaaagcatgagtagagctccttttgtcatgcctaaagctagttcagcattttctaggaatgcagaaatttatgatacaactataggttggaggtttgttaacccaaaaatgaaaactaattacggtatagattcaatgccagagactgctgaaaacgttgcagaaaaatatcaagttagtagagatgatcaagataaaatggctctttctagtcaaataaaggcttctactgcaattcagaatggaaggttggctaaagagattactccggttgaaattccacaaaaaaagggtatggctctaatatttgaaaaggacgaacatcctaggagcacatcaattgaaaaactttcttcacttcctacaccatttcgaaataacggtactgttacagcaggaaatgctagtggtgtaaacgatggtgcggcggcaatgataattgcaagtgaagtaggaataaaacggaatcatttaactgctagagcaagaataatttctgcagctagctctggggttgaaccagcattcatgggtattggacctgttccagcttcattaaaagcacttaaaatagccgggattaaaattaacgatattgacgtaattgaaataaacgaggcatttgcagcgcaaggttggctagtttaag

SEQ ID NO: 233192 - DNA, 286 bp, Unknown
  Bacterial polypeptide expressing nucleotide sequence isolated from the Sargasso Sea
aacctgagcaagattcgattgaacgaaattggggtgatcgaaatcaacgaggccttcgcagcacaggtgctcacagtgagcagggaacttggaatggaggatgatgatccccgaatcaatcccaacggaggagcgatcgccctgggacacccccttggcatgagcggggcccgcctggttttaaccgcagtcgaggaactccatcaacgccaggagaaacttgcactttgcagcatgtgcatcggcgtcggtcagggtatctcgatgctactggaacgggtatagg

SEQ ID NO: 233193 - DNA, 475 bp, Unknown
  Bacterial polypeptide expressing nucleotide sequence isolated from the Sargasso Sea
atggaaaaaggtaccgtaactgcaggaaactcatcaggtttaaacgacggtgccgctgctttagttctgagtaccgctgcagccgctggatctaatggattaaaagttaaagcaaaaatattaggttattctcattcaggagtaagacctgaagtgatgggtataggtccaataatcgctgtaaaaaaactttttgaaaaaactggcttatgtgaaaaagattttgatgtaattgaaagcaatgaagcttttgcagctcaagcgtgtgcagtttctaaagaattgaaactaaatccagaaaaagtcaaccctaatggtggagcaatagccttaggtcatccaattggagcaacaggagcaatcttaacaattaaagcaattcatgaattagaaagaattgacggaacttttggattgataactatgtgtataggaggaggtcaaggtatatctctagcaattgagagagtttaat

SEQ ID NO: 233194 - DNA, 191 bp, Unknown
  Bacterial polypeptide expressing nucleotide sequence isolated from the Sargasso Sea
tgagtacgcagttaaaaaatcaggcatcaaattaaatgatattggtttagttgagataaatgaagcatttgcctcagttgcaatggcttggcagaaagagatggaatatccaatgaatcaaatcaatgtaaacggaggggcaatagctcttgggcatcctcttggtgcaactggcgcaagattgatgacca

SEQ ID NO: 233195 - DNA, 886 bp, Unknown
  Bacterial polypeptide expressing nucleotide sequence isolated from the Sargasso Sea
tggcagtggcatgagagctactatggacggattatctaaaatctattcaggtgagtctgaattattaattgtaggtggtcaggagagtatgtctagagctcgtcatacttatttaagtaggacaggtgaaaataaattgggaaataatgtttttattgacactttagtgaacgatggactaacagacgcattttcaaaagagcatatgggcataactgcagaaaatgtttcacgaagatatacagtcactagacaagaccaagatcattttgcttttcagtcataccttaaaacatataaggctattaaaaataattattttaaaaacgaattgattaaatcgccctataaagatgaggttcgcaaagacactactcttgttaaactagctcaacttaaaacagtctttaaaaagtctggaacagttacagctggaaatgcctcgtcactaaatgatggagccagttttatagccttagcttctgagaattatataaattctaataaaattaaacctatagcaaaaattttatcttgggcttcatcagccggtaaccctgattatatgggagtcactcctataacggccatacagaaattaatgaagaaaatgggtgttaatattggttattttgatctcgttgaaattaatgaggcatttgctgcaacctcagttgcagttcaaagatcattaaaaatagatccaaataaattaaatatcgctgggggagctattgcacttggtcacccaattggttgttctggcgcgagaatagtcacaaccttggctcatcaattaagacgaacaaaacaaaaaattggtgtcgcgagtatgtgtattggtggtggacaggggctagcaattgccattgaaaaacttaactaa

SEQ ID NO: 233196 - DNA, 382 bp, Unknown
  Bacterial polypeptide expressing nucleotide sequence isolated from the Sargasso Sea
taggagtaacgccgttagcgaaattgtagcttctggagtttcttccctaaatccagaggtgatggggttaggtccaattgatgcaattaaccagacgctacaaagagccggtatggcaattagtgacatagacctcgtcgaaataaatgaagctttcgcagcgcaagttattccttcagcggaagaaactggaatagaccatgacaaattgaatgtaaatggcggagctatagctttgggtcatccatttggaatgacaggtgctcgaataatgacaacgcttataaatggactggaagacgcagataaagaattcggacttgaaaccatgtgtgttgggggcggacaaggaatggcgatgatagttcagcggatgagctga

SEQ ID NO: 233197 - DNA, 868 bp, Unknown
  Bacterial polypeptide expressing nucleotide sequence isolated from the Sargasso Sea
tgtttttggtaatgttatacatacagaacccagagatatgtatgtgagtagagttattgcacttcaggctggaatggacaaagcatctgctgcgttgactgtaaatagactttgtggctctgggcttcaggcaattgtaagtgcttctcaaattctcatgcttggagatgcttcagttgcaatggcaggaggtgtagaggttatgtcaaatggtgcacacattgttcaagggtttcgatggggttctagaatgggtgatggacaagttcatgatatgatgttaggtgcacttcatgatccttttggtcatggacatatgggtatcactgctgaaaatatttctagtagataccaaattagtagagaaatgcaggatgaatttgcgttaactagtcaaaaaagagcatatgatgctattggaaatggagcttttaaggatcaaattctacctattgaaattaaaacaaaaaaaggaattgagatttttgaaatagacgaacacccaaaaccagaaactagtatggaaacattaacaggtctcagaactgcttttaaaaaagatggtgtagtaacagctggtaatgcttcaggaattaatgacggagcttctgctttaatactcgccaatgaagaaaaggcaaaaaaaggtaagccattagcaagaatagtttcatacggatttggaggtgttgatcctgacgaaatgggtatgggaccaatacctgcgtcaaaaatggcgttaaataaaggtcaattaactgttgcagatctagatttaattgaatctaatgaagcttttgctgctcaagcatgtgccgttaataaacaattaggtcttaatcctgagatagttaatgttaatggagga

SEQ ID NO: 233198 - DNA, 949 bp, Unknown
  Bacterial polypeptide expressing nucleotide sequence isolated from the Sargasso Sea
atgcgcagcagcgcttttctgcaacacctacaacaacaaatagatgatgttaaagcagaagttttatacaaagcagaacgtattattacgtcgcagcagcaagccagtgtcgatgttggcggcgagcaggtactgaatttctgcgccaataactacctggggttagcaaaccatgctgatcttatcgccgccgcgaaacacggcctggacagccatggttttggtgtggcatcggtacgttttatctgcggtactcaggatattcacaagcagctggagcagagcatcagcgagtttcttggcacagaagatactattttatattcctcttgttttgatgcgaacggcggcttatttgaaaccttgcttggtgctgaagacgcgattatttccgatgcgttgaaccatgcgtccattatcgatggcgtgcggttgtgcaaagccaaacgttaccgctatgccaataatgatatggccgagcttgaagctcagctaaaacaggctgatgccgatggtgcacgctttaagctgattgcgaccgacggtgtgttttcaatggacggtgttattgctgatttaaaagccgtatgcgatttggctgataaatatggcgccatggtgatggtagatgacagccacgccgtcggctttgtcggtaaacacggtcgcggcacacatgaatactgtggtgtgatggacagagtggacattattaccggtactttgggtaaagcgctgggtggcgcatcgggcggttatacctccggtaagaaagaagtgattgaatggctgcgccaacgctcacggccttatttgttctcaaactcgctggcaccgtcgatagcatcggcgtcgatcaaagtacttcagatgttaaagcaaggcgacgacttaagagaaaagttatggcagaacgccgattacttccgcgagaaaatgtcagccgccg

SEQ ID NO: 233199 - DNA, 676 bp, Unknown
  Bacterial polypeptide expressing nucleotide sequence isolated from the Sargasso Sea
atgtctgcggcatttatttctcatttgcaatcgcaaattgaagccacaaaagaagatggtttgtacaaaaaagagcgtgttatcacgtcgcaacaacaagcagatattggtgttgctggtggtgagcatgtcataaacttttgtgccaacaactaccttggtcttgcaaacaacgaaagcttaattgaagcagcgaaagaaggcttggacagtcatggttttggtgtagcatctgtgcgattcatttgcggtacacaagacattcacaagcagctagaagcttctatcagcgacttcttaggtacagaagataccattctttatccgtcttgcttcgacgctaatggcggtttatttgaaactctgcttggaccagaagatgccattatctctgacgcgctaaaccacgccagtatcattgacggcgttcgcctttgtaaagctaagcgctatcgttacgccaataacgacatggccgcgttagaagagcagctaaagcaagccgatgccgacggtgcgcgctttaaaattatcgctactgacggtgtattctcaatggacggtgtcattgccgacctcgcctcaatatgtgaccttgccgacaaatacgatgccatggttatggttgacgactgccatgcaacaggcttctgggtgaaaacggtaaaggcagcca

SEQ ID NO: 233200 - DNA, 863 bp, Unknown
  Bacterial polypeptide expressing nucleotide sequence isolated from the Sargasso Sea
ccttcttgttttgatgctaatggcggggtttttgaggggctattaacttcctcagacgctataattagtgatcaattaaatcatgctagtattattgatggcataaggctttgtaaagccaagcgttatagatatcaaaataataatatgctagatcttgaagaaaagctaaaatcagctgattcagatggctcaagatttaagttaatagttacagacggagttttttctatggatggaatcatagctgatttaaaatctatatgtgatttggctgacaaatataatgctttagttatggttgatgattctcacgctacagggtttgttggagataaaggtataggtactcctgagtactgcgaggttttaggtagagtagatatcttaaccagtactttaggaaaagcacttggtggtgcaagtggaggatttgtaagtgcatctaaaaatatagtagatattttaaaacaaagagcaagaccgtatttattttctaattccttggctccaatattagctgcaactagtttaaaagtattagatatagtgtcagagaatgattatttaagagaaaaattaaagttaaatagtgccaaatttagaaaaggactttcagatgccggttttgatttagttccaggtgagcatcctattattccagttatgttatatgatgaaaaattagcatctcaaatggcagagagattattagaccatggtgtttatgtgattgctttttcttatccagtcgtacctaaagggcttgcaagaatcagaactcaaatgtcagcatctcatagtgaagagcaaattgataaagcagtaaatgctttttgccaagtaggtaaagaattaaaaat

SEQ ID NO: 233201 - DNA, 709 bp, Unknown
  Bacterial polypeptide expressing nucleotide sequence isolated from the Sargasso Sea
tcacactattttaatagcgacgatactattctatatacttcttgttttgatgcaaacggtggtctttttgaaactctgcttacagataaagatgctgtgatttctgattcacttaatcatgcatcaattatcgatggaataaggctttgcaaggcggaacgatttcgttacaaaaatagcgatatggaggatttagaaaaacaattgcgtaattcgcaaaatgcgaatattcgaatgattgcgacggatggggttttctctatggatggttatatagcaaagctggaccaaataactgctttagcaaaaaaatatgatgctttggtgatggttgatgattgtcatgcaacaggatttctaggtaaaactggaagaggttctgcggaatatcacaatgttatggataaaatcgatctttggacttctacgcttggcaaggcgcttggaggagcctctgggggatttactactggtaaacaagagctgattgatctacttcgtcagcgatctcgaccgtatttattttcaaatacactttctccatctatagcttccgcaggaattaaagcctttgaaatgctttctgattcaacatcactaagagacaagcttgaaaaaaatactaaatactttcgaagtgagattagaaagattgggtttgacattaaaaagggcgagcacccaattgtgccaattatgatttacgatg

SEQ ID NO: 233202 - DNA, 328 bp, Unknown
  Bacterial polypeptide expressing nucleotide sequence isolated from the Sargasso Sea
accagatacaagtcttcttcaccaaccaagcagcgctataaatgttgcattggactcagctggaatgaaagtaagtgatttggatctttttgaaataaacgaagcatttgctgctgttgcacttgcctctatgaatcatcttggtctaagtgacgaaattgtaaatgtgaacggcggagcgatagctcttggacacccaatcggaatgtcaggaacccgagttgttctaaccctcattcacgaactgcaacgccgaggcggaggtttaggcgctgccagtctttgtggcggcggcggtcaaggcgaagcactaattctgaaagtttaa

SEQ ID NO: 233203 - DNA, 766 bp, Unknown
  Bacterial polypeptide expressing nucleotide sequence isolated from the Sargasso Sea
attgggagaaaccgcagaaatactggcacgcgattttcagatctcacgcgaagagcaagacgcatacgctcgacaaagtcatgcacgtgctatcaaggcctctgacgacctgaatcaggaagtctgcccaatatttccaggcacggggtcacgaaaattagtcgagcgagacaacggtatgcgaactcccgatcaactgaaaaagcttggtcggctcagacccgtatttgatccggaaaccggaacggtcaccgctggtaacgcctcccagatcaccgacggagcagttgctttgctggtagcctccaaagatgctgcgcaacggcttggcctgccagtactcggatatttgcgagattggcaatattccggatgcgctccagatcgtatgggactggggccagtctatgcgatgaacgagttgactgatagaatcggcatttcaatcgatgagattgatctcttcgaaattaatgaagccttcgcatcccaaatgcttgctgtgcttaaggcctcagaatctgcggaatttgctcgtaaaaatttgcatcgctctcagccattgggagccattcccatggaaaagcttaacctcaatggaggtgcgattgcactcgggcatccggtcggagccaccggtagcaggctagtcttaaccgcattacaacagttaaaacagcgcggccatgaatgtgcgataacctctgcctgtattggaggaggacaaggagccgcgctctatctggaaaggaacttgaaatcatga

SEQ ID NO: 233204 - DNA, 1123 bp, Unknown
  Bacterial polypeptide expressing nucleotide sequence isolated from the Sargasso Sea
gggcctgtacaaagctgaacgagtgataagctcccatcaacaagccgccgtgactgtaggtcatgagcaagtactgaatttctgcgccaataactacttaggtttagccaataacccggaccttattaaagccgcgcaacaaggcctggattctcacggttttggtgtggcctctgtacgttttatctgcggtactcaggatattcacaaagaactggagcaaaaaatcagtggctttttaggcactgaagacaccattttgtattcctcttgttttgatgccaatggtggtttattcgaaaccattttaggcgcggaagatgcggtgatctccgatgcgttaaaccatgcctctattatcgatggcgtgcgtttatgcaaagccaaacgctaccgttatgccaataacgatatggccgaattagaagcccagttaaaacaagcagacgccgatggcgcccgttttaaactgatagcgacagacggcgtattttcgatggatggcgtgattgccgatttaaaatccatttgtgatttagccgacaaatacaatgcactggtgatggtggatgacagccacgctgtaggttttgttggtaaaaatggccgcggcacccacgaatactgcgacgtgctggaccgtgtggatatcatcaccggcactttaggcaaagctttaggcggcgcttccggtggttacacttctggtaaaaaagaagtgattgaatggttacgccagcgttcacgtccttatttattttctaactctttagcaccttctattgttacagcctctattaaagtgctggatttactggccaatggtgatgcactgcgcgctaaattatgggacaacgtcagttacttccgcgaaaaaatgtcagctgcaggttttaccctggcaggcaaagatcacgctattattcctgtgatgttaggcgatgccaaagtggccgctgaaatggcgcgccgtatgctcgctgaaggcatttatgtagtgggattctcattccctgttgtgcccaaagatcaggcgcgtatccgcactcaaatttcggctgcacatagtaaagaatatttggataaagccatcagcgcctttatccgtattggtaaagaaatg

SEQ ID NO: 233205 - DNA, 1004 bp, Unknown
  Bacterial polypeptide expressing nucleotide sequence isolated from the Sargasso Sea
tgcccgcatggcgctgctgctggccgggctaccgcaaacggtgccgggcagtaccattacccggctgtgcggctccagtcttgatgcgatcggcgtcgcagcgcgcgccattaaaagcggcgaaactcagctgatgatcgccggcggcgtggagagcatgtcgcgcgcgccgtttgtgatgggcaaggcggagaatgccttcagccgcaacatgcagattgaagatacgacgatcggctggcgctttatcaacgcccggatgaaagtattgtacggcgtggattcgatgccggagaccgccgagaacgtcgccgctgattttgccgtttcgcgtgccgatcaggacgcctttgcgctgcgtagccagatgcgtaccgccgcggcgcaggaggccggccggtttgctgatgagctgataacggtctctatcgcccagcgaaaaggtgatccgctgctgtttacccgcgatgaacacccgcgcagcacttctgcggaagcgctggcgaaactcaagggggtggtgcgcccggacggctcggtgaccgcggggaacgcctccggggtgaacgatggcgcctgtgccttgctgttggccagcgaatcggcgctgagggccaacgatctgcaccccctggcccgggttgtcggcgtggcgacggcgggtgtggcgcctcggattatgggcttcggaccggctccggcggtacgtaaagtgctggcgcagaccgggctgacgctggagcaaatggatgtgattgaattgaatgaagcgttcgccgcacaggcgctggcggtgacccgcgatttagggctggccgacgatgcgccccacgtcaatcccaacggcggcgccattgcgctgggccatcctctgggggcgtcgggcgggcgtctggcgatgaccgccgcgtatcaactacgtcgcaccggtgggcgctatgcgctgtgtaccatgtgtattggcgtcggtcagggcattgcgctgattattgaacgtgtttaag

SEQ ID NO: 233206 - DNA, 886 bp, Unknown
  Bacterial polypeptide expressing nucleotide sequence isolated from the Sargasso Sea
ggcgaggcaggtctgatgatcgcgggcggtgtggagagcatgagccgcgcccccttcgtcatgcccaaggccgagtcggccttcagccgcaacaacgcggtgtatgacacgacgattggctggcgcttcatcaacaagctgatgaaggaaaagtacggtgtggactccatgcccgaaaccgccgagaacgtggctaccgacttcaagatcgagcgcgaagcccaggaccacatggccctgcgcagccagctcaacgccgtggctgctatcaaggccggccacttggcgcgcgagatcgtgcccgtgcacatcccgcaaaaaaagggcgacgccatcatcgtcagccaggacgaacacccgcgggagaccagcctggaagcgctggccaagctcaagggcgtggtgcggcccgacggcacggtgacagcgggcaacgccagtggtgtgaacgacggcgcctgcgcgctgctgctggccgatgaagccaacgccgccaagtacggcctcaagccccgcgcccgcgtggtgggcatggccgtggccggtgtggcgccgcgcatcatgggctttggccctacgcccgccacgctgaaggtgctggcgcaaacgggcctgaccatcgaccacatggatgtgatcgaactcaacgaagcctttgccgcgcaaggcctggccgtgctgcgcgcgctgggcatcaaggacgacgacgcgcgcgtgaacgcctggggcggcgccattgcgctgggccacccgctgggtgccagcggcgcgcgcctggtgactaccgccgtcaaccgcctgcacgaacacgccgggaaatacgcgctgtgcaccatgtgcattggcgtgggccagggcattgccgtgattctggagcgcgtgtgac

SEQ ID NO: 233207 - DNA, 1210 bp, Unknown
  Bacterial polypeptide expressing nucleotide sequence isolated from the Sargasso Sea
atgaatgaagcttttatttgtgatgcaattagaacacccataggaagatacggcggggcgctatcctctgtaagaactgatgatttagcggctataccaatctccgagttaatgaatagaaacacgaatgttgattgggaaaaaattgatgacgttatatatggatgtgtaaatcaatccggtgaagacaatagaaatgttgctagaatgggttctttactcgccggaattcctgacaaggtgtctggagtaacggtaaatcggctttgtggttccggaatgtatgccgcaggtagcggtgcccaagctatacggagcggagaagctaatttattgatcgtcggtggagtagaaagtatgtcacgctcaccgtttgtgattcccaaatcagaaacaggtttttccagaagtacggaaatatatgatacgactattggctggagatttgtaaatcctaaaatggaacaactttatggcactgactccatgggggaaacagcggaaaatgtagctgaggaacataatattaatagagaagaccaagatttgtttgcggctaacagtcaaagaaaaacagaagaagcacaagctgacggtcggttggctgaagagatagtcccaataacaattaaacaaaagagaaaagatgatactgttgtcagtgttgatgagcatccaagagctgggacaaattatgaaaaactatccaatttaaaaagtgcctttaaggaagatggcacagttacagctggtaattcttccggtgtaaatgatggggcttgtgcaatattaattgcatctgaaaagggaataaaagaacataaactcgaaccaaaagctagaatcttaggaatggccagtgcgggtgttcctccaagggtaatgggaatagggccaatcccttctacgaacaaactattagaccgactaggcctaacaatagatgatctcgatataattgagctcaatgaagccttcgccgcacagtcgctaggcgttctaaggggcctaaatattaaagataatgacgaaagggttaatccgcagggtggagctatagctcttggtcacccgctaggtgctagcggagcaaggcttattaccaccgctacctaccaattactcaagggaaacgggtccaaagctctttgtacaatgtgtgtgggagtgggtcagggtatttcgagtataatgaaaaagtttaattaga

SEQ ID NO: 233208 - DNA, 1225 bp, Unknown
  Bacterial polypeptide expressing nucleotide sequence isolated from the Sargasso Sea
cctgcgggcgcgaacgaaccggagtgagacgatgagcaatgcagcgaaagaagtcgtggtggtgagcggtgtccgtaccgcgatcggtgatttcggcggcagcctgaaggatttctcgccgaccgacctcggtgcgaaggtggtcgccgaagtgctgtcgcgggcgaacgtgccgggcgacgcagtcgggcatgtcgtgttcggccacgtcgtgaacacagagccgaaggacatgtatctcgcgcgcgtcgcggcgatcaacggcggcgtggcgcagcacacgcccgcgctgaccgtgaaccgcctgtgcggttcgggcctgcaggcgatcgtatcggccgcgcagacgatcatgctcggcgacgccgacatcgcgatcggcggcggctcggaaagcatgagccgcgccccgtacaccgtgccggccgcgcgcttcggccagcgcatgggtgacggcaagctcgtcgacatgatgctcggcgcgctgcacgacccgttccagacgatccacatgggcgtgacggcagagaacgtcgcggcgaagtacggcatctcgcgcgacgcgcaggatgcgctggcgctcgaatcgcatcgtcgcgcggcgcgcgcgatcgcggaagggcgcttcaaggaccagatcctgccgatctcgatccgcacgaagaagggtgaagttgcgttcgacaccgacgagcacgtgcgcctcgaagccagcgcggatgatttctcgaagctgaagccggtgttccagaaggagaacggcacggtgacggccggcaatgcgtcgggcatcaacgatgcggctgccgccgtgctgatgatgagcgcggacgccgcgcgcgcgcagggcgtgaagccgctcgcccgcctcgtcgcgtatgcgcacgcgggtgtcgatccggcgtacatgggcatcggcccggtgccggccacgcagaaggcgctcgaacgcgcgggcctgaagatcggcgatctcgacgtgatcgaggcgaacgaggcgttcgcggcccaggcgtgcgcggtcacgcaggagctcggcctcgatccggcgaaggtcaacccgaacggctcgggcatctcgctcggtcacccgatcggtgcgaccggtgcgctgatcacggtcaaggcgctgtacgaactgaagcgcatcggcgggcgttacgcgctcgtgacgatgtgtatcggcggcggccaggggattgctgcgatcttcgagaacatctga

SEQ ID NO: 233209 - DNA, 1246 bp, Unknown
  Bacterial polypeptide expressing nucleotide sequence isolated from the Sargasso Sea
gttggcggcacagcgcacgcagcacatcaactggagacatcacatgaccgaagcattcctgtgcgacgcgattcgcaccccgatcggccgctatgcgggttcgctgtcgtcggttcgcgccgacgatctgggcgcggtgccgctcaaggcgctgatggagcgcaataaagacgtcgactggagcgcgatcgacgacgtgatctacggctgcgcgaaccaggccggtgaagacaatcgcaatgtcgcgcgcatgtcgctattgctggccggtttgccgcaagatgtgccgggctcgacggtgaaccgcctgtgcggttcgggcatggacgccgtgggcattgccgcgcgcgcgatcaaatcgggcgaggccgcgttgatgctggccggcggtgtcgaaagcatgagccgcgcgccgttcgtgatgggcaaggcaagcagcgcgttttcgcgccaggccgatatcttcgacacgacgatcggctggcgtttcgtgaacccgctcatgaagcagatgtacggcgtcgactcgatgcccgagaccggcgaaaacgttgcgaccgactacaagatcagccgtgccgatcaggatgcatttgcgctgcgcagccagcagaaagccgcacgcgcgcagcgtgacggcacgctcgcgcaggaaatcgtcggcgtgacgatcgcgcagaagaagggcgatccgattaccgtgctgcaggacgaacacccgcgcgaaaccagtcttgaagcgctcgccaagctgaagggcgtggtgcgtcccgacggcacggtcacggccggcaatgcgtcgggcgtgaacgacggcgcggcggctttgctgctggcgaacgaagcaaccgcgaagcgttttggccttacgccgcgtgcacgcgtgctgggtatcgccacggccggcgttgcgccgcgcgtgatgggcatcggcccggcgccggccacgcagaagttgctggcgcgcctgaacatgaccatcgaccagttcgacgtcatcgaactgaacgaagcgtttgcctcgcaaggtattgccgtgctgcgcgcgctcggtgtcgcggatgacgacgcacgtgtgaatccgaacggcggcgcgatcgcgctcggccacccgctcggcatgagcggcgcgcgtctggtgaccaccgcgatgtatcaactgcatcgcacgcagggccgctttgcgctgtgcacgatgtgtatcggcgtgggtcaaggcattgcgatcgctatcgagcgcgtgtaa

SEQ ID NO: 233210 - DNA, 1132 bp, Unknown
  Bacterial polypeptide expressing nucleotide sequence isolated from the Sargasso Sea
ttgaagcctaaatttggcacacttgaaaaaaaattaagtggaattaaaaaaaacaatctactacgaaatcttcaagacagtcatgtagaaaagcagttcataaaacagaatggaagaaaattattaaatttttcatcaaatgattatcttggaataaaatcaggtaaaatgagacatgcacaattccagtcaagttcaagacttgtttcaggaaatgatactagtttttcactactagaaaaaaaacttgcaagacataaatcacaagagcaagcaattatttttcctacaggatacatggcaaatcttggaatgattacttcaattacaaccaaacatgatacgatatttagtgatgaactaaaccatgcaagtattgttgaagcatgtaaattatcaggttcaaagattaaaattttcaaacataatgacataggagatttagagagaaaagttcaaaaaactaaaggtaaaaagatcctaatcacagaaggagttttcagtatggatggggattggtcaaaattaaatgagatttgccaagtatcagaaaaacacgggatgattacagttctagatgacgcacacggggattttgtactaggaaaagatggaaaaggaacagcaaatttttttgatgttgaaaagaaaattgatctctacgtgagtagtcttagtaaaggattgggaagttttggaggatatgtttgtggtaaaaaaaaattaattgatttatgcataaacacgtcaaagacattcatttacacatctgcactaccttcttcaataaatcaatattcacttaatagatttaattcaaaacgagagatataccgagagaaattatggggaaaaattaatctttttcataaaagattagaagagattgagcttcataccacatctacaagtcaaataataccgataattattggaaatgaaaaaaaagcaatggagttatcaaaatttttaagaattaatggaatttttgcacaggcaataagatatccaactgtaaaaaaggatcaagcacgtatcagaatttcaatcacagggtggttatcaaataaagaaatagagtattccatacaaattttagaaaaagctaaaagaaagtttaacctaaaatgat

SEQ ID NO: 233211 - DNA, 1192 bp, Unknown
  Bacterial polypeptide expressing nucleotide sequence isolated from the Sargasso Sea
atgaattataataataaacattattcagacgttttaaccagtatcaaagaagaaggcctgtataaaaaagagcgcgtcatttctacaccccaaggtgtagagatcaccactcataatggtgaaaaggtcttgaatttctgcgcaaataattatctaggtctcgcaaacaatccaactttgataaaatcagcaaaatcagcaatggataaatttggttttggaatggcatctgtacgatttatttgcggaacgcaagatctacataaagtgttagaagagaaaatatcagagttttttggtacggatgatacaatcttatatacctcatgttttgatgcgaacggtggactttttgagacgatccttggtccggatgatgctgtaatatcggattcattaaatcatgcatccatcatagatggaatacggctatgtaaagcaaagaggtttagatataacaatagtgatatgcaggacctggacagaaaattggtagaagcaaaagatgcaaaaataaaactgatagcgactgatggtgttttttcaatggacggttatattgcaaagttagatgaaataacccaattagctgaaaagcataatgcaatggttatggtggatgatagccatgctacaggatttattggcaatacgggtagaggctctgctgaataccatggtgtaatggataaggtcaatatttttacttcaacccttggaaaagctttaggtggggcttcaggtggatttacaacagggaaaaaagagatcatttctcttctaaggcaaagatcaaggccttatttattctccaatactgttgctcctgcaattgttgcagcaggggctgaggttcttgatatgatatcatccactacaaggctacgagataagctagaacaaaacaccatgtacttcaggcaaaggatgtcagaatcagggtttgatatccttgaaggtattcatcctattgtaccaattatgctctatgacgctattactgcacaagacatggcaactagaatgctaaaagaaggtatttatgtaattggtttttatttcccagtggttccaaaagggaaagccaggatacgagtacagatatctgctgcaatgaataaagaacatttggataaagcgatagatgcatttaaaaaagtaggaaaagatatgggaatcattgaatcttaac

SEQ ID NO: 233212 - DNA, 1201 bp, Unknown
  Bacterial polypeptide expressing nucleotide sequence isolated from the Sargasso Sea
aatgagcaaacaattgcaagacgcatacatcgtcgccgccagccgcacgccgatcggcaaggccccgcgcggtgtcttcaagaacacgcgcccggacgagctgctggtccacgcgctcaagtcggcggtggcgcaggtgcccggcttcgacacgaagctgatcgaagacgcgatcatcggctgcgcgattccggaggccgagcagggcctgaacgtcgcgcggatgggcgcgctgctcgcgggcctgccgcagacggtcggcggcgtgacggtcaaccgcttctgcgcgtcgggcattacggcgctggcgatggcggccgaccgcatccgcgtcggcgaatcggacgcgatcttcgcgggcggctgcgaatcgatgagcatggtgccgatgatgggcaacaagccgtcgatgtcgccgcacatcttcgatcgcaacgaagacttcggcatcgcgtacgggatgggcctgacggccgagcgcgtcgcggagcagtggaaggtgagccgcgaagaccaggatgcgttctcggtcgagtcgcaccgcaaggcgcttgccgcccagcaggccggcgagttcaacgacgagatcgccgcgtacacgatcaccgagcgcttcccgaacctcgcgacgggcgaagtcgacgtgaagacgcgtgagatcaagctcgacgaaggtccgcgcgcggatacgtcgatcgaaggcctcgcgaagctgcgcacggtgttcgcgaacaagggctcggtcacggccggcaacagctcgcagacgtcggacggcgcgggcgcgctgctggtcgtgtcggagaaggtgctcaaggaattcaacctgacgccgctcgcgcgcttcgtgagtttcgcggtgcgtggcgtgccgccggaaatcatgggtatcggcccgaaggaagcgattccggccgcgctgaaggccgccggcctgaagcaggacgatctcgactggatcgagctgaacgaagcgttcgccgcgcaatcgctggcggtgatgcgcgatctcggcctcgacccgtcgaaggtcaacccgatgggcggcgcgatcgcgctcggccacccgctcggcgcgaccggcgcgatccgcgcggcgaccgtcgtgcacggcctgcgccgccgcaacctgaagtacgggatggtcacgatgtgcgtcggcaccggcatgggtgcggcgggcatcatcgaacgcctgtaa

SEQ ID NO: 233213 - DNA, 1198 bp, Unknown
  Bacterial polypeptide expressing nucleotide sequence isolated from the Sargasso Sea
atgtctgcggcatttatttctcatttgcaatcgcaaattgaagccacgaaagaagatggtttgtacaaaaaagagcgtgttatcacgtcgcaacaacaagcggatatcggtgttgctaacggcgagcacgtaattaacttttgtgccaacaactaccttggtcttgcaaacaatgaaagcttgattgaagcagcaaagaaaggcctggatagccatggttttggtgtagcatctgtacgattcatttgcggtacacaagacattcacaagcagctggaagcctctatcagcgacttcctcggtacagaagacaccattttgtacccatcgtgcttcgacgcgaacggcggtttatttgaaacgctattaggccctgaagatgccattatttctgatgcgttaaaccacgccagtatcattgacggtgtgcgcctgtgtaaagctaagcgttatcgctacgccaataacgatatggcagcattagaagagcagttaaagcaagctgatgccgatggcgcgcgtttcaaaattattgccaccgacggtgtgttttcaatggacggcgtgattgccgacttagcctctatttgcgacctggccgacaagtatgacgccatggtaatggtagacgattgtcacgcaacgggcttccttggcgaaaacggcaaaggcagccatgagtattgtggcgttatgggtcgtgtagacatcatcaccggtactctaggtaaagcactaggcggcgcgtctggcggttacacctcgggtaaaaaagaagtcgtagagtggttgcgtcaacgctcgcgtccttatcttttctcaaactcggttgcgccacctatcgtttcagcatcgcttaaagtatttgaaatgatgaaagaaggtgacgagcttcgcgctaatctatggcgcaacgccaatcatttccgtacgcgtatggaagaagcgggcttcacattagctggtaaagatcacgctattattcctgttatgctaggcgatgcccgtttagctagcgaaatggcagacaagatgcttgagaaaggcatttatgttatcggtttctcttaccctgttgtgccgaaaggtcaggcccgtatccgtacgcaaatgtcagcaggtcatagccttgaacatgttgataaagcggtagatgcatttattgaagtcggccgtgaattgggagtaatttcatgaa

SEQ ID NO: 233214 - DNA, 1048 bp, Unknown
  Bacterial polypeptide expressing nucleotide sequence isolated from the Sargasso Sea
tatgacagcacagatcatcagcagtctttttgataggaatgacaatattgagcctaagcacattgaggacctagtgctgggctgtgcatttccagagggaccacagggaatgctgatggcaaaaggagtggctatcttagcagggatacctgaaacaaccggtggttcagtagtgaaccgattttgtggatcttccatggatgcagtacaccaaattagtgcaaagattgaaacgggagatatccaaatgggtatcgcagctggcgtggaagatatgttctctgttccaatgggtggattcaatcctgattttcatcctgaattagcggagcaagaatactatatcgggatgggagaaacagctgagatactcgctgaagaaggaaatatctcacgagaagaccaggaagattttgctgttggctctcacgagaaagcattaaaggcctgggaaaatggccattttaaaaatgaggtagttcccatcaatgtatatggcgagaataccgtggaacaagatgaaggcccaagacaaccagaccttgaaaagatcaagagccttgaccctgccttcttagagaatggaactattactgcggccacttccagtcccatatctattggcgcatcagcggttttgatatgcagtcgtgaccttgctgaaaagaatgaccttaagataagagcggctattaaaggacgatctgtcgttggagttgattggaaacgaatgggcaaaggccctatccctgccacagaaaaagttctacaaaatgcaggaatgtcaatggatgaaatagatgtgattgaattgaatgaggcatttgcagctcaatctctctatgttatagaaaatggtaactgggatcgttccagagtcaatcttaatggtggagcaatagcacttggtcacccactaggatgttctggcgctaggatcattaccactttggtcaatgtcatggaacaggaaaatgcaaagagaggcctagctacaatgtgtatcggttcaggtcagggaattgcaacaattctaggaagagattaa

SEQ ID NO: 233215 - DNA, 1095 bp, Unknown
  Bacterial polypeptide expressing nucleotide sequence isolated from the Sargasso Sea
catggaagaagcatatttatgtgatggaatacgtaccccgattggaagatacgggggagtactttccggtatacgtgcagatgatctggcgtcaattccaatcagaactctgatggaacgaaattcaggagttgactgggaaagtgtggatgacgtgattttaggttgtgcgaatcaggcaggtgaagataatcgaaacgttgcccgtatggcaagcttgctttcgggattaccacatacagttccgggggcaactgtcaacaggctatgcggttctggacttgatgcaattggaatcgctgccagagcagttagatcaaaagagcagcgtttggtcattgcgggcggtgtagaaagcatgagtcgtgcaccttttgtgatgggtaaatccacagaagcgttttcacgctcagctgaaatttttgatacgacaatcggctggcgttttgtcaatgaaattatgaaaaaacagtacggggctgaatcaatgcctgaaacagcagaaaatctagcagcagaattcaatatatcacgcaatgatcaggatgagtttgctctaaggtcgcagcaaaaagctgcaaaggccataacaattggacgtttttcagaggaaatagtgccaatcaaaattccacaaaaaaagggtgagattttctttttagatcaggacgagcatccacgtctggattctaaactggaaaatctgcttaaattgcccactccatttcgagaaaatggcagcataactgctggaaattcgtctggagttaatgatggagcagcagctgtgatagtatcttctgaaaaaaaatcacttgaatataatcttaaacctctggctaggatcgttggaatggcaactgccggagtggaacctcggacaatgggatttggaccagttccggcaactaaaaaattactaatatcaactggaattaaactggataaagttggaatcatcgaacttaatgaagcctttgcagctcaggttttgactgtaactcgtgctttgaatctggaagatgatgatgaacgtataaatcctaacggggggtgcgatagcactcgggcatcctctcggtatgagcggtacac

SEQ ID NO: 233216 - DNA, 1189 bp, Unknown
  Bacterial polypeptide expressing nucleotide sequence isolated from the Sargasso Sea
tatgtatcaatcactaaaaaaaagattaaaaattgaaatagaagaaataaaggattctgggagatataaaaatgaaagaattataacatctcctcaaaaagcaataattaatgccaacgaagatgaagttgtaaatttttgtgcaaataattacttaggcttggcatctgataaaagaataattgatgccgcaaaacaatcccttgagacacatggttttggcttggcatctgtaagatttatttgtggaactcaggatattcataaaaaattagaagaaaaaatatcaaattttttagagacagaagataccatcctttacgcagccgcttttgatgcaaatggaggtctttttgaacccttgtttgatcataacgatgcgatcattagtgatagtctaaatcatgcatcaataatagatggaattagattatgtaaagcagctagatttagatacaataatagtgatatggatgaccttgaaaataaattaaaagaagcatcaaaatatagaaacagagttatagttaccgatggtgtattttcaatggatggaacgattgcaaaacttgatttaatatgtgacttagcaaaaaaatacgattcactagtttttgttgatgattgtcatgcaacaggctttatcggatctagtggaaaaggtactcaggaagaactcgatgttattgggaaaatagatattattactggaactttgggtaaagcattaggtggtggaagtggtggttttacaactgggaaaaaagaaattattgatattcttagacaaaaatcaagaccatatttattttctaatactcttgctcctgctattgtaggggcctctcttaagtcaatagaattaattcaaaaggatacaactattatagataatctcaagaaaaacactagtttttttagagaaaaaatatcacaattaggttttgacataaagggaaaatctcatccgattgttccagttatgatttacgatgacaaaaaggcttccctaatcgccgattatttacttgataatgggatttatgtagttggtttttcttatccagttgtaccaaaaggacttgcaagaattagagttcagatatcatcagcacacacaaaaaatcaaatagaaaaagcagtacaattatttgaggaagctggaaaaaaattcggagttttaaattaa

SEQ ID NO: 233217 - DNA, 268 bp, Unknown
  Bacterial polypeptide expressing nucleotide sequence isolated from the Sargasso Sea
aaccttaaatgatattgatgtagttgaaataaatgaggcctttgcatcagttgctatggcttggcaaaaagaaatggattatccaatggaaaaaattaaccctaatggaggcgcaattgcacttggtcatcctttaggggcaactggagcaagattaatgacgacaatgatacacacaatgaaaagaagcaatcttaaatatggcttacaaacaatgtgtgaagggggtggacaagcaaacgtaacaattttagagaattgctcatga

SEQ ID NO: 233218 - DNA, 1094 bp, Unknown
  Bacterial polypeptide expressing nucleotide sequence isolated from the Sargasso Sea
ggcccggattgcggtgggcggcgagcaggtgctgaacttctgtgccaacaactatttggggctggccaaccacccggatctgatcgcagcggctcatcaggggctggacaaccacggcttcggcatggcctcggtccgtttcatctgcggcacccaggatcagcacaaggagctggagcagaaactgtcgggtttcctcggcaccgaagacaccatcctctactcctcctgcttcgatgccaatggcggtctgttcgaaaccctgttcggtgccgaagacgccatcatctccgatgctctcaaccacgcctccatcatcgacggggtacggctgtgcaaggccaagcgttatcgctacgccaacaacgacatggccgagctggaagcccagctcaagcaggctgacgccgacggcgcccgcttcaagctgatcgccaccgacggggtcttctccatggatggcgtcattgccgacctcaaatccatctgcgatctggccgacaagtacgacgccctggtgatggtggacgactcccacgccgtcggcttcatcggcgagaacggccgcggcacccacgaatactgtggcgtgatggacagggtcgacatcatcaccggtaccctgggcaaggcgctcggcggcgcctccggtggctacacctccggcaagaaggaggtgatcgactggttgcgccagcgctcccgcccctatctcttctccaactcgctggccccctccatcgtcgccgccaccatcaaggtgatcgacatgctggccgaaggccatgcgctgcgctccagcctcaaggagaacagccaatacttccgcgagcggatgagcgccgccggcttcaccctggccggggccgatcacgccatcattccggtgatgctgggtgacgccaaactggccgccgagatggcaagccgcatgctggccgccggcatctacgtggtgggcttctccttcccggttgtgcccaagggccaggcccgcatccgcacccagatgtccgctgcccacacccgtgagcaactggacaaggccatcgatgccttcattcgcatcggccgcgaactcgacatcatctgat

SEQ ID NO: 233219 - DNA, 895 bp, Unknown
  Bacterial polypeptide expressing nucleotide sequence isolated from the Sargasso Sea
atgtatcatagtcctgttcttcttgatgactcagtaaaaggtttaaatattattccacacggaacttatgttgacgctacgtatggaggtggaggtcactcaaaagtaatactaaaaaagctcggaccaaaagggagattggttgcatttgatcaagatagtgatgcgcacaaaaataaaattattgatagtagattaaagctaatcgagtcaaattttaaatttttaaacaatcatctaaattatttacagataagtcaaatagatggtttgcttgcagactttggtatttcttcatatcaaatagatacaaagactagaggtttctcaattagatttgattataaactggatatgagaatggatcaatcccaagatatggatgcacagtttattataaataaatatgatagagaaaaattggaaaacatttttcagaattatggagaacttagaaattatagaagaattgttgatacaattatttcagaaagaaaaaataatgaaattaaaacctctggagatcttaaaaggattttagagccactatctaataaatcagaaaaaaataaatttttagcaaaagtttttcaagcaataaggattgaggttaatgatgaaataaatattataaaatcacttttgcttcaatcttcaaaaatgttaaaaaaaggtgggaggctagtatgtatatcttatcactctttagaagataggctagtaaaaagatttatacaaaatggaacttttgagagtgatgcaatatccgatatatacggaaataaagaattgaaatttaaaaaagtagggaatctaataagcccagatgaaaaagaagttagattaaataatcgatcaagaagtgccaaactaagagtagcagaaaaaatatgaa

SEQ ID NO: 233220 - DNA, 520 bp, Unknown
  Bacterial polypeptide expressing nucleotide sequence isolated from the Sargasso Sea
taaaaaaacagatctagaaagcttaaaaagtttgaagtccgtatttatggaaaaaggtaccgtaactgcaggaaactcatcaggtttaaacgacggtgccgctgctttagttctgagtaccgctgcagccgctggatctaatggattaaaagttaaagcaaaaatattaggttattctcattcaggagtaagacctgaagtgatgggtataggtccaataatcgctgtaaaaaaactttttgaaaaaactggcttatgtgaaaaagattttgatgtaattgaaagcaatgaagcttttgcagctcaagcgtgtgcagtttctaaagaattgaaattaaatccagaaaaagtcaaccctaatggtggagcaatagccttaggtcatccaattggagcaacaggagcaatcttaacaattaaagcaattcatgaattagaaagaattgacggaacttttggattgataactatgtgtataggaggaggtcaaggtatatctctagcaattgagagagtttaa

SEQ ID NO: 233221 - DNA, 406 bp, Unknown
  Bacterial polypeptide expressing nucleotide sequence isolated from the Sargasso Sea
tatgagtgaggattcagttgagagcgctggcataagtcctgaatttaagatactatctagagcggtcgctggcattgattggactcggatgggtgctggtccgcttccggctactgaaaaggctttagctaatgctaaattgaccattgatgatatagatgtaattgaattgaatgaagcctttgccgcccaatcgctttacgttataagaaaggggcagtgggatatggaaaaagtaaatttaaatggtggtgctatagccctaggccatccgcttgggtgttcaggggcaaggattttgactaccctcatgaatgttatgaggcagaatgatctaagtctaggtttagctactatgtgtattggtagtggtcaagggattgctacaattattgaaagaatttaa

SEQ ID NO: 233222 - DNA, 566 bp, Unknown
  Bacterial polypeptide expressing nucleotide sequence isolated from the Sargasso Sea
catggagcatataaataagatattaacagacataaaggaagagggccttttcaaaagggagaggactattactacaccccagagtgtagagatacggacacaaaatggtaatagagtattaaatttttgtgcaaataattacctcggccttgcaaatcatccagatttaattaatgcagcaaaaaatgcaatggatgattatggatttgggatggcatccgtccgatttatttgtggtacacaagatattcacaagattctcgagaaaaaaatagcaaaattttttgatacagaagacaccatcctttacacttcatgttttgatgcaaatggagggctatttgaaactattttgaatgaaaaagacgcagtcatttctgactcattaaatcatgcatccattattgatggcataagactttgtaaagctacgaggcttcggtatgaaaacaataacatgaacgacctagaagccaaactcaagcaagttgaaaattcaagaacaagaattattgctactgatggtgttttctcaatggatggatatattgcaaaactagacgaaa

SEQ ID NO: 233223 - DNA, 626 bp, Unknown
  Bacterial polypeptide expressing nucleotide sequence isolated from the Sargasso Sea
tttgattaaaaaacaaaatatttttattgatgatttagctaaaattaaagctgagggattatataaaaatgaacgtacgataaccacaccccaaggtgtaatcataaatactttggaaaatggtgaagctataaatttttgttcaaataattatttagggttatcaaataatatagaaataaaagaggctgcaaaaaaagcactagaagaatatgggtttggaatgtcttctgttcgcttcatatgtgggacgcaacagattcataaaatattagaggaaaaaatatctaagttttttggtacggatgattcaattctttatacatcgtgttttgatgcaaatggtgggctatttgaaacattgttgggacaagatgacgcaattatttctgatgaattaaatcatgcatcgataattgatggaattaggctaagcaaagcaaaacgttatcgatttaacaataatgatatagatgatttagaattaatactacaagacagagataaatatgataatgtaatgattgcaacagatggggtcttctcaatggatggacatattgctaaaattgataaaattactaagctagcagagaaatataacacaatagttatggttgatgatt

SEQ ID NO: 233224 - DNA, 1132 bp, Unknown
  Bacterial polypeptide expressing nucleotide sequence isolated from the Sargasso Sea
aatgagtaaatcagttattgtagatgcattacgttcgccaatcggactaaaaaatggtgaaatgattgggattcgcccggatgatttagctgcgcaagtggtaaaaggattaatggagcgcaacccaacgattaaaacagaaatgattgaagatgttgttgttggatgcgcctaccctgaaggtcctcaaggtcatatcattggaaaatcagttggtgttttagcagggctgccgatcgactctacaggtaaagttatcaaccgtttttgcggctcatcaatggatgccgcgcatcaaataagtaccgctgcggagtgcggggatattgatgctggtattgctgttggggttgaagatatgttcgcagtgcccatgggtggatttgcgccagactttcatccagaacttgccgagcaagaattttatattggcatgggggaaactgctgaaaaccttgcaaacgatctagatatttctagagaagaccaagaagagtttgcgatgaactcgcatcgcaaggcattaaaagcctatgaagaaggaaaatttgatcaagaattagtttcaattgatgttaacggtgaagctaccgtgactaaggatgatggaccaagagaacctgatgtagaaaaaataaaaagcctctcccctgcttttcttgaaaatggaacggtgaccgctgctaccagtagccctatttcagtgggtgctgccgcattaatagtggcaaatgaatctttttgcaataacaacgatttaaaacccagagctgagattgtatcgcgcgcgatcgctggcgttcactgggatcggatggggatgggaccccttcccgcggttgaaaaagcattaaaaaaagcaaaccttactatggatgacattgaaacgattgaattaaatgaggcctttgcagcgcaatcactgtatgtgattcgaaagggcggctgggatgaaagtaaaattaatctcaatgggggcgcgatcgcactagggcatcctttaggctgctcgggagctcgcatcttaacaactttgattaatgtgatggagcagcagaatactaatattggtcttgcaaccatgtgtatcggtagtggtcaaggcattgcaaccataatcaaaagggcttaa

SEQ ID NO: 233225 - DNA, 685 bp, Unknown
  Bacterial polypeptide expressing nucleotide sequence isolated from the Sargasso Sea
caatatatcacgcaatgatcaggatgagtttgctctgcgatcacagcaaaaagccgcaaaggctataacaattggacgtcttaaagaggaaatagtgccaatcaaaattccacaaaaaaagggtgagatgtactctgtagatcaggacgagcatccacgtctggattctaaactggaaaatttgcttaaattgcccactccattccgagaagaaggcagcataactgcgggaaattcgtctggagttaatgatggagcagcagctgtgatagtatcttctgaaaaaaaatcacttgaacataatcttaaccctctggctaggatcgttggaatggcaactgccggagtggaacctcggataatgggatttggaccagttccggcaactaagaaattactaatatcaactggaattaaactggataaagttggaatcatcgaacttaatgaagcctttgctgctcaggctttgactgtaactcgtgctttgaatctggaagatgatgatgaacgtataaatcctaacgggggtgcaatagcactcgggcatccactcggaatgagcggtgcacgtctagctttaacagctatgagggaactgcactcgaaaaaggaacgttacgcactttgtacaatgtgcatcggtgtgggacagggaatttccatgcttttagaaaggatttga

SEQ ID NO: 233226 - DNA, 902 bp, Unknown
  Bacterial polypeptide expressing nucleotide sequence isolated from the Sargasso Sea
gatgaatccactaatgaaaaacgttttaattgataggttaagttattccttaaatgaaatgcaacgagaagggctttttaaaaatgaaatagagatccgctctccccaagctgcgcgcgttgatgttgggcatcagaataaagttctaaatttgtgcgcaaacaattatttgggtctggcagataatgatcgtttaattagtgctgctaaaaatgcgctggatacctacggttttggaatggcgtcagtcaggtttatttgtgggacgcaagataaacacaaggaacttgaagaaaaacttgctgaatttcttggcaaggatgatgcgatattatttgcttcctgttttgatgctaattgtggtttatttgaggcgctattgggacctcaagacgcagttgtttcagataacctcaatcacgcctcaattattgatggaattcgcttatccaaagctcaacgttatcgttatcataataatgatccagttgacctggaaattaaacttaagcaagcccgtactgcgggatcggagaatattattatagccacagacggcgttttttcgatggacgggacctatgccaatcttcctgaaatatcccgtctggctaaaatttatgacgctttagttatggttgacgactgtcacgcaactgggttcgttggaactaaaggaaagggaacctcagaatattttggggtaaacgtagacattttaacgggcaccctagggaaagccttgggtggtgcaattggaggatacattgcgggccctcagagagtaatcgatatgctgcggcaacgtgctacgccctatctattttcgaattcacttccacctgtagccatagcagccggtttagaagcaataaatattattaatgaaagtgattatcttc

SEQ ID NO: 233227 - DNA, 411 bp, Unknown
  Bacterial polypeptide expressing nucleotide sequence isolated from the Sargasso Sea
cttgaagcctaaatttggcacagttgaaaaaaagattaacgtaattaaaaaaaacaatctattacgtaatcttcaagatagtagagttgagaaacagcatatttttcagaatggaaaaaaacttctaaatttttcatcaaatgattatctaggaataaaacctgggaagataaagcatacacaatttcaatcaagttccagacttgtttcgggaaatgacattagtttttcaattctagaaaagaaactcgcaaaacataaatctcaagaaaaaacaataatctttccaacaggatacatggcaaacatcggagcaatttcatcgattgcagataagaatagtacaatattcagtgacgaattaaatcatgcaagtattgtggaggcatgcaaattatctaatgcaaaaat

SEQ ID NO: 233228 - DNA, 1145 bp, Unknown
  Bacterial polypeptide expressing nucleotide sequence isolated from the Sargasso Sea
tatgaggaacaaattttttatgcaagaagaagttgttatattatccggatccagaacagcaattggtagttttggaggatcacttaaatcagtttcaccaattgaacttggaacagtggttgcaaaaaaagcactagaaatttcagaggttgataaaaatgaagttggtcaagttgcttttggtcatgttattaatacagaacctaaagatatgtatctttctagagttgtagcgttaaattcaggtttgccaaaaagcgttgctgcaatgaatgtgaaccgtttgtgtggatctggattacaagcaatcgtatctgtcatacaaagtttaacattaggtgattctaattttggtcttgcaggtggatcagaaaatatgagtaattcaccccatattttaaaatctaacaggtggggtaaaagaatgggaaacactactgtagaagatatgatgctaggagcattaaattgtccatttggtactggccatatgggagttactgcagaaaatgttgctagcgaatatggaatttcaagagaagatcaagatagtttttctttagaaagtcaattaagagcttctaatgcattggaaaaaggttattttaaaaatcaaatcgtagatattaaagtcagaaaaaatatatttaacgttgatgagcatccaaaagaaacagatgcagaaagcctcaaaagcctaaattcagtttttatggaaaatgggacagtaactgcaggtaactcgtctggtttaaacgatggagctgctgcattagttcttagtaccgccgcagctgctaaatcaaacggattaaaagttaaagcaaaaatattaggttattcacattcaggcgtaagaccagaggtaatgggaataggtccaatattcgctgtaaaaaaactattggataaaactggcttatctgaaaaagattttgatgttattgaaagcaatgaagcatttgctgctcaagcgtgtgctgtttctaaagaattaaaactaaactctgataaagtaaatccaaatggtggagcaattgcattggggcatcctattggagcaactggagcaatcttaacaattaaagccttacatgaattagaaagaattgatggtactttaggtttaataacaatgtgcatag

SEQ ID NO: 233229 - DNA, 895 bp, Unknown
  Bacterial polypeptide expressing nucleotide sequence isolated from the Sargasso Sea
atgtatcataatcctgttcttcttgatgactcagtaaaaggtttaaatattatccctaacggaacttatgttgatgctacatatggaggtggaggtcactcaagggtaatactaaaaaacctgggaccaaaagggaggttaattgcatttgatcaagataatgatgcacataaaaataaaattattgataatagattaaagctaattgagtcaaattttaaatttttaaataatcatcttaattatttacagataagtcaaatagacgggttacttgcggactttggtatttcttcatatcaaatagacacaaagactagggggttctcaattagatttgattataaactggatatgagaatggatcaatcccaagatatagatgctcagtatattataaataaatatgacagagaaaaactggaaaagatttttcagaattatggtgagcttagaaactatagaagaattgtcgacataattctttcagaaagaaaaaataatgaaattaaaacctcaggagatcttaaaaggattttagcgccaatatctaatagctcagaaaaaaataaatttttagcaaaagtttttcaggctataagaattgaggttaatgatgaaataaatattataaaatcacttttgattcaatcttcaaaaatattgaaaaaaggggggaggctagtctgtatatcatatcactctttagaagataggttagtaaaaagatttatacaaaatggaacttttgagagtgatgcaatatctgatatatacggaaataaagaattgaaatttaaaaaagttggaaatctaataagcccggatcaaaaagaagttaggctaaataatcgatccagaagtgccaaattaagagtagcagaaaaaatatgaa

SEQ ID NO: 233230 - DNA, 1156 bp, Unknown
  Bacterial polypeptide expressing nucleotide sequence isolated from the Sargasso Sea
tatgcaagatgcatttatagtaagcgccttaagaactccaattggaaagaaaaaagggtctttatcaggcatgcatccagctgatcttggagcatcggttctctctgctacatttgagcaaatagaccttgatcctggcttagttgaagacgtaatctttggttgcgttgatactgttgggcctcaagctggagatattgcaagaacttgttggcttgctgcagggttgcctgagcacgttcctggaacaactgttgatcgacaatgtggatcttctcagcaagcagtgcattttgctgcccaagcaatcatgtctggtacatctgatgttgttattgctggtggagtgcaaaacatgaatatgattcctatctcatatgcaatgttagctggtcaatcattgggttttgacgatccattttctggatcaaaaggatggctagagcgatatggcaagcaagaggtaagtcaattcaattctgcccaaatgattgctaaaaagtggaacctttccagggaggaaatggaaaattatgcctatcaaagtcatcaaaaggcaatgcatgctataaaaagtggatattttgaaaacgaaattatatcggttggaacattttgccaagatgaaactcccagggctgaaacttcattagaaaaaatggcctcactaaatccactggtcgaaggtcatgacatcactgcagcaatttcctctcagaatgccgatgcttcttcagctattttaattgtttccgagaaaattttaaaagaacataaccttaatccgttagctcgtattgctcacattagcgtaagagctgatgacccaatttggatgttaacagcaccaatgccagctactgagtatgctattcaaaaatctggcataagtcttaatgacatagatgttgttgagattaatgaggcttttgcctcggttgctatggcatggcaaaaagaaatgaattatccgatgagtaaaattaatcctaatgggggcgctatagctctgggtcatccccttggtgcgactggtgctagactgatgacaaccatggtacatactatgaaaagaaataactttcgatacggtttgcaaactatgtgtgaaggcggcggacaagctaatgtaactattttagagaattgctcatga

SEQ ID NO: 233231 - DNA, 910 bp, Unknown
  Bacterial polypeptide expressing nucleotide sequence isolated from the Sargasso Sea
aatgcgatttatttagcagcccaaatggttgagaatggtgatgcagaaattgtcattgctggcggaatggaatcaatgacaaacgctccatatctcgttccaaaggctagaggcggctacaagtatggaaatgcagagatgatggatgttattcaacatgacggattgttttgcgctttagaaaaagaacttatgggagaggggacggaaaggtatgcagcttcggctgatataactcgctcaagccaagatgaggttgcacaaaaatctcatgaaagggcttcttctgcaatagaaaatggaaacttgtcggaagagatagtatctattgaaattcctcaaaggcgaggcgaacctatttcatttgaacatgatgagggagtgagacctggaactgacttggaaggtcttcaaaagcttcgtccagcctttgctgaaagtgggaatataactgctgggaatgctagtcaaatatctgatggtggctctgcagttgtgattacctctcgcgatgtagctgatcggctttctgttgaaccgttggctgagttgatttcgtatggccaagtcgcagggccagatactagcttgcttacgcaaccatctcgagctatctccgacgcgttgtccaatagtgaattggcattgtcagatattgaccttttcgaaattaacgaagcttttgctgctgtgtctgttgcttcaatggcagatctggggattgatgactctgtagtaaatattaatggtggagctattgctcttggtcaccccatcggtatgtctggaaaccggctagcgcttactcttgcttatcaattaaaacgtcaaggtggcggcgtaggcgctgccgctctttgtggcggtggcggacaaggcgatgcgttaattctaaaagcgatcggataat

SEQ ID NO: 233232 - DNA, 1204 bp, Unknown
  Bacterial polypeptide expressing nucleotide sequence isolated from the Sargasso Sea
gatgaccgaagcttttctgtgtgatgcgatccgtacgccgatcgggcgttacggcggtgcactgtccggcgtgcgcgccgacgacctgggcgcggtgccgctcaaggcgctcgtcgagcgcaaccgcgacgtcgactgggcggcgatcgacgacgtgatctacggctgcgcgaaccaggccggcgaggacaaccgtaacgtcgcgcgcatgtcggcgctgctcgcagggctgccgcagggcgtgccgggttcgacgatcaaccgcctgtgcggttccggcatggatgcggtcggcgtggccgcgcgtgcgatcaagtccggcgaggccgcgctgatggtcgcgggcggcgtcgagagcatgacgcgcgcgccgttcgtgatgggcaaggccgcgagcgcgttcgcgcgccaggccgacatctacgatacgacgatcggctggcgcttcgtcaatccgctgatgaaacagctgcacggcgtcgattcgatgccggagacggccgagaacgtcgcggtcgactacaacatcagccgcgccgaccaggacctgttcgcgctgcgcagccagcagaaggccgcgcgcgcgcagcaggacggcacgctcgccgaggaaatcgtcgcggtcacgattgcgcagaagaagggcgatccgctggtcgtgtcgcgcgacgagcatccgcgcgaaacatcgctcgaaacgctggcgaagctgaagggcgtcgtgcgcccggacggctcggtgacggccggcaacgcgtcgggcgtcaacgacggcgctgccgcgctgctgctcgcgaacgaagaaaccgcgaagcgcttcggcctgacgccgcgcgcacgcgtgctgggtatcgcgacggccggcgtcgcgccgcgcgtgatgggcatcgggcccgcgccggccacgcagaagctgctcgcccggctcgggatgacgatcgaccagttcgacgtgatcgagctgaacgaggcgttcgcgtcgcaaggtctcgcggtgctgcgcatgctcggcgtggccgacgacgatccccgcgtgaacccgaacggcggcgcgatcgcgctgggccatccgctcggcgcgtcgggcgcgcgtctcgtgacgaccgcgatgtaccagctgcatcgcacgaacggccgctttgcgctgtgcacgatgtgcatcggcgtcggccagggcatcgcgatcgcaatcgaacgcgtctga

SEQ ID NO: 233233 - DNA, 466 bp, Unknown
  Bacterial polypeptide expressing nucleotide sequence isolated from the Sargasso Sea
gattgcagggaattcttctgcaatttcggacggtgcatcggcagtagtgatgatgtcccgcaaacgtgccaaagaactgggattgaaaccgatggcgaaggtgagggcaatggcttcaacgggagttgatccgtcgatcatgggttatggaccggttcctgccgtccggaaagcgctcaagaggggtggactggaaatcaatgatatcgaactgcttgaactcaatgaggctttcgcagcacaatcattgccggttctcagggatctcaaactggaagacagcatggaagagcgggttaacctgaatggcggtgctattgccctcgggcatcccctgggctgttcaggagcacggatcacgacaaccttgctgcacgagatgaaagaaaaggacgcccaactcggagtggcaacaatgtgtgtcggactgggacagggtgtggccacggtgtatgagcggatctga

SEQ ID NO: 233234 - DNA, 826 bp, Unknown
  Bacterial polypeptide expressing nucleotide sequence isolated from the Sargasso Sea
ggagaggaggatgccgtgatatcagactcgctaaaccatgcatcgattattgatggaattaggttatgtagagcaaagaggttgcggtatcaaaataatgatatgcttgacctggaagaaaaattgatcgaagcaaaaaatacaagattaaaactaatagcaactgatggcgtcttttccatggacggatccatcgctagactaggcgagataacaaaattagcaaaaaaatacggtgcaatggttatggttgatgatagccacgctacaggttttatcggtaagaccggtagaggctcggcagagcattatggtgtaatgggagatattgacatatttacctccaccttgggaaaagccctaggcggcgcttcaggcgggtttacgacagggaacaaagagattatttccctgttaaggcaaagatcaaggccttatttattctcaaatactgttgctccagcaattgtttctgcagggataaaagtgcttgatatgatatcatctaccactgaacttcgggataaattagaaaagaacaccatctactttaggcaaaagatgtctaaagctggttttgatattttaccaggtgctcatcctatagtgcctattatgctatatgatgctattactgcacaggaaatggcagcaaaaatgctaggagagggtatatatgtaattggcttctatttcccagttgtccctaagggcaaagcaaggatccgagtgcaaatatctgcagctatgaatgagagacaattggatgaagcaattcacgcttttactaaagtaggtaatgaaatgggaattatctcatcataaa

SEQ ID NO: 233235 - DNA, 1288 bp, Unknown
  Bacterial polypeptide expressing nucleotide sequence isolated from the Sargasso Sea
catgagtgatcgaattgcaatcgtcgacggcatacgaacaccgttctgcaaggccggtacggaactcaagggcttctccgcgcagaaacttggatcgctcgttattcgagagttgctcgatcgttcgtcaattgatgggaacgccgtcgacgaagttgtgatgggctgcgttgcaaacccggttgatgcagccaacgtagcgcgtgtagcagctttgatggccggactgcccgaacgctctcgcgcctatacggtctcacgcaactgcgcttctggatttgagtcggtaaccagtgcgtacgaaaagatagccagtggattcgatgatattgtgattgccggtggaacagagtcgatgacgaacattccgctcatctataacgagcacatgacggcattgtttgccgggctgatgcggtcaaaaacggcatttcaaaaactacaaacaatactatctttccgtccgcattacctgaagccgattgttggcgtagtctgtggattgtctgatcccgtatgcggtctgaatatgggccagactgcagagaacatcgcgaagcagtgcgggattacacgggagcaacaggatgaatttgctctcgccagtcataacaaggcagtggcaagccgggccaaacttgtcgaagagatcatggctgtaccggtgcaaccgaaatatgaaacggtttgcgaaactgataacggtccgcgcgaggggcagtcactcgaagcattagcgaaactcaaaccgtatttcgatcgaaactccggcaccgtgacggtcggcaatgcctgtcctatcactgacggagccagtgcggttttgatgatgaaggaatcgaaagccgacgaactagggctgcccccactgggttacgtcaaatcgtattcgtacgaagggcttagtcccactgtgatgggtctcggtccggtctatgccatttcaacggttctcaaaaaatccggcatggaactggatcaaatgtcatttgttgagatcaacgaagcatttgcagctcaggttctgggatgtgtgcagctgatcgagtccgatcaattcgcaaaaaaggaactcggccggactaaagccatcggcaaactggaacacgaacggcttaacgtcaacggtggagccattgcacttggccacccggtcggtgtcactggtaaccgtcttatcctgacggctttgaaagagcttcatcgtcgacgtgaacaacatgcacttgtatcgctgtgtattggtggaggacaaggcggagcgatcattctcgaacgagcatcatga

SEQ ID NO: 233236 - DNA, 1129 bp, Unknown
  Bacterial polypeptide expressing nucleotide sequence isolated from the Sargasso Sea
aatgagtaaatcagttataattgatgcagtacgatcaccaattggcttaaaaaatggcccaatgattggtattcgtcctgatgatcttgcaggtcaagttgtaaaaggattattaaatagaaatgattctgtggactctaaaatggtagaagatgtaattgtgggatgcgcataccccgagggtccccaaggacatattattggcaaatctgttggtgttcttgctggcctacctatagaatcaactggaaaagtggtaaatagattttgtggatcatcaatggatgctgctcaccaagttagtactgctattgaaagtggagatatagatttaggaattgctgctggagttgaagatatgttttctgtgccgatgggaggttttgcacctgattttcatcctgaactggcagaacaggaattctatattggaatgggagaaacggctgaaaacttagcaaatgatttaaatatttccagagaagaacaggaagagtttgctattagctcacacaagaaagctttaggggcaatagaagaaggaaattttaaaaatgaaataattcctattgataagtacggagaatgcacagtagaaaaagatgatggaccaagggaaccagatgtagaaaaaattaaaagtttaaacccggcatttgttgaaggcggaaccatcaccgcagctacaagtagccctatatcagtcggagcatctgctgtactagttgcaagtgaagatttcgcatctcaaaatggtcttaaaactagagcagaatttgtttctcgagcagtttctggtgtacattgggatcgtatgggcatgggcccacttcctgcagtagaaaaagcattaaaaaaagcaaaccttactatagatgatgttgaaacaattgaattaaatgaagcatttgcagcccaagccttatatgttattcgcaaaggtggttgggatgagaacaaagtcaatttaaacggcggcgctatagctttagggcatcccttaggttgctctggagctcgaatcattacaacacttttaaatgtaatggaacagcaagatactaatattggactagcgaccatgtgtattggaagtggacaaggaattgcaactgtaattaagcgttaa

SEQ ID NO: 233237 - DNA, 1180 bp, Unknown
  Bacterial polypeptide expressing nucleotide sequence isolated from the Sargasso Sea
atgaaaaacattgatcaaatcctaaatgctcaattaaatgagattaaagagcaaggtacctataaagatgaaagaataattgagactgctcaagaagctcaaatcagtgttaagggtaaaacagtactcaacttttgtgcaaataattatcttggattagctaataatagtgaaattaaaaaagcagctgtggatgccattcaagaatggggttttggtcttggttcagtaagatttatatgtgggactcaaaccattcacaaacaattagaagactccgttagcaaatttcttggtaaagatgatactattctctactcttcttgttttgatgcaaatggcggatttttcgaaacgattttaagtgataaagatgctgtattttcagatgaacttaaccacgcgtcaataattgatggagttagactttgtaaagcacaaaaacatagatataaaaactgtgatatgaacgatttagagaaaaaactaaatcaatcttcagcgagaattaaacttattgttactgatggagttttcagtatggatggtactattgcacctgtagatgaaattgttaagttagctaaaaagtatgatgctcttgtaatggttgatgattgtcatgccacaggtttcattggagaaaatggtaaaggaagtggtgaattctataatgttttagacaaagttgatataatttcttctacttttggaaaggcgcttggtggagcttcgggaggatttgtttcagcttcaaagaatattattgatactttaagacaaaaatctagaccatatcttttttccaacagcttagctcctacattagtagtggcatgcttaaaagctttagaaataattaattcaaataaaaatcttttaaaacaacttcaacaaaatacacttttttttagagagcaaataaaagaaattggttatgagataaagggagactcacatccgattgttccaataatgatttatgatgcaaaaaaagcagtagctttatctgaaatgcttttagaaaaaaatatatatgtaattccattttcttttcctgttgttccaaaagatcaagcaaggataagagtacagctttcttcaatccattcaagagaacaattagtatatgctgttgacacttttaaagattgtggaaaggcactaaatattatttaaa

SEQ ID NO: 233238 - DNA, 802 bp, Unknown
  Bacterial polypeptide expressing nucleotide sequence isolated from the Sargasso Sea
ttcggctgagatttatgacactacaattggttggcgcttcatcaatccaaaactggatggacagtacggttcagactcaatgccagagacaggggaaaatgttgcggaaaagtttcagataagaagggaagatcaagataagtttgctctgggaagtcaaataaaagctggtagagcaatggagaatggacgcatggcaaaagagttgctcacggttgaaattcctggtcggcgcggtgatgttaccgtcgtagacaaagatgagcatccgagaccggatactaccttggaaggattatcaaagctacctgcgccgttcaggaaagatggtggaagtgtaacaccaggcaatgccagtggtgtaaatgatggatcagcggcaatgattatagcaagtgaagatgcggccaaacaacatggcttgacaataagagcaagagttgttgcctgtgccaccgctggagttgaaccaagaataatgggtataggacccgcccccgcctcgcagaaggttttagagcgcgttggtcttaaaatttcggacatggacgtgatcgagctgaacgaagcttttgccagtcaagcactagcaaccctgcgagagcttggtgtggaagacgacgatccaagagttaatccaaatggaggtgctattgcattgggacatccgcttggagcgtctggggcaaggctgatactgacagctgcccaagagctggaagaaactggcggaaaatatgggctatgcacgatgtgcataggcgttggtcaaggaatggcaactattatagaacgggtctaa

SEQ ID NO: 233239 - DNA, 1204 bp, Unknown
  Bacterial polypeptide expressing nucleotide sequence isolated from the Sargasso Sea
atggatgcatttatttgtgatgcgattagaacaccaataggtagatttggaggagcattatcttcaataagagcagatgatttagctgctctttcaataaaagagttaaaggaaagaaacacaagcatagactggtcaatggttgacgaagtaatttttggatgcgccaatcaatcaggagaagataacagaaacattgctaggatgtcattgttacttgcaggactgcctcaaacagttcctgggataacaattaacagactttgcgcatcagggctagaggctgttacatatgcttcaagaatgattaaatctaatgaagctcacctaattatagcaggtggtgttgaaagtatgagccgtgccccatttgttattcccaagtcaaccactccattttcaagaaatgctgagatatatgatacaacaattggttggaggtttataaatccaattatgcgtcaaatgtatggtgttgattcaatgccagagacagccgaaaatgttgcagaaaggtggaatataagccgtgaagatcaagataagtttgctttttggtcacaaaaaaaagcagcagaagcaatttccaaaggaagattcgatacagaaattttcaaggtaaagattattcaaaaaaaggaagaaaactttttagataaagatgaacatccacgttctgatacactgctagaaaaattaagtaccttgccaacaccatttaggaataatggtactgttacagctggaaatgcaagtggtgttaatgatggttctgcagccctaataattgcatctgaaaaagctattaaagaatataatttaatcccaaaagctaggttattaagctctgccgcaactggtgttgaaccaagtgttatgggaattggaccagtttcagcaacaaaaaaagttctttcactttcaaatatcaatttagccaatataaatattattgagcttaacgaagcatttgcatctcaagctttagcaacaatgagagatctatcattgtcagacgatgatgaaagagtaaacattaacggtggggcaattgctttaggccatccacttggtatgtctggtgcaaggttagtgcttacagcaactgaacaattacaccaaagtaaaaataataagttagcactttgcacaatgtgtgttggggttggtcagggcagtgcaattattttagaaaaattataaa

SEQ ID NO: 233240 - DNA, 1243 bp, Unknown
  Bacterial polypeptide expressing nucleotide sequence isolated from the Sargasso Sea
aatgaattatgaaaaattttttagcgacgagcttaaatcactcaagtcgcaagggttatatagaaaattccgcgaaataaatagaacacgatcgacttttccaaaagcaaccgaacgcgatggagattctaagagacaagtagaagtttggtgcagcaatgattatcttaacttgagccaacatcctgctattgttaatgaaaccataaaagttactcaagaattaggcaccggctccggcggtactagaaacatttctggtacttcctcttaccatgcggaccttgaaagaacgctagctgaattgcacaaaaaagattctgccttgatatttccatcggcttacacagccaatcaatctactttatggaccttatgcaaaaaattagaaggaattgaaatatattctgatgagcttaatcacgcatcaatgattcaaggcattaaaaatgcaaacgttaaagtacatatttttagacataacgataccgaacatttagaagagcttttaaaaacgtcaaatgcaaatactcctaaaatgattgtgtttgaatccctttattccatggaaggcttaagatctcctattgaaaaaattatttggctcgccgaaaaatacaatgcgctgacatacttagacgaagttcattctgttggcttgtacggtccagaaggaagagggatagctgcagaagctggagtctccgataagatagacattatcaacggaactctctcaaaatcttttggtcaattaggcggttatgtggcggccaacgcggacataatagatttcattagaagttttgcacctggtttcatatttacttcttcagttaatccgtccattgtagctagttctattaaagctattaagctttcaaaaaaagcagatcatctaagacgtgaaataaaatttaattccgatcaaataagatctggattaagaaatcttaaaattccatttatagaaaatgatagtcatataattccaattcttattaaagaccctgtcctgtgtaaagacgcagcaaatctcttagtagataagcacggtatctatattcaacccgtcttcttcccaacagttccaaaaggcgatgaaagatttagagtaaccatcacgccaaaacataacgcttcagatattcaaaactttttaaatgcaatcgatgatatatggacagaaatgtccttagaaaggattgaagcagacagcaaagtagtaaatttgaattcgtaa

SEQ ID NO: 233241 - DNA, 1189 bp, Unknown
  Bacterial polypeptide expressing nucleotide sequence isolated from the Sargasso Sea
ttgattaaagaaaacaataattttgcagaagatttagctaaaataaaagctgaaggattatataaaaatgaacgcaccattactactccgcaaggtgtaactattaatactgaggagcatggtgatgcattaaatttttgttctaataattacctgggattatcaaataataatgaaataaaagaagctgccaaaaatgcattagaaaaatatggttttggtatgtcttctgtgagattcatctgcggaacacaggatatccataaaagattagaaagaaaaatatctaaattttttggttccgatgatacaattctttacacatcatgttttgatgcaaacggtgggctatttgaaacattattgggctcagatgatgcaattatttctgatgagttaaaccatgcatcgataattgatggtatacggcttagtaaagcaaaacgatatcgatttaaaaatagagatatgaatgaccttgaattaaagctaagtgaaaggaatgaatatcgtaatgttatgatagcaacagatggtgttttctccatggatggacatatagcaaaaatagataaaattgcagaattagctcagcagtataatgccatggttatggttgatgattcacatgctacaggattcatcggaaagactggtcgtgggtctgctgagtttcatggagtaatggataaagtggatatttggacatcaactctaggtaaagcattaggaggagcatcaggaggatttactacagggaaacaagaaattattgatctattaagacaaagatcacgtccatatcttttttctaatacactagctccatcaatagttgctgcaggactaaaagcgtttgaaatactttcttcatctacagttcttcgagatagattagaaaataataccaatttttttagagatgagatgaccaaagctggttttgaaattaaagttggcacccatccaatcattcctgtaatgattcatgatgcagttttagcccagaaaatggctgaaatgttaataaaaaaagggatttatgtagttggctttttttatccagttgttccaagaggtcaagcaagaattcgcgtgcaaatatctgcagaaatggatatgcaacaactcacaaaagcgatatcaatattcactcaagtgggtcaagaactaaatattataaaataat

SEQ ID NO: 233242 - DNA, 1201 bp, Unknown
  Bacterial polypeptide expressing nucleotide sequence isolated from the Sargasso Sea
tctgattgtgagtaaaagtttctacaatcatattgatcatgagatcgagcaaatattaagtgatgatctatataaaaatgagaggtttataaaatcccctcaacaaacagcaattaaactcaaagacggcaaagaagttatgaatttctgtgccaatgattatcttggtttggcaaataataaggaaataaaggatgcagctgctgcttccatcgagcaagatggttttggtatggcatcggtcaggtttatatgcggaactaatgatttacatagaacacttgaacaaaagctaagctcttttttaggttttgatgattgcatactttatgtagcatgttttgatgcaaatggcggtcttttcgagccactttttggtcctgatgatgcaataattagtgattctctcaaccatgcttcaataatcgatggcataagactttgcaaggcaaaaagatatagatatcaacatagtgatatggatgatcttgaaaaatgtttgaaacaagcagatgctgactcagcaaaacacaaagttattgttagcgatggtgttttttcaatggatggaacatacgctaaattggataagattgttgagctagctgaaaaatacgatgcattagtaatgcttgatgattgtcatgccactggatttgttggtgaaaagggcaaaggcacagctgaacattttggcttagaaggtaaagtagatattcttagtggtacgcttggaaaagctcttggcggtgcatctggtggttttatatgtgcaaaagaaaatgtaattaagcttctaaagcaaagatctagaccctatttattttctaatgcattatctccatctatagtctctgcatctttaaaagctttagagattgttcaggatcagccagaaagaagaaaaagaattaaagaaaatacaacttattttagagactccataaaatctttaggctttacaattaagggtgatatgcatcctataactccagtaatgttaggagaagctaagattgcacaagaaatgtcaaagaagcttcttgaagatggtttatatgcaattggcttcttttatcctgttgtacctaaaggtgaagctagaatcagattacaaattacaagtgaacatacaaaacaacagcttgacgaagccattaaaatattcgataaagttggaaaggaattgaaagtcatatga

SEQ ID NO: 233243 - DNA, 934 bp, Unknown
  Bacterial polypeptide expressing nucleotide sequence isolated from the Sargasso Sea
tatgccagtcgatatgtcatggatgagggatcggtactcggaactccgggaccaggggctggactggaatccacccacactggaggctgcaagtgagccaaggtgcacaatagatggtagggagatgatcatgctatcagcaaataactacctcaatctcactactcaccccagagtggtcgaggctgcagtggaggcaaccaggaagtacggtgcggggtccggatccgtgagagcaattgccggaacaatggacctacatctcgaagcagaaaggacctgtgccgaattcaaggaagtcgaggcatcactgatctactcagcggggtataccgcgaacgtcggcctcatccctactctggtaagggggccacaagacgtaatcatctcagatgagctgaaccatgggtcaataatcgacggggttaggctgactaaggcatcaagggcagtttatccgcacaacgacatggaagcactggagagggccctcagggagaacaaggactcggaaaggaaactgatcatcaccgatggggtattcagtatggatggcgatatcgcccctctcgacgagattgccgatctagcagaggaattcggtgctatgacattcgttgacgactgtcacggtgagggagttctcggagaaggtaggggaatagtatcgcacttcggtctacaaggcagggtcaccttcgaggtagggtccttctccaaggccctgggagtacagggaggcatccttgccggaagcgatgatgtcaggacacacgcactcaatcacagcaggtcctggctactctcgggaagccagccaccgggcgtcgcagccgctcagaaggctgcaatcgaggtccttatgtccgagcctgagcatgtcaggaggctttgggagaacaccacatacttccgagacgaactcgaatccatg

SEQ ID NO: 233244 - DNA, 1201 bp, Unknown
  Bacterial polypeptide expressing nucleotide sequence isolated from the Sargasso Sea
tctgattgtgagtaaaagtttctataatcatatcgatcatgagatcgagcaaatattaaatgacgatctatacaaaaacgagagatttataaattcgcctcaacaaactgcaattaaactgaaagatggcaaagaggttatgaatttctgtgccaatgattatcttggcctagcaaacaacaaagaaataaaagatgcagccgctgcttctattcaagaagacggtttcggcatggcttcagttagatttatatgcggaaccaatgatttgcatagaaagcttgaagagaaattgagttctttcttaggttttgatgattgcatactttatgtagcctgttttgatgcaaatggcggtctttttgaacctctttttggtcctgaggatgccataatcagtgattctttaaatcatgcttcaataattgatggcataagattatgtaaagcaaagagatatagatatcagcatagcaatatggaagatcttgagaaatgtttgcagcaagcagattctgattcagcgaatcataaagttattgttagtgatggtgttttctcaatggatggaacatatgcaaaattagacaagattgtagagcttgctgagaaatatgatgcattaataatgcttgatgattgccatgccactggatttgttggtgagaatggtagaggtacagctgaacattttggtctagaaggaaaggtagatattcttactagcactcttggaaaagctcttggtggagcatctggtggttttgtatgcgcaaaagaaaacgtaattaaacttctgaaacaaagatctagaccgtatttattttctaatgcattatcaccatcaatagtctccgcatccttaaaagctttagagattattaaagatgagccagaaagaagagaaagaataaaagaaaacacaatttattttagagactctatgaaatctttaggatttaagatcaaaggagatatgcatcctataactcctgtaatgttaggagatgcaaaaaaagcacaagagatgtcaaaaaagcttcttgaagaaggtttatatgcaattggtttcttctatcctgttgttccaaaaggtgaagctagaattagattgcaaattacaagtgaacatacaaaacaacaacttgaacaggcaataaaaatatttggtaaagttggaagagagctaaaagttatatga

SEQ ID NO: 233245 - DNA, 1207 bp, Unknown
  Bacterial polypeptide expressing nucleotide sequence isolated from the Sargasso Sea
catggaagacgcagtcatcgtttccgttgcgcgcacgccgatcggcaaggcgtttcgcggcatgttcaacgataccgaggcgcccgcattgggcggccacgtcgtgcgcaccgcactcgaacgcgcgggcgtcgcgccagccgacgtcgacgacgtgctgatcggctgcgccgcgcagcagggcacgcagggctacaacatcggccgcctgtcggccgcggcggccgggctgccagcgtcggtgcccggcatggcgatcgaccgcatgtgctcgtcgggcctgatgtcgatcgcgagcgccgcgcgcagcatcggcgcgggcgacgcacggatcgtcgtcgcgggtggcgtcgagtcgatctcgctcacgcagaacaagcacaagaacgtgtatcgcgcgcgctcgcaggccgtgctcgaccatcagccggctgcgtacatggcgatgatggaaacggccgagatcgtgtcgcgccgctacgggatctcgcgcgccgcacaggacgaattcgcgctgcagagccaccagcgcacggccgacgcccaggcggccggccgcttcgacgcggaaatcgcgccgctcgacgtgcggcgcgcgctgttcgacaaggaaggcaacccggccggttacgaggacgtgaatgccgcgcgcgacgaaggcgtgcgcgccgacacgacggccgagcggctcgcggggctgaaaccgtcgtggagcggcggcaaggtcgtcgagcagggcgcgttcgtcacggccggcaatgcgtcgcagctgtcggacggcgcagcggccgtggtcgtgatgtcgcgcagcgaggcggtgcgccgtgggctgacgccgctcggtgcgttccgcggcctcgcggtggccggctgcgagccggacgagatgggcatcggccccgtgttcgcgattccgaagctgctggctcgcttcgggatgaccgtcggcgacatcgggctgtgggagctgaacgaggcattcgcgtgccaggcgctgtactgccgcgacacgctcggcattcccgacgaccggctgaacgtcgatggcggagcgatcgcgctcggccatccgttcgggatgtcgggtacgcggatgacgatgcacgcgctgctcgaaggcgcgcggcgcggcgtgcggcacgcggtcgtgacgatgtgcatcggcggcgggatgggtgccgccgcgctgttcgaagtcggcgcgtag

SEQ ID NO: 233246 - DNA, 562 bp, Unknown
  Bacterial polypeptide expressing nucleotide sequence isolated from the Sargasso Sea
tgatgtaaatggagaagtgaccgttaataaagatgaaggccctcgtgaaccagatattgaaaagatcaaaagtcttaatccagcattcctagaaggtggtactgtaacagctgccacaagcagtccaatttcaattggagctgctgcagtattaatgactagtgatacatttgcagataaaaataatttaaatcctagagcagaaatatcttctagagctgtagctggagtgcattggaatcgaatggggatgggacctttacctgctactgaaaaagcattagcaaaagctgaaataacaatggatgacgttgaaaccattgaacttaatgaggcttttgctgcccaagctctctacgttattcgggaaggtggatgggatcaaaataaaattaatctcaatggaggtgcaatcgctctaggtcatccattaggatgctcaggcgcaagaatcattacaactcttattaatgtaatggagcagcaaaatactaaagttggattggcaacaatgtgcattggcggaggccaaggaatagcaactgtaataaaaaggtcataa

SEQ ID NO: 233247 - DNA, 742 bp, Unknown
  Bacterial polypeptide expressing nucleotide sequence isolated from the Sargasso Sea
tttaaaaacctttatggaattgatagcatgccagaaccagcagaaaatgtggctgaggacttttcaatttctcgtgaggatcaagatctttttgcatttaggtctcaagaaaaggcggcgttggctattgggtcaggacggctggcgcatgaaattattccgattaatttagaaggaaagtcgccagaagttgtttctaaggatgagcatcctaggaaagcagatttagaaaaattagcgcaattatcaaccccatttagaaaagatgggacagtaacagccgggaatgcatcgggagtaaatgatggagcagcagctctaatcattgcctctacgagtgcagttgaaaaatatcagcttgagccttttgcaaagattctaggaatggctaccgctggtgttgagccaagaataatgggcattggtccagtgccggcaacaaaaaaattattagagcgcctgaatttaaaaatttcagattttgatattatagagattaatgaggcctttgcagcccaaagtcttgctgtaatgaggctgcttggacttaaggataattcagattttgttaatccaaatggtggagcgatagcgttggggcatcctctcggaatgtctggagctaggttggctctcacctctggtttggagttaaaattatctggtcttaatagagcactgtgcactatgtgcattggggttggccagggaatttcacttgcaatagaaagggttaattaga

SEQ ID NO: 233248 - DNA, 784 bp, Unknown
  Bacterial polypeptide expressing nucleotide sequence isolated from the Sargasso Sea
gacacaaccatcggctggcgattcatcaatccaaaaatggaaaaactcttcggaatcgattcgatgccggaaaccgcggagaaccttgcagaacaattcaacatttcccgggaggatcaggattctttcgccttaagctcccagcagaaaacctccaaagcgatggcgtctggaaggctcgccattgaaatgattccagtatccattccacgcaggaaacaggagcccttacaggtcgaacaagatgaacatccccgtggagacacaactctggaaaaactaactaaacttcctgcccccttccgttccggaggttctgtgaccgcagggaacgcatcaggggtgaatgacggggccgcagctttgatcatcgcctctgagaaagcagtactggaacacaatctgaaaccccgtgcgcgaatcctagcctcctccaccgctggagttgaacctcgcatcatgggatatgggcctgtaccctccgttaagaaattgctgaacctgagcaagattcgattggacgaaatcggggtgatcgagatcaacgaggcattcgcagcccaggtgctcacggtgagcagggaacttgggatggaggatgatgatccccggatcaatcccaacggaggagcgatcgccctgggacacccccttggcatgagtggggcccgcctggttttaacctccgtagaggaactccatcaacgccaggagaaacttgcactttgcagcatgtgcatcggcgtcggccaggggatctcgatgctactggaacgggtatagc

SEQ ID NO: 233249 - DNA, 886 bp, Unknown
  Bacterial polypeptide expressing nucleotide sequence isolated from the Sargasso Sea
acagtcaaccgattgtgttcctctggtatggcagccattattcatgcaaaccgggcaataaaagctggcgaaggcgaggtgtttatatcaggtggtgtggagcacatgacaagaggtccttgggttatctcaaaagtttctaagcccttcggtagagatgctcaaatgcatgacagtagttttggatggcgctttgtaaatccgaaaatgaaagagatgtatggcactgatgccatgggacaaacggcggaaaacttggtggataagtatggcataagcagggaggatcaggacaagtttgctgcttggtcacaagcgaaagctaccgaagcgcaaaacaatggacgattggcaaaagagattgtttcagtagaaattccacaacgcaaaacagatcccatcattttctcaaaagatgaatttattcgtcctggaactacagaagagaagctagccaagcttcgccctgcctttagaaaagaaggcggtactgtcaccgcgggaaatgcatcaggcttgaatgatggagccgcagctaccatcatcgcttcagaagatgcagtgaaacaatacgaattgaaacctttggcacgcattgtgagtgctgctgtgcatggagttgagccccggatcatgggcattggacctgttggtgcttcagaaaaagccttgaaaagggccggtctaacgctagatgatatggacattatagaattgaacgaagcctttgcagcacaagttttagcatgcaccagagaaatgggcttagcagatgataatcctcgaataaatccgaatggcggtgcaattgctttgggtcatccgttgggcgttactgggacgagaattttacacacagctgcgcttcagtgcaagaaacaggcaa

SEQ ID NO: 233250 - DNA, 922 bp, Unknown
  Bacterial polypeptide expressing nucleotide sequence isolated from the Sargasso Sea
aaagtgccgggcacaacaataaatagactatgtggttcaggaatggacgcgatagggcagcgggcccgagcaatcagatgcggtgaggctgatcttgttttggctggaggggttgagtccatgagccgtgcaccctttgtcatgccgaagagcgaaaagggcttttctcgcgatctaagcatctacgacacaaccattggctggcgcttcataaatgagagaatgcatgccttgtatggcacagattctatgcctgagactgcagaaaacatcgcgcaagactttaaaatttcccgacttgatcaagatctctatgcagcacgctcacaggaaagaacacatgaagcacgtgattggttgcagggagaaataaccgctgtgaccgttccgcaaccaaggaagggtccgaaaatcgtcatgcaggatgaacacccccgcccgggtacattgttggaagaccttgccagactgcccgcgccatttcgcgagaacggaacggttactgccggtaacgcctctggagtgaatgatggtgcggcggcggtgatattagcaacggagcaggctgcgaaggagaatgggttacaatgcttggcgcgcatttccggtatggcgtctgctggcgtggagccacgaattatgggtataggcccggtgcctgcaaccagaaagctgatggatcatctcgatttaagcattgatgacttcgatgttatcgaaatcaatgaagcattcgccgcacaggttttggccgtcattcgagagtttggccttgatgacagcgcagagcaagtaaaccggaacggtggggcaatctcgcttggtcacccgttgggcgcttccggtgcgcgtctggttggaacggctgcgagaatgctgtccgaaggtggtcacaagcgtgctctttgtaccatgtgcattg

SEQ ID NO: 233251 - DNA, 826 bp, Unknown
  Bacterial polypeptide expressing nucleotide sequence isolated from the Sargasso Sea
tatgcctaaggctaattcagcgttttcacgaaatgcagaaatttatgatactacaattggatggagatttgtaaatccaaagatgaaggaaaactttggaatagattcgatgcctgaaacagctgaaaatgttgcagaaaaatatcaaattagtagagaggaccaagacagaatggccttatctagtcaacaaaaagccgctaattcaatttctagtggccgattggctaaagaaataacttcggtgaagattcctcaaagaaaaggtaaacctataatttttgataatgatgagcaccctagaggtacctcacttgaaaaactatcatcactaccgtcaccgtttcgccaaaatggaagcgttactgcaggaaatgcaagcggagttaatgacggtgcagctgcaattataattgctagtgaagctggtgtgaaacgaaaccatttaacacctaaagccagaataatttcagcagcaagtgctggagttgagccagcatacatgggtattggcccagttccagcctctataaaagctcttaaaattgctggcctaaatgtagaggatatggatgtaatcgaaattaatgaagcatttgctgctcagggtttggcaagcttacgatctctaggtattcaagacaatgatgaaagggttaatcctaacggaggagcgatagcacttggtcatcctttaggaatgtcaggaacaaggttaattctaacagctacgcaagagttaatagaaaaaagcaaaaaatatgctttatgtactatgtgtgtcggagttggtcagggtagtgccgttataattgaaaaagtttaa

SEQ ID NO: 233252 - DNA, 862 bp, Unknown
  Bacterial polypeptide expressing nucleotide sequence isolated from the Sargasso Sea
aatgtacaaagactttaaagcacatttagttaatgaaattgagaatacaaaaaaggcaggactatataaaagtgaaagaataataacctctcctcagagctccgttataaatacaaataatcaaaaaaatataattaatttatgttcaaataattatttaggtctttcatcagatccatctgttttagaagcagcgaaagaatcaattgacacacatggttatggaatgtcatctgttagatttatttgtggaactcagaatatacataaagatctagaagacactataagtgaatttctagggactgaagatactattttatatgcagcagcttttgatgctaatggaggattatttgaaccactatttggtcctgaagacgcaataatatctgatgagttgaatcatgcttcaatcattgatggaattagattatgtaaagcatcaagacatagatatagtcacaataacatgaaagatttagaggaaaaacttcaagaaacccaagattctagggcaagaattattgttactgatggtgttttttctatggatggaactatagctcaattagacaaaatttgtgcattagctgaaaaatataatgccctgattatgatagatgaatgtcattctactggttttatgggagagaatggaaaaggagttcatgaattaaaagatgtaatgggtaaaattgatataataacaggtactcttggtaaggctcttggaggtgcttctggtggtttcacatcaggaagaaaagaaatgatcgatttattaagacaaaaatcaagaccatatcttttctcaaatactctagctccatcaattgttggtgcttccttaaaagttttg

SEQ ID NO: 233253 - DNA, 868 bp, Unknown
  Bacterial polypeptide expressing nucleotide sequence isolated from the Sargasso Sea
aacagtcaatagactttgtgcttcaggaatggcagcaacaatcaatgcttacagagcaattgcaacaggagatggtgacatgtatatatctggaggaattgaacatatgactagaggaccatgggtgatttccaaagtatccaaaccttttggaagagatgcacagatgtttgatacaagttttggatggagatttattaacccaataatggctaaatcctatggtactgaaggaatgggccaaactgctgaaaaccttgttgaaaaatacaatataagaagagaagaccaagatcaatttgcctattggtcacaaatgaaagcaactcaagcgcaaaacaatggacgtcttgatgaagaaataacatcagtaagtattccacaaaggaaaaaggacgatcttatttttaaaaaagatgaatttataaaacctaaatcaactctagaaaaattaaattctttaaaccctgcttttaaaaaagaaaacggttccgttactgctggaaatgcatccggactaaacgatggtgctgcagccttactattaggaactgatcaagcagctgtaaaaaaccatttaaaaccaatagcaagaatagtatcctcaggtgttgccggagttgaacccagaataatgggtattggtcctgtcaaagcttctgaaaaagcattaaaaagagccggattgaccatcaatgatatggatgtaatagaacttaatgaagcatttgctgctcaaagcttagcatgtacaagagaacttggccttcaagacaatgatccgagaattaatccaaatggtggagcaattgctttaggacatccactaggaatgactggtgctagaatacttcaaacagcagctata

SEQ ID NO: 233254 - DNA, 574 bp, Unknown
  Bacterial polypeptide expressing nucleotide sequence isolated from the Sargasso Sea
cgcaggaaacaggaacctattcaggtcgaacaagatgaacacccccgtggagacaccaccctggaaaaactatccaaacttcctgcccccttccgttctggaggttctgtgaccgcagggaacgcatcaggggtgaatgacggagcggcagctttgatcatcgcctctgaaaaagcagcactggagcacaatctgaaaccccgtgcccgaatcctagcctcctccaccgctggagttgaaccccgcatcatgggatacgggcctgtaccctctgtcaaaaaattgctgaacttgagcaagatacgattgaacgaaattggggtgatcgaaatcaacgaggccttcgcagcccaggtgctcacggtgagcagggaacttggaatggaggatgatgatccccgagtaaatcccaacggaggagcgatcgccctgggacacccccttggcatgagcggggcccgcctggttttaaccgcagtcgaggaactccatcaacgccaggagaaacttgcactttgcagcatgtgcatcggcgtcggtcagggtatctcgatgctactggcacgggtatagg

SEQ ID NO: 233255 - DNA, 622 bp, Unknown
  Bacterial polypeptide expressing nucleotide sequence isolated from the Sargasso Sea
gatggcgtcaggaaggctcgccattgaaatgattccagtatccgttcaacgcaagaaactggaacctttagaggtcgaacaagatgaacacccccgtggagacacaaccctggaaaaactatccaaacttcctgcctccttccgttccggaggttctgtgaccgcaggaaacgcatcaggggtgaatgacggggcggcagctttgatcatcgcctctgaaaaagcagccctggaacataatctgaaaccccgtgctcgaatcctagcctcctccaccgctggagttgaacccagcatcatgggatacgggcctgtaccctcagtcaaaaaattgctggacataagcaagattcgattggacgaaatcggggtgatcgaaatcaacgaggcctttgccgcacaggtgcttacggtgaccagggaacttgggatggaggatgatgactcccgaatcaatcccaacggaggagctattgccctcggacacccccttggcatgagcggggcccgcctggttttaaccgccgtggaggaactccatcagcgccaggagaaacttgcactttgcagcatgtgcatcggcgtcggccaggggatctctatgctactggaacgggtatag

SEQ ID NO: 233256 - DNA, 829 bp, Unknown
  Bacterial polypeptide expressing nucleotide sequence isolated from the Sargasso Sea
cgaaacgcccgcattcaacgtcaccgcctgtgcggctcgggcctccaggccgtggtgagcgcagcgcaaaccgtgctgctgggcgatgccgatatcgccattgccggtggcgcggaaagcatgagccgcgcgccatacctggcgcctgccgcccgttggggttcgcgcatgggcgacgccaagatggtcgacatgatgctcggcgcgctgcacgacccgttccacacgatccacatgggtgtgacggcggaaaacgtcgcccgcgaattcggcatcagccgcgagcagcaagatcagaccgcgctggagtcccaccagcgtgcatcgcgtgccatccaggccggctacttcaaggaccagatcgttccggtgacgatcaagtcgcgcaagggcgatatccagttcgataccgatgagcatgtccgtcacgacgcgaccatcgacgacatgaccaagctcaagccggttttcacgaaagaaaacggtacggttacagcgggcaacgcttcaggtctcaacgatgcaggcgcggcgctggtgctgatggagcgttcggtggccgagaagcgcggtctcaagcctctggcccggctggtctcttatggccatgctggcgtggacccgaagatcatgggcatcggcccggtgccggcaacgcgcaaggcgctggagcgcgcgggcctgtcggtcaaggatctggatgtgatcgaagccaacgaggcatttgccgcccaggcttgcgcggtgacgaaggaactcggcctggacccggccaaggtcaacccgaacggttcgggcatttcgctcggccacccgatcggcgcaacgg

SEQ ID NO: 233257 - DNA, 677 bp, Unknown
  Bacterial polypeptide expressing nucleotide sequence isolated from the Sargasso Sea
tatgtatgtagatttatggtcggagtggggggcttcgcggggccccacggcgtattctatccctgggcgcgaggtgggcgggctccggcgcggggccagttccgttcgttcgttcgtccctccacggttttggggtccgcgggcggggtgctacgcgggcggggtgctacgcgggccgggtgctacgcgggcggggtgctacgcgggccgggtgctacgcgggcggggtgctacgcgggcggggtgctacgcgggcggggtgctacgcaggccgggtgctacgcgggcggggtgctacgcgggccgggtgctatgcgggccgggtgctacgcgggcggggtgctacgcggaccgggtgctacgcgggcggggtgctacgcgggcggggtgctacgcgggcggggtgctacgcgggccgggtgttacgcgggcggggtgctacgcgggcgaggtgctacgcgggtggggtgctacgcgggccgggtgctacgcgggcgaggtgctacgcgggccgggttttacgcgggcgaggtgctacgcgggcagggtgctacgcgggccggggtgctacgcggggtgctacgcgggcggggtgctacgcgggcggggttctacgcgggccggttgctacgcgggcggggtgctacgcgggccgggtgctacgcgggcggggtgct

SEQ ID NO: 233258 - DNA, 1192 bp, Unknown
  Bacterial polypeptide expressing nucleotide sequence isolated from the Sargasso Sea
catgtacggaaaaattaaaaattttttatcagatgagcttcaaggagtctctgatgcaggcttatttaaaaaagaaagaataattactacgccacaaggtgctgaagtttctgtttcaagcggagatgaggtagtcataatgtgtgctaataattatttgggattatcgtctaactctgaagttattgatgctgctaagcaagcattagatactcatggttttggaatgtcgtctgttcgatttatttgtggaacacaagatatccataaagagttagaaaataaaattgcaaatttttataaaacagaagataccattctttatgcagctgctttcgatgcaaatggagggttgtttgagcctttgtttggtcctgaagatgctattatttctgatgagctcaatcatgcttctatcatagatggagtaagattatgcaaggctaaaaggtatcgttacaaacatagtgatatgtctgacttagaagcacaattaattgaatctcagtctcaaagacatagaattatagttacagatggagtgttctctatggatggtgatatagctaaaatggatgaaatttgtgatttagctgataaatacgatgctttggttatgactgatgagtgtcattcagctggttttattggtgaaactggaagaggagttccagaatatcataatgtcatggatagagtagatattgtgaccggaacacttggaaaggctcttggtggtgcaatgggtggatacacaacagggaaaaaagaggtgattgaaatgttaaggcaacgttcaagaccatatttgttttctaattctctagcgccatctattgttggtgctgcaaataaagtttttgatattctatcagctagtaccgaattaagagataagttggaggacaataccaattattttaaatccaaaattattgaagcaggatttgatgtaaaagaaggtgactcgccaattgtgccaataatgttgtatgatgctgctctatctcaaagttttgcagacaaattgcttgaagaaggggtatatgccattggattcttttatccagttgttcctaaaggaaaagctagaataagaactcaaatatctgctgctcatgaaaaacatcatttagataaagcaattagcgcatttattaaggttggaaaagagcttggagttatctcctaa

SEQ ID NO: 233259 - DNA, 1042 bp, Unknown
  Bacterial polypeptide expressing nucleotide sequence isolated from the Sargasso Sea
tgtagatttaggaacattagtttcaaaagaagcaataagtaggtctaatttaaatagtgaagaaattaaccatgcagtttttggaaatgttatacatacagaaccacgtgatatgtatgtaagtagagttataggacttcaatcaggactgaaaaaggaatctgcagctctaactgtaaacagattatgtggttccggattgcaagccatagtaagcgcaactcagttaattttacttgaagacgcagaagtggtgttagcaggtggagttgaagttatgtcgagtggtactcatgttgttcaaggttttagatggggatctcgtatgggagatgcgaaggtgtttgacatgatgcttggctctttacaagatccatttgggcatgggcacatgggtataaccgcagaaaatatttctgagagatatcaaataagtagagagatgcaagataaatttgccttaacaagtcaaactagagctgtagacgcgataaagaatggtaaatttaaagagcaaattattcccatagagattaaaacaagaaaaggaattgaaatatttgacaaagatgagcatgtcaaacctgacacaactttagatactttatctaacttaaaagctgcttttaaaaaggatggttctgtcacagctgggaatgcttctggaataaatgatggagcatcagccttagttcttgccaatgagaagaaagccaaaaaaggaaagccattagctagaatagtatcttatggttttggaggtgttgagccagatgaaatggggatgggacctatcccagcatctaaaatggcactaaaaaaatctggtcttaatgtagatgatattgatttagttgagtctaatgaagcttttgctgctcaagcctgtgcagttaataagcagttgggcttggatccagcaaaggtaaatgttaatggtggagcaatagctttaggtcatccagtaggagctacaggttcaatcattatgacaaaattaattcatgaattaaaaagcatcaatggaagatatggtttggca

SEQ ID NO: 233260 - DNA, 659 bp, Unknown
  Bacterial polypeptide expressing nucleotide sequence isolated from the Sargasso Sea
acgtgctataaatgctattaatgaaggaagctttaaggatgaaattattgaagtcagtgtttcacaaaggaagggtaatccaataatttttgatactgatgaatatcctaggtacagacaagaaaatggaaaattgattttaaacacctccattgaaaaattatctgatctcaaaccagccttccggaaaggaggcacagtaaccgccggaaactctagcggaatcaatgatggtgctgcagcaattttaatgatgagtaaagaaaggtcagaagaattaggtctaaaaccgattgcaaaatggaagggttctgcagtcgcaggagtagatccttcaattatgggaattggtccagttccatctacaaaaaaactattggctagattatctttggataaagaagatgttggattaattgagatcaatgaagcatttgctgctcagacaataggtgtaatgaaagaactcgaattggatcacgaaaaggtcaatgtaaatggcggcgctattgctttaggtcatccattaggatgctctggggcacgtatttttactacactgctgcatgaaatgaaaagaaaagatgtcagatatggactagcaacactctgtgtaggtgttggacaaggggtatctactgttgtggaattaatgtaaa

SEQ ID NO: 233261 - DNA, 896 bp, Unknown
  Bacterial polypeptide expressing nucleotide sequence isolated from the Sargasso Sea
caaatccggtgaacaatcacttttgatcgcaggtggtgtggaaagtatgagccgggccccgtttgtaatcggaaaagccacctcggctttttcaagacaaaacagtatggaagacaccaccatcggttggcggttcatcaatccaaaaatggaagaactcttcggaaccgattccatgccggaaaccgcggagaaccttgctgagcaattcaacatttctcgggaggatcaggattccttcgccttaagctcccagcagaaaacctccaaagcaatggcgtcaggaaggctcgccatagaaatgattccagtatccattccacgcaggaaacaggaacctctacaggtcgaacaagatgaacacccccgtggagacaccaccctggaaaaactatccaaacttcctgcccccttccgttccggaggttctgtgaccgcagggaacgcatcaggggtgaatgacggagccgcagctttgatcatcgcctctgaaaaagcggcactggagcacaatctgaaaccccgtgcccgaatcctagcctcctccaccgctggagttgaacctcgcattatgggatacgggcctgtaccctctgtcaaaaaattgctgaacctgagcaagattcgattggacgaaatcggggtgatcgagatcaacgaggcctttgccgcccaggtgctcacggtgagcagggaacttgggatggaggatgatgatccccgaatcaatcccaacggaggagcgatcgccctgggacacccccttggcatgagcggggcccgcctggttttaaccgccgtagaggaactccatcaacaccaggagaaacttgcactttgcagcatgtgcatcggcgtcggccaggggatctcgatgctactggaacgggtatagc

SEQ ID NO: 233262 - DNA, 868 bp, Unknown
  Bacterial polypeptide expressing nucleotide sequence isolated from the Sargasso Sea
ggttgaacagcagtggataagccgcattcacaaagctttgaatacggcagctgatcgtggcgatattgaatacacatactctgaaaatgtggctaacacagactatgagcgtgttatgcgtgaatacgcagagcagggacaacaactcatagtgggggaagtctttggtttggaaagagctgctcgaaaagttgcaaaagattatcaaaacactgcatttttaatgggctcttcatttggaggagttggaccaaattttgcggtattcgataactggattcacgagccatcctacctgtctggaatgattgctggttcaatgactaagtcgaataaaatcggcatggttggcggatatgctattccggaagttaaccgtttaatgcatgcatttatggatggcgctagagatgtaaatccagatgttaagtttatggtgaactttatagatagctggtatgacccacccaaagcaaaagagagtgcatttgccatgatggatgctggagccgacataatgtatgcggaacgctttggtgtatcagatgctgcggttgaaagaggcgttaaggccattggcaatgttatagatacttctggtgattacccaggaactattttggcctctgctttatggcatatggaagcaacaatagataaagcgatatcaaatgttgtatcaggcaacttcgaagccgcggactatggacaatacagctttatggcctacggtggcggatctctggtaatggatgaaagccttgttccagctgatgtggcaacttcggtgaaagcaaaacagcaagaaatactagacggtttattccgagtaaacgtgaatgatgctcggcctcaatctgacggttaa

SEQ ID NO: 233263 - DNA, 454 bp, Unknown
  Bacterial polypeptide expressing nucleotide sequence isolated from the Sargasso Sea
ccgggtgctggtgcacggctcgcgcccgcaaatcgaaacccgcctggaagcacgcggccttaccccggcttaccacgaaggcttgcgcatcaccgatgctgcgacgctggagtgtgtgatcgacgcggtgggtcatttgcgcattgccatcgaggcgcgcttgtccatggacatggcgtcctcgccgatgcagggctcgcgcctgcgtgtggccagcggcaacctggtcaccgcacggccaatcggcgtgctggaaggcgtggactaccaccacaccggcgaagtgcgccgggtcgaccgcaagggcatcaaccgcctgttggatgagcgctctatcgtgctgctgtcgccgttggggtattcgcccaccggcgagatcttcaacctggcctgcgaagacgtcgccacccgcgccgctatcgacctgggcgccgacaagttgctgctgttcggc

SEQ ID NO: 233264 - DNA, 428 bp, Unknown
  Bacterial polypeptide expressing nucleotide sequence isolated from the Sargasso Sea
catgcacgactacgtcaactggctacgccacgcctcgccctacatcaacgctcatcgtgactgcaccttcgtggtcatgttgccgggcgagggtatcgcccacccgaatttcgccaatatcgtccacgacctggtgctgctgcacagcctcggcgtgcgtctggtgctggtgcacggttcgcgcccgcagatcgaggcgcgcctgaccgcccgcggcctgaccccgcactatcatcgcgacctgcgcatcaccgatgcaccgaccctggagtgcgtgatcgatgccgtcggccagctgcgcatcgccatcgaggcgcgtctgtcgatggatatggccgcttcgccaatgcagggctcgcgcctgcgcctgaccagtggcaacttcgtgaccgcacggccgatcggcgtgctcgatggcatcgactatc

SEQ ID NO: 233265 - DNA, 994 bp, Unknown
  Bacterial polypeptide expressing nucleotide sequence isolated from the Sargasso Sea
tatgactcttacgcaccaaataagtcgtaggttagcactcgctttagtggcaagcgcaagcctattctcatcagttggcattgctgctgctgataaaattaaagttgcggcaatttatacattgccggttgagcaacagtggataagccgcattcacaaagctttgaatacggcagctgatcgtggcgatatagaatacacattctctgaaaatgtggctaacacagactatgagcgtgttatgcgtgaatatgcagagcagggacaacaactcatagtgggagaagtctttggtttagaaagagctgctcgcaaagttgcaaaagattatcaaaacaccgcatttttaatgggctcttcgtttggaggggttggaccaaatttcgcagtattcgacaactggatccatgaaccatcatacctttctggaatgattgctggttcaatgactaagtcaaataaaatcggcatggttggcggctatgctattccagaggtaaatcgtttgatgcatgcattcatggatggtgcaagagatgtaaacccagatgtgaagtttatggttaactttatcgatagttggtatgacccacccaaagccaaagagagtgcatttgcgatgatggatgctggcgctgacataatgtatgcagaacgttttggtgtatctgatgctgctgtagaaagaggcgttaaagccattggtaacgttatagatacatcgggtgattatccaggaacgatcttggcttctgctttatggcatatggaggcaacaatagataaagccatagcaaatgttgtatcaggtaattttgaagcagctgactacggacaatatagcttcatggcatatggtggcggatctttggtaatggatgaaagtcttgtgccagctgacgtggctagttcagtaaaagcaaaacagcaagaaatattagatggtttgttccgagtgaatgtaaacgacgctcggcctcaatcagacggttaa

SEQ ID NO: 233266 - DNA, 749 bp, Unknown
  Bacterial polypeptide expressing nucleotide sequence isolated from the Sargasso Sea
catgcacgactacgtcacctggttacgccacgcttcgccctacatcaacgcccaccgcgactgcaccttcgtggtcatgctgccgggtgaaggcgttgcccacccgaacttcgccaacatcgttcacgatctggtgctgctgcacagccttggcgtacgcctggtgctggtgcacggctcgcgcccgcagatcgaggcgcgcctggctgcccgtggcctgatcccgcattaccatcgtgacctgcgcatcaccgacgcaccgaccctggaatgcgtgatcgacgccgtcggccagttgcgcatcgccatcgaagcacgcctgtcgatggatatggctgcctcgccgatgcagggctcgcgcctgcgcctgaccagcggcaacttcgtcaccgcgcggccgatcggcgtgctcgatggcgtcgactatcaccacaccggcgaggtgcggcgtatcgatcgcaagggcatcaatcgccagctcgacgagcgcagcattgtgctgctgtcgccgctcggctattcgcccactggggagatcttcaacctggcctgtgaggacgtcgctacccgcgcggccatcgacttgggcgcggacaagctattgctgttcggcgccgaagacggtctgctcgacgagcagggcaggttggtgcgtgagctgcgcccgcagcaggtgccggcgcatctgacgcgcctgggcagcaactaccagggtgaattgctcgatgccgcggccgaagcctgccggg

SEQ ID NO: 233267 - DNA, 863 bp, Unknown
  Bacterial polypeptide expressing nucleotide sequence isolated from the Sargasso Sea
gctgcagggcgcccatatcaacgtggtgagcggcaactttattatcgctcagccgctgggcgtcgacgacggcgtggattattgccatagcggacgcatccgccgtatcgatgaagaggcgatccatcgccagctggataacggcgctatcgtgctgatgggtccggttgccgtttccgtcaccggcgaaagcttcaatctgacctcggaagagattgccacccagctggccgtgaagctgaaggcggaaaagatgatcggcttctgctcttcgcaaggggtttacaaccaggatggggtgattgtttccgaactgttccccaacgaagctcaggcgcgcgtggaagagctggaggcggaagaggattacaactccggcacggtgcgttttctgcgcggtgccgtcaaggcctgccgcagcggcgtgcgtcgttgccacctgatcagctatcaggaagacggggcgctgctgcaggagctgttctctcgcgacggtatcggcacccagatcgtcatggaaagcgccgagcagattcgccgcgccaccattaacgatatcggcggtattcttgagctgattagcccactggagcaacagggcattctggtgcgccgctcccgcgaacagctggagatggaaatcgataaattcacgattattcagcgcgataacaccacgattgcctgcgccgcgctctatccgttcccggaagagaaaatcggcgaaatggcctgcgtcgcggtgcatccggactatcgcagctcatcgcgcggtgaagtgctgctgaaccgcatcgccacccaggcgaagcagatgggattgagcaaattgtttgtcctgaccacccgcagtattcactggg

SEQ ID NO: 233268 - DNA, 1339 bp, Unknown
  Bacterial polypeptide expressing nucleotide sequence isolated from the Sargasso Sea
atgaggtgtaaacaacgcgtgcgtaccactgaactggttgatggatttcgtcattctgccccttacgtcaatgcccatagagggaaaacctttgtggtgatgttgggtggcgaggctttagcacaaaatcaatttcgcggcattttaaatgacgtggccctgttgcacagtttaggcattaaagtggtgttggtgtatggcgcgaggccgcaaatcgatgcggcgttggcagccaatgggattgaacccgcctaccacgaaggtgtacgtatcaccgatgaagactcgcttaaagtgatcaagcaggtcgcgggcgcattgcagtttgatatcacagcacgtttatcgatgagtctcagtaatacgccgatgcaaggcgcgcaaatcaacttagtcagcggtaactttgtgatcgcccagcctctgggggtcgataatggcgtggatttttgtttaagcggcaaagtgcgccgtatcgatactcaagggcttaagcgtcagctcgataaccactgtatcgtgttgatggggccgattgccgcatcggtcactggcgaaagctttaacctcaccgccgaagagattgccactcaagtcgcgatcaagctgaaggccgacaagatgattggctttagttcgcaaaacggtatcctcgatcgcaatggcgatgtgattgccgaattaatgccaaatgacgcgcaaaacattctgactaagctcgctgagcaaggttcggcctgtgtaggcactatggctttcctcaaggcgagtattgatgcgtgccgcaatggcgtgccacggtgtcatttggtcagttacctcgatgacggcgccttgctgcaggagttgttttcccgcgagggcataggtacgcaaatcgtgactgaaagcgctgagcgtctgcgccgcgcgtcgattagcgatattggtggcgtactaaacttaattcgccctctggaagaacaaggcattttggtgcgccgcagtcgtgagcagcttgagattgagatcgagcagtttatgttgattgagcgtgatggcttagtgattggctgtgcggccctgtatccctttgaagaggataacgccggggagtttgcctgtttggtagtgcacccagattatcgcgatgcggataggggcagtttgctgctgaaaaacatcataggtcaggcgcgtagccgcggttattcccgtttgtttgctttgactacccgcagcattcactggttcttagagcatggctttgtgattgaagatgtggaagccttaccgcagaagaaaaagcagctgtataactaccagcgccgctctaaaattctcgccctcgatctgtaag

SEQ ID NO: 233269 - DNA, 1339 bp, Unknown
  Bacterial polypeptide expressing nucleotide sequence isolated from the Sargasso Sea
tatgaggtgtaaacaacgcgtgcgtaccactgaactggttgatggatttcgtcattctgccccttacgttaatgcccatagagggaaaacctttgtggtgatgttgggtggcgaggctttagcacaaaatcaatttcgcggcattttgaatgacgtggcgttgttacacagtttgggtattaaagtggtgttggtgtatggcgcgaggccgcaaatcgatgcagcgttagccgccaatgggattgaacccgcctaccacgaaggtgtacgtatcacggatgaagactcactcaaagtcattaagcaagtcgcgggtgcattacagtttgatattaccgcgcgtttatcgatgagtttaagcaatacgccgatgcaaggtgcgcaaattaacttagtcagcggtaactttgtgattgctcagccactgggcgtcgataatggtgtggatttttgtctaagcggcaaagtgcgccgtatcgatactcaagggcttaagcgtcagctcgataaccactgtatcgtgttgatggggccgattgctgcatccgtcactggcgaaagctttaacctcacggccgaagagattgccactcaggttgctatcaagcttaaggccgacaagatgattggctttagttcgcaaaatggcatcctcgatcgcaatggcgatgtgattgccgaattaatgccaaatgatgcgcaaaatattctgactaagcttgctgagcaaggttctgcctgtgtgggcacgatggctttcctcaaggcgagtattgatgcgtgccgtaatggggtaccccgttgtcatttggttagctatcttgatgatggtgccttgctgcaggagttgttctcccgcgaaggcataggcacgcaaatcgtgacagaaagcgctgagcgcctgcgccgcgcatcgattagcgatattggcggcatattgaatttaatccgtcctctggaagagcaagggattttggtgcgccgaagccgtgagcagcttgagattgagatcgagcagtttatgttgattgagcgagacggcttagtgattggctgcgcggccctgtatccgttcgaggaggataacgccggtgagtttgcctgtttagtggtgcatccagattatcgcgatgcggataggggcagtctgctgctgaaaaacatcataggtcaggcgcgtcatcggggttattcccgtttgtttgccttgactacccgcagcattcactggttcttagaacatggctttgtgattgaagatgtggatgcattgccgcagaagaaaaagcagttgtataactatcagcgccgctctaaaattctcgcccttgatctgtaa

SEQ ID NO: 233270 - DNA, 295 bp, Unknown
  Bacterial polypeptide expressing nucleotide sequence isolated from the Sargasso Sea
attgacaaaaaattctataactttacataacacatttgctgaagcttttcctatgaaagcctcaaggctaattgttacagcatattcaaaaaaatgggcactggaagctgccaattcttttacaggttttgcaacatctgttattgcttgcggttgtgaggcaggaatagagtcaatcctgaatccggaggatacacctgatggaaggccaggcgtgtcattattagttttttccatgtcagaaaaagatttagccaaacaaattttaaatagagctggacagtgtataatgact

SEQ ID NO: 233271 - DNA, 847 bp, Unknown
  Bacterial polypeptide expressing nucleotide sequence isolated from the Sargasso Sea
aatgtatgttgaggtgatggttcctcatgagatccagcatccatatccaattgtttttcttcatggggctggacagaccggcgttgattacatgcagactcctgatgggcgaccaggatgggcatttgattttcttgagatgggctatgtggtttatgtgcaggattttcctgcacgaggcaggtcccaatatgtccctggtgttgacggagatattcgtattcgtaatggacataatctagaggagatatttactgcatctgccgctacagcagattttccacaagcttcaaaacatacccagtggcctgggacgggtcgaatgggcgatcctatcgctgataatttcatgaagactcaggtgcaatttattggtggacgccaggcacaactgactattgatgcgaatgtggcactacttgatatgattggtacacctgtaattttgcttacccattctcagggtggttggtttggttggaatattgctgatgaacgccccgagcttgtgcataccattgttactttagagccagcagctccacctataagaggtgtaaatacatctaccgcaacttaccgcgatggaggagggctttcatggggtgtaggtaatacgcctattacctacgatccgcctgtgaataactcatcggagctgcaagttgaattgcagtcgcagtctgaaggtcccggtcttgttccatgttatcaacaggttgaaccagctcggcagttagtgaatctggcagatatcccagtgctttttatgaatggtgaagggggttatcatcgaatttttgatcattgtcttgctaattggctaaatcaggcaggtgtgcaaact

SEQ ID NO: 233272 - DNA, 309 bp, Unknown
  Bacterial polypeptide expressing nucleotide sequence isolated from the Sargasso Sea
aatgattattaacgggataaaaattgaggatacctttgctgaagcttttccgatgaaagtggtaagacttattattacagcagattcaaagtattggttaaagcaggcagcaaacaatattacaggttttgcaacttcagtgattgcttgtggttgtgaagcaggaatagaaaaagaaattaaatcttctaaaactcctgatggtagacctggaatagctgtgcttttatttgctatggacagcaaaggtcttgctaaacagattttaagaagagttggacagtgtatattaacttcaccaactaccgc

SEQ ID NO: 233273 - DNA, 898 bp, Unknown
  Bacterial polypeptide expressing nucleotide sequence isolated from the Sargasso Sea
atgaaaataaatgggttagctatcgagaatacttttgctgaggcttttaatatgaaggcaagcagaataatcgtcacagctgataatacaaagtgggctagaaatgcagctgtgtcatttactggatttgcaacatctgttatagcctgtggggtagaagcaggcattgaaaaacaattgacaaccaaagatacacccgatggtagacctgggttttccatactccttttctcaatgtcacggagtcagctagaaaagcagcttgagacaagagctggacagtgtatcttgacttgcccaactacggcactattctcaggtcttgatggagaagatatgattccacttggaaaaaatttaaaatattttggtgatggataccaaatagcaaagcgcattgataaaaaaaggttctggaggataccagtaatggatggggaatttatgtgtgaggagatgactgcacgtatcccggcaattggtggtggtaatttcttacttttatcaaaaaatagatcttcatgtcttttagcatgtgaattagcagtaaatgttatgagtaagattgataatatcattacacctttccctgggggcgttgttcggtctggttctaaagttggctcaaaatataaagcgctgatagcgtcaacgaatgatgcgttctgtccatctctaagtggaattacaggaagcaagcttcacaagagtgttaattgtgtcatggaaatagttataaatggattaactagagatgacatagataagggtattcgagagtcacttattgctatatcaaaatctaaatacaaaaaagacattgtatccgtgtcagcaggtaattatggtggaaaactaggccaacatcacttccatctaagaaagatattaaaatgaa

SEQ ID NO: 233274 - DNA, 997 bp, Unknown
  Bacterial polypeptide expressing nucleotide sequence isolated from the Sargasso Sea
cttggccttctggaaaaattctgccctccgcaccgtgcgtcgcggacatatgtggatttcgggcgaccgcatcgaacgagacggacagacccaccaatgcggaccgcttttcgttgagtgggaggcgccggaggaggtcacgcgcccttggccgattgtgctcgtgcatggcggtggctaccagggaaccgagtggtttgacacgccggatggccgtccgggctgggcacaacgtctggtggaagcgggctacgcggtgctggtggtcgatcgtcctggacaaggacgatcgccgtaccacgtcgagacgatggggccaatggggcccgggttctcctatgagcacggccgcgacatctacttcccgacaaaatatgaatctcaacacacccaatggccatttgcccgggacgacgaggcagcgatggacgagttcattgccggctatgggccgcttcccgcagacctcgcgttttccgaggacatggaggcggacaggatcgcaaagctgctggacaggatcggtccggcgatcctcctgacgcactcagcgtcgggaccagttggttggcttgtagcagaccgccggcccgggctggttaaagggatcgtcgccgttgagccgatgggcccgccattcgcacatattcccaatatcgggtcgctcgcgtggggcctcgcggcggccccgcttagctgggagccgcccgtcgcgacgcctgaagagctgcgggcggctcttcctggcacataccggctgcctgcgctcgccggtttgccgatcgtcgccgtcaccgcggaagcgtcagccttcgccgcggccagtcgacccgctattgagcaactgaaggcggctggcagccgggcggaagtgttgcatcttcccgaccacggtgtgttcggaaacggccacgggctcatctacgaaaagaactcggatgatgcactggtgccggtgttgaggtggctggtcgagaacacggaaaaacccaactga

SEQ ID NO: 233275 - DNA, 898 bp, Unknown
  Bacterial polypeptide expressing nucleotide sequence isolated from the Sargasso Sea
aatgatatataaaggcataaaaattgataatacatttgcagaagcatttaatatgaaagctagtcgaattatcgtgacagctgataattctaaatgggctcgaaatgcatgtgactcttttacaggatttgcaacatctgtgattgcctgtggaatagaagcagggatcgaaatggcgctcaaaaaatctgaaacaccagatggaagacctggatattctatacttctcttttcaatgtctagatctcagcttgaaaaacaattagaaactagagtaggtcagtgcattttaacatgtccaacaacagctattttttctggaatgaacggtgaggatatgataccgctaggaaagaatttaaggtattttggagatggttatcagatctcaaaaaaaattaataataaacgattttggagaatacctgtaatggatggtgaatttctttgtgaagaattaactgcccgcgtgcctgccataggtggtggaaatttcttggtattaagcagtaatagaaagtcctgccttgaggcttgtgaagtagctgttgatgcaataaaaaatctaccaaatgttatcacaccttttccgggtggtgttgtaaggtcaggctcaaaagtaggatcaaaatataaagctctgattgcatctacaaatgatgcattttgtccaacacttaggagttttacaaaaagctcattatctgaaaatgttaattgtgtaatggagatagtgattaatggactaacatttgaggatataagtctagcaacaaaaaaatgtatcgagagtatatcaaaatcaacaattaaaaaagatattttatccatatctgcagggaactatggtggcaaactgggtcaatatcaatttcatcttaggaaaataatgaaatga

SEQ ID NO: 233276 - DNA, 311 bp, Unknown
  Bacterial polypeptide expressing nucleotide sequence isolated from the Sargasso Sea
tttgagtgctataatcgacgatacttatgccgaagcttttaaaagtatttatgtagaaatacttattactgcggtgaatcaaaaatgggtaaagcacgctgtcgatgctgctacgggaaatgcgtctagtagtattttgtgcgattgtgaagccggttttgatagatttgttggccctggtggtgatgagagtgttgaaacacctgacggaagacctggagcaattatccaacttcatattccaaaattttggaaagatccaaaaaaacttgaaaaatctgccttagttaggataagtcagaatatactta

SEQ ID NO: 233277 - DNA, 898 bp, Unknown
  Bacterial polypeptide expressing nucleotide sequence isolated from the Sargasso Sea
aatgaaaattaaaggtatagaaattcataacacatttgctgaagcatttaatatgaaagcagcaagaattattgttactgctgataataataaatgggcaaaaaatgcatgtttatcatttacaggttttgctacttcagtgatagcatgtggaattgaagctggcatagagaaacagcttaacaaaaacgaaactccagatggtcgcccaggtttttctatattactattttctatgtcaaggtctcaacttgaaaaacagcttgaaacaagagtaggacaatgtttacttacttgccctactactgctgtattttctgggattgatagtgaggataaaattcctctaggaaaaaatcttcgttactttggagatggttatcaaatttctaaaaaaattaattcaaaacgatattggagaattccagtaatggatggcgagtttatgtgtgaagaatatacctctcgcatctcggctataggtggaggtaattttctaatattgagcaagtcaagaaaatcctgtttagaggcatgtgaaatagcgatagaggcaattaagaatgaagcgaatataattactcctttccctggaggtgtcgtaagatcaggatctaaggttggctctaaatataaagcgttaattgcatctacaaatgatgcattctgcccaacccttaagagtctcactcaatcaaaattaccgtccactgtttcatgtgtaatggagatagtaataaatggaattagtcataatgatattgccagcgcaactaaaaaaagtattctagctatatcaaattcgaaagttaaaaaagatattgttgcagtatcagcaggtaactatggcggaaaacttggacaacataaattttatttaagaaagatactcaaatga

SEQ ID NO: 233278 - DNA, 462 bp, Unknown
  Bacterial polypeptide expressing nucleotide sequence isolated from the Sargasso Sea
tatgaatattgaaaaattaaaagaaaacattgaaaacattgatgctgagaatatttcaagtgaagatattacttcaattaggcagactattgaggcattagataatggcaagataagagttgcagaacaagtcgatggtgaatggttggtcaatgaatgggtaaagaaatcaatactacattatttcaccatagaaaatttgaaagtcatttcatcaggtgatgttacttattttgataaattagaaccaaagaaaaattatgaagatttaaaaattagagtagttcctccgggagttgtaaggtatggagcattttgtgagcctggagtagttgtaatgcccggtttcgtaaatattggagcttatgttggttctggaacaatggttgatacttgggcaacagttggttcatgtgctcaaattggaaaaaatgttcatttatctggtggggtaggaattgg

SEQ ID NO: 233279 - DNA, 142 bp, Unknown
  Bacterial polypeptide expressing nucleotide sequence isolated from the Sargasso Sea
gttgtagtcccagattcgctcccaggaaaatctttgccagatggttcacagggtccaagcttatattgtgctgttatagtcaaaaaagtcgatgcgcaaacacgctccaaaacatctgttaacgaattgttaagggattaga

SEQ ID NO: 233280 - DNA, 415 bp, Unknown
  Bacterial polypeptide expressing nucleotide sequence isolated from the Sargasso Sea
atgagtatagaaaatatcataaataaagcctgggaaatcaaagaccaggttggcccaaattctgatcaaaatttaaaagatgctataaatcaaattattgaagatttagattgtggcaagtctagagttgcagaaaaaatcgatggtaaatgggtaactcaccaatatctcaaaaaagcgatcatgttaagttttagaatatatccaatggaaaatttaaatggcccttatagtagttggtatgacaaagctcacttgcttaaaggtaaaactgctggatggacaaaacaagatcatgaaaaagcaggttttagaatggttcctaactcacctgtaagaaaaggatcttttgttggcaaaaatgcagtcctaatgccgtgctatgttaatatcggtgcatacattgatgaaggta

SEQ ID NO: 233281 - DNA, 484 bp, Unknown
  Bacterial polypeptide expressing nucleotide sequence isolated from the Sargasso Sea
aatgagtgataatacagaattaaaaaataaaattgaaagtgcttgggaaaatattactaaaatttctcctaccgatacagacatcgctgatgctgtaaatgaagttataaaaaaacttgataatggacaatctagaattgcagaaaaaaatggcaatgattggattgttaatcagtggttaaaaaaagccgttcttatatcattccgaataaatgataataaaattttaaaaggaccctatacgtcttggtatgacaaggtgaaaggtaaaactgttgattggaatgaggatcaatggaaagaagctggctaccgacatgttccaaatggtaccgttcgcgaaggatcattcataggtaaaggtgtggttctgatgccatcatttgtaaatattggcgcttatatagatgaaggcacaatggtagatacatgggcaactgttggctcatgtgctcagatggaaaaaactgtcacttatcaggtg

SEQ ID NO: 233282 - DNA, 565 bp, Unknown
  Bacterial polypeptide expressing nucleotide sequence isolated from the Sargasso Sea
atgagtaatttagaaaatattatcaatcaagcctgggaaaaaaaagatcaaataaatcaaaattctgatcaagcttttaaagatgctataaatcaagttatcaaagatttagatagcggtaagtcaagggttgctgaaaaaattaatggaaattgggttacacaccaatatctgaaaaaagcaattatgttaagtttccgaatttatccgatggaaaatttaaatggaccttatagtagttggtatgacaaatctcatttgttaaaaggtaaaactgctggatggtccaaagaagatcacgaaaaagctggattcagaatggttccaaactcaccggttagaaaaggttcgtttgttggtaaaaacgctgttcttatgccctgctatgtaaacattggtgcctatatcgacgaaggcacgatgatagatacattcgcaagagctgggagttgttgtcagatagggaaaaattgtcatatttcagcaggaagtggagttggtggagttttagagcccgctcaagcgcttccaactattatagaagaccaatgtttttttgggtgca

SEQ ID NO: 233283 - DNA, 570 bp, Unknown
  Bacterial polypeptide expressing nucleotide sequence isolated from the Sargasso Sea
tatgtctttagaaaaaataatcaatgatgcttgggaaaataaagatcaagtgagtcctaattcggaccagtctttaaaggacgcaataaatcaagtcatctctgatttagatagtggtaaatcgagagttgccgaaaaaataaatggagattgggtaactcatcagcacctaaagaaagctataatgttaagttttagaatttacccaatggaaaatttaaatggtccttatagtagctggtatgataaatcacatttattaaaaggaaaaacagctggctggacaaaagaagatcatgaaaaagcaggttttaggatggttccaaactcacctgttaggaaaggatcattcataggaaaagatgctgttcttatgccatgttacgtaaatatcggttcctacattggggctaaaacgatgatggatacatttagtcgtgctggcagttgttgccagattggtgagaattgtcatatatctgcaggatctggagttggaggcgtactagaaccagctcaagcattacctacaataatcgaagataatgtatttttaggagcaatgtctga

SEQ ID NO: 233284 - DNA, 568 bp, Unknown
  Bacterial polypeptide expressing nucleotide sequence isolated from the Sargasso Sea
tatgacagatttagaaaaaattattaatgatgcatgggaaaataaaaatgatgttacacaaaattctgatggctcattattaaattcaataaatcaaattattgatgatttagataaaggcaaaatccgtgtagccgaaaaaataaataatgaatgggttactcaccaatatattaaaaaggcaattatgctaagttttagaattcatagtatggaagctttatcaggtccttatagttcgtggtatgataagtcacatcttcttaaaggtaaaactgcaggctggggtaaagatgattttgaaaaagctggatttagaatggtgccaaattcaccagtaagaaaaggtgcccacattgctcccaatgttgttttgatgccatgctttataaatataggtgcatacgttggatctggaacaatgatggatacattttccagagcaggatcttgctgtcaaattggagaaaattgtcacatatcagcaggaagtggagtaggtggagttttagaaccagctcaagcattacctactataattgaggacaatgtttttttaggagcaatg

SEQ ID NO: 233285 - DNA, 283 bp, Unknown
  Bacterial polypeptide expressing nucleotide sequence isolated from the Sargasso Sea
tgttttgtcggcgctagggcagaattgctgaaggtgttattgttggcaaaggatctgttttatctatgggagtttacatttggtgcatcaacaagaataattgatagagcaacaggtgaaattcactacggaaaagttccaccctattcagttatagtgcctggggctatgccgagtaaaaataacccggacggcccatcattatattgtgtgattattgtaaaaaaagtggacgaaaaaacgagaagcaaaacttctattaacgatttattaagagattaat

SEQ ID NO: 233286 - DNA, 286 bp, Unknown
  Bacterial polypeptide expressing nucleotide sequence isolated from the Sargasso Sea
cgcatcatctacgatcgcgagaccgggcggagcaaggggatcgccttcgtgcacttcgccgagaaggaatcgatcgcgatcgcagcggagcgcacgcacggcgttgagatcgacggtcgcgccgtacgatgcaaccccgccgcggacggccccacgcagcatcccccgccacgaacggccgaccgcggcaggggcgggcggcgcgacgaccgacgcgggagggatcgcgacgattcccgccgcggcggcgatcgggggcgctactcgcgccggtcgcggagccgct

SEQ ID NO: 233287 - DNA, 454 bp, Unknown
  Bacterial polypeptide expressing nucleotide sequence isolated from the Sargasso Sea
atgtctttagaaaaaattataaatgatgcttgggataaaaaagatcaggtaaatcagaattcagatcaatccctaaaggacgcaataaatcaagtaattagagatttagatagtgggaagtcccgtgttgcagaaaagattgatggtagatggattacccaccagcatttaaagaaagcaattatgttaagttttagaatttatccaatggaaaatttaaatggtccttacagtagttggtacgataaagctcatttattaaaaggcaaaactgcaggctggaccaaagagcaacatgagtctgctggtttccgcatgacccctaacagccccgtgcgtccaggttcttttattggaaataatgctgttcttatgccatgctatgtaaacattggtgcatacattggggctggaacaatgatggatacgtttagtcgtgctggaagctgttgcc

SEQ ID NO: 233288 - DNA, 264 bp, Unknown
  Bacterial polypeptide expressing nucleotide sequence isolated from the Sargasso Sea
aatgagtatagaaaatattataaacaaggcttgggaaaacaaagatcaagttaatccaaactcagatcaaagtttaaaagatacaattaataatataattaatgacttagatagcgggaaagttagggttgctgaaaaaattgatggtaattggataacacatcaatatctcaaaaaagcaatcatgttaagttttagaatttatcctatggaaaatttaaacggtccttatagcagttggtatgataaagctcatttacttaa

SEQ ID NO: 233289 - DNA, 355 bp, Unknown
  Bacterial polypeptide expressing nucleotide sequence isolated from the Sargasso Sea
aatggataacttagaaaattttattaatgagaaatttgataaacgatcagaaattaattctagtcaagataataatgagctcaaaaatacagtaaaaaatattattcaaaaattggataatggagaattaaggatagcagaaaaaattaatggtgaatggattgtaaatcaatggttaaaaaaagctgtgttactctcatttattctcgatgaaaatactgtaattgaaggtagccatgctaattattttgataaaattacaaataaattttttgattataacaaagctaactttatcaaaactggagctcgtgttgtaccgacagctattgtcagacatgggagttttatcggt

SEQ ID NO: 233290 - DNA, 127 bp, Unknown
  Bacterial polypeptide expressing nucleotide sequence isolated from the Sargasso Sea
agtaccaggctctttgccagataaaaacaatcctacggcaccatctctatattgcgctgtaataattaaggaagttgatgaaaaaacaagatctaaaacttctattaatgatcttttaagagaatag

SEQ ID NO: 233291 - DNA, 787 bp, Unknown
  Bacterial polypeptide expressing nucleotide sequence isolated from the Sargasso Sea
cattgaaaacattgatgctgagaatatttcaagtgaagatattacttcaattaggcagactattgaggcgttagataatggcaagataagagttgcagaacaagtcgatggtgaatggttggtcaatgaatgggtaaagaaatcaatactacattatttcaccatagaaaatttgaaagtcatttcatcaggtgatgttacttattttgataaattagaaccaaagaaaaattatgaagatttaaaaattagagtagttccgccgggagttgtaaggtatggagcattttgtgagcctggagtagttgtaatgcccggtttcataaatattggagcttatgttggttctgggacaatggttgatacttgggcaacagttggttcatgtgctcaaattggaaaaaatgttcatttatctggaggggtaggaattggaggagtcttagaaccaccttcagcaatgccagtaattatcgaggatggtgcttttattggatccagggcaataattgttgagggtgtaagaattggtaaaggagctgttataggcgcaaatgttacgataacttcttccactccagtaattgatgtctctggtgaaaagcctattgagcacaaaggaattgtccctgaaaactctgttgtaattcctggtactagaccaaagaaatttccaagtggtgaatttgaagttcaatgtgcactaattattggacagagaaaagaatcaacgaatgagaaaacctcattaaatgaggcactcagaacatttggagttgacgtttga

SEQ ID NO: 233292 - DNA, 205 bp, Unknown
  Bacterial polypeptide expressing nucleotide sequence isolated from the Sargasso Sea
atgagcaatattgaaaaaattattaatgatgcttgggaaattaaagatcagataaataaaaattctgacaaatcaataattaaatctattaataaaattatagatgaccttgatcaaggaaaagtaagggttgcagaaaaaattgatggtgaatggaaaactcatcaatacataaagaaagcggtaatgctaagttttagaattt

SEQ ID NO: 233293 - DNA, 778 bp, Unknown
  Bacterial polypeptide expressing nucleotide sequence isolated from the Sargasso Sea
attgatgctgagaatatttcaagtgaagatattacttcaattaggcagactattgaggcattagataatggcaagataagagttgcacaacaagtcgatggtgaatggttggtcaatgaatgggtaaagaaatcaatactacattatttcaccatagaaaatctaaaagtcatttcatcaggcgatgtcacttattttgataaattagaaccaaagaaaaattatgaagatttaaaaattagagtagttcctccgggagttgtgaggtatggagcattttgtgagcctggagtagttgtaatgcccggtttcgtaaatattggagcttatgttggttctggaacaatggttgatacttgggcaacagttggttcatgtgctcaaattggaaaaaatgttcatttatctggtggggttggaattggaggagttttagaaccgccttctgcaatgccagtaattatcgaggatggtgcttttattggatccagagcaataattgttgagggtgtaagaattggtaaaggagctgttataggcgcaaacgttacgataacttcttctactccagtgattgatgtttctggtgaaaagcctattgagcacaaaggaattgtccctgaaaactctgttgtaattcctggtaccagaccaaagaaatttccaagtggagaatttgaagttcaatgtgcactaattattggacagagaaaagaatcaacgaacgagaaaacttcattaaatgaggcactaagaacatttggagttgacgtttgaa

SEQ ID NO: 233294 - DNA, 391 bp, Unknown
  Bacterial polypeptide expressing nucleotide sequence isolated from the Sargasso Sea
aatgagttacgataaattagagaaaattataaatgaaagttttgatataaaagaaaaaatcggacctaaatctgataaaagattaattaaatcgattcatgaaacaattgatttagtagacaaaggaaaaattagagtcgctaataaaaaaaacggtaaatgggaagttaatcagtggattaagaaagcaattcttttgagttttagaataaataaaatgaagatgcttaaaggtccttatacttcttggtacgataaagtacctggtaaaactgttaagtggaaagagaccgattggaaaaaagctggctacagacatgttcctaatggtgtagtaagaaaaggggcttttattgctaagaatgttgttttaatgcctagctttgttaat

SEQ ID NO: 233295 - DNA, 433 bp, Unknown
  Bacterial polypeptide expressing nucleotide sequence isolated from the Sargasso Sea
tatggttgatacttgggctacggttgggtcttgtgctcaaatcgggaaagatgtacacttatcaggtggtgtaggaataggtggtgtattggagccagttcaagcagcgccagttattatagaagacggagcttttgtaggttctagatgtatcgtagtagaaggtgttagagtaggtaaagaggctgttttaggagcaggggtaactttgacaatgtctacgaaaattgtcgatgttaccggtgataagcctgttataactcaaggctatgttccagaaagatccgttgtgattcctggtactatgccaaaagaatttgctgcgggtacttatgatgtaccttgtgctctgattatcggtaaacgtaaagagtcaactgataagaaaacatcattaaatgatgcattaagagagaataacgttgctgtttaa

SEQ ID NO: 233296 - DNA, 511 bp, Unknown
  Bacterial polypeptide expressing nucleotide sequence isolated from the Sargasso Sea
atgagcaatatcgaaaaaattattaatgatgcttgggaaattaaagatcagataaataaaaattctgacaaatcaataattgaagctgttagcaatattctaaaagaattagacgaaggaaaaattagagttgcagaaaaaattgatggaaagtggactactcatcaatatattaaaaaagcgattatgttaagttttagaacgtatgaaaaagaagttttgcaaggaccttattctagttggactgacttgagtgtttatttaaaaggaaaaacagcaggatggggtgctgaagaatttaaaaaagccggattcagaatgttgcctaactcaccagtgaggtttggatctttcataaataaaaacgttgttttgatgccgtgctttgtaaatgttggtgcttacatagatcaaaacaccatgatggacactttttccagagcaggtagctgctgtcaaattggaaaaaattgtcatatatcagccggatcaggtgttggcggagtattag

SEQ ID NO: 233297 - DNA, 115 bp, Unknown
  Bacterial polypeptide expressing nucleotide sequence isolated from the Sargasso Sea
tatgcaaagcaaaaacaaccctaatggaccatcattatattgtgtagtgattgtaaaaaaagtagacgaaaaaacacgaagtaaaacctcaataaacgatttattaagagactaa

SEQ ID NO: 233298 - DNA, 148 bp, Unknown
  Bacterial polypeptide expressing nucleotide sequence isolated from the Sargasso Sea
aatgggagaaattacaaaaggtcgtataccacctttttcatttgtagtgccaggcacgcacaaagatctttacgctgttcatataattaaaacagtcgattcaaaaactagatcgaagacatcaattaacgatcttttaagagattaa

SEQ ID NO: 233299 - DNA, 748 bp, Unknown
  Bacterial polypeptide expressing nucleotide sequence isolated from the Sargasso Sea
ttgtcagtcattgagtttacaattcaagaactcgacaaaggaaatattagagtagcaagctacaacgaggacgagtggattattaatgaatgggtaagagacaccattttattatttttttctatacgaaatttgaaagaaatcagtgcaaatgacttactatattatgacaagttagagcctaaaaaaaattacaaagaactaggcattagagttgtcccacctggagttgtaaggtatggcgctttttgtgaaccgggtgttgttgttatgcctggctttgtcaacattggcgcatatgtaggttcagggaccatggttgatacctgggcgactgttggatcttgtgctcaaattggaaaaaatgttcatctttctggtggagttgggattggtggagttttagaacctgcaggagcgatgccggtggttgtagaggatggagcatttattggctctcgttcaattattgttgaaggtgtcagaataaaaaaaggagcagtaataggtgcaaatgttaccctgactgcatctacaccaattattgatgtaacaggcaaggatcctgttgaggtaaaaggtgtggtcgatgaaaattccgttgttattccaggaacaaggccaaaagaatttcctagtggtgtattcaatactccttgtgcgttagtaattggaaaaagaaaagaatcgaccgatgaaaaaacttcactcactgatgcgctgagaacttttggagttgaagtttgaa

SEQ ID NO: 233300 - DNA, 973 bp, Unknown
  Bacterial polypeptide expressing nucleotide sequence isolated from the Sargasso Sea
catgagcgaaacagatactgaaaaatcaaacccgataggcaggttgaaaagatatgctaatgttacttctgctgttggtgggcttgcagctaggatggctggtgaaagatatctaggcattaagattgacagagaaaatcatgctaaggtcttaacagaagcgcttggtggcttgaaaggtccactcatgaaggtagcgcagatactatcaactattccggatgcacttcctcctgaatatcgagaagaattatcaaagcttcaagctgatgctccttcaatgggatggctttttgtaaaaagaagaatggcaacagaattaggtatagactggcaaaaaaaatttaaatcttttgaaaaacaatcatgttctgctgcttccttaggtcaggttcataaagctattagtttggatcaaaaaaatcttgcgtgcaaacttcaatatccagatatgcaaagtgctattgaagcagatttaaaacaactaaaattaggtttcactttatatgaaagagcagataaagcaatttcaactaagtctatccataaggaactttctgcaagattatctgaagaactagactataatagagaagcttcaaatataaaactatattcagcaatattagaatcagaaagctctgtaaatgttcctgaagtaattgaggatttatcgacgaaaagactacttacaatgacatggcttcagggggaaaaacttacaaaatggcttgagcaagatccaaatctcaaatctagaaacaatgttgccattaacatgttcaaagcatggtatattcccttttatttttatggtgtgatacacggagaccctcatttaggtaattattcaattacaaaaaatgaaaatattaatttactagactttggaagtatacgtttttttaatcctacatttgtagaaggtgtaatcgttttatacaaagctctcaaaactaaaaactcaaaatta

SEQ ID NO: 233301 - DNA, 1270 bp, Unknown
  Bacterial polypeptide expressing nucleotide sequence isolated from the Sargasso Sea
catgattgacttagtacggatacaaattcctgtttctatggaatatatggttgaaatctacgatagagagacaggccgtcttactggtggtgaggtagatatatctcttttccatcaatatggttgcaagcttgctgctggttctgtcgaccgagatgataatggggtaactactgttcatcgtctttatcatccttttgagtcaatcccttctagcaatagttctcttgcttttaaaatcagggcagggggtcataactattttccacacgtagagttgaatgcttcacctgctaaattgcttaccggccaaaatgtttatggcacggctgattttgaaaaatgcatttcttctctgttgtacgtgttttctacttcattccccggcattgagtcggttttggattaccatttggctgaagtttgtcagatggatttcacttattctgcaatggttgaaaacttgttcattgcaaaacaaattgtccaggcgctgagacacgtttcatcaggccagattcgttcttcacgtgagacttatgaaacttccgtactatggaacgctggttcttcacattgcgttcgcgaggtgtatttaaaacacttcgaggtcaagcgtcagattgaacggttaacaaagcttcaaaagcagtcaccaaaggattatcaggctttccaattggaacagcttaataaacctgaagttcttgctttcgcacaaaatgcggtgcgtttcgaggctaaggtaaaaaaacgtatgtttgagcgcctgggcatccctacacgtgtaacagatttagttaattacgctgagtcctataaaggcgacttagcacaattcatgtggaatcaatcttttaaagacatatttgacacatttaaggggtcagacgtgaacgtttatgatgatgaaaaggtgttagaagcattaaaagccagatattacaccgtaaataagactggcaaagtgaattattcaaaagctttaaggattatgcgtttttttcgttccattaagaacgaaggctttgttcaagttaaggctacaactcctcacagaacgttttacgacaacttgaaagaagtttcagccgttgtccctaaagcaacgctgcaaaacatgcataccgttaaaaataatgtcgttcctcttattcgtttagtaaacgttgattttgctaaacaacatccagtcggttggcaagagcctatacatatgtcacagcaaatcgacaattcacttaaacaaccccttagattggtaggttaa

SEQ ID NO: 233302 - DNA, 649 bp, Unknown
  Bacterial polypeptide expressing nucleotide sequence isolated from the Sargasso Sea
gatgccatttttattatttttttcaattagaaatttaaaagaaattagtgcaaatgacctcatttattatgacaagttagaacctaaaaagaattacaaagaacttggcataagagtggtcccccctggagtcgtaaggtatggagctttttgtgagcccggagttgttgttatgcctggctttgtcaatattggagcatatgtaggcacaggaactatggtagatacctgggcaacagtaggttcttgtgctcaaataggaaaaaatgttcatctatcaggtggagttggtattggtggagttcttgaacctgctggagcaatgccggtggttgttgaagatggagcatttattggatcccgttcaattattgttgaaggcgtcagaataaaaaaaggagcagtaattggtgcaaatgttactcttactgcctctacaccaattattgatgtaacaggtgaggagccagtagaagttaagggtgtagttgatgaaaattctgttgtcattccaggaacaaggccaaaagaatttccaagcggtgtttttaacactccttgtgctttagtaattggaaaaagaaaagaatctactgatgaaaaaacttcacttactgatgcattgagaacttttggagttgaagtttga

SEQ ID NO: 233303 - DNA, 727 bp, Unknown
  Bacterial polypeptide expressing nucleotide sequence isolated from the Sargasso Sea
atgaaaaaatccttccgcatcgcggccgccgcgctcgcgatcgccgccgtcacaatgggctgctccgcgcaagccgatcaagccaccgacaagctcaaggccacgctgcaaacgcgtctggccgacgtgacgatcaagagcgtgacgaagtcgccgattgccggcctgtatgaagtgaatctcggcacgcagatcatctatagcgatgcgaacggcgactacctcatgctcggcgatatggtcgacgcgaaaacgcgcaagaatctgactgaagcgcgtctggcggaaaccaaccgcatcgatttcgcgagcctgccgttcggcaacgcggtgaaggtcgtgaagggcaacggcgcgcgcaagatcgcggtgttctcggatccgaactgcccgtactgcaagcagctcgagacctcgctcaagtcgctcgacaacgtcacggtctacaccttcctgtacccggtgctgtcgccggattcgaccgccaagtcgaagtcgatctggtgctcgaccgaccgcgcgaaggcgtgggagtcgtggatgcaggatcatcaggcgcctaccgctgccggcacctgtgacacggctgcactcgacaagaacctggcgctcggccacgcgatgggcgtcgacggcacgccgaccgtgttccttgccgacggccgccgcctgccaggcgccgtctcggcagaccggctggacaaggaaatgtccgccgtgcactgag

SEQ ID NO: 233304 - DNA, 187 bp, Unknown
  Bacterial polypeptide expressing nucleotide sequence isolated from the Sargasso Sea
agggccacaggtgagatttttattggccgagtgccctcctattcagtagttgtacctgggagccttcctggtccaaatttaccagatggaagtcccgggcctgcattatcatgcgctgttataattaaacgggtcgacgagaaaactaggtctaaaacatcacttaatgatttgcttagggattaag

SEQ ID NO: 233305 - DNA, 1522 bp, Unknown
  Bacterial polypeptide expressing nucleotide sequence isolated from the Sargasso Sea
atgaaagcaaattttctactattatttttcctacttttttactcatgtggaaatgaaaaaaatgtacaacccaacgtcgttcttatttatttagatgatttaggttatggtgatgttagttcatacgaattaggaactttagagactccaaatattgataaaattgcaaatggaggaattagatttactaatggatatgcaagttcagcaacatgtagtcctagtagatatgctttgatgactggtacttacccttggagaaataaaagagctaaaattataacaggtggaaatttgataattgatgaaagtgagatgactttgccaaaaatgttcaaatcattaggttatgaaacaggtgttgttgggaaatggcacttaggacttggcaaaggtggccctgttgattacaatagcttgattaaacctggtccgaatgaagttggttttgatcattcttatattatggctgatacacaagatagagttcctaccgtatacattgaaaatggaaatgttgtgaatctagacccaaatgacccaattgaaattaattttggaaatgatgattatggtttgccaagcggtaccaaaaaccctgaattattgacaatgaaatggcatcatggtcataataaagcgattgttaatggtgttccaagaattggatacatgaaaggtggtgaaaaagcaaaatggagtgatattgatatggctgatgaatttataaataaagcgaaagaatatttagatacagttaaagacaaacctttcttccttttttactcacttcaacaaccacatgtgcctagaacgcctcatccaagatttgaaggaacctcaggaatgggtccaagaggtgatgtaataaaagaagcggattggtgtattggagaaatgtatgattacttggaggaaaatggtattctggaaaatacaattataattatttctagtgataacggtccagttttaaacgatggctactatgatgatgctgtcgaaaagttaggagaccatactccagctggaaatttaagaggaggtaaatacagtctatatgaagctggaacaagagtcccttttataacttattggaaaggaaaaattaaaccacaagtctctgatgaagtagtaactcaaatcgatttcttaaattcattttcatcactattgggttcagatacaaaatctaaagatggagttgatttatcaagtgtattttttgaaaattctggaaaaggaagggatgaacttgttattgaagcaacatcaagaactgcatttaggcaaaataattgggtaatgattccaccttataatcttcctgcaacaaatcctagagtaaatatagaattgggtaattcaaaagactatttattattcaatttagatgaagatatttctcaacaaaatgatttgtcaaaaagcaaccccgaaaaattaaatgaaatgattactagatatgatgaaattttgggaaacaacaaaaaaaaggctgaaaaacttgaactcgaataaa

SEQ ID NO: 233306 - DNA, 260 bp, Unknown
  Bacterial polypeptide expressing nucleotide sequence isolated from the Sargasso Sea
tatgagtgatatagaaaaaattataaatgatgcgtgggaaaatagagataatgtaaatcaagattctgaccaaagtttaaaggatactatcaatcaaatgattgatgatttagatagtggtaaagttagggtcgcagaaaaaatagatggtgaatgggtcacacatcaacacattaaaaaagctattatgctcagctttagaatatatccaatggaaaatttaaatggaccatacagtagttggtatgacaaggcacatt

SEQ ID NO: 233307 - DNA, 703 bp, Unknown
  Bacterial polypeptide expressing nucleotide sequence isolated from the Sargasso Sea
atgaaaatagaagaacttgaaaatataattaatgaagcttttgaaaaaaaacaaaatatatctgaaaaatcagatagaaagattttagattcaataaatgaaaccattgagcttactgataaaggtagcataagagtagcagagaaaaaaaatggacaatggatggtaaatcaatgggtaaagaaagctattttattaagctttagagttaacaaaatgacaatgtcaaaaggtccctacactacgtggtacgataaagttcctggtaaatcagtttcgtggaatgaagacgattggaaaaaagcaggctacagacatgtcccaaacggtgttgttagaaaaggatcttttatagcaaagggagtggtattgatgccttgttttgtaaatcttggagcatacgtggatgaaggtactatgattgatacttgggcatcagttggatcttgtgcacaagttggaaaaaattgtcatgtttctggtggagctggtattggtggagttcttgaaccattacaagcaggaccggtaattatcgagaataattgttttataggagctcgatcggagatagccgaaggtgttttagtagaagaaggtgcagtaatctcgatgggagtatacatcggagcttctactaagattgtagatagagagactggaaaaattacgtatggaaaagtccagcttactcagttgtagt

SEQ ID NO: 233308 - DNA, 509 bp, Unknown
  Bacterial polypeptide expressing nucleotide sequence isolated from the Sargasso Sea
tatgagtgatattgaaaaaattataaatgaagcttgggaaattaaagatcagataaataaaaattctgataaatcaataattgatacaataaaccaaattattgaagatctagaccaaggaaaaaaaagagttgccgaaaaaattaatggtaaatggacaacacatcagtacataaaaaaagctgtgatgttaagttttagaattcatgaaatggaagctttaactggtccttatagttcttggtatgataaagctcacctacttaaaggtaaaactgctaattggaaaaaaagtgattttgaagcagcaggttttagaatggttccaaactcaccagtaagaagaggttcttatattggtaaaaatgttgtgcttatgccatgctttgtaaatattggagcctatgttgactcaggaacgatgatggatacaggttctcgtgcaggaagttgtgcacagataggaaaaaattgccatattagtgcaggaacaggtattgggagagtat

SEQ ID NO: 233309 - DNA, 193 bp, Unknown
  Bacterial polypeptide expressing nucleotide sequence isolated from the Sargasso Sea
acaaagatagttgatagaaaaactggagaaattacttatggtaaaatacctccttattcagttgtggtacccggttctttaccagataaaaataatcctgcagctccatcactttattgtgcggtgattattaaacaggttgatgaaaaaacaagatcaaaaacatcagtaaatgatcttttgagagaataaa

SEQ ID NO: 233310 - DNA, 583 bp, Unknown
  Bacterial polypeptide expressing nucleotide sequence isolated from the Sargasso Sea
atgaacttagaaaaaattgaaaaaaccattaacgaagcttttaaaaataaagaaaaaattgatagttcagataaagcactaaacgacgtagtgcgtgaaactataaacttactggataacggtaaaattagagttgctgaaaaaaaaagtggtaaatggcaagtcaatcaatggattaaaaaatcaatacttttaagtttccgagtaaataaaatgaaagcttctaagggaccttactctacttggtatgataaagtagatggtaaaacacaaggatggagcgaagaacaagttaagaaagctggatttagatatgtgcctaatggagtaattagaaaaggagctcacatagcaaaaaatgttgttctaatgccgtcctttattaatgtaggtgcctatgtagatgaaggaacaatgatagatacttgggcttcggtcggatcatgtgcgcaggttggaaaaaattgtcatatttctggcggtgccggtattggtggtgtcttagaaccaatgcaggcaaatccaactatcgtggaggacaattgttttttaggtgcgcgtgctgaaatagcagaaggtggtt

SEQ ID NO: 233311 - DNA, 454 bp, Unknown
  Bacterial polypeptide expressing nucleotide sequence isolated from the Sargasso Sea
gccttgctacgtaaacataggtgcatacattgatgaaggcacgatgatagacacctttgcgagagctggcagctgttgtcaaattggaaaaaattgtcatatatctgcagggtctggtgttggaggtgttttggaaccagctcaagcattgcctactattatcgaggataacgtttttttaggtgcaatgtccgaagtggttgaaggagtgattgttggtgaaggatcagttttgagcatggggatgtacattggtcaatcaactaaaattgtagatcgaaagtcaggaaaaatatcttatggtaaaatacctccttactcagttgttataccaggaaccttaccggataaaaaaaatttgtcagcaccatcactatactgcgcagtaataattaaacaagttgatgaaaaaacaagatctaaaacttcagtaaatgatcttttaagagaataa

SEQ ID NO: 233312 - DNA, 631 bp, Unknown
  Bacterial polypeptide expressing nucleotide sequence isolated from the Sargasso Sea
aatgaacttagaaaaaattgaaaaaactataaacgaaacttttgaaaaaaaagataaaattgatagttcagataaaacgctaaatgatttggtgcgtgaaactattgacttgttagataacggtaaaatcagagttgcagaaaaaaaaggtgacaaatggcaagtcaatcaatggattaaaaaagctatacttttaagttttcgggtgaataaaatgaaagcatccaaaggtccttactctacttggtacgataaagttgatggaaaaacacaaggatggagtgaagagcaagttaagaaagctggatttagatatgttcccaatggcgtaattagaaaaggagctcacatagcaaagaatgttgttttaatgccttcgtttataaatgttggagcgtacgtagatgaaggaacaatgatagatacatgggcatcagttgggtcatgtgcacaggttggaaaaaattgtcatatttctggtggcgctggtattggtggtgtcttagaaccgatgcaagcaaatccaactattgttgaggacaattgttttttaggagcaagagcagaaatagcggaaggtgtaattgttgagaaaggatcggtgctgtcgatgggtgtttatattggtaca

SEQ ID NO: 233313 - DNA, 469 bp, Unknown
  Bacterial polypeptide expressing nucleotide sequence isolated from the Sargasso Sea
tatgagccatcaagatataattgaaaaattatgggatcaaagagatcagattaattttattgaggataatgaggcaaaaaaaaatgtagagagtgttcttaacttattggatgagggaaagcttcgagtatgcgaaaaaatagaaaatgattggcatgtgaatcaatggcttaaaaaagcaattcttttaagttttagaattcaagatatggaattaataactggcggtccgagtgttaaagatggatctactgcatggtgggataaagttccctcaaaattccaagattggaaatcagaaaattttcaatcagctggttttagagctgttcctaactgtgttgtaaggagatcagcatttattgcaaaaagtgcagtgcttatgccttgctttgttaacttgggtgcatatgtagatgagggaacaatggttgatacttgggctactgttggatcttgtgctccagta

SEQ ID NO: 233314 - DNA, 289 bp, Unknown
  Bacterial polypeptide expressing nucleotide sequence isolated from the Sargasso Sea
ttttattggtgcgcgctctgaagtcgcagaaggagttattattgaggatggtgttgtactatcgatgggagtcttcttaggggcctctacaaaaataatagatcgaaacactggcgaggtatatataggcactgttccttcatactccgttgttgtacctggtacaataagtggacgtgctttgcccgatggaactgcaggtccaagtttgtactgcgcagttattgtaaaaagagttgacgaaaaaacccgttcacgcacatcaattaacgaattgttacgcgattga

SEQ ID NO: 233315 - DNA, 105 bp, Unknown
  Bacterial polypeptide expressing nucleotide sequence isolated from the Sargasso Sea
aaaataattcggctgcaccttcgttgtactgtgctgtaataattaagcaggttgatgaaaaaacaaggtcaaaaacttctataaacgaccttttacgagactgaa

SEQ ID NO: 233316 - DNA, 552 bp, Unknown
  Bacterial polypeptide expressing nucleotide sequence isolated from the Sargasso Sea
gatggacaaaagaagatcatgaaaaggctggttttagaatggtacctaattcaccggtaagaaaaggatcatttgttggaaaaaatgcagttttgatgccgtgttatgtaaatatcggagcatatatcgatgaaggaacaatgatggatacatttagtcgtgcaggaagttgttgtcagattggaaaaaattgtcatatctcagctggaactggagttggaggcgtattagaacctgctcaagcattaccaactattattgaggataatgtattcttaggagcaatgtctgaagtagtagaaggtataatagttggagaaggctctgttttaagtatgggaatgtacattgggcaatcaacaaaaattgttaatagaaaaactggtgaaataacttatggaaaaattccaccttattcagtggtagttccaggatccttacctgataaaaacaatccacaagcaccatctttatattgtgcagtaataattaaacaagttgatgaaaagacaagatcaaaaacatcagttaatgatcttttaagagaataaa

SEQ ID NO: 233317 - DNA, 349 bp, Unknown
  Bacterial polypeptide expressing nucleotide sequence isolated from the Sargasso Sea
tttggaaaccgaagatcttatacaaataatagaaactgcatgggatgagagggacaatttatcacaaaatactagtggctctatacgtgatgctatcgaaatgtcattggcaggaatggatagtggtaaatttcgagtggcagaaaaaaaggatgatagttgggtagtaaacgaatggctaaaaaaagcagtgcttctgtcatttagacttaatgatatggaaatcatacctggaggtcctggagacaccgtctcatggtttgataaagtaaagtctaaattttcaagttggactgatgagcaatttcgaacagccggatttcgggcagtcccaaacgccatagtaaga

SEQ ID NO: 233318 - DNA, 160 bp, Unknown
  Bacterial polypeptide expressing nucleotide sequence isolated from the Sargasso Sea
aatttatgggaaaatccctccttattcagtgttagtgcctggatcattacctgataaaaataacccaagtgcaccatcgctaaattgcgcagtaataattaagcaagttgatgaaaaaacaagatctaaaacatccattaatgatttgttgcgtgattaa
